United States Patent Application Publication US 2024/0327476 A1 - sequence listing, part 109

SEQ ID NO: 208474 - DNA, 1842 bp, synthetic construct
  misc_feature 1..1842: note = Description of Artificial Sequence: Synthetic coding sequence
  source 1..1842: mol_type = other DNA
atggacgccgtgctggcctgccggctgcggggccggggcaaccgggtcgccgcgctaagaccgagaccgcgacctggggggtccgctggcccatctcccttcgctctgctgtgcgctggactgtcccccgaaccacgggcaggagtagggagtgaattcccagcttggtttctgggcgggagctcacagagacgaaatatggctctgctgggatcccgtgctgaactggaggctgatgaagatgtgttcgaagacgcactggagaccatttcaatggctaaagagtcaatgtatcacgctttgggttattcgaccatagtggtcttacaagccgttttaacattcgagcaacaggacatccagaacggtataagtgcgatgaaggatgccctgcagacctgccagaagtaccgcaagaagtatacagtggtggaatccttctcaagcttgctttcccggggaagtctcgagcaactgtcagaagaggagatgcatgcagaaatctgttatgccgaatgtttgcttcagaaagccgctctgaccttcgtgcaggatgaaaacatgatcaattttatcaagggtggactcaaaattaggaccagttaccagatttataaagaatgcctttccatactccatgagatccagaagaataagctgcagcaggaattcttttatgagtttgagggaggagtaaagcttggctctggtgcctttaatttgatgttgtcacttctccccgcaagaatcatccgtctgctggagtttattgggttctcaggaaatcgcgagctcggcctgttgcagcttagggagggcgcctctgggaggtctatgagatctgctctctgttgtctgactatcctagcatttcatacatatatcagcctgatactgggaactggggaagttaatgtcgcagaggcagagcgattgctggcccctttccttcagcaatttcccaacggctctctagtcctcttttatcacgctcggatcgaactgctgaagggaaatctggaggaggcacaggaggtcttccagaaatgcattagcgttcaggaagagtggaaacaattccaccacctctgttattgggagcttatgtggatcaacgtatttcaacaaaactggatgcaggcttattattacagcgacctcctgtgcaaggagtccaaatggtcgaaggccacatacgttttcctgaaagctgctattctatctatgctgcccgaggaggatgtcgtggcaactaacgaaaatgtagtcactctgtttcgccaggtagacagtcttaaacagaggatcgctgggaagagtattcccaccgagaaatttgccgttaggaaggcccggaggtatagtgcaagccttcctgcacctgtcaaactcatacttcctgccctggagatgatgtacgtgtggaacggcttctctattgtgtctaagagaaaagacctcagtgaaaacctgttagttaccgtggaaaaggccgaagcggcactacaatctcagaattttaactccttctccgtcgacgatgaatgcctggtgaagctcctaaaaggatgctgcctgaagaaccttcagagacctcttcaagcagaactgtgttacaaccatgtcgttgaatccgaaaaactccttaaatatgatcattatttggtcccttttaccctgtttgaactggcttccttatataaaagtcagggggagatcgataaagccatcaaattcctcgaaacagcaagaaacaactataaagattatagcctggagagcagactgcacttcagaatccaggccgccctgcacctctggaggaagcctagttccgattag

SEQ ID NO: 208475 - DNA, 1851 bp, synthetic construct
  misc_feature 1..1851: note = Description of Artificial Sequence: Synthetic coding sequence
  source 1..1851: mol_type = other DNA
atggccctgctgggcagccgggccgagctggaggccgacgaggacgtattcgaggatgccctggagaccattagcattagtagccactctgatatggctacttcatctttacacttcgccagctgtgatactcagcaggccccgcgccagagaggggcctcgacagtatctagtagctccagcacaaaggtggaccttaagtctggactggaggaatgtgccgtggccctgaacttgtttttgtccaacaaattcacagacgcacttgaactgctgcgcccctgggccaaagaatccatgtatcatgctctggggtattctactatcgtcgtcttgcaggcagtgttaacatttgagcagcaggacattcagaacggtatctctgccatgaaggatgctctgcagacatgtcagaaatataggaaaaaatacacggtcgtcgagagcttctcgtcgcttttgtcaagaggaagtctagaacagttgtccgaagaggagatgcacgccgaaatttgctacgctgagtgtctgctccagaaggcagcgctgactttcgtccaggatgagaacatgatcaacttcattaaagggggcctgaagatcagaaccagctatcagatatataaggagtgtctctccattctgcacgaaatacaaaagaacaagctccagcaggaattcttttacgagtttgaaggcggcgttaagctcggcagcggggcttttaacctcatgctgagtctcttgcccgctagaattatacggctcctggagttcataggctttagcgggaacagggaacttggcctgctgcagctccgagagggcgcctcaggcagatcaatgaggtcagctctgtgttgcctgactattttggcgttccatacttacatatctttgattctgggcacgggggaagttaacgtcgcagaggctgaacgcctcctggccccctttctacagcagtttcccaatgggtctctggtgcttttttaccatgctcggattgagctgttgaagggcaatcttgaagaagcgcaggaggtgttccaaaagtgtatctctgttcaggaggagtggaagcaatttcaccatctttgttactgggaactgatgtggataaacgtttttcagcagaactggatgcaggcctactactactccgatctgctctgtaaagagagcaaatggtccaaggccacttacgtgtttcttaaggcagccattttgtccatgcttcctgaggaggatgttgttgcaaccaatgagaatgttgttacgttgtttcgccaggtggattcactcaagcagagaattgccggtaaaagtattcctacagagaagtttgcagtcagaaaagcaaggagatactctgcgtcattgccagctcccgtaaagctgatacttcccgcactggagatgatgtacgtttggaacggctttagtatagtcagtaaaaggaaagatctttcggagaacctgctcgtgaccgtggaaaaggctgaggccgctctacagagccagaacttcaattcattcagcgttgacgatgaatgtttagtcaagctgttgaaaggctgttgccttaagaatttgcagaggccactgcaagcagagttatgctataatcatgtcgtcgaatcagagaagctgctcaaatacgatcactatcttgtccctttcactctgtttgagcttgccagcttgtacaagagtcaaggcgaaattgacaaggcgatcaaattcctggagactgccagaaacaactataaagactattccctggagtcaagactccactttagaatccaagccgctctgcacctgtggcgaaaacctagcagtgactag

SEQ ID NO: 208476 - DNA, 2010 bp, synthetic construct
  misc_feature 1..2010: note = Description of Artificial Sequence: Synthetic coding sequence
  source 1..2010: mol_type = other DNA
atggacgccgtgctggcctgccggctgcggggccggggcaaccgggtggctgccttgcggcccagaccaaggccaggggggagcgcgggacctagcccattcgcccttctctgtgcggggctgagccctgagccgcgagccggcgtagggtccgaatttcctgcctggttcctcgggggctcaagtcaacgaagaaatatggccttgctgggctccagagccgaattggaggccgatgaggatgtgttcgaagatgcacttgagaccatatcgattagttctcactcagacatggccaccagctccttgcactttgcttcatgtgatacacagcaggcccccagacagaggggtgcatctaccgtgagtagcagctctagcacaaaagttgatctgaagtctgggctcgaggagtgtgccgttgcgctgaatctgtttcttagcaacaaatttaccgacgctctcgagctgttgaggccatgggcgaaggagagcatgtatcacgccttgggatatagtactatagttgttctccaagccgttctgacgtttgagcaacaggacatccagaacggcatatccgcgatgaaggatgccttacagacatgccagaagtaccgtaagaagtacaccgtcgtggaaagcttctcaagtctgttatctagaggctctctggagcagctgagcgaggaggaaatgcacgcggagatttgctatgccgagtgcctcctgcagaaagcagctctcacctttgtgcaggatgagaatatgatcaactttattaaaggaggtctcaagatccgcaccagttaccagatatataaagagtgcctgtctatcctccatgagatccagaaaaacaagctccagcaggaatttttctacgagttcgaagggggcgttaaactcggttcaggcgctttcaatctgatgttgtcattgctccccgcaaggataatccggctgctcgagttcataggcttctcagggaacagggagctggggctgttacagctcagagaaggtgcatccggacggtccatgcggagtgctctgtgctgcctcactatcttagcatttcacacttacataagtctgattctgggcaccggtgaggtaaacgtcgctgaagccgaacggctgcttgcccctttcctgcagcagtttccaaacgttcggtcagtgttccagagcgcccaggaggtgtttcaaaagtgcataagtgtgcaagaagagtggaagcagttccaccatctgtgctactgggagctgatgtggataaatgtcttccaacagaactggatgcaggcctactactattccgatttattgtgtaaggagtcaaaatggtcaaaggccacgtacgtgttcctcaaagctgccatcctcagcatgctcccggaagaggacgtcgtggccactaacgagaatgtcgtcacactgtttagacaggtagattccttgaagcagcggattgcaggaaagtctatcccgacagagaagtttgcagtaaggaaagctcggaggtatagcgcctcccttccagctcctgtaaagctgatcctgccggccctcgagatgatgtacgtgtggaacggattttctatcgtttccaagcgcaaagacttgtctgagaatcttctcgtcactgtcgaaaaagcggaagccgccctgcagagccagaatttcaacagtttctcagtcgacgatgagtgtctcgtcaaactgctgaagggctgttgccttaagaatctccagaggccattgcaggctgagctgtgctataatcacgttgtcgagagtgaaaaactgctgaagtatgaccattacctggttccattcacattgttcgaactggcttcgctatacaaatcacagggcgagattgacaaagccatcaagttcctcgagacagcccgtaataactataaggactattccctggagtctcgcctgcactttagaatccaagcagcattacacctctggagaaaaccttcctctgattag

SEQ ID NO: 208477 - DNA, 2049 bp, synthetic construct
  misc_feature 1..2049: note = Description of Artificial Sequence: Synthetic coding sequence
  source 1..2049: mol_type = other DNA
atggacgccgtgctggcctgccggctgcggggccggggcaaccgggtcgccgccctccgacctcggccgaggcctggaggaagtgcgggtccatcccctttcgctctgctttgcgcggggttgtcaccagagccaagagctggcgttggcagtgaatttcctgcctggttcctaggcggaagttcccagcgcaggaatatggccttgttagggtcaagggctgagctggaggccgacgaagacgtgtttgaagacgcgctcgaaacaatttctatcagttcccacagcgacatggctacaagtagcctacatttcgctagctgtgacactcaacaggcaccacgccagcggggggctagtacggtgtctagctcgagctcaacgaaagtcgatcttaagtcaggtcttgaggagtgcgcggttgctcttaacctcttcctctcgaacaaattcactgacgccttagagttactgaggccttgggcaaaagagtcaatgtatcacgccctgggttatagcaccattgtggtactgcaggcagtactgaccttcgagcagcaggatattcagaatggaatttccgctatgaaggacgccctgcagacatgccaaaagtatcgtaaaaagtacaccgtcgtagagagctttagcagtttgctgtctcgcggtagcctggagcaactgagtgaagaagagatgcatgccgaaatctgttacgctgagtgcctgttgcagaaagccgcattaactttcgtgcaggacgaaaacatgattaattttattaagggaggcctcaagattagaaccagctaccagatctataaagagtgccttagcattcttcacgaaatccagaaaaacaaacttcagcaagagtttttctacgagtttgaggggggcgtcaaactgggtagcggtgccttcaatctgatgctaagtctgcttcctgcacgtatcattagattgctggagttcatcggatttagtgggaaccgagaacttgggctgttgcaactcagggagggcgctagtggaaggagcatgcggagcgcactctgttgcctaactatccttgccttccatacttatattagtctgatccttggaacaggcgaagtcaatgttgcggaagccgaacgccttttagctccgttccttcagcaatttccgaatggaagtctggttctcttctaccatgcccgcatagagctcctgaaggggaacctagaggaagctcaggaggtatttcaaaagtgtatcagcgtgcaggaggagtggaagcaatttcaccatctgtgttactgggagcttatgtggataaacgtgttccagcagaactggatgcaagcctactattactctgatttattgtgcaaggagtctaagtggagtaaggcaacgtatgtgtttttgaaagccgctatcctgtcgatgcttcccgaggaggacgttgtggcaaccaacgagaacgtagtgaccctgttccgccaggtagattccctgaagcagaggatagcgggtaaaagcatccctaccgagaagtttgcagttagaaaagctagacgatactctgccagtctccccgctcccgtgaaactgatattacctgctctggaaatgatgtatgtgtggaatggcttttcaattgtcagtaaaaggaaggatcttagtgaaaacctgctcgttaccgttgaaaaagcagaagcagccctgcagagtcaaaactttaattcattttccgtcgacgacgagtgcctcgtgaagctcctgaagggctgctgtctgaagaatctgcagagaccccttcaggcagagctgtgctacaaccatgtggtcgaatccgagaaactgctgaagtacgatcactatctggtccccttcaccctgtttgaattggccagcctctacaagtcccagggggagatcgacaaggccataaagtttctggaaaccgctaggaacaactataaagactacagcttggagtctcggctgcacttccgcattcaggccgcactccacctttggaggaaaccaagttcagattag

SEQ ID NO: 208478 - DNA, 585 bp, synthetic construct
  misc_feature 1..585: note = Description of Artificial Sequence: Synthetic coding sequence
  source 1..585: mol_type = other DNA
atggccctgctgggcagccgggccgagctggaggccgacgaggacgtgtttgaggacgcgctggagaccatcagcatatcaagtcattccgatatggccactagttccctccacttcgcgtcgtgcgacacccagcaggccccacggcagcggggggcgtccactgtcagtagttcctcctccaccaaagtggacttaaagagcgggctggaagagtgtgcggttgctttaaacctgtttctgagcaacaaatttactgacgctcttgagctgctgcgaccctgggccaaagaaagcatgtatcacgcactgggatattcaaccatagtggtattgcaagcagttcttacctttgagcagcaagacatacagaacggcatttcagccatgaaggacgcattgcaaacgtgccagaagtataggaagaagtacaccgtcgtggagagctttagcagcctactaagcaggggaagcttagagcagttgagtgaggaggaaatgcacgcagaaatttgctacgctgaatgcctgctgcagaaagcagctctgacatttgtgcaaaggatgtctttttatccagcttag

SEQ ID NO: 208479 - DNA, 1164 bp, synthetic construct
  misc_feature 1..1164: note = Description of Artificial Sequence: Synthetic coding sequence
  source 1..1164: mol_type = other DNA
atggagcagcccggccaggaccccaccagcgacgacgtgatggactcctttcttgagaagtttcaaagtcaaccatatcgaggagggttccacgaggaccaatgggagaaagaatttgagaaagtgcccctcttcatgtcccgcgccccatccgaaatcgaccccagagagaatccggacctcgcttgtctgcagagcattatctttgacgaagaacgaagtccggaagagcaggcaaaaacctacaaggatgagggtaatgactacttcaaagaaaaggactacaagaaggcagtgattagctataccgaaggcctaaaaaagaaatgtgccgacccagatctcaacgcagtgttgtatacaaatcgtgccgcagcgcagtactacctggggaacttcagatctgccttgaatgatgtgaccgccgcaaggaaactgaagccctgccacctgaaagctatcataagaggcgcactatgtcacttggagctcaagcatttcgctgaggccgtgaattggtgtgacgagggcctccaaattgacgccaaagagaagaagctgcttgagatgcgcgcaaaagctgacaaactcaagagaatcgaacagagagacgtgcgcaaagcaaatctgaaggagaagaaagaaagaaatcagaatgaagctctcctccaggcaatcaaggctcggaatatacggctcagtgaagctgcttgcgaagacgaggactcggccagcgagggcctgggcgaactttttcttgacgggctcagcaccgagaacccacacggtgctagactgagcctggatggtcaagggagactgagctggcctgtcttgtttttgtatcctgagtatgcccaatcagatttcatttccgccttccacgaagatagcagattcatagaccacctgatggtcatgtttggcgaaaccccgagctgggatcttgaacagaagtactgtcctgataacttggaagtttattttgaggacgaggacagggctgagttgtatagggtgccagccaaaagcacacttctccaggttctgcagcaccagaggtactttgtcaaagcactgactcctgcctttttagtctgtgtgggcagcagcccattctgcaaaaattttctgcgtggtaggaaagtctaccaaatcaggtag

SEQ ID NO: 208480 - DNA, 1515 bp, synthetic construct
  misc_feature 1..1515: note = Description of Artificial Sequence: Synthetic coding sequence
  source 1..1515: mol_type = other DNA
atggccacccgggacgtggtgctgagccgggtgcccgagcaggaggaggatcggaccgtctctctgcagaatgcagccgccatctatgatttgctgtccattactttggggcgacggggacagtacgtcatgctctcggagtgccttgagagagcaatgaaatttgccttcggtgagttccacctctggtatcaggttgcgctgtccatggtggcttgcggcaaaagtgcctacgccgtcagtctactgagggagtgcgtcaagctgcgaccatccgatccgacagtgcccctgatggcggccaaagtctgcatcggctctctccggtggctcgaggaagccgagcactttgctatgatggttattagcctgggagaagaagccggtgaattcctgcccaaaggatacctggctctgggactgacatattccctccaggccaccgatgcaactctcaagtcgaagcaggacgagctgcaccgcaaggccctgcaaacgctggagagagcacaacaactcgctccttctgaccctcaggtaattctgtatgtgtctttgcagctggcactcgtcagacagatctcctcagctatggaacagcttcaggaggcactgaaggtacggaaagatgacgcacacgccttgcacttgctggcactgctgttttctgcacagaagcaccatcagcatgccctcgacgtagtgaacatggctatcaccgaacaccctgagaattttaacctcatgttcaccaaggtgaagttggaacaagtgttaaagggtcctgaggaagcgctcgtgacatgtcgacaagttttacgcctctggcagacattatacagcttttcccagttagggggcctagagaaggatgggagttttggcgagggcctgactatgaagaaacaatcagggatgcacctaacattgcccgacgcgcatgacgcggactcggggagtcgccgggcatcctctatcgcagcctcaagactggaagaagctatgtccgagcttacaatgccttcttcggttctgaagcagggacccatgcagttgtggactacgttagaacagatttggctgcaggccgccgaactctttatggaacagcagcatctgaaggaggcaggtttctgtatccaagaggccgcaggcttattccccacctcacattcagttctctacatgcgagggagactggccgaagtgaaagggaacctggaagaggccaagcaactctacaaggaggcattgactgtgaatcctgatggcgtgagaatcatgcacagcttaggtctgatgctctcccgactgggccacaaaagccttgctcaaaaagtgctccgcgacgcagtggaacgccagtccacatgccacgaggcatggcagggactcggggaagtcctgcaggctcaggggcagaatgaagcagccgtagactgttttttgacggcactggaactggaggcctcaagccctgtactgcccttcagcataattccacgggaactttag

SEQ ID NO: 208481 - DNA, 2577 bp, synthetic construct
  misc_feature 1..2577: note = Description of Artificial Sequence: Synthetic coding sequence
  source 1..2577: mol_type = other DNA
atggccgccaagggcgcccacggcagctacctgaaggtggagagcgagctggagcgatgtagagccgagggccactgggataggatgccagagctggtaaggcaattacagaccctctctatgcccggcggtggagggaataggagaggttccccttccgccgcctttactttcccagataccgatgatttcggaaagctactgctggccgaggccctgctggagcagtgcctcaaagaaaaccacgccaagattaaagactcaatgcctttgctcgaaaagaacgagcccaaaatgtcggaagctaagaactatctgtccagcattctcaatcacgggcgcctgtctccgcaatacatgtgcgaggctatgctgattttagggaagctccattatgtggaaggaagttaccgcgatgcgatttcaatgtatgcaagggcagggatcgatgacatgtcaatggagaataagcctctataccagatgcgcttgctgtcggaggctttcgtaataaagggactctctctcgaaagactcccaaattccatcgccagccgcttcagactgactgaaagggaggaagaggtaatcacatgctttgagagagcttcctggatagcccaagtatttctgcaggaattggagaagaccactaacaattcaaccagcaggcaccttaaggggtgccacccattggactacgaactgacctactttttggaggcggcgctacagagcgcttacgtcaaaaacttaaagaaaggcaatatagttaagggcatgagagagctccgcgaggtgctaaggactgtagagacaaaggccacccagaatttcaaagttatggctgctaaacaccttgctggagtgttgctgcatagcctaagcgaggagtgctattggtcgcccctgtcccacccacttccggaattcatgggaaaggaggaaagtagttttgctacccaggccctgcgcaagccacacttgtacgagggggacaacctgtattgccctaaggataacatagaagaagccctgttactactcctgataagtgagagcatggctacccgagacgttgtcttgtcgcgagtgcctgagcaggaggaggaccggacagtgtcgctgcagaacgctgctgcgatctatgatctgctgagcatcacactaggacggcggggccagtacgttatgctctccgaatgtttggagcgcgccatgaagttcgcctttggtgagttccacttatggtaccaggtggcactctccatggtggcttgcggtaaaagtgcctacgctgtgtccctgctgcgggagtgtgttaagctacgaccttccgaccctacggtgcccctgatggctgctaaggtgtgcattgggtccttgagatggctcgaagaggccgagcattttgccatgatggtgatttctctgggggaagaagctggggaattccttcccaaagggtacttggccttgggattaacctatagtctgcaggccacagacgccaccctcaagtctaagcaggatgagcttcacaggaaggctctgcaaactttagagagagcccagcagctggccccctcagatccacaggtgatactttacgtttcattgcaacttgcattggtgcgtcagataagttcagccatggaacagttacaggaagcacttaaagttcgcaaggacgacgcacacgctctccatcttttggctctgcttttttcagctcagaaacatcaccagcatgccctggatgtcgttaacatggctattactgagcaccccgagaactttaaccttatgttcaccaaggttaaactggagcaggttctgaaggggcctgaggaagctttagttacctgccggcaagtgctccgcctttggcagactctgtacagctttagccagcttgggggtctggaaaaggacgggagctttggcgaagggcttaccatgaagaaacagagcggtatgcatcttactctaccagacgcccatgatgccgactccgggtccaggagggccagttccatagccgcaagcaggctcgaggaggccatgtccgaactgacgatgccttcctctgtgctgaagcaaggccccatgcagctgtggacaacactcgagcagatctggctgcaggctgccgagctgttcatggagcaacagcaccttaaggaggccggattctgcatccaggaggccgccggtctgtttcccacaagccattcagtgctctacatgagaggacgcttagctgaagtgaaggggaatcttgaagaagctaaacagctgtataaggaagctttgaccgtgaatcccgatggcgtgaggatcatgcactccctgggcctgatgctctcaaggctgggccataagagcctggcacagaaagtcctgcgcgacgccgttgaacgtcagtctacttgccacgaagcctggcaaggtttgggagaagtgctgcaggcgcaggggcagaatgaagccgcggtagattgcttcctaacagcacttgagctggaagcctcttcccccgtgcttcccttttcaataatcccgagagagctgtag

SEQ ID NO: 208482 - DNA, 2058 bp, synthetic construct
  misc_feature 1..2058: note = Description of Artificial Sequence: Synthetic coding sequence
  source 1..2058: mol_type = other DNA
aagaagaagatcaacttcttcaagaagccccacagcctgagcctgcgcaagaaaagagaagaggaggtgatcacatgtttcgaaagagcttcgtggattgcccaggtattcctgcaggaactggaaaagaccaccaacaactccacaagtcgacatttaaagggctgtcatccacttgattatgagctcacttattttttagaagccgccctccagtctgcctacgttaagaatcttaagaaaggtaacattgtgaagggaatgcgagagctgcgtgaggtactcagaactgtcgagaccaaggcaacccagaactttaaagtcatggcggccaaacatctggcgggcgtactgcttcactcattgtctgaggaatgctattggtcccctctttcccacccgctgccagagtttatgggtaaagaagagtcatcattcgctacgcaggctttgcgaaaacctcatctatatgaaggtgataatctgtactgtcctaaagataacatcgaggaagcgctccttttgcttctgatctcagagagtatggcaacaagagacgtcgtgctgtcaagggtgcctgagcaagaagaggacaggacagtgtccctccagaacgctgccgctatttatgatctgctatctatcaccctggggcgtcgcggccaatatgtgatgctgagtgagtgtcttgagcgggcgatgaaattcgctttcggggagtttcatttgtggtaccaagttgcgctgagcatggtggcttgtggaaagagcgcttatgccgtatccttgctgcgggaatgcgtcaaactgagacccagcgaccctaccgtgcccctgatggcagcaaaggtgtgcattggctccctccgatggctggaggaggcagaacattttgctatgatggtaatctcattaggcgaggaagctggcgagttcctgccaaaaggatatctagccctcggcctgacgtactccctgcaggctaccgacgctactctcaagtcgaagcaggatgaactgcacagaaaggccctccagaccctggagcgcgctcagcagctggccccgagcgacccacaggtcatcctctatgtaagcctacagctggcactcgtgaggcaaatctcttccgctatggagcagctacaagaggctttgaaggtgagaaaggacgacgctcacgcgctgcacctacttgccctgctcttctctgctcagaagcaccaccagcatgcgctggatgtggtgaacatggccattaccgagcatcccgagaattttaatctgatgtttacaaaagtaaagctcgagcaggttctcaagggtccagaggaggcgttggtgacttgtaggcaggtgctgcggctctggcaaacactctactcattctctcaactgggtgggctcgagaaggatggatcatttggcgagggcctaactatgaaaaagcaaagtggcatgcacctgacgctcccagacgctcacgatgctgacagcggtagccgccgggcatcctccatcgccgcatcaagactggaagaggcaatgagtgagctgacaatgccctccagcgtcctgaaacaaggacccatgcagctatggacaactctggaacagatttggttacaggctgctgagctctttatggagcagcagcatctgaaggaggctggcttttgtatccaggaggcggccggtctttttccgacctcccacagcgtactctacatgcgaggccggctagctgaagtgaaggggaatttagaggaggcgaagcagctctataaagaagctctcaccgttaatccagatggagtgagaattatgcactccttgggtcttatgcttagtcggctgggccataaatccctggcacagaaggtccttcgtgacgccgtggaaaggcaatccacgtgccacgaggcctggcaaggactcggcgaggtcctccaggctcagggccagaatgaggctgctgtggactgcttcttaacagcgctcgagctcgaagcttcaagccctgtcctgcctttctccatcattcctcgggagctttag

SEQ ID NO: 208483 - DNA, 441 bp, synthetic construct
  misc_feature 1..441: note = Description of Artificial Sequence: Synthetic coding sequence
  source 1..441: mol_type = other DNA
atggccgccaagggcgcccacggcagctacctgaaggtggagagcgaactcgaaagatgccgagctgaggggcactgggaccgaatgccggaattagttaggcagctccagacattatctatgccaggcggcggaggcaataggcgtggaagcccttccgccgccttcaccttccccgacaccgacgatttcggcaagctgcttcttgccgaagctctcctcgagcagtgtctgaaggagaatcacgcgaagattaaagactccatgccccttctcgaaaagaacgaacccaagatgtcagaagctaaaaactacctgtctagcatcctgaatcacgggagactctccggtttggccgtattactgaggctcgtctccaacagctgggctcaggctattctcctcctgcaacctccagaggcactcgggctgcaggaatag

SEQ ID NO: 208484 - DNA, 1596 bp, synthetic construct
  misc_feature 1..1596: note = Description of Artificial Sequence: Synthetic coding sequence
  source 1..1596: mol_type = other DNA
atgagcagcgagatggagcccctgctgctggcctggagctacttccggaggagaaagttccaattatgcgccgatctgtgtacacagatgctggagaagtctccttatgatcaagccgcgtggattttaaaagctcgcgccctgaccgaaatggtgtatatcgacgagatcgatgttgaccaagaaggtatagctgaaatgatgcttgacgaaaacgctatcgctcaggtaccacggccaggtacctccttaaagttaccaggaacaaatcaaaccggtggtccttcccaagcagtccgacccataacgcaagctgggcgcccgattaccggattccttcggccttcaacacaaagtggcaggccgggcaccatggaacaggctatcaggaccccgcggactgcctacacggcaaggccaatcacttcttcttcagggcgcttcgtgcgcctagggacggcttcaatgctgacatcgccagatgggcccttcattaacctcagcagactaaacttaacaaagtatagccaaaagcccaaactggcgaaagctctctttgagtatattttccatcatgaaaacgacgtgaagacaatccacttggaggacgtcgttctgcatctggggatttacccttttctcctgcgcaacaaaaaccacatcgaaaaaaacgcgctcgacttggctgccctcagcaccgagcacagccagtacaaagactggtggtggaaggtgcagatagggaaatgttactacagactaggcatgtaccgtgaggccgagaagcagttcaagtccgccctaaagcaacaagaaatggtcgatacattcttgtatctggcaaaggtgtacgtttctttggaccaacctgtgaccgccctgaacctattcaagcagggtctcgataaatttcctggcgaggtgactctgctgtgtggtattgcacggatttacgaggaaatgaacaatatgtcttcagccgcagagtactataaagaagtcctaaaacaggacaacacccacgtggaggcgatcgcttgcattggatctaatcacttttacagcgatcagcccgagatcgcgctccgtttctatcgacgtctactgcagatgggcatatataacggccagcttttcaataacctcggactgtgctgtttctatgcccagcagtacgacatgacactgacctcattcgagcgggcccttagtctcgcggaaaacgaggaggaggctgcagatgtgtggtacaacttgggacacgtggctgtgggaattggggatacaaaccttgcccatcaatgtttccggctagcactggtcaacaataacaaccacgctgaggcatataataacctggcagttttggagatgcgcaagggccatgttgaacaagcgagggctctgttgcagacggctagctcgctcgccccccatatgtatgaacctcattttaacttcgccacgatcagcgataaaataggcgacctccagcgatcttatgttgccgcccaaaagtcagaagccgcctttccagatcatgtggacacccagcaccttattaagcagctgagacagcattttgcaatgctctag

SEQ ID NO: 208485 - DNA, 636 bp, synthetic construct
  misc_feature 1..636: note = Description of Artificial Sequence: Synthetic coding sequence
  source 1..636: mol_type = other DNA
atgagcagcgagatggagcccctgctgctggcctggagctacttccgtaggcgaaaattccagctctgtgccgacttgtgtacacagatgttggaaaaatctccatatgatcagaagattagctgggcatggtggcatgtgccagttatcccagctacctgggaggccgaagcaggcgagttactcgaacccaggaaacgacgtttgcagcaggccgaaatcaccccgctgtatagttcactgggcaataagtcaaaaacaccttctcaaaaagccgcctggattctgaaggctagagcacttacggagatggtgtatatcgacgagatagatgtcgaccaggagggaattgctgaaatgatgctggacgaaaacgcgattgctcaggtgcctaggcctgggacttccctgaagttaccaggtaccaaccagacaggaggaccgtcccaggctgcgaatcatactagctggaaaacacattatagattccctcaggcccagcatgccgaatggaaagcccggcactacggcacaggttaccagaatactcagaatcgtctccatagcccgccttatcatcaactattacgaaaaatttgccaggcaggaaacggttttcatgcttacaaaagttag

SEQ ID NO: 208486 - DNA, 1518 bp, synthetic construct
  misc_feature 1..1518: note = Description of Artificial Sequence: Synthetic coding sequence
  source 1..1518: mol_type = other DNA
atgagcagcgagatggagcccctgctgctggcctggagctacttcagacgccgaaaatttcagctgtgcgccgacttgtgtacacagatgctcgaaaagagcccatacgatcaggccgcgtggatcctcaaagccagggcgcttaccgagatggtgtacattgatgaaattgatgtcgaccaggaggggattgccgaaatgatgcttgacgagaacgccatcgctcaggtaccacgaccggggacctcactcaagcttcccggcaccaatcagactggtgggccctcacaagccgtgcgccccatcacacaggccggcagaccaatcaccggttttttgaggccttctacccagagcggacgcccaggcacaatggaacaggcgatacggacccccaggaccgcttacacagcacgtcctatcacttccagctcaggccggtttgtgcgtttgggcaccgctagcatgctcaccagccctgatgggccgttcatcaatttgagccgtctgaatctgacgaagtacagccagaagcccaagctcgcaaaggccctgttcgaatacatttttcaccacgagaacgacgtgaaaaccgccctcgacctggcggccctgagcactgagcacagccaatataaggactggtggtggaaggttcaaatcggcaagtgttactacaggctcggcatgtaccgagaggccgagaagcagttcaagtcagcgcttaaacagcaagagatggtggatacctttctttatctggccaaggtgtatgtaagtctcgatcagcctgttacagctctgaacctgttcaagcagggtctcgacaaattcccaggagaagtgacattactctgcggaatcgcccgaatctacgaagaaatgaacaacatgagttcagccgccgaatactacaaggaagtattgaaacaagacaatacacacgtggaagccatcgcatgcattggctccaaccacttctacagcgaccagcctgagatcgcactgaggttctataggcgtctcctgcagatgggaatttataacggacaactgttcaataacttgggattgtgctgcttttacgcacaacagtacgacatgacgctgactagctttgagcgagctctgagcctcgccgaaaacgaggaagaggccgctgacgtgtggtacaatctcgggcacgtggcagtcgggattggagacacgaaccttgcacatcagtgctttcggctggccctcgtgaataataacaaccatgctgaagcgtataataatttagcggtgctcgagatgaggaaaggacacgtagaacaggcgagggctctccttcagacggcctcttctctcgctccccacatgtacgaacctcattttaactttgccacaatcagcgataagatcggagatctacagaggagttatgtcgcagcgcagaagtctgaggcagcttttcctgaccatgtcgatactcaacacctgatcaagcagttgagacaacattttgcaatgctgtag

SEQ ID NO: 208487 - DNA, 1428 bp, synthetic construct
  misc_feature 1..1428: note = Description of Artificial Sequence: Synthetic coding sequence
  source 1..1428: mol_type = other DNA
atgagcagcgagatggagcccctgctgctggcctggagctacttcaggcgaagaaaatttcagttgtgcgccgacttatgtacccagatgctcgaaaagtctccatacgatcaggcagcatggatcctcaaggccagggctctgactgaaatggtgtacattgatgaaatcgacgtggaccaggaagggatcgcagaaatgatgttggatgagaacgccattgcacaggtgccgcgccccggaacctccttgaaactgcccggcactaaccagaccggagggccctcgcaggccgtgagacctatcacccaggcagggcgaccgataacaggttttttaagaccatccacccagtcaggccgccctggcaccatggagcaagcaatacgaacccctcggaccgcctacactgccaggcccattacatccagctcagggaggttcgtccgacttggcacagcattgtttgagtacattttccatcatgagaatgatgtgaagactgccctggacttagcagccctatcaaccgaacattcacagtacaaggattggtggtggaaggtgcagatcggcaagtgctactacagacttggaatgtacagagaggcagagaagcagttcaagtctgccttaaagcagcaggaaatggttgatacttttctgtacctcgccaaagtctatgtgtctctggatcagcctgttaccgcactgaacctgtttaaacagggtctcgacaaattcccgggcgaggtcactctcctgtgcgggatcgcccggatttatgaggaaatgaacaatatgagttctgcagcagagtactacaaagaggtcctgaagcaggataacacacatgtggaggccattgcttgcatcggaagcaaccatttctacagtgaccagccagaaatagctttaagattttacaggaggctacttcagatgggcatctacaacgggcagcttttcaataatctcgggctgtgctgcttttacgcccagcaatacgacatgaccctaactagttttgagagggctctttcactggcagagaacgaagaagaagccgcagacgtctggtataatctcgggcatgtcgcagtgggaatcggcgacaccaatcttgcacatcaatgcttccggctcgcattggtcaataacaataatcacgccgaagcctacaacaacttggcggtactcgaaatgcggaaagggcatgtggagcaggctagagccctgctccagacagcctcaagccttgcgcctcatatgtacgaaccgcacttcaacttcgctacgattagcgataaaatcggtgacctccagcgcagctacgttgccgcacagaaatccgaggccgcatttcccgaccacgtcgatactcagcaccttataaagcagcttcggcagcacttcgcgatgctgtag

SEQ ID NO: 208488 - DNA, 753 bp, synthetic construct
  misc_feature 1..753: note = Description of Artificial Sequence: Synthetic coding sequence
  source 1..753: mol_type = other DNA
atgagcagcgagatggagcccctgctgctggcctggagctacttcagacgccggaaattccagctgtgtgcagatctgtgcacacagatgctcgagaagagtccttacgatcaggagatgaacaatatgagttctgcagccgaatactataaggaagttctgaaacaggataacacacatgtggaggccatagcctgtattggttcaaatcatttctattccgaccaacctgagatcgctttaaggttctaccggaggctgctgcagatgggcatatacaacgggcagctgtttaacaacttaggactgtgttgcttttatgctcagcagtacgatatgacgctgacatcttttgaacgggccctttccctggctgagaacgaggaggaggctgcagacgtatggtataacctcggacacgtggcagtggggatcggtgatacgaaccttgctcatcaatgtttccggctggcactggtgaataacaataaccacgcggaagcctacaataatcttgctgttctggagatgagaaaaggccatgtggagcaggcaagggctctgctgcaaacagcatcttctctggcaccacatatgtatgaacctcattttaactttgccacaatttcagataagattggtgacctccaacgaagttacgttgcagcccaaaagtctgaggctgcctttcctgatcacgtggacacccagcatcttatcaagcagctgcggcagcactttgccatgctatag

SEQ ID NO: 208489 - DNA, 954 bp, synthetic construct
  misc_feature 1..954: note = Description of Artificial Sequence: Synthetic coding sequence
  source 1..954: mol_type = other DNA
atgatcctgagctacgaggtgatcctgcacgccctggacctggccgcactcagtactgaacacagccagtataaggactggtggtggaaagttcagattggtaaatgctattaccggctagggatgtaccgcgaagcagagaagcagttcaaaagtgcactgaaacaacaggagatggttgatacgttcttatatctcgcaaaggtgtacgtgtccctggatcagccggttaccgctctaaacctttttaagcagggactggacaaattccccggggaggttacactcctctgcggaatagcaaggatatatgaagaaatgaacaacatgtcttccgccgcagaatactacaaagaagtactgaaacaggataacacacatgttgaggcaatcgcctgtatcgggtcaaatcatttctattcggaccaacctgagatcgctctacgattttatcggcgacttttgcagatgggtatttataatgggcagctgttcaataatctgggtctgtgttgtttctacgcccagcagtacgacatgacactgacctcattcgagagggccttatccttggccgagaatgaggaagaagcagctgatgtgtggtataaccttggccacgtggcagtgggtataggagatacaaaccttgcccaccagtgttttagactggccctggtgaacaacaacaaccacgcagaggcttacaataacctggcggttctagaaatgagaaagggccacgtggaacaggcacgggccctcctgcagactgcgtcatccctcgctcctcacatgtatgagccgcactttaactttgccaccatcagcgacaagatcggagacttgcagagaagttacgttgctgcacagaagtcagaggcagccttccccgaccatgtagacacccagcacctgatcaagcaactccggcaacatttcgccatgttatag

SEQ ID NO: 208490 - DNA, 1548 bp, synthetic construct
  misc_feature 1..1548: note = Description of Artificial Sequence: Synthetic coding sequence
  source 1..1548: mol_type = other DNA
atgagcagcgagatggagcccctgctgctggcctggagctacttccggaggcggaagtttcagctgtgtgctgatctctgcactcaaatgctcgaaaaatcaccttatgatcaagagccagatccagaattgcctgtgcaccaagccgcctggatactgaaagctcgagcactaactgaaatggtgtatattgacgagatcgatgttgatcaagaaggaatagcagagatgatgctggatgaaaacgccatcgcccaggtgccacggcccgggactagcctgaagctgcccgggactaaccagaccggcggcccatctcaggcggtaaggcccatcactcaagccgggagacccatcaccggctttttacgtccatctacacagagtgggcgtcctggcaccatggagcaggccatcagaacaccccggaccgcctatacagctaggccaattactagttcttcagggagatttgtgcgacttggcacggcgtctatgttgaccagcccagatggacctttcatcaatctctccagactcaatctgactaaatattcccagaaacctaagctggcaaaagcgctgttcgagtacatctttcatcacgagaacgatgtgaagacagctctggacctcgccgcactgtctacagaacatagccagtacaaggactggtggtggaaggtgcagatcggcaaatgttactataggttggggatgtatagggaagctgaaaaacagtttaaaagcgcattgaaacagcaggaaatggtagacacatttctatacctcgctaaggtctacgtctccctcgatcagcctgttactgccctaaacctcttcaaacagggactagataagttccccggagaggtgacactgttgtgtggtatcgcaaggatatacgaagaaatgaacaacatgtcatctgccgctgaatactataaagaggtgcttaaacaggacaatacacacgtagaagcgatagcctgcattggctcaaatcacttttacagtgaccagccagagatagccctgagattttacagaagactgctgcaaatggggatatataacggccagctgtttaacaacctcggcctctgttgcttttacgcacagcagtacgacatgaccctcaccagtttcgaaagagccctgtcattggctgagaatgaggaagaggctgcggacgtgtggtataacctgggacacgtggctgtcggaataggggatacgaatctggcccatcagtgttttcgactggccctggtgaacaataacaatcacgccgaggcctataataacctcgctgtgttagagatgcggaaaggtcatgtggaacaagcgcgagccctgctgcagaccgctagctcccttgcaccccatatgtatgagccacattttaatttcgccaccatctcagacaaaataggcgatctccagcggtcttacgtagctgcccagaaatccgaagccgcgtttcctgatcatgtggacacacagcatcttattaagcagcttaggcagcattttgccatgctctag

SEQ ID NO: 208491 - DNA, 831 bp, synthetic construct
  misc_feature 1..831: note = Description of Artificial Sequence: Synthetic coding sequence
  source 1..831: mol_type = other DNA
atgtaccgggaggccgagaagcagttcaagagcgccctgaagcagcaggagatggtggacacctttctctatctggccaaagtgtacgtgagcctcgaccagcccgtgaccgctctaaacttgttcaaacagggactagacaagttcccaggcgaagtgacgcttttgtgcggaatagcgcgtatctatgaggagatgaataatatgagttccgccgctgaatactacaaggaagtgctcaagcaagacaacacacatgtggaagccatcgcttgcattggatccaatcatttttactccgatcagcctgaaatagctctccgcttttacagaaggttgcttcagatgggtatctataacggccagctgttcaataatctggggctctgctgcttttatgctcaacagtacgatatgacattgactagttttgagcgagctctgagtctagcggaaaacgaagaagaggcggcagacgtgtggtataacttaggccacgtagcagtcggaattggtgacactaacctggcccaccaatgctttaggctcgccctcgttaataacaacaatcacgctgaagcctacaacaatcttgctgtgctggagatgaggaaaggccatgttgagcaggcccgagcactgctgcagactgcttcttctctagcaccgcatatgtacgagccccacttcaattttgccacaatttccgataaaattggcgacctacaaaggagttacgtcgctgcacaaaaaagcgaagcagctttccccgaccacgtcgacacccaacacttgattaagcagctaaggcagcacttcgccatgttatag

SEQ ID NO: 208492 - DNA, 348 bp, synthetic construct
  misc_feature 1..348: note = Description of Artificial Sequence: Synthetic coding sequence
  source 1..348: mol_type = other DNA
atgagcagccccagcagccccttccgggagcagagcttcctgtgcgcagctggcgatgcaggagaggaatccagagtccaggttctgaagaatgaggtgcggagggggtcaccagttctgctgggctgggttgagcaagcatacgccgataagtgtgtatgcggtcccagtgccccgccagcccccactccaccctccctttcacagcgggtgatgtgtaacgatttattcaaagttaatcccttccagctgcaacagttcagggctgatcccagtaccgcctccctcctcctctgtccaggaggcttggatcacaaacttaatctaaggggaaaagcctggggttag

SEQ ID NO: 208493 - DNA, 348 bp, synthetic construct
  misc_feature 1..348: note = Description of Artificial Sequence: Synthetic coding sequence
  source 1..348: mol_type = other DNA
atgagcagccccagcagccccttccgggagcagagcttcctgtgcgcagctggggatgccggtgaagaaagcagggttcaagtcctgaagaatgaggtgcgccgagggagcccagtgctccttgggtgggttgagcaggcgtacgctgacaaatgtgtgtgtgggccatccgcgccacccgcccctacccccccctctttgtctcagagagtcatgtgtaacgacctgtttaaggttaacccctttcagctgcagcagttccgggctgatccgagtaccgcaagtctactgctctgccctgggggcctggaccacaaactgaacctcagggggaaggcatgggggtag

SEQ ID NO: 208494 - DNA, 357 bp, synthetic construct
  misc_feature 1..357: note = Description of Artificial Sequence: Synthetic coding sequence
  source 1..357: mol_type = other DNA
atggagggcggcgcctacggcgccggcaaggccggcggcgccttcgatccttacactctagtgcgacagcctcatactatattaagggtcgtatcatggttgttttcgattgtcgtattcgggagcattgtgaatgagggctatctcaactcagcgtccgaaggagaggagttctgcatttacaatagaaaccccaatgcctgcagttacggcgttgcagtcggagtgctggcttttctcacctgcttgctctacttagcactcgacgtgtactttcctcagatcagcagtgtcaaggatcgtaaaaaagccgtgctgtccgacatcggtgtcagcgcgtgggagatgcacagctag

SEQ ID NO: 208495 - DNA, 1389 bp, synthetic construct
  misc_feature 1..1389: note = Description of Artificial Sequence: Synthetic coding sequence
  source 1..1389: mol_type = other DNA
atggccgcccagcggcggagcctgctgcagagcgagcagcagccctcatggactgatgatctgccgttgtgtcatctgagcggcgtgggctcggcgagcaatcggagttactcagccgatgggaagggcaccgaatcacacccccccgaggattcttggctgaaatttcggtccgagaacaactgttttctctatggcgtcttcaatggctacgatggaaacagagtgaccaactttgtcgcccaacgactgagtgcggagctgctccttggccagttgaacgcagaacacgctgaggcggatgtgcggagagtgctgttgcaggctttcgatgtggtggaacgtagctttctcgaaagcatcgatgacgccctggcagagaaagcttctctgcagagtcagttgccagagggggtgccgcaacaccaactgcccccgcagtaccagaagatactagaaaggctgaaaactcttgagcgggaaatctcaggcggagccatggccgtcgtggcagtcttactcaataacaagttatatgtcgccaacgtgggaactaatcgagccctcttgtgtaaaagtaccgtagatggcttgcaagtgacacagctgaatgtcgaccacacaaccgaaaatgaggacgagctgtttcgtctgtctcagcttggactggacgctggtaagataaagcaagtaggtattatctgtggccaggaatccactagacgtatcggggattacaaggtgaagtacggctacactgatatagacctgcttagcgcggcaaagtctaagccaatcattgcagaaccagagatccacggggcacaacctctggacggggtgactggcttcctggtgttgatgagcgagggactctacaaggccctcgaggctgcacatggaccaggccaggctaatcaggagatagcagccatgatcgacaccgagtttgcaaagcaaacatccctcgacgccgtcgcccaagctgtggtggaccgagtaaagaggatccacagtgacacttttgcaagcggaggcgagcgcgcaaggttctgcccacgtcacgaggacatgactcttctggtaagaaattttgggtacccgcttggggagatgagccaaccgacaccttccccagctccggccgctggggggagggtctatcctgtgtcggtaccttatagtagtgcccagagcacgtcaaagacatcagtgactctctcactggtgatgccaagtcagggtcaaatggttaatggggcccacagcgcatctacattagacgaagctacacctacgcttacaaaggatccgagccgtcccgcttctgatctcacagccattcctcaatgtcagctcaacctactcgggtccctcactcccggttag

SEQ ID NO: 208496 - DNA, 2082 bp, synthetic construct
  misc_feature 1..2082: note = Description of Artificial Sequence: Synthetic coding sequence
  source 1..2082: mol_type = other DNA
atggcccagggcagccaccagatcgacttccaggtgctgcacgacctcagacagaaattcccagaagtgcctgaggtcgtggtcagtcgatgcatgctgcagaacaacaataacctggacgcatgctgcgctgttcttagccaggagtcgaccagatacctgtacggggaaggcgacttgaattttagtgatgattcagggattagtgggctgcgtaaccatatgactagcctgaatctagatctgcagagccagaacatatatcatcacggacgggagggatctaggatgaatgggtcaagaaccctgacacacagcatctctgacggccaacttcaaggtgggcagtcaaactcggagctgttccagcaggaacctcagacggcccctgcgcaggttccccaagggttcaatgttttcgggatgtcatccagttctggcgcgagcaattcggctccccacctgggcttccatctgggatcaaagggaacctcttcgctgtctcagcagacccctaggttcaaccctatcatggttacactggcccccaacattcagacaggtagaaatacgccaacctccctccacatccacggtgttccgccgcccgtgctcaatagtccccaaggtaactcgatctacatcaggccctatattacaacaccaggaggaaccacaaggcagacccagcagcattcgggctgggtgagccaattcaatcccatgaaccctcagcaagtttatcaaccttcacaacctggcccatggacaacatgtcccgcatctaaccctcttagccacacaagcagtcagcagcccaatcagcaagggcaccaaacctcccatgtctacatgccaatctcgtcccccactaccagtcaaccaccaaccatccactcatcagggagttcccagtcctctgcccacagccagtataatattcagaatatctccacggggcctaggaaaaaccaaattgagataaaactggagcccccccagagaaataatagttccaaactcaggagctcaggaccacgaacctcatctacaagcagctctgtaaatagtcagaccttgaaccgaaaccagcctaccgtgtacatcgcagcgagccctccaaataccgatgaattgatgagcagatcccagcctaaggtgtacatcagtgccaacgccgcaaccggtgacgagcaggttatgaggaatcaaccaacactatttatatcaaccaatagcggagcctccgccgcctcacggaatatgtccggtcaggttagcatgggacccgcatttatccaccatcatcctccaaagtctagagctataggcaataattccgccacttcaccgcgcgttgtggtcacgcaacctaatacaaaatacaccttcaaaattaccgttagccctaacaaaccaccagctgtgagccctggagtggtgtctccaacatttgagctcaccaacttgctcaaccacccagatcattacgtagagaccgaaaatatccaacacctgaccgacccgactttggcgcacgtggacagaatttccgagacaaggaaactgagcatgggttctgacgacgccgcgtacacccaggcccttctggtgcaccaaaaagcccgcatggaacgacttcagagagagttagagatccagaaaaagaaactggacaaattgaagtctgaagttaatgaaatggaaaataaccttactagacgcagattgaagcgctcaaacagcatctcccagatcccgtccttggaggagatgcagcagctaaggagctgtaatcgccagttgcaaattgacatagattgcctaacaaaggaaattgatctgttccaagccaggggcccccattttaacccatccgctatccacaacttctacgataatatcggctttgtgggtccggtgccaccaaagccaaaggaccagaggtcgattattaagacaccaaaaacgcaagatactgaagacgatgagggagcccagtggaactgcaccgcctgtacttttctgaatcacccagccctgatccgctgcgagcagtgtgagatgcctcggcatttctag

SEQ ID NO: 208497 - DNA, 2082 bp, synthetic construct
  misc_feature 1..2082: note = Description of Artificial Sequence: Synthetic coding sequence
  source 1..2082: mol_type = other DNA
atggcccagggcagccaccagatcgacttccaggtgctgcacgaccttaggcagaagtttccagaagtgcccgaagtcgttgtgagccgctgcatgttacaaaataataacaatctcgatgcttgctgcgctgtgctgagccaggagtctactaggtatttatacggcgaaggagatttaaatttctctgacgacagtggcataagcggcttaagaaatcacatgacctcgctgaacctagatttacagtcgcaaaacatataccaccacggacgagagggctcgagaatgaatggatccagaacgctgacacactctatttctgacggacagttgcagggcgggcagtctaacagtgagctgttccagcaggaaccacaaactgctcctgcccaggtcccacagggctttaacgttttcgggatgtcgtccagctccggtgcttcgaactccgccccgcacctcggctttcacttgggttccaaagggacctccagcctttcccagcagacccctcggttcaatcccatcatggtgacactcgcacccaatattcagactgggcggaacacccctacctccctgcacatccatggcgtgcccccgccagtgttaaattccccacagggtaattcaatttacataaggccatacatcactaccccgggagggacaaccaggcaaacacagcagcattcagggtgggtgtcgcagtttaatccaatgaatccccagcaagtgtatcagccaagccaaccagggccgtggacaacgtgtcccgcgtcaaatcctctctcccacacatcctctcagcagccaaatcaacaggggcatcagacctcccatgtctatatgcctatttcaagcccaactacttcccagcccccgacgatccactcctccggatccagccagagctcagctcattcccagtacaatattcaaaacatatccaccggacccaggaagaatcagatcgaaatcaaactggagccccctcaaaggaataactcctcgaaactgagatcatctgggccacgaacatctagtacctcgtcctccgttaactcgcaaaccctgaatagaaaccagcccaccgtttatattgcagcgtctccacccaatactgatgagctcatgagccgcagtcagccgaaggtgtacatctcagctaatgctgccaccggagacgagcaggtgatgcggaaccagcccaccctgtttatcagcaccaacagcggtgcctccgctgcatctcggaatatgagcggccaggtatctatgggacctgcctttatccatcaccaccccccaaaatcccgcgctattgggaacaactccgcaacatccccaagggtggtggtcacacagccaaacactaagtacacgtttaagatcaccgtaagccccaacaagcccccggccgtgtccccaggggtagtgtcacctacttttgaactcaccaatctgcttaaccatccagaccattacgtggaaaccgagaacatacagcaccttacagacccaacactcgctcacgtggatcgtattagcgagacaaggaaattgtctatgggttccgacgacgcagcgtatacacaggccctgctcgtgcatcagaaggcccgaatggaaaggctccagcgtgaactggagatacaaaaaaaaaagctggacaagctgaagagcgaagtgaacgaaatggagaacaatctgacccgaaggcggcttaagcgtagtaattccattagtcaaattccttctctggaagagatgcagcagctgaggtcttgtaatcggcagctgcagatcgatatagactgcctgacaaaggaaattgacctgttccaggcccgcggaccgcacttcaatccatccgctatccataatttctatgacaacatcggatttgtgggaccggttcctcctaaaccaaaggaccagcgatctatcattaaaacccctaagactcaagatacagaagacgatgagggggcacagtggaactgtacagcctgcacattcctgaaccatccagcgctcatccggtgtgaacagtgcgagatgcctcgccatttttag

SEQ ID NO: 208498 - DNA, 1611 bp, synthetic construct
  misc_feature 1..1611: note = Description of Artificial Sequence: Synthetic coding sequence
  source 1..1611: mol_type = other DNA
atggcccagggcagccaccagatcgacttccaggtgctgcacgacctgcggcagaagtttccagaggtgccggaggttgtcgtatcaagatgcatgctccaaaacaataataacctcgatgcctgttgtgctgtgctgtctcaggagagcacccgatatttatacggagaaggggacttgaactttagtgacgattcaggaatctcagggcttcggaatcacatgacgagtctcaacttggatcttcagtcccagaatatctatcatcacggaagggagggctcaaggatgaacgggagccgaacgttgacacattctatctctgatggccagctccagggaggacagtctaactctgagctctttcaacaggagccccaaactgcgccagcgcaggttccccagggcttcaacgtgttcggcatgagcagttcctcgggggcatcaaactctgcaccccatttggggttccatctgggctccaaaggcacttcatctctgtcacagcagaccccgagattcaacccaatcatggtgacattggcacctaacattcagaccggccgaaacacacctacttctctgcatattcacggtgtcccccccccagtgctgaactcccctcagggaaacagcatatatattaggccatacattaccacccctggcgggactacacgacagactcaacagcactctggctgggtatctcagttcaacccgatgaaccctcagcaggtgtaccagccttcgcaacccgggccctggaccacctgccccgcctccaaccccttgagccatacctccagccagcagcccaatcaacaggggcatcagaccagccacgtttatatgccaattagcagccctacgacgtctcagccgccaaccatccactcgagcggcagttctcaatccagcgcacattcacagtacaatattcagaacatcagcactggcccccgaaagaatcagattgagataaaattggagccacctcagcgaaataactccagcaagctgcggagtagcggcccaaggacgtcgagcacatcttccagcgttaacagccagaccttaaatagaaatcaacctaccgtgtacatcgccgctagcccacccaatacagacgaactgatgtcgcgcagtcagcccaaggtctatatttctgctaacgccgcaacaggggacgaacaagtgatgagaaaccaaccaactctattcattagcaccaacagcggcgcttctgctgcctctaggaacatgagtggacaggtttctatgggcccagccttcatccatcatcatccaccaaaatctagggcgattggaaataacagtgctacctcaccaagagttgtcgtgacccagccaaacacgaaatacacattcaagatcaccgtctcccctaataagcctccagccgtgagcccaggggtagtaagtcctactttcgaattgacgaacctcttgaaccatcctgatcattacgtggaaactgagaacattcagcaccttacagatcccaccctggcccatgtcgacaggataagcgagacaagaaaattgtccatgggctccgatgacgctgcttacacacaagacatctag

SEQ ID NO: 208499 - DNA, 1986 bp, synthetic construct
  misc_feature 1..1986: note = Description of Artificial Sequence: Synthetic coding sequence
  source 1..1986: mol_type = other DNA
atgcagaacaacaacaacctggacgcctgctgcgccgtgctgagccaggagtctaccagatatctgtacggagaaggggacctgaattttagtgatgactccgggatttccggactgaggaaccacatgacaagcttgaacttagacttgcagtctcagaacatctatcatcatggccgggaggggtcccggatgaatggtagccgcacattgactcactcaatatccgatggtcagcttcagggcgggcagtctaattccgagctgtttcaacaagagccccagacagcccccgcccaggtgccgcagggattcaacgttttcggcatgagctcttctagtggcgcctcaaactctgccccccacttgggctttcacttaggatctaagggcacctcttcactgagtcagcaaacccctagatttaaccctataatggtcacactggctcctaacatccagaccggacgaaacacgcctacttcccttcacattcatggcgttccgccgccagtcctcaattcgccgcagggaaatagtatatatattcgtccgtatattactacccctggtggcaccaccagacaaacacaacagcactcaggttgggtctcacaatttaatcctatgaatccgcagcaggtgtatcaaccatctcagccggggccatggacaacatgccccgctagcaacccactgtcacacacctctagccagcagcctaaccagcaaggccatcagacatcgcatgtctacatgcccatttctagtccaactacttctcaacccccaaccatccatagctccggcagttctcagtcgtcggctcactcgcaatataacattcaaaacatcagcaccggcccacggaaaaaccagatcgagattaagctggagcctccccaaagaaataatagttctaaactgagaagcagtggtcctagaactagctctaccagctcttctgtgaatagccaaaccctgaataggaaccagccaaccgtgtatatcgcagccagcccacccaacacagacgaactaatgtcccggagccagccaaaggtgtatatctctgctaatgcagcaacaggggatgagcaggtaatgagaaaccagcctaccctttttattagcacgaacagcggcgcgtcagcagcctccaggaacatgtctggtcaggtctctatggggcctgccttcatacatcatcacccaccaaaatctagggcgataggaaataacagcgccacaagcccgagagtggtcgtcactcaacctaacacaaaatacactttcaagataacagtgagccccaacaagccgccggccgtaagccctggtgtggtgtcccctaccttcgaacttacaaatctcctgaaccacccggaccactacgttgaaacagaaaacattcagcatcttactgaccctaccttggcccacgtcgacaggattagcgagactagaaagctatcaatgggatccgacgacgctgcctatacccaagccctgttagtccatcagaaggcccggatggagcgcctccagagggagctggagattcagaagaagaaactggacaagttgaaaagtgaggtcaacgagatggaaaacaatctcacaagaaggcgcctgaagcgcagcaacagcatttcacagattccttccctggaggagatgcagcagctgcgatcatgtaaccgccagttgcaaattgatattgactgcctgacaaaggaaatagatctgttccaggccaggggtccacactttaacccatccgctattcataacttttatgacaatataggcttcgtcggacccgtacctcctaagccaaaggatcagcgtagtataatcaagacccctaagacccaagacacagaagacgacgagggtgctcagtggaactgcaccgcctgtacctttctcaatcacccagcactcattaggtgtgagcagtgcgagatgccacgccatttctag

SEQ ID NO: 208500 - DNA, 2082 bp, synthetic construct
  misc_feature 1..2082: note = Description of Artificial Sequence: Synthetic coding sequence
  source 1..2082: mol_type = other DNA
atggcccagggcagccaccagatcgacttccaggtgctgcacgacctgcggcaaaaatttcctgaggtcccagaagtggtagtcagcagatgcatgctgcagaataataataaccttgacgcttgctgcgctgttctcagtcaggagtctactagatatttatacggggaaggcgacctcaacttttccgatgactcgggtatctcaggcctgcgcaaccatatgacaagtctcaatttagacctgcagagtcagaacatatatcaccacggacgggagggtagccggatgaatgggtctagaacccttacacacagtatttcggacggtcagctgcagggaggacagagcaattcggagctattccaacaagagcctcagacagcaccagcccaggtcccccaggggtttaacgtgtttggaatgtcaagttccagcggcgcttctaatagtgccccacacctgggtttccacctgggaagcaagggtaccagttccctctcccagcaaacaccgagatttaacccgattatggtgacccttgccccaaatatccagaccggtcggaatacacctacaagcctgcacattcacggagtgcccccacccgtgctaaattcaccgcaggggaattccatctacataaggccgtatattaccactccaggtggcaccacccgccagacacaacagcattcaggctgggtctcccagttcaaccccatgaatccccagcaggtgtaccagccctcacagcccgggccctggaccacgtgcccagcaagtaacccattgagccataccagtagccagcagccaaaccagcaggggcatcagacgtcacatgtgtacatgccaatctcctcccccactaccagtcaaccccccaccattcatagtagcgggtcctcacagtctagcgctcactctcaatacaatattcagaacatctcaactgggccacgtaaaaatcagatcgagataaagctggaaccgccacagagaaataacagctccaaattgcggtccagcggtccccgcacaagttcaacaagttcctcagtcaacagccagacacttaacaggaaccagccgacagtatacattgcagcatctcctcccaacaccgacgagcttatgagtcgctcccagccaaaggtgtacatcagtgccaatgcagcaactggcgacgagcaggtgatgcgtaatcagcctaccttgttcatttctacgaatagcggggcatcagccgcctcccgcaacatgagtgggcaagtgtccatgggaccagcatttatccaccaccatccaccaaagagccgggccattgggaataatagcgctacctccccccgtgtagtggtgacccagccaaacaccaaatatacatttaagattactgtcagtccaaataaacctccagccgtgagcccaggcgtggtgtcacctacttttgaactgactaacctgttaaatcaccccgaccattacgtggagacagagaatattcagcacctcacagatcctaccctcgctcatgtggaccgtatcagtgaaaccagaaaactcagtatggggtctgacgacgcagcctacacacaggccctgctcgtccaccagaaagcaagaatggagagactacagagagaactcgagattcagaagaaaaagctggacaagctgaagtcagaagtgaatgagatggaaaataacctaactcggaggaggttgaaaagatccaactctatcagccagattccctctctggaggaaatgcagcagctgcgttcctgcaaccggcagctgcaaatcgacattgactgcctcaccaaggagatcgacctgtttcaggcaagagggcctcattttaaccctagcgctatccataacttttacgataacattgggtttgtgggaccagtgcctcccaaacccaaggaccagcgctctatcatcaaaacacccaagacacaggacaccgaggatgatgaaggggctcagtggaattgcactgcctgtacgttcctcaaccacccggcgctcattcggtgcgagcaatgtgagatgcctcgccacttttag

SEQ ID NO: 208501 - DNA, 714 bp, synthetic construct
  misc_feature 1..714: note = Description of Artificial Sequence: Synthetic coding sequence
  source 1..714: mol_type = other DNA
atgagcgacagcgacctgggcgaggacgagggcctgctgagcctggcagggaagcgcaagagaaggggcaacctccccaaagagtccgttaagattctccgtgactggctctaccttcatcggtacaatgcatacccatcagagcaggaaaagctgtcgctatcaggacagacaaatttgtctgtgctgcagatttgcaactggtttattaatgctcgccggcgactgttgcccgacatgctccgcaaggatggaaaggatcctaaccaattcacaatatcaaggcgtggagggaaagccagcgacgtcgccctaccgcggggttcctccccttccgtcttggcagtctcagtacccgcccctaccaacgtgctgtcattgtctgtctgtagtatgcccctgcattccggtcaaggtgaaaagcccgcggcaccttttccgagaggagagctggagtccccgaaaccattggtaacccctggtagtacgttaacgctattgacaagggccgaggccggctctcctaccggaggcctgttcaatacccccccaccaacacctcctgagcaggataaagaagacttcagctcgttccagcttctggttgaggtggccctccagagagctgccgagatggaactgcagaaacagcaggacccgagtctgccactgctccacaccccgattcccctagtgtccgagaatccccaatag

SEQ ID NO: 208502 - DNA, 714 bp, synthetic construct
  misc_feature 1..714: note = Description of Artificial Sequence: Synthetic coding sequence
  source 1..714: mol_type = other DNA
atgagcgacagcgacctgggcgaggacgagggcctgctgagcctggccgggaagcgaaagcggcgaggcaaccttcccaaggaaagtgtgaaaatccttcgcgattggttgtatctgcaccgatataatgcatacccaagtgagcaggaaaagctcagtctcagtggacaaactaacctgtcagtgctgcagatctgcaactggttcattaatgccagaaggagacttctgccagacatgttgcgtaaggatggcaaggaccctaatcagttcacgatctctcggagaggaggaaaggccagcgatgtggcacttccaaggggcagctcacctagcgtccttgccgtcagcgtacccgctcccacaaacgtgttgtctctcagtgtgtgtagtatgcctttgcacagtgggcagggggagaaaccagccgccccttttcccagaggcgaactcgaatctccaaagcctctggttacccctgggtcgacccttaccctgctgacacgggccgaagctggctccccgacgggcggcctcttcaataccccaccgcctaccccacccgaacaggacaaagaggacttcagttctttccagctactcgtggaggttgctctgcagcgggcggcagagatggaacttcagaaacagcaggatccatcgctaccactgttgcatactccaattcccctcgtgagcgagaacccccagtag

SEQ ID NO: 208503 - DNA, 525 bp, synthetic construct
  misc_feature 1..525: note = Description of Artificial Sequence: Synthetic coding sequence
  source 1..525: mol_type = other DNA
atgagcgacagcgacctgggcgaggacgagggcctgctgagcctggctggaaagagaaaacgtagaggtaatctgcctaaggagagcgtaaaaattttgcgagattggttatacctccaccggtacaatgcctacccctcggaacaggagaagctgtcactgtccgggcaaacaaatctgtcagtactgcaaatctgcaattggttcatcaacgcccgccgcagactgctcccggacatgttgagaaaggatggcaaagaccccaaccagttcactattagccgccggggtgggaaagcgagcgacgttgcactgcctcgtggctccagtccttcagtccttgctgtgtccgttcctgcacccacaaatgttttgagtttgagcgtgtgctcgatgcctctgcacagcggccagggagaaaaacccgcagcgccgttccctcgaggcgagcttgagtccccgaaacccctcgtgacaccaggatccaccttgacattacttacaagagctgaagctggctcttag

SEQ ID NO: 208504 - DNA, 714 bp, synthetic construct
  misc_feature 1..714: note = Description of Artificial Sequence: Synthetic coding sequence
  source 1..714: mol_type = other DNA
atgagcgacagcgacctgggcgaggacgagggcctgctgagcctggcaggaaaacgcaagcgtcggggcaatcttccgaaagagtctgtgaaaattctaagagactggctctacttacacaggtacaatgcataccctagtgaacaagagaagttaagcctcagtggtcagacgaacctaagtgtcctgcagatctgcaattggttcataaacgcccggcggagactccttcccgacatgttacgcaaagatgggaaagacccaaaccagttcactattagccggagaggcggtaaagctagtgacgtggccctgccacgaggaagttcccccagcgtgttagccgtgtctgtccctgctcctaccaacgtgctcagtctcagtgtttgtagcatgccccttcattccggccaaggagagaagcctgcagccccattcccaaggggggagctagaatctccaaagcctctggttacaccaggttcaactctgactctgctcacaagagccgaggctgggtcccccaccgggggactgtttaacaccccccctcccaccccccctgagcaggataaggaagacttctcctcatttcaacttctggtggaagtcgccttacaaagagccgctgagatggagctgcaaaaacaacaagaccctagcttgcccctgctgcatacaccaatcccccttgtatcagagaatccacagtag

SEQ ID NO: 208505 - DNA, 726 bp, synthetic construct
  misc_feature 1..726: note = Description of Artificial Sequence: Synthetic coding sequence
  source 1..726: mol_type = other DNA
atggaggccgccgccgacggccccgccgagacccagagccccgtggagaaagattcccccgccaaaacacagtcccccgcacaggacacatcaataatgtcacggaataacgccgatactgggagagtgctggctctacctgaacacaagaaaaagaggaagggtaacttgcccgcggagtcggtcaagatattaagggactggatgtataagcatcgcttcaaggcgtatcctagcgaagaggaaaagcagatgctgtctgagaagacaaacctgagcctcctgcagataagcaattggtttattaacgctcgaaggaggattcttcccgatatgttgcaacaacggcggaacgatcctattattggccataaaactggaaaggatgctcacgcgacacatctacagtccacggaggcttccgtaccggccaaatccggcccctcgggcccagacaacgtgcagtctctgccactttggcctctccctaaggggcagatgtcacgcgaaaagcagcctgaccctgaaagtgctcctagccagaagctcacaggcatagcccagcccaagaagaaggttaaggtgtcagttaccagtccttcgagcccggagcttgtctccccagaagaacatgcagatttttcgagcttcttgctgcttgtggatgccgccgttcagcgagcggctgagctcgagctcgagaagaagcaggagcctaacccgtag

SEQ ID NO: 208506 - DNA, 726 bp, synthetic construct
  misc_feature 1..726: note = Description of Artificial Sequence: Synthetic coding sequence
  source 1..726: mol_type = other DNA
atggaggccgccgccgacggccccgccgagacccagagccccgtggagaaggacagcccagccaaaacacagtcaccagcacaggatacaagcatcatgtcccgtaacaacgctgacacgggaagggttcttgctcttccagagcataaaaagaagagaaaaggaaatctccctgctgagagcgtgaagatcctcagagattggatgtacaagcaccgattcaaggcctatccctctgaggaagagaaacaaatgctgtcagagaagacaaatttatcattgttgcagattagcaattggttcattaacgctcggagaagaatcctgcccgacatgctgcagcagagacggaatgaccctatcatcggacataagacaggtaaagatgcccatgctacacatcttcagtcgacagaggcttctgtccccgcaaaatctgggccgtccggccctgacaatgtgcagagcctgcccctttggccgctacccaaggggcagatgagccgagaaaagcaacccgatcctgagagcgctcccagccagaaactgaccggaatagctcagcccaagaagaaggtgaaagtgtccgtgacctcccctagtagccccgaactggtctcacccgaagaacacgccgactttagctccttcttgctgctggtagatgccgctgtgcagcgagccgctgagctggagcttgaaaagaagcaggagccgaatccatag

SEQ ID NO: 208507 - DNA, 558 bp, synthetic construct
  misc_feature 1..558: note = Description of Artificial Sequence: Synthetic coding sequence
  source 1..558: mol_type = other DNA
atggaggccgccgccgacggccccgccgagacccagagccccgtggaaaaggatagtcctgccaagactcaaagccctgctcaggatactagcatcatgtctcggaataatgcagacaccggacgtgtactggctctccccgaacataagaaaaagagaaaggggaacttgcccgctgagagcgtgaagattctgagagattggatgtacaagcaccggtttaaagcataccccagcgaagaggaaaagcaaatgctgtcagagaaaacaaatttaagcttgctgcgcattagtaactggttcatcaacgctcggaggaggattctgcccgatatgttacagcaaaggagaaacgaccccattattggccacaaaacaggaaaagacgcccacgccacacatctgcagagtaccgaagccagcgttcctgctaaatctggtcccgtagtgcaaaccatgtacaaggcctgcccatgtggaccttgtcagagggcacgttgtcaagagaggagcaaccagattcggtcgcgtccactcgcccgcagctctcccgagtag

SEQ ID NO: 208508 - DNA, 558 bp, synthetic construct
  misc_feature 1..558: note = Description of Artificial Sequence: Synthetic coding sequence
  source 1..558: mol_type = other DNA
atggaggccgccgccgacggccccgccgagacccagagccccgtggagaaggactccccggcaaaaacccagtcacctgcccaggacactagcatcatgagcaggaataatgccgacaccggtcgagtgctcgctctgcccgagcataaaaaaaagcggaagggaaatttgcccgcggagagtgtgaaaattctgcgggattggatgtataagcaccgcttcaaagcttacccatcagaagaagaaaaacagatgttgtctgagaagacaaatctcagtcttctccgtatctcaaactggtttattaacgcacggcgaagaattctgccagatatgctccaacaaagacgcaacgatcccataattggacataaaacaggtaaggacgcccacgccacccacctccagtcgacggaagcctcagttccagcaaagagtggccctgtcgtccagaccatgtacaaggcctgcccctgtggcccctgtcagcgcgctcgatgccaggaacgctcaaatcagatacggagcaggcccttggcgagatccagtccagagtag

SEQ ID NO: 208509 - DNA, 1773 bp, synthetic construct
  misc_feature 1..1773: note = Description of Artificial Sequence: Synthetic coding sequence
  source 1..1773: mol_type = other DNA
atggccggcgccgtgcccggcgccatcatggacgaggactactacggatccgccgctgagtggggggacgaagcggacggcggtcaacaggaggatgacagcggcgagggcgaggatgatgccgaagtccagcaggaatgcctgcataaattcagtacaagagattatataatggagccatccatttttaatactctcaaacgatattttcaggccggcggctctcccgagaatgtgatccagcttcttagtgagaattataccgcagttgcccagaccgtgaatctcctggcagagtggcttatccaaaccggcgttgagcccgttcaagtgcaggagactgtcgagaatcacctcaaatctctgttgattaagcactttgaccctaggaaggctgatagcattttcacagaggaaggcgagacccccgcttggttggagcaaatgattgcccacacaacctggcgcgaccttttttataagttggctgaagcccaccctgactgtcttatgctgaattttactgttaagctgattagtgatgcgggctatcagggggagatcacctctgtgtccactgcttgtcaacagttagaagtattcagtagggtcctccggactagcctagccacaattctggatggaggcgaggagaatctggagaagaacctgcccgaattcgcaaagatggtttgccacggagagcatacttacctctttgctcaagctatgatgtccgtcctggcccaagaagaacaaggcggctcagctgtgagacgcatcgcacaggaggtgcagcgattcgctcaggaaaagggacatgacgccagccagatcacactggcacttggaacagccgctagctacccgcgtgcttgtcaggccctgggagctatgctgtccaagggtgcacttaatcctgccgacatcactgtgctcttcaaaatgttcacatcaatggacccacccccagtagagctcatccgcgttccggccttcttagatctctttatgcagagcctctttaagccgggcgccaggatcaatcaggatcacaaacacaagtacatccatattcttgcctacgctgcctccgtggttgagacgtggaaaaaaaataaaagggtctcaatcaataaggacgagttgaagagcacgtcaaaggccgtggaaacagtgcacaatttatgttgtaatgaaaacaaaggggcatccgagttggtggcagaactgtccaccttgtatcagtgtataagatttccagtcgttgccatgggcgtcctgaaatgggttgattggacagtgagcgagcctaggtattttcagctccagacggatcatacgcctgtacatctcgctctcctggacgagatttccacgtgccatcagcttcttcatcctcaggtcctccagttgctggtaaagttattcgaaaccgagcattcacagctcgatgtcatggaacaattggagctcaaaaagacgcttctcgatagaatggtccaccttctctctcgcggatatgttcttcccgtggtgagctatatcagaaaatgcctagagaagttggacacagacatttccttgatacggtattttgtcacagaggttttggatgtgattgcacccccatatacctctgactttgtgcaattgtttcttccaattctcgagaacgactccatagctggcaccattaaaactgaaggcgaacacgaccctgttaccgaatttatcgctcactgcaaaagtaatttcatcatggtcaattag

SEQ ID NO: 208510 - DNA, 1773 bp, synthetic construct
  misc_feature 1..1773: note = Description of Artificial Sequence: Synthetic coding sequence
  source 1..1773: mol_type = other DNA
atggccggcgccgtgcccggcgccatcatggacgaggactactacggctccgctgcagaatggggggacgaagctgacggggggcagcaggaggacgactccggtgaaggtgaggatgacgcagaagtgcagcaagagtgcctgcataagttctccactagggattatattatggagcccagcatatttaacaccctgaagagatacttccaggctggcggctctcctgagaacgtgatccagctactatcagaaaattatacggcagtggcccagaccgttaatttactagcagagtggctgatccagaccggcgtggaacctgtacaggtgcaagagactgtcgaaaatcacctcaaaagtctgctgattaaacacttcgacccacggaaggccgacagtatctttaccgaggaaggagaaacacccgcatggctggagcagatgattgcgcatactacctggcgggacctattctataaactcgctgaagcgcaccctgattgtctgatgctaaatttcacggtcaagctgataagcgacgccggatatcagggcgagatcaccagcgtgagcactgcatgccagcagctcgaagtgttttcacgggtgctgagaacctccctggcaaccattttggatgggggcgaggagaacctagaaaaaaatctgccggagtttgccaagatggtatgccacggcgagcatacatacctgtttgcccaggccatgatgtcggttctcgcccaagaagagcaaggtggtagtgctgtgagaagaatagcccaggaggtgcagaggtttgcccaggagaaaggacatgatgctagccagatcactctcgcccttggcaccgccgcctcctacccacgggcatgccaggcactgggggcaatgctctctaagggtgctctgaatcccgccgacatcactgtcctgttcaagatgtttacatctatggatccaccaccagtggaattgatccgcgtgccagcctttctggaccttttcatgcagtccctgttcaagcccggcgcgagaattaaccaggatcacaaacataaatacatccacatcctggcttacgctgcctcagtggtagagacttggaaaaaaaataagagggtatcaatcaacaaagatgagctgaagtccactagcaaggcagttgagacagtccataacctgtgctgcaacgaaaacaagggcgcctccgaactggtagccgaacttagtacactgtaccagtgtattcggttccccgtagtggccatgggcgtgctcaagtgggtggattggaccgtgtcggagccacgctacttccagttgcagacagaccacactcccgtgcacctggctttgttggatgagattagcacttgtcatcagctgctacacccacaggtgctccagctccttgtaaaactctttgagacagagcactctcagctggacgtcatggagcagcttgagttgaagaaaactctgttggatagaatggtgcacctcctgagccgaggatatgtactgccagtggtgtcttatattagaaaatgcctggaaaagttggatacagacattagtttgattcggtacttcgttaccgaagtgcttgatgtgattgcccccccatatactagtgatttcgtgcagctattcctcccaattttagaaaacgatagtatagccgggactataaaaacagagggtgagcacgaccccgtaaccgaatttattgcacactgtaagtccaattttattatggtgaactag

SEQ ID NO: 208511 - DNA, 774 bp, synthetic construct
  misc_feature 1..774: note = Description of Artificial Sequence: Synthetic coding sequence
  source 1..774: mol_type = other DNA
atgcccgcccggtgcgtggccgcccactgcggcaacaccaccaagagcggaaaaagcctgtttcgcttccccaaggaccgcgccgttcgactgctctgggaccgatttgtgcgggggtgccgggctgactggtacggagggaatgacagatctgtaatctgtagcgaccattttgctccagcctgctttgacgtaagttccgtgattcagaagaacctgagattttcacaacgcttaaggctggttgccggagctgttccaaccctccacagagtgccggccccggctcccaaaagaggggaggaaggggaccaggcgggtcggctcgacactcgcggagaactgcaggctgctaggcacagtgaggctgccccagggcctgtgtcctgtaccaggcccagagccggcaagcaggccgccgccagtcagataacatgcgaaaatgagctggtgcaaacacaaccacatgccgacaatccttcaaacaccgtgacaagcgttccgacgcactgtgaggaaggacccgtgcataagtcaactcaaatcagcttgaagagacccagacaccgctccgtaggcattcaggccaaagtgaaagcttttgggaagcggctgtgcaatgctaccactcagaccgaagagctctggtctcgcacatcctcccttttcgatatatacagcagcgacagcgagacagataccgattgggacattaagtcagagcaatccgatctgtcctatatggcagttcaagtgaaggaggaaacctgttag

SEQ ID NO: 208512 - DNA, 498 bp, synthetic construct
  misc_feature 1..498: note = Description of Artificial Sequence: Synthetic coding sequence
  source 1..498: mol_type = other DNA
atggagccccccaagatgaaccccgtggtggagcccctgagctggatgttgggtacttggcttagcgatcccccgggggccggcacctaccctacgctgcagccttttcaatacttagaggaagtgcacatttcccacgtaggtcaacccatgctgaactttagtttcaacagctttcatccagacacccgaaagccaatgcatagagagtgcggctttatccgcttaaagcccgatacaaacaaggtggcttttgtgtccgctcagaatacaggcgtcgtagaagtggaggaaggcgaagtcaacgggcaggaactgtgtattgcttcgcactccatcgctaggataagcttcgccaaggagccacacgtagaacagataacaagaaagttccgtctcaactccgaggggaagctggagcagacggtaagtatggccacaacaactcagcccatgacccagcacctacacgtgacctataagaaagtgacaccgtag

SEQ ID NO: 208513 - DNA, 1734 bp, synthetic construct
  misc_feature 1..1734: note = Description of Artificial Sequence: Synthetic coding sequence
  source 1..1734: mol_type = other DNA
atggtgatctgctgcgccgccgtgaactgcagcaaccggcagggcaagggagagaaacgcgctgtgagctttcatcggtttcctctcaaagactccaagaggctcattcagtggctcaaggctgtgcagcgagacaattggacaccaaccaagtatagttttctctgttcggagcactttactaaggattccttcagcaagcggctggaggatcagcatcggctcctgaaaccaaccgcagttccgtctatttttcacctcacagagaaaaaaagaggggcaggaggacacggccggacacgaagaaaagacgcctccaaagcgactgggggtgtgagagggcattccagtgctgccactagccgaggagctgccgggtggtcgccgagttccagtggcaacccaatggcaaagcccgaatcccggcggctaaagcaggccgccttacagggggaagcaaccccgcgggcagcacaggaggcagccagccaggaacaggcacagcaggcactggagcgcacaccgggggatgggcttgccaccatggttgccggctcccaggggaaggccgaggccagcgccaccgatgccggcgacgagagcgccaccagcagcattgaaggcggcgtgaccgataagagcgggatctctatggacgattttacaccccccggttctggcgcttgcaagttcattgggtccctgcacagctatagtttctcgtcaaagcacactcgcgagaggccctctgttccgcgggaacccatcgataggaagcggctcaagaaagacgttgaaccgtcttgctccgggagttccctgggacccgataaaggtcttgctcaatcccccccttcttccagcctcacagcaacgcctcaaaaaccgagccagagccccagcgccccccctgccgacgtcactcctaaaccagcaacagaagctgtacagagcgagcacagtgacgcatcacctatgtcaataaatgaggtgatcctctcagcatctggggcctgcaagctcatcgactcccttcacagctattgttttagtagcagacagaataaaagccaggtgtgttgtctgcgtgagcaggtcgagaagaagaacggggagctgaagagccttcggcagagagtgtcccggagcgactctcaggtccgtaagcttcaagagaagctggacgagctgcgccgggtgagcgtaccttatccctcatcactcctcagccccagcagggagcctccaaagatgaatcctgtcgtcgagcccttgtcttggatgctgggcacatggctgtcggaccctccgggagccggcacttatccaacactgcagccctttcagtacctggaagaggtgcacatctcccacgtcggtcagccaatgctcaactttagcttcaattcttttcaccctgatacccgtaagcccatgcaccgtgaatgtggcttcatccggttaaagcctgatactaataaggtcgcttttgtcagcgctcaaaacacaggggtcgtggaagtagaagagggcgaggtcaatggccaggaactgtgtattgccagtcactccatcgcccggatctcatttgccaaagagcctcacgtcgaacagattactcgtaagttccggctgaatagcgagggcaagctcgaacagacagtgtcaatggccacgacaacacagcctatgacccagcacctgcatgttacttacaaaaaagtaactccttag

SEQ ID NO: 208514 - DNA, 510 bp, synthetic construct
  misc_feature 1..510: note = Description of Artificial Sequence: Synthetic coding sequence
  source 1..510: mol_type = other DNA
atgagcatcaacgaggtgatcctgagcgccagcggcgcctgcaagctcatagactcattacacagttattgtttctcttctaggcagaacaagagtcaagtatgctgtttgcgcgagcaggtggagaaaaagaacggtgagttaaagtccctgcgccagagggtcagtaggagcgacagtcaagtcaggaagctccaggaaaagctggatgaactgcggcgggtcagtgtgccatatcccagtagtctgctctccccttcacgggagccacccaaaatgaaccccgtggtggagccactgtcttggatgctgggaacttggcttagtgatcccccaggcgccggcacctatccgaccctccagccctttcagtacctcgaggaagttcatatttctcatgtcggacagccaatgctgaacttcagcttcaattccttccaccccgatacgaggaaacccatgcatagagaatgtggcttcatccggctgaagcccggtagttccggatag

SEQ ID NO: 208515 - DNA, 1062 bp, synthetic construct
  misc_feature 1..1062: note = Description of Artificial Sequence: Synthetic coding sequence
  source 1..1062: mol_type = other DNA
atgaagcgggacagctgggtgcccagcaagtaccagttcctgtgcagcgatcatttcacgcctgacagcctcgatattcgctggggcatacgatacctaaagcagacagcagttcctacaatattctccctccctgaagacaatcagggcaaggatccttctaagaaaaaaagccaaaagaaaaacctggaggatgagaaggaagtctgcccaaaggccaagtccgaggaatcctttgtactgaacgagacaaagaaaaacatcgtgaacacagacgtgccacaccagcacccagagctactacatagctcctcgctagtcaagccgcccgcgccaaagacggggtctatacagaacaatatgctgactctcaatctcgtcaagcagcatacaggaaaacctgaaagtacactggagacgtcagtgaaccaggatacagggcgcggagggtttcacacctgctttgagaacttgaactccactaccatcactctaaccacaagtaattcagaatccatacatcagtctctggaaactcaagaggtgctggaggtcacaacctcccaccttgctaacccaaatttcaccagtaactctatggaaattaagagcgctcaggagaatccattcctcttcagcactatcaatcaaacagtagaagaactcaatacaaacaaggagtccgtcatcgccatatttgtgccggcggagaactctaaaccaagtgtcaattccttcatctccgcgcagaaggagaccacagaaatggaagatacggacatcgaagacagcctctataaggatgtagactacggtaccgaagtgttacaaattgagcattcctattgcaggcaggatattaataaagagcacctttggcagaaggtgtccaaactgcattcaaagattactctgcttgaactaaaagaacagcagacactcggccgccttaaaagcctggaggccctgatcaggcagctaaaacaggaaaattggctgagcgaagagaatgtcaaaatcatcgagaatcactttactacctacgaagtgaccatgatttag

SEQ ID NO: 208516 - DNA, 1188 bp, synthetic construct
  misc_feature 1..1188: note = Description of Artificial Sequence: Synthetic coding sequence
  source 1..1188: mol_type = other DNA
atgccccggtactgcgccgccatctgctgcaagaaccggcggggcaggaataataaagacagaaaactgtcattttacccatttcctctacacgacaaagaacgcttggaaaagtggttaaagaacatgaaaagggatagttgggtcccctcaaaatatcaatttctgtgctccgaccactttacacccgattctcttgatatccggtggggaatacggtatctgaaacaaactgcagttcctacgattttttccctcccagaagataatcagggaaaggacccctccaagaagaagagtcaaaaaaaaaaccttgaagacgaaaaggaggtttgtccaaaggcgaaatcggaagaatctttcgtgctgaatgagactaagaagaatattgtgaatactgacgtgcctcaccagcaccccgagctgctccactcctcatctctcgtgaagccacctgcccccaagaccgggtctatccagaacaacatgctcacgctcaacctggtgaagcaacatacaggaaagccagaatcaaccctggagacttccgttaaccaggacactggccgtggagggttccacacctgctttgaaaatctgaatagtacgacaataactcttacaacctcaaacagtgagagtattcaccagtccctcgagacccaggaggtgctggaggtgaccacctctcatctggccaatcccaactttacatcaaacagcatggagatcaagtccgctcaggaaaacccattcctgttctccactataaaccagaccgtggaggaactaaatacaaataaggaaagcgttatcgccattttcgtgcctgccgagaactctaaaccctctgtgaatagtttcatctccgcccagaaagagacaaccgagatggaggataccgatatcgaagacagtttatataaagacgttgactacggaaccgaggtgctgcagatagagcatagttactgcaggcaggatataaacaaagagcacctgtggcagaaagtatccaagctgcacagtaagataactctactggaacttaaagagcaacagacactcgggaggctgaagagcctggaagcccttatacgacagctaaagcaggaaaactggctgtccgaggaaaatgtgaaaatcattgagaaccactttacaacttacgaggtgactatgatatag

SEQ ID NO: 208517 - DNA, 669 bp, synthetic construct
  misc_feature 1..669: note = Description of Artificial Sequence: Synthetic coding sequence
  source 1..669: mol_type = other DNA
atggtgaagtgctgcagcgccatcggctgcgccagccggtgcctgcccaatagtaagctaaaaggcttgacattccacgtgttcccaaccgacgaaaacatcaaaaggaaatgggtattggcaatgaaacgactggatgtcaatgccgccgggatctgggagccgaagaaaggcgacgtgctctgttctcgccattttaagaagaccgattttgacaggagcgccccgaacatcaaattgaagcccggagtgattcctagcatctttgactccccttatcatctgcaaggcaagcgggagaagctgcactgccgaaaaaattttacacttaaaactgtgccagctactaattataatcaccacctcgtgggcgcaagcagttgtatcgaagagtttcagtctcagttcatttttgagcactcctattcagtgatggacagccctaagaaactgaaacataaactggatcacgtgattggagaactggaggatactaaggagtctctccggaacgtgcttgaccgggagaagagattccagaaatccctgaggaagacaatcagagagttgaaagacgagtgtctcatatcgcaggagacagctaatagactggatactttctgctgggactgttgccaggagtccattgagcaggattacatctcgtag

SEQ ID NO: 208518 - DNA, 99 bp, synthetic construct
  misc_feature 1..99: note = Description of Artificial Sequence: Synthetic coding sequence
  source 1..99: mol_type = other DNA
atggtgaagtgctgcagcgccatcggctgcgccagccggtgcctgccgaacagcaagcttaagggacttacattccacgtattccctacagacgagtag

SEQ ID NO: 208519 - DNA, 243 bp, synthetic construct
  misc_feature 1..243: note = Description of Artificial Sequence: Synthetic coding sequence
  source 1..243: mol_type = other DNA
atggtgaagtgctgcagcgccatcggctgcgccagccggtgcctgccgaattctaaactgaaagggttaacctttcatgtgtttccaacagatgaaaatatcaagcggaaatgggtgcttgccatgaaacgcctcgacgtcaacgctgcaggcatctgggagcctaagaaaggcgatgtgctgtgctctcgtcactttaaaaagaccgacttcgataggagcgcgcctaatattaaactgtag

SEQ ID NO: 208520 - DNA, 669 bp, synthetic construct
  misc_feature 1..669: note = Description of Artificial Sequence: Synthetic coding sequence
  source 1..669: mol_type = other DNA
atggtgaagtgctgcagcgccatcggctgcgccagccggtgcctgcctaactcaaagcttaaagggctgacgttccacgtattccccacggatgagaacattaagcggaaatgggtgctggcaatgaagcgcctggatgttaatgcagccgggatatgggagccaaagaaaggagacgtgttatgtagcagacacttcaagaaaaccgatttcgaccgttcagcccccaacataaagctaaagcccggagtgattcccagtatttttgactcaccctatcacctgcagggcaaacgggaaaaactgcactgtaggaagaacttcaccctcaagaccgtcccagcaaccaactataatcaccacctcgttggggccagctcatgcattgaagagttccaatcacagtttatcttcgaacacagctattcagtaatggactccccaaaaaagttgaagcacaaactggatcatgtcataggcgagctggaagacactaaggagtccctgaggaacgtgttagacagagagaaacggtttcagaagagcctgcggaaaacgattagagagctgaaggacgagtgcctgatttctcaggagaccgctaaccgacttgacaccttctgctgggattgttgtcaggagtccatcgaacaggattacatctcgtag

SEQ ID NO: 208521 - DNA, 825 bp, synthetic construct
  misc_feature 1..825: note = Description of Artificial Sequence: Synthetic coding sequence
  source 1..825: mol_type = other DNA
atgcccaagtactgccgggcccccaactgcagcaacaccgccggccgccttggtgccgataatcgtcccgttagcttctacaaatttccgctgaaggacggcccacgactccaggcttggcttcagcatatgggttgtgaacactgggtgccatcgtgccaccagcacctatgctccgaacacttcactccctcatgcttccagtggcgatggggtgtgcggtaccttagacccgatgcagtcccgtctatcttctcaagaggtccccctgctaaatcccaaagacgaacaaggagcactcaaaagcccgtaagcccccctccacccctccaaaaaaacactccattgccccagtcacccgctatccccgtgagtggccccgtaaggctggtggtcttggggcccacatctggaagccccaagactgtggctactatgttgttaacacccttggctcccgcccctacccccgaaaggtcccagcccgaggtgccagcccagcaagcgcagacaggcttgggacctgtgcttggcgccttacagcggcgagttagacgcctccagcgctgccaggaaagacaccaggcccagctccaggccctggagcgcctggcacagcaacttcacggagagtcactattggcgagagcacgaagagggttgcaaagactgactacagcacaaacattgggtccagaagagtcacagacgttcacaattatatgtggcggccccgacattgccatggtattagcccaggatccagccccggcaaccgtagacgctaaacctgaactgctcgatactcgcattccttccgcttag

SEQ ID NO: 208522 - DNA, 825 bp, synthetic construct
  misc_feature 1..825: note = Description of Artificial Sequence: Synthetic coding sequence
  source 1..825: mol_type = other DNA
atgcccaagtactgccgggcccccaactgcagcaacaccgccggcagactgggagccgacaatcgacccgtgtccttctacaaatttccactgaaggacggccccaggcttcaagcatggctgcagcatatggggtgtgagcattgggtacccagctgtcaccaacacttatgttctgaacactttacaccttcctgttttcaatggcgttggggcgtgcgttatctccgtccagatgccgtgccaagcatcttttctagaggacccccggcaaaaagccaacggaggactagatctacccagaaaccagtttctcctccacctccgctacaaaaaaacacacccctcccacagtctcccgcaattcctgtctctgggcctgtccgactggtcgttctcgggcctacctccggtagtcctaaaaccgtcgccactatgctcctgacgcccctcgcacctgcgcccacaccagagcgtagtcagccagaggtgcctgcccaacaagcgcagaccggcctcggccctgtactcggggctctccagcgtcgagtaagaagactgcagaggtgccaagaaaggcatcaggcccagctgcaggcacttgagcgcctggcgcaacagctacacggtgaaagcctcctggctagagccaggcggggacttcaaaggctgaccactgcacagacattgggcccagaggagtcccaaaccttcacgattatctgcggaggtcctgatatcgccatggtactggcccaggaccctgccccagcgaccgtggatgcaaagcccgaacttctggacactaggattccatctgcctag

SEQ ID NO: 208523 - DNA, 390 bp, synthetic construct
  misc_feature 1..390: note = Description of Artificial Sequence: Synthetic coding sequence
  source 1..390: mol_type = other DNA
atgctgctgacccccctggcccccgcccccacccccgagcggagccagcctgaagtgccggcacaacaggcccagacgggactgggtcccgtgttgggcgcactgcaaaggagggtgcgccgcctgcagcgttgtcaggagcgacaccaggcgcagctccaggcactggagaggctggcgcaacagctacatggggagagcttattggcccgcgcccggcgtggactgcagagacttacaacggctcagaccctgggtccagaggagtctcagacatttaccattatttgcgggggccccgacattgcaatggtcctggcccaggacccagctcctgcgactgtggatgctaaacccgaattgcttgatacaagaatacccagcgcttag

SEQ ID NO: 208524 - DNA, 2712 bp, synthetic construct
  misc_feature 1..2712: note = Description of Artificial Sequence: Synthetic coding sequence
  source 1..2712: mol_type = other DNA
atgacccggagctgcagcgccgtgggctgcagcacccgggacaccgttctgagcagagagcgtggcctctcttttcatcagttcccaacagacacaatccagcgctccaagtggatacgtgcagttaatagggtcgaccctcgctcaaaaaagatttggatccctgggccaggggccattttgtgcagcaagcacttccaagaatcggatttcgagtcctatggaataaggaggaaactcaagaaaggagctgtgccctcagtttcactgtataaaataccacagggtgtgcatttgaagggaaaggcacggcagaaaatcctgaagcagcccttacctgataatagccaggaggtagcaaccgaggatcataactactccttaaagaccccacttacgattggagccgagaagcttgctgaggtccaacagatgctgcaggtaagtaagaagagacttatctcagttaagaactaccggatgatcaagaaaagaaaaggcctcaggctaatcgacgcgttagttgaggagaaactgctctcagaggagacagaatgtctactgcgagcccaattctccgactttaaatgggaactgtacaactggagggaaaccgatgagtacagcgccgaaatgaaacagtttgcttgtactctgtacttatgttcgagtaaggtctacgactatgttcgtaaaatcctgaaactgccacacagctctattctcagaacttggctgagtaagtgtcagccctcacccgggtttaatagtaacatattctcattcctgcagaggcgagtggagaacggcgatcagctgtaccaatactgcagcctgctgatcaagagtatgccactcaaacaacaactgcagtgggacccaagtagccactcgctccaaggctttatggacttcggcctggggaagctggatgccgatgagacaccgcttgccagcgagacagtccttttgatggccgtgggcatctttgggcattggaggactccgctcggatatttttttgtgaatcgcgcctccggctacctacaggcccagctccttcgcctgacgattggtaaactttccgacatcgggatcacagtactcgcagtgaccagcgacgcaacagcacactctgtgcaaatggccaaggccctcggaatccatatcgatggagacgatatgaaatgcacgttccagcatccatcaagttcatctcagcagattgcttacttttttgattcctgtcacctgctacgactcattaggaacgcattccagaattttcagagcatacaatttatcaatgggatagctcactggcagcatctggtagaactggtcgccctggaggaacaggagctgagtaatatggaacggatcccgagcaccctcgccaacctgaaaaaccacgtactaaaggtgaactcggcaacgcaactcttttctgagtctgtggcctccgccctagagtacctgctctctctggacttgcccccgtttcaaaattgtattggcacgatacactttcttagactaattaacaatctgttcgacattttcaacagccgtaactgttatggtaaaggcctcaaaggaccactgcttccagaaacctactcaaagatcaatcatgtgttgattgaggcgaaaactatcttcgttaccctctctgatacatccaataaccagattatcaagggcaaacagaagctggggttccttgggtttctccttaatgcagaatcattaaagtggctgtatcaaaactacgtgttcccaaaggtgatgcctttcccctatctgctgacctataaatttagccatgatcacctggaattgttcctaaagatgcttagacaggtccttgtaacaagtagctcccccacatgtatggcatttcagaaggcttactataacctcgagacgagatataaatttcaggatgaggtgttcctgtccaaggtctccattttcgacatctctattgccaggagaaaagatctcgcattatggaccgtgcagcggcagtatggggtttccgtcaccaagacggtttttcacgaggaggggatatgtcaggattggtctcattgctcactgagtgaggccctcctggatctgtccgatcataggaggaatttaatttgttacgcaggatacgtcgctaataagctctcagctctccttacttgcgaagattgcatcacagccctctacgcgtctgatctcaaagccagcaagattggcagcttgctgtttgtgaagaagaagaacggcttacactttccttccgagtcactctgccgcgtcattaatatctgtgaacgcgtggtaaggacacactctcggatggccatctttgaactggtgtcaaaacaacgcgagctgtaccttcagcagaaaattctatgcgagctgagtggccatatcaatctcttcgtcgatgtgaacaagcacctgtttgacggggaagtatgcgcaataaatcatttcgtgaagttgctgaaagacattatcatctgcttcttgaacatccgcgcaaagaatgtagcccaaaatcctctgaagcatcacagcgaaaggacagacatgaagacactaagccgtaagcactggagctccgtccaggactacaaatgttcctccttcgctaacacatctagcaagtttcggcaccttctctcaaatgatggctaccctttcaaatag

SEQ ID NO: 208525 - DNA, 2712 bp, synthetic construct
  misc_feature 1..2712: note = Description of Artificial Sequence: Synthetic coding sequence
  source 1..2712: mol_type = other DNA
atgacccggagctgcagcgccgtgggctgcagcacccgggacaccgttttgagccgtgagcgtggactaagcttccaccagtttcctacggatactattcagagatcgaagtggatcagagctgtgaacagggttgatcctcggagcaagaagatatggatacctggacccggggcaatcctatgttctaagcacttccaggagagcgattttgagagctacgggatccgcaggaagttaaaaaagggggcagtgccatcggtgtcactgtacaagatcccacagggggtgcacctaaagggaaaagcaaggcagaagattctgaagcagccactcccagacaattcacaagaagtggcgacggaagatcataactatagcttaaaaacacctctgacaattggggccgaaaagttagctgaagttcaacagatgctgcaggtgtctaagaaacggttgatctccgtgaaaaactataggatgataaagaagcggaagggacttcgcctgattgatgcactcgttgaggagaaactgctgagcgaggaaactgagtgtctcttacgcgcgcagtttagtgattttaagtgggagttgtacaattggcgagagacagacgaatattcggcagagatgaagcagtttgcttgcacgttgtacctttgttcctctaaggtttacgactacgtccgcaagatcctgaagctgccacatagcagtatcttgcggacgtggctgtcgaagtgccaaccgagccctggatttaatagtaacatcttctccttcctccagagacgcgtggagaacggcgaccaactgtaccaatattgtagccttctgatcaagtccatgcctctgaagcagcaactgcagtgggacccatcgagccacagtctgcaaggctttatggatttcggacttggtaaactcgacgctgacgaaacccctctggcaagtgaaactgtcttattaatggcggtcggcatttttggacattggagaacccctcttggatacttctttgtaaaccgcgcctcgggatacctccaggcacagttattgcggcttacgatcggcaaactaagcgacatcggaattactgttctggccgtgacctcagacgcaactgcccattctgtgcagatggcgaaagcacttggtatacatatcgacggggacgacatgaagtgcactttccagcacccctcatccagctcgcagcagatcgcttatttcttcgactcttgccacctgttgagactgatcaggaacgcttttcagaacttccagtccatacagttcatcaacgggattgctcactggcagcacctcgtcgagctggtcgctctggaggagcaggaattgtcgaatatggaacggatcccgagcacacttgccaatctcaaaaaccacgtgttgaaggtgaactcggccacacagctgtttagcgaatctgttgcctctgccctggaatacctgttgtccttggaccttccccccttccagaactgcataggcactatacactttctgcgattaataaacaacctattcgacattttcaacagccgaaattgctatggtaagggcctgaaaggaccactcctgccagagacttactccaaaattaatcacgtgctcatagaagcaaaaaccatctttgttaccctgagcgatacatcaaataaccagatcattaagggaaaacaaaagttaggatttctcgggtttttgctaaacgccgaatctttaaaatggctatatcaaaactatgtgtttcctaaggttatgccatttccttacctgctcacgtacaagttcagccatgatcatctggaattgtttctcaaaatgcttaggcaagtgctcgtgacaagtagcagcccaacttgtatggccttccagaaggcttactacaatctcgagacgcggtataagtttcaggatgaagtgtttcttagcaaggtaagcattttcgatatctccatcgccaggcgtaaggacctcgcattgtggaccgtccagcgtcagtatggggtctccgtcaccaagacagttttccatgaggaaggcatctgccaagactggtcccattgctctctcagtgaagccctcttagacctctcagatcaccgcagaaacttgatctgttacgcgggttacgtggcaaataaactgagtgctttacttacctgcgaggactgtattaccgccctgtatgcgtcggacctgaaagccagtaaaatcggctccttgttattcgtcaaaaagaaaaatggtctccactttcctagcgaaagcctttgccgggtcattaatatctgtgaacgagtggtacgcacccacagtcgaatggccatcttcgaactggtcagtaagcagcgtgagctgtacctgcagcagaaaattctttgtgagctatcaggtcacatcaatctctttgtcgacgtgaataagcacctattcgacggagaggtgtgcgcaattaaccactttgttaaactcctgaaggatattataatttgttttttaaatattagagcaaagaatgttgcccagaaccccctgaaacatcactcagaacgtactgatatgaagacgctcagcaggaagcattggagttccgtgcaagattataagtgttccagcttcgctaatacctcatctaagttccggcacctgctcagcaatgacggctacccctttaaatag

SEQ ID NO: 208526 - DNA, 642 bp, synthetic construct
  misc_feature 1..642: note = Description of Artificial Sequence: Synthetic coding sequence
  source 1..642: mol_type = other DNA
atggtgcagagctgcagcgcctacggctgcaagaaccggtacgacaaagataagccggtgagctttcacaagtttccacttacccggccatcattgtgtaaggaatgggaggcagctgtgagaaggaagaatttcaaacctaccaaatatagcagcatctgctccgagcatttcaccccagactgcttcaaaagggagtgtaataataagctgctgaaagaaaacgcggtgccgacaatcttcctgtgtacagagccccacgacaagaaggaagacctcctcgagccccaggagcagttgcctcccccccccttgcctccccccgttagtcaagtcgacgccgccattggtttgcttatgccaccactccagacaccggtaaatctttctgtcttttgtgaccataattataccgtggaggataccatgcatcaaagaaagcgcatccatcaactcgaacagcaggtggagaagttgcgtaagaaactaaaaaccgcccagcagaggtgcagacgccaggaacgacagctggagaagcttaaggaagtggtgcatttccaaaaggaaaaagatgacgtgtctgagagaggatatgtgattctccccaatgactactttgaaatcgtggaagtaccggcttag

SEQ ID NO: 208527 - DNA, 162 bp, synthetic construct
  misc_feature 1..162: note = Description of Artificial Sequence: Synthetic coding sequence
  source 1..162: mol_type = other DNA
atggtgcagagctgcagcgcctacggctgcaagaaccggtacgacaaggataaaccagtatcctttcacaagaaaaaaatcttctggtcgcaccgtaattcatttccccatctcttgtacaggttgctgttcccacggttaatgctgctgctcgattactag

SEQ ID NO: 208528 - DNA, 687 bp, synthetic construct
  misc_feature 1..687: note = Description of Artificial Sequence: Synthetic coding sequence
  source 1..687: mol_type = other DNA
atgcccaccaactgcgccgccgccggctgcgccaccacctacaacaagcatatcaacatcagttttcacagattcccgcttgacccaaaaaggaggaaagagtgggttagactcgtgagacgcaaaaattttgtgccaggcaagcacacattcctctgttccaagcactttgaagccagttgcttcgatctaacgggccagacccgaaggttgaaaatggacgccgtgcctacaatcttcgacttttgtacacatatcaagtccatgaaacttaaaagtagaaacttgttaaaaaagaacaacagttgcagcccagccggccctagtaatctgaagtcgaacattagttctcagcaggtcctcctggagcattcctacgcctttcggaaccctatggaggccaaaaagaggatcataaaactggaaaaggaaatcgcttctttaagacgcaagatgaaaacctgcctgcaaaaagagcggcgtgccactcgccggtggattaaagcaacctgtctggtgaaaaatctggaggccaactccgtgctgccaaaaggcacctcagaacacatgctgcctacagctctgtcaagcctccctctagaggactttaaaatccttgaacaggaccaacaggacaaaacgctgttgagcctgaatctgaagcagaccaagagcacattcatttag

SEQ ID NO: 208529 - DNA, 720 bp, synthetic construct
  misc_feature 1..720: note = Description of Artificial Sequence: Synthetic coding sequence
  source 1..720: mol_type = other DNA
atgcccaagagctgcgccgcccggcagtgctgcaaccggtacagctcgcgcagaaaacagctgacattccatcgtttcccgttcagcagacctgagctgctgaaagaatgggtactcaacattgggcgggggaatttcaaaccaaagcagcacactgtcatatgctcagagcattttcgcccagaatgcttctctgcatttggcaatcggaaaaatctaaagcataacgccgtgccaacagttttcgccttccaggatcccacacaacaggtccgggagaacactgaccctgcgagcgaaaggggaaacgcctcatctagccagaaagagaaggtactgcccgaggccggcgcaggagaagacagccctggaaggaatatggacacggctctcgaggagcttcagctgcctcccaatgccgaaggacacgtcaagcaggtgtcgcccaggcgacctcaagccactgaggccgtcggtcgcccaactggccccgccgggctgagacgtacccccaataaacagccatctgaccactcctacgctctgctcgacctagacagtctcaagaaaaaacttttcctcactctgaaagagaacgagaagctcagaaagcgcttgcaggcacagcgattagtgatgcgtaggatgtcttcaaggcttagagcttgtaagggtcatcagggactgcaggcacggctcgggcctgagcagcaatcctag

SEQ ID NO: 208530 - DNA, 717 bp, synthetic construct
  misc_feature 1..717: note = Description of Artificial Sequence: Synthetic coding sequence
  source 1..717: mol_type = other DNA
atgcccaagagctgcgccgcccggcagtgctgcaaccggtacagctcacgccggaagcagctaacatttcacagatttcccttttcaagaccagagctgttgaaggaatgggtgctcaatatcggcaggggtaactttaagcccaaacagcacacagtcatttgctctgagcacttccgcccagagtgtttctccgccttcggcaaccgcaaaaatctgaagcataatgccgtgccaacggtcttcgcctttcaggaccccactcaggttagggagaatactgaccccgcaagcgaaagaggcaacgcctctagctctcagaaggaaaaagtattgcctgaggcaggtgccggagaggattctcccggcagaaacatggacactgccctggaggaactccaactccctccgaacgcagaggggcatgtgaagcaagtcagtcctaggcggccccaggcgacagaggcagtgggcagaccaaccgggcccgcagggttaagacggacccctaataaacagccttccgaccatagctacgcactgcttgatttagattcgctgaagaagaaactgttcctgaccctgaaagagaatgagaagcttcgaaagcgactccaggcccagagactggtgatgagaagaatgtctagtcgcctgagagcttgcaagggacatcagggactgcaggccagactgggaccagagcagcaaagctag

SEQ ID NO: 208531 - DNA, 528 bp, synthetic construct
  misc_feature 1..528: note = Description of Artificial Sequence: Synthetic coding sequence
  source 1..528: mol_type = other DNA
atgcccaagagctgcgccgcccggcagtgctgcaaccggtacagctcgcgtcgaaagcagctaacctttcaccgctttccgttcagtcggcccgagctgctcaaagagtgggtgctaaacatcgggcgaggaaatttcaaacccaaacagcacacggtcatttgcagcgaacactttagacctgaatgttttagtgcgtttggaaataggaagaacctgaaacacaatgctgtccctacggtgtttgcctttcaagaccccacacagcaggtgagagagaataccgatccggcatccgagcggggtaatgcatcgtccagccagaaggaaaaaacaagcccctgcaggagtcaggtgctccccgaggccggagcaggtgaagacagtccagggcgcaatatggataccgccttggaagaactccagctccctcccaacgccgaaggccatgtcaagcaggccatgttattcaacgtggaaaacggcacgcccgcttctcgagaggcattgtggctgtcggaagaatag

SEQ ID NO: 208532 - DNA, 732 bp, synthetic construct
  misc_feature 1..732: note = Description of Artificial Sequence: Synthetic coding sequence
  source 1..732: mol_type = other DNA
atggagcacgccttcacccccctggagcccctgctgagcaccggcaacctgaaatactgcttggtgatcctgaatcagcccttggacaactatttcaggcacctttggaacaaagctctcctgcgagcatgcgcagacggaggcgcaaaccggctgtatgatattacagaaggagagcgggaaagcttcttgcccgagttcatcaacggggacttcgatagcattcgaccagaggttcgagaatattatgctaccaaggggtgcgagctgataagcactcccgatcaggaccacaccgacttcactaagtgtttaaagatgttacagaagaaaatagaggaaaaagatctgaaggtcgatgtcatagtgactctaggggggctggctggtagattcgatcaaattatggcgtcagtcaatactctgtttcaggctactcacattacaccattcccaatcattattatacaagaagaaagcttgatttacttactgcagccgggaaagcaccggctccacgtggacacgggtatggaaggcgactggtgtgggctgattccggtcggtcagccctgcatgcaagtcaccacaacaggcctcaagtggaatcttacaaatgacgtcttggcttttgggacacttgtgtcaacttccaacacatacgacggcagcggcgtcgttactgtagagaccgaccatcctctcttgtggacaatggccattaagtcatag

SEQ ID NO: 208533 - DNA, 585 bp, synthetic construct
  misc_feature 1..585: note = Description of Artificial Sequence: Synthetic coding sequence
  source 1..585: mol_type = other DNA
atggagcacgccttcacccccctggagcccctgctgagcaccggcaatctgaagtactgtctagtgatcttaaatcaacccttggacaactatttcagacacctttggaataaagccctgctccgggcctgcgccgacgggggggcaaacagactttatgatataactgaaggtgagcgtgaatcctttcttccagaattcattaacggtgacttcgactcaatccgtcccgaggtccgggagtattacgccacaaagggctgtgaactaatcagtactccagatcaggaccacactgatttcaccaaatgtcttaagatgttacaaaaaaaaatcgaggaaaaggacctgaaaggaaagcatagactgcacgttgacactggaatggaaggcgattggtgcggcttgattccagttggacagccctgtatgcaggtgaccaccactgggctgaagtggaatctgacaaacgacgtcctggctttcggtacattggttagcactagcaacacgtatgatggatccggcgtcgttaccgttgagactgaccatcctcttttatggacaatggcgatcaagtcctag

SEQ ID NO: 208534 - DNA, 375 bp, synthetic construct
  misc_feature 1..375: note = Description of Artificial Sequence: Synthetic coding sequence
  source 1..375: mol_type = other DNA
atggtggacgtgatcgtgaccctgggcggcctggccggccggttcgatcagattatggccagcgtgaataccctgttccaggccacacacatcaccccgttccccatcataatcatacaagaggaaagccttatctacttactgcagcctggcaagcatcgcctgcacgtggacactggtatggaaggcgattggtgtggcctgatcccagtggggcagccttgcatgcaagttaccacaacagggctgaagtggaacttaagaacttgcgattacactaggactacctggatcgccaaggataaccctgtcccacgtctgatccggctgattcgactgaaccacatatgcaaggttccgctggcaatcaagtag

SEQ ID NO: 208535 - DNA, 504 bp, synthetic construct
  misc_feature 1..504: note = Description of Artificial Sequence: Synthetic coding sequence
  source 1..504: mol_type = other DNA
atggagcacgccttcacccccctggagcccctgctgagcaccggcaatctaaaatactgtctggttatcctcaaccagccactggataattactttaggcacctgtggaataaggcgctgctgagagcttgtgcagacgggggtgcaaaccgcttatacgatattacggagggggagagggaatccttcctcccagagtttattaatggcgattttgacagcatccgtcccgaagtgagggagtattatgccacaaagggttgtgagctgattagcaccccagaccaggatcacaccgattttacgaagtgtttaaaaatgttacagaagaagatagaggagaaggatctgaaggttgatgttatcgtaactttaggtggcttggccggaaggttcgaccaaattatggcctccgtgaatacactctttcaggccacccacatcactccgttccctattatcattatacaggaagagagtctgatatacttgcttcaaccatag

SEQ ID NO: 208536 - DNA, 693 bp, synthetic construct
  misc_feature 1..693: note = Description of Artificial Sequence: Synthetic coding sequence
  source 1..693: mol_type = other DNA
atggcccagggcctgatcgaggtggagcggaagttcctgcccggccccggaaccgaggagcgcctgcaagaactcggaggaacactcgaatacagggttacctttcgggacacctactatgatacacccgagctgtcgttgatgcaggctgaccattggttacgtagaagggaggatagtggatgggagctgaagtgccccggcgctgcgggcgttctgggacctcatacagagtacaaagaactaacagctgaaccaaccatagtagctcaactctgtaaagtgctgcgggctgacgggcttggtgccggtgatgtggcagcagttctcggccctttagggctgcaggaagtggccagttttgtcactaagaggagcgcctggaagctagtgctcctgggagcagacgaagaagaaccgcagctgcgggtggatcttgacacagcagacttcgggtatgcagtaggcgaggtggaggcactcgtgcacgaggaggctgaggttccaaccgctctggagaaaattcaccgcttaagctccatgcttggggtgcctgcccaggagaccgcccccgccaagctaattgtttatcttcagagattccgaccgcaggactatcaaaggcttttggaagtgaactcctctcgcgagagaccccaggagaccgaggacccagatcactgcctgggatag

SEQ ID NO: 208537 - DNA, 693 bp, synthetic construct
  misc_feature 1..693: note = Description of Artificial Sequence: Synthetic coding sequence
  source 1..693: mol_type = other DNA
atggcccagggcctgatcgaggtggagcggaagttcctgcccggccctggcacggaggagaggctgcaggagctgggaggcaccctcgagtatcgagtgacctttagagacacctactacgacacgccagaactgtctctgatgcaagcggatcactggctgagaagacgcgaggatagtggatgggagctgaaatgtccaggggcagcgggagtccttggccctcacaccgagtataaggagttaacagcggaaccaaccattgttgcccagttatgtaaagtccttagagccgacggactgggagcgggagatgtggctgccgttctgggccctttaggcctccaagaagtggccagttttgtcacaaaacgcagtgcctggaaattggtgttgctcggagcagacgaagaggagccccaactaagagtagacctggacaccgccgatttcggatatgccgtgggcgaagttgaagccctggtgcacgaagaggccgaggtgcccactgcgcttgaaaagatacaccgccttagttccatgctgggagtgcccgctcaagagacagcccctgcaaagctgatcgtgtacctgcaacgatttcgcccacaggattaccagaggttacttgaagtgaatagctcccgggaacgccctcaagagaccgaggatccagaccactgtctaggctag

SEQ ID NO: 208538 - DNA, 372 bp, synthetic construct
  misc_feature 1..372: note = Description of Artificial Sequence: Synthetic coding sequence
  source 1..372: mol_type = other DNA
atggcccagggcctgatcgaggtggagcggaagttcctgcccggcccagggactgaggaacgcttacaggaactggggggaacgctggagtaccgcgtgacctttcgcgacacgtactacgacacccctgagctgagtctcatgcaggctgaccattggctgcggcgtagagaagatagtgggtgggaattgaagtgtcccggcgccgccggagtcttaggcccgcatacagaatacaaagaactaactgcagagccaacaatcgtcgctcaactttgtaaggtgcttagggcggacggccttggcgcaggtgacgttgctgctgtattgggcccactcggtctccaggaggtggcaagttttgtgacttag

SEQ ID NO: 208539 - DNA, 2070 bp, synthetic construct
  misc_feature 1..2070: note = Description of Artificial Sequence: Synthetic coding sequence
  source 1..2070: mol_type = other DNA
atgaagccccccgccgcctgcgccggcgacatggccgacgccgccagtccatgttcagtggtaaacgacctgcgctgggacctgagcgcccaacaaattgaggagagaacgagggagctgatcgagcagaccaagagagtgtacgaccaggtgggtacacaagagttcgaagacgtctcttacgaaagtacactgaaggccctggccgacgtggaagttacttacactgtgcagaggaatattttggatttcccccagcacgtctctcccagtaaggacattcggacggcgagtacagaagccgacaagaagctcagtgagtttgacgtagagatgagcatgcgagaggacgtataccagaggattgtgtggctgcaggaaaaggtgcagaaagactctctcagaccggaagccgctcgttaccttgagcgactgataaaacttggcagacgaaatgggctgcacctgcctcgcgaaactcaggagaatataaagcgcatcaaaaagaagttatccttgctgtgtattgactttaacaagaatctgaacgaagataccacattcttgccattcactctacaggagttagggggactccctgaggactttctcaacagtctcgagaagatggaagatggcaaactcaaagttacattaaagtatccacactatttccccttgctgaaaaagtgccacgtgcctgaaacccgacgtaaagtggaggaagccttcaactgtaggtgtaaagaggaaaactgcgccattctcaaggaactggtgaccctacgagcacagaaatctcggcttctcggctttcatacccatgcagactatgtgttagagatgaatatggccaagacttcacaaaccgttgcaacatttcttgacgaacttgcgcagaaactcaagccgctcggtgagcaggagagggctgtgatactcgagctgaaacgcgcagagtgcgaacgcaggggtctaccctttgacggccgcattcgcgcttgggatatgcggtattacatgaatcaagttgaagagactagatactgcgtagatcaaaaccttctgaaggaatatttccccgtccaggtggtcactcacggtctcttaggcatctatcaggaacttctagggctggctttccatcatgaagagggcgcgagcgcctggcacgaggacgtgagactgtacaccgccagggatgcggctagcggcgaggtggttggaaagttttacctggatttatatcctcgggagggaaagtatgggcacgcagcatgctttgggttacaaccaggatgtctgcggcaagatggatcacggcagatcgctattgctgccatggtggccaactttactaaaccaactgccgacgcccctagtctcctgcagcatgacgaagtggaaacttacttccatgagttcgggcacgtaatgcatcagctttgctcacaggcagaattcgctatgttttcgggcacccatgtggagcgggattttgtcgaggctccctctcagatgctggaaaattgggtgtgggagcaggagccactactcagaatgtcacgccactaccggaccggctcagccgtgcctagagagttgctggagaagcttattgagtccaggcaagcgaacaccggcctatttaatctgcgacaaatagtcctcgctaaggtggatcaggctctccatacacagacagacgccgaccctgccgaggagtatgctaggctctgtcaggaaattctgggcgtgcctgctactcctggtactaacatgccagctaccttcgggcatctggcaggcggctatgatgcccaatattacgggtatctctggagtgaggtgtattctatggacatgtttcacactaggtttaagcaggaaggggtgctcaacagtaaggtagggatggactaccggtcctgtattctgcggccaggcggatccgaggatgcgtcagccatgctccgtaggtttctcgggcgcgaccctaagcaagatgctttccttctctctaagggactgcaagtgggtggatgtgagccagagccgcaagtctgttag

SEQ ID NO: 208540 - DNA, 777 bp, synthetic construct
  misc_feature 1..777: note = Description of Artificial Sequence: Synthetic coding sequence
  source 1..777: mol_type = other DNA
atgttcagcggcacccacgtggagcgggacttcgtggaggccccctcccagatgctcgaaaattgggtgtgggaacaggaacccctgctcaggatgtcgagacattatcgcactggatccgccgtgccacgagaactccttgagaagctgatagaatcccgtcaagctaacactggcctttttaacctgcggcaaatcgtgcttgcaaaggtggaccaggctctgcatacccagactgacgctgacccagcagaggagtatgccagactttgccaagaaattcttggcgtcccggcaactccaggcaccaatatgccagctacattcggacatttggccggaggctacgacgcacagtattatggctacctctggagcgaagtgtacagtatggatatgttccacacgagattcaaacaagaaggtgtgttaaattctaaattcccgcattatgaggtgcgtcctctaaggcacgtgtccctctgcctcccgctgacctggtgcgatccgggatccggtcaaccgcctgagagtctcaccaggaaccgctggttgcccgcactgcgggctgggcctgccctgccgggatgcaacatcgcccttggatcactgcaggtagggatggactacagatcatgcatcttgcgacctggaggatccgaggacgcatccgcgatgctacgccgcttccttggcagagacccaaagcaggatgccttcctcctctcgaaaggactccaggtcgggggatgtgagccagagccacaggtctgttag

SEQ ID NO: 208541 - DNA, 738 bp, synthetic construct
  misc_feature 1..738: note = Description of Artificial Sequence: Synthetic coding sequence
  source 1..738: mol_type = other DNA
atggacggcacccggaccagcctggacatcgaggagtacagcgacaccgaagtgcagaaaaatcaagtcctcaccttggaggagtggcaggataaatgggttaacggaaagactgcgtttcaccaagagcagggacaccaattgctgaagaagcatctggacacatttctcaaggggaagtcaggactgagagtttttttccctctttgcgggaaagccgtcgagatgaaatggttcgctgatagaggccactctgtggtaggagtggaaatctctgaactcggaattcaggagttcttcactgaacagaacctgtcttattctgaagagcccatcacggaaatccccggcacaaaggtgttcaaaagctccagcggaaacatctccctgtactgctgctcaatttttgacctgccccgtacaaatatcggcaagtttgacatgatttgggatcggggggctctcgttgcaatcaatccgggcgacagaaagtgttatgcagataccatgttctctctcttgggtaaaaagtttcagtatctgctgtgtgtcctttcctatgatcctactaaacaccctggacctcctttctatgtcccacatgccgaaatcgagcgcctcttcggaaaaatctgtaatattcggtgtctggagaaagtggatgcctttgaagagagacataagagctggggaattgactgtttgttcgagaagctctacctactgactgagaaatag

SEQ ID NO: 208542 - DNA, 519 bp, synthetic construct
  misc_feature 1..519: note = Description of Artificial Sequence: Synthetic coding sequence
  source 1..519: mol_type = other DNA
atggagacccggccccggctgggcgccacctgcctgctgggcttctcatttctcctcctcgtcatcagctccgatggtcataacggcctagggaagggatttggtgaccacatacactggagaactctagaggacggcaagaaggaggctgcagcgtctggccttccgctcatggtgatcatccataagagttggtgtggcgcctgcaaggccctcaaacctaaatttgctgaatccaccgaaatctccgagctctctcataattttgtcatggtgaacctcgaggatgaggaggagccaaaggacgaagatttttctccggacgggggatatattcctaggatcttgttcctggatcctagcggaaaggtccaccctgagatcatcaacgaaaacggtaaccctagctataagtacttttacgtgtctgccgaacaggtggttcagggcatgaaggaggctcaagaacgcctgactggcgatgccttcaggaagaagcacttagaggatgaactctag

SEQ ID NO: 208543 - DNA, 1767 bp, synthetic construct
  misc_feature 1..1767: note = Description of Artificial Sequence: Synthetic coding sequence
  source 1..1767: mol_type = other DNA
atggccagcaagaagcgggaggtgcagctgcagaccgtgatcaacaaccagtccctttgggacgagatgctgcagaataaaggcctcacagtgattgacgtataccaggcttggtgcggcccgtgtcgcgccatgcagcctctctttcgaaagttgaagaatgagctgaacgaggacgagatcttgcacttcgcagtcgcagaggcagataacatagtgaccctgcaaccgtttcgcgacaagtgcgaacctgtgttcctgttcagtgtcaacggcaaaatcattgaaaagatacagggcgccaacgcacctttggtcaacaagaaggttatcaatctgatcgatgaggaacgaaaaattgctgccggtgagatggctcggccacagtatccggagattccattggtggattctgattcagaagtgagcgaggagagtccatgtgagagcgtgcaggaactctactcaatcgcaattataaagccagatgctgtgatatccaagaaagtcctagagataaaaaggaaaattaccaaggctgggttcattatcgaggctgagcacaaaactgtactgaccgaggagcaggtcgtaaacttctactctcgtatcgcagaccagtgtgacttcgaagaatttgtgtcttttatgacctctggtctgtcttacatcctggtggtttctcagggaagtaagcacaacccaccttctgaagaaaccgagccacagaccgatacagagccaaacgagagaagtgaggatcaacctgaggtagaagctcaggtgacccctgggatgatgaagaacaagcaagactcgctgcaagagtacctcgagcgtcaacacttggcacaattatgcgatattgaagaagatgctgcgaacgtcgctaaattcatggacgcctttttccctgactttaaaaaaatgaaatccatgaagctggagaaaaccctggctctgctcagacctaacttatttcacgagcgcaaagacgacgtcctgcgcatcattaaagacgaggatttcaaaatcctcgagcagcgccaagtagtgttgtccgaaaaagaggcacaggcgctgtgtaaggaatacgaaaatgaggactactttaataagttgatcgagaatatgacttctggcccctcactggcccttgtgttactgagggacaacggactgcaatattggaaacagctgctgggccctcggaccgtggaagaggccatcgaatacttccctgaatccctgtgcgcacagttcgccatggacagtctccccgtgaatcaattatacgggagcgatagcctggaaacagctgaacgtgaaatccagcatttcttccctcttcagtccacactaggactcatcaagccgcacgccaccagcgaacagcgtgaacagatcctcaaaatcgtgaaagaggctggttttgatctaacacaggtgaagaagatgtttttgacaccagagcagatcgagaagatctaccccaaggtgaccggaaaggatttttacaaagacctgctggaaatgttgtcggtgggaccatcgatggtgatgatattgaccaaatggaatgcagttgcggagtggagacggttgatgggacctacggacccagaagaggccaagttattgtcacctgactcaatccgcgcacaattcggcatcagcaagcttaagaatatagtgcatggcgcatctaatgcatacgaggccaaagaagtcgtgaatagactgtttgaggatccggaggaaaattag

SEQ ID NO: 208544 - DNA, 1767 bp, synthetic construct
  misc_feature 1..1767: note = Description of Artificial Sequence: Synthetic coding sequence
  source 1..1767: mol_type = other DNA
atggccagcaagaagcgggaggtgcagctgcagaccgtgatcaacaaccaatcactgtgggacgaaatgcttcagaataaaggcctaacggtcatcgacgtctaccaggcttggtgcggtccttgtagagccatgcagccgctgttccggaaactcaaaaacgaactgaatgaggatgaaattctgcacttcgctgtggctgaggcggacaatatagtaactctgcagccgttccgtgacaaatgtgagcccgtattcctattctccgtgaacggaaaaatcatcgagaaaatacaaggcgctaacgctccgctggtgaataaaaaagtcattaaccttattgacgaggagagaaagatcgccgcaggagagatggcacgacctcagtaccctgagatcccattggtcgactccgattccgaggtctccgaggaatctccatgcgagtcggtgcaggagttgtattccattgctattatcaaacctgatgcagtaatctcaaagaaggtgctggagattaaaagaaagatcaccaaagcaggctttatcatagaagcagaacacaagacggtcctgactgaggagcaagtcgtaaatttctattcgcgaattgccgatcagtgcgactttgaggaatttgtatctttcatgacctcaggtcttagttacattctggtcgtgagtcagggttctaagcataaccctccaagtgaagagaccgagccccagaccgacacagaacccaacgagagatccgaggaccagcccgaggtggaagctcaggttactcccgggatgatgaagaataagcaggactccctgcaggagtacctggagcgacagcatctggcccaattatgtgatatagaggaggacgcagccaacgttgcaaagttcatggatgcattttttcctgacttcaaaaaaatgaaatcaatgaaactcgagaagacgctcgcgttactacggccaaatcttttccatgagaggaaggatgacgtgttacgcatcatcaaagacgaggactttaaaatactggaacagaggcaggtggtgctgtccgagaaagaggctcaggctctgtgcaaagaatatgagaacgaagattattttaacaaactgatagagaacatgacttcgggtccgtctctcgcactggtcttactcagagataatggactgcagtattggaagcagctactgggccctagaaccgtggaggaggcaatcgagtacttccccgagtccttgtgcgctcagtttgctatggacagcctgcctgtgaaccagttatatggtagcgattcattggaaacagcagagagggagatccagcacttctttcctctgcaatctactctcggtttgatcaagccacatgcgaccagcgaacagcgcgaacaaatactcaaaattgtgaaagaggccggctttgacttgacccaggtcaagaagatgttcttgactcctgaacagattgagaaaatatacccaaaggtaacagggaaagacttttacaaagatctgctggagatgctgagcgttggaccctcaatggtgatgattttaacgaagtggaatgcagtcgctgagtggcgacgactgatgggtcccaccgaccctgaggaagccaaactcctgagccccgactctattagagcgcaatttggtatttctaaactgaagaacattgtccatggcgcaagcaacgcttatgaggcgaaagaggtggtaaacagattgtttgaggatccagaggaaaattag

SEQ ID NO: 208545 - DNA, 681 bp, synthetic construct
  misc_feature 1..681: note = Description of Artificial Sequence: Synthetic coding sequence
  source 1..681: mol_type = other DNA
atggaggccgacgccagcgtggacatgttcagcaaggtgctggagcaccaactgctgcaaactaccaagctggtggaagagcaccttgattccgagattcagaaactcgaccagatggacgaagatgaactggaacgtcttaaagaaaaacggctccaagcactgcgaaaggctcagcagcagaaacaggagtggctctctaagggacacggagagtacagggaaattccttccgagcgggatttcttccaggaggtgaaggaaagcgaaaacgtcgtgtgccacttctacagggattccacatttcggtgcaaaatcttggaccgtcacctcgccatcctgtccaaaaagcatttggagacgaaatttctgaaattaaatgtagaaaaggccccgtttctctgcgagcgcctgcacatcaaagtgattccaaccttggctttactcaaggatggaaagacgcaagactacgttgtcgggttcactgatctggggaacaccgatgactttaccacagaaactttagagtggcggttggggagttctgacatactgaactacagcggcaacctaatggagcctccttttcaaaatcagaaaaagtttggcaccaattttactaagctcgagaaaaagactataaggggcaagaaatatgattccgactctgatgatgactag

SEQ ID NO: 208546 - DNA, 408 bp, synthetic construct
  misc_feature 1..408: note = Description of Artificial Sequence: Synthetic coding sequence
  source 1..408: mol_type = other DNA
atggaggccgacgccagcgtggacatgttcagcaaggtgctggagcatcagctgctccagacaactaaactagtagaggaacacctcgattctgagatccaaaaactggaccagatggatgaagacgaattagagcgactgaaagagaagaggcttcaggctctccggaaggctcaacagcagaagcaggagtggctctccaaaggccatggagagtatcgcgagatcccatccgaacgcgacttctttcaggaggtcaaggagtctgagaacgtggtgtgccacttctatagagactctaccttccgctgtaaaatcttggatcggcaccttgccatccttagtaagaagcatctggagactaaattcctgaagctgaatgtggaaaaggcaccgttcctttgctag

SEQ ID NO: 208547 - DNA, 627 bp, synthetic construct
  misc_feature 1..627: note = Description of Artificial Sequence: Synthetic coding sequence
  source 1..627: mol_type = other DNA
atgagccagaagagcctggccccccggctgaacagcgtgcccttcggacgtatggaggctgatgcaagcgtagacatgttttccaaggtgttggaacaccaactcttgcaaaccactaaactggtcgaggaacacctagactccgagatccaaaagctggatcaaatggatgaggacgagctggaaagacttaaggagaagaggctccaagcactcaggaaggctcaacagcagaaacaggaatggctgtcaaagggacacggggaatacagagagatcccgtctgaacgcgatttttttcaggaagtgaaggagtctgaaaacgtggtctgtcatttttaccgagactctacttttcgctgtaagatcctggacagacaccttgccatactctcgaagaagcacttagagacaaagtttctcaagctgaacgtcgagaaagcaccattcctgtgtgaacgtctgcatataaaggtgattcccaccctggcgttactgaaggacgggaagactcaagattacgtggtagggtttaccgacctgggaaacacagacgacttcaccaccgagacgctggaatggagactgggctcatctgatatccttaactatcggtggtggccgtag

SEQ ID NO: 208548 - DNA, 1017 bp, synthetic construct
  misc_feature 1..1017: note = Description of Artificial Sequence: Synthetic coding sequence
  source 1..1017: mol_type = other DNA
atggccgccatggccgtggccctgcggggcctgggcggccggttccggtggaggacccaggctgtagcagggggggtccgtggcgctgcaagaggagcagcagcaggtcagcgggattacgaccttctggttgtcggggggggctctgggggactggcctgtgccaaagaggcagctcagctcggaagaaaggtcgctgtagtggattacgttgaaccttctccgcaaggcacacgatgggggctaggtgggacatgtgtaaatgttgggtgcatacccaagaagctaatgcatcaggccgcactcctaggaggactgatccaggatgctcccaattacggttgggaggtggcccagcctgtgccccacgattggcggaagatggctgaggccgtgcagaaccacgtgaaaagtctgaactggggccacagggtccagttgcaggaccgcaaggttaaatacttcaatataaaagcatctttcgtcgacgaacacactgtctgcggcgtagcaaaaggagggaaagaaattctcctttcagccgaccatattatcatcgcaaccggcggacgcccacggtatccgacccatatcgagggggctctcgaatacggaataacttccgatgacatcttctggttgaaggaaagccccggaaaaaccctggtggtcggagcctcatatgtggccctcgagtgcgccgggtttcttaccggtatcggattggacaccaccatcatgatgaggtcaatcccgctgcgagggtttgaccagcagatgagttcgatggtcatagagcatatggcctcccacgggacgagattccttaggggttgcgccccaagtcgtgtccgcagacttcccgacgggcaactgcaggtgacctgggaagacagtacaactggcaaggaagacacgggcacctttgacactgtgctttgggctatagcaccttgcatctccgcttgccttcccaccactgttggtcatgccgggaagaaccaacgtagggattag

SEQ ID NO: 208549 - DNA, 1485 bp, synthetic construct
  misc_feature 1..1485: note = Description of Artificial Sequence: Synthetic coding sequence
  source 1..1485: mol_type = other DNA
  misc_feature 1..1476: note = DNA
  misc_feature 1477: note = RNA
  misc_feature 1478..1485: note = DNA
atggaggaccaggccggccagcgggactacgacctgctggtggtgggcggcggcagcggaggcctcgcctgtgccaaggaagctgcacaactcggtcgaaaggtggccgtcgtggactacgttgagcctagtccacagggtactagatggggattgggaggaacctgcgtcaacgtaggatgtatccctaagaaactgatgcaccaagccgccttactgggcggactcatccaggacgctccaaattatggttgggaggtcgcacagccagtccctcatgattggcgcaagatggccgaggccgtgcaaaaccacgtcaagagcctaaactggggtcaccgggtccaactgcaggatcgcaaagtgaaatattttaacatcaaggcaagcttcgtagacgaacataccgtctgtggagtcgcaaagggtggaaaggaaattttacttagcgcagaccacattattatcgcaacaggcggccggccacgataccctacacatattgagggtgctctggagtatggcatcacttccgatgatattttctggcttaaagaaagtccagggaaaaccctagtggtaggggctagctatgtggctctggagtgcgcagggttcttgacaggcatcggcctggatacaacgattatgatgagaagcatcccgctgcgcggattcgaccaacagatgagttcaatggtgattgagcatatggcgtcccatggaacccgcttcctgcgaggatgtgccccatctcgagtgcgacgcctgccagacggccagctacaggtgacttgggaagactccactaccgggaaagaagacacgggaacttttgacactgtcctctgggccatcggacgggttcctgatactcgttcgctcaacctggaaaaagcaggcgtcgatacctcaccagatactcagaagatccttgtggactccagggaagcaacgtcagtcccccacatttacgccatcggtgatgtagtcgagggccggcccgagttaactcccattgctattatggccggacgactgctcgtgcaaagattgtttggcggctcaagtgatctgatggactatgataatgtacctacaacagtgttcacccctctggagtacggctgcgttgggcttagtgaggaggaagctgtcgccaggcatggtcaggagcatgttgaggtctatcacgcccactataagcccctcgaattcaccgtggctggaagggacgcctcccagtgctatgtgaagatggtgtgcctgcgggaacccccgcaactggttcttggtctgcactttctcggccctaatgcaggggaagtgacgcaggggtttgccctcgggatcaagtgcggtgcctcatacgcacaggtcatgcgcaccgtaggaattcacccaacatgctctgaggaggttgtgaaactgagaataagcaagcgatctggattggacccaaccgtgaccgggtgctgaggatag

SEQ ID NO: 208550 - DNA, 1575 bp, synthetic construct
  misc_feature 1..1575: note = Description of Artificial Sequence: Synthetic coding sequence
  source 1..1575: mol_type = other DNA
  misc_feature 1..1566: note = DNA
  misc_feature 1567: note = RNA
  misc_feature 1568..1575: note = DNA
atggccgccatggccgtggccctgcggggcctgggcggccggttcagatggcggactcaggccgtggcgggtggagtgaggggagccgcgcggggagcggcagccggccagcgcgactacgacctcctggtggtgggcgggggctcagggggactcgcatgcgccaaagaagccgctcagcttggaagaaaagtcgccgtggtcgattacgttgagcccagtccacaagggacacgttggggtctgggaggcacatgcgtgaacgttggatgtatccctaaaaagttgatgcaccaggccgcgctcctgggaggcttgatccaggacgcccctaactacggatgggaagttgcccagcccgtaccccatgattggcgcaagatggctgaagcagttcagaatcacgtcaaatctctgaactggggacaccgagtccaactgcaagataggaaagtcaaatacttcaatatcaaagcatccttcgttgatgagcataccgtttgtggcgtggctaaggggggcaaagaaatactgctctccgctgatcatatcattatcgccacaggaggtcggccaagataccccacccatatcgagggcgcactagagtacggaatcactagcgacgatatattttggttaaaagaatctccaggcaaaactctggttgtgggagcttcatacgtcgctctggagtgtgctggcttcttaaccggtatcggattggacacaaccattatgatgagatctattccattgagaggtttcgaccagcagatgagtagcatggttatcgaacatatggcctcccacggtacaaggtttctccgggggtgtgctcccagccgcgtgagaaggctcccagatgggcagctgcaagtgacatgggaggattcgactactggaaaagaggatactgggacctttgacactgtgctgtgggctattggacgtgtacctgataccaggtctcttaacttggagaaagcaggggttgatacttcccccgatacacagaaaatcctggttgacagtcgagaggccacttcagtgcctcatatttacgccatcggggatgtggttgaaggaaggcccgagttgactccgatagccattatggccggcaggttgcttgttcaaaggctgtttggcggttcctctgacctcatggactacgataatgtcccaactacagtgttcaccccattagaatatggatgtgtcggcctgtctgaagaggaagctgttgcccggcatggccaggagcacgttgaggtgtaccacgctcactacaagccactcgagtttactgtggcaggtagggatgctagccaatgctatgtgaaaatggtgtgccttcgggagcccccacagctcgtcctggggcttcacttcctggggcccaatgcaggggaggtaactcaaggctttgcgcttggtattaagtgtggtgcctcctacgctcaggtaatgaggactgtgggtatccacccaacatgctcagaggaagtggtaaaactccgaatcagtaagcgatctggcctggatcctacggtcacaggctgctgagggtag

SEQ ID NO: 208551 - DNA, 1566 bp, synthetic construct
  misc_feature 1..1566: note = Description of Artificial Sequence: Synthetic coding sequence
  source 1..1566: mol_type = other DNA
atggccgccatggccgtggccctgcggggcctgggcggccggttccgatggcgaactcaggctgtggccgggggggtccgtggagctgctcggggcgcagccggacagcgagactatgacctcttagttgttgggggcggaagtgggggactagcgtgcgcaaaagaggccgctcaattgggaaggaaagtggcagttgtggattacgtggaaccgtcccctcagggtacccgttggggtttaggggggacctgtgtgaatgttggatgcattcctaagaagcttatgcatcaagcggcactgctcggtggactcatccaggatgctccaaactatggttgggaagtggctcagcccgtgccccacgactggcggaaaatggctgaggcagtgcagaaccacgtgaaatctctgaactgggggcaccgtgtgcaactgcaggatagaaaggtcaaatacttcaacatcaaggcttcattcgttgacgaacatacagtgtgtggtgtggccaaagggggtaaagaaattctcttatctgctgaccacatcatcattgcaaccggtggtaggccccgatatccgacccacattgaaggagcgctcgagtatggaatcaccagcgatgacattttttggttgaaggagagccccggaaagacacttgttgttggggcgagctatgttgccctggaatgtgctggttttttgacggggattgggctcgatactactattatgatgaggagcattcccttaagaggatttgaccaacagatgtcctctatggtcatagagcacatggctagtcatgggacaaggtttctcagggggtgcgctccgagcagagtgcgccgcctacccgacgggcagctgcaggtaacctgggaagacagtactaccggcaaggaggacacaggcacgtttgacacagtgttgtgggctataggccgggtccccgatacgcgatctctgaacttggagaaagctggggtagacactagcccggacacacagaagatcctggtcgacagccgagaggccacctccgtaccacatatttacgctattggcgacgtggtggaggggagacctgagctaacccctatcgctataatggctggacgccttctggtacagaggctgtttgggggaagttccgatctcatggactatgacaatgtcccaacaaccgtattcacaccccttgagtatggttgtgtcggactcagcgaggaggaagccgtggctcggcatggccaggagcatgtggaagtgtaccacgctcactataagccacttgagtttaccgtggccggccgggatgcttcccaatgctatgtgaaaatggtgtgccttcgcgaacctccccagctggtgctcgggctgcattttctggggcctaacgcaggcgaagttacacagggcttcgccttgggaatcaagtgtggagcctcttacgcacaggttatgcggaccgtgggaattcatcctacgtgtagtgaagaagtcgtgaagctgaggatcagcaagaggagcggtctggatcccaccgtgaccgggtgctag

SEQ ID NO: 208552 - DNA, 1569 bp, synthetic construct
  misc_feature 1..1569: note = Description of Artificial Sequence: Synthetic coding sequence
  source 1..1569: mol_type = other DNA
atggccgccatggccgtggccctgcggggcctgggcggccggttccgctggcgcacgcaggcagttgcagggggcgtgcgtggggcagccagaggcgccgccgcggggcagcgcgactacgacctgctggtcgtgggtggtgggagcggaggacttgcgtgcgccaaggaggctgcacaactcgggaggaaggtggctgtggtcgattacgtggaaccttctccacagggcacccgctggggactgggaggtacgtgcgtcaacgtgggatgcatccccaagaaactgatgcaccaggcagcattacttgggggcttgatccaggatgcaccaaattatggctgggaggttgcccaacccgtgccccacgactggagaaaaatggcagaggccgtacagaatcatgtcaaatctctaaactgggggcaccgcgtgcaacttcaagaccgcaaggtcaaatacttcaacatcaaggcctcgtttgttgacgagcacacggtctgtggcgtcgcgaagggaggaaaagagatactgctctccgctgatcacatcatcattgcgacaggcgggagaccccggtatcccacccacatcgaaggagctcttgagtacggaatcacctcagatgatatcttttggctgaaggagagtcccggaaagacattgcccgtgagcgtcagctatgttgccctggagtgtgccggattcctgaccgggatcggactggataccaccatcatgatgcggtctataccattgaggggctttgaccaacaaatgtccagtatggtcattgaacacatggcaagccatggtacgagatttctgagggggtgcgctcctagcagggtgcgtcgcctccctgatgggcagttgcaggtgacttgggaggactccacgaccggcaaggaggatacagggacctttgataccgtcctttgggctattgggcgggtcccagatactaggtcgttaaacttggagaaggctggtgtggacactagccctgatactcagaagatactggtcgacagtagagaggccacttctgtacctcacatctacgcaattggtgacgtcgtggaggggagacccgagctcacccccatcgccatcatggcagggcgactgcttgtgcagcggctgtttggagggtctagcgacctgatggattatgataacgtgcctacgaccgtgttcacccctctggagtatggatgtgtgggacttagcgaggaggaagcagtggcaaggcatggacaggagcacgtggaagtgtatcatgcccattacaaaccactggaattcacggtcgccgggcgggacgccagccagtgctatgttaaaatggtttgcctgcgggaacctccacagctggtactgggtctgcactttctggggcccaacgcaggtgaagtgacgcaagggttcgctctcggtatcaagtgcggcgccagctatgctcaggtgatgcgcacagtgggcatacaccccacgtgctcagaggaggtggtcaagctgagaatctcaaagaggagcggacttgacccaacagtgacaggctgctag

SEQ ID NO: 208553 - DNA, 1281 bp, synthetic construct
  misc_feature 1..1281: note = Description of Artificial Sequence: Synthetic coding sequence
  source 1..1281: mol_type = other DNA
atgcaccaggccgccctgctgggcggcctgatccaggacgcccccaactatggctgggaggtggctcagcccgtgcctcacgactggcgcaaaatggctgaggcagtccagaaccacgttaagagtctgaactgggggcacagagtacagttgcaggaccgcaaagtgaagtactttaacatcaaggcaagcttcgtcgacgagcatactgtgtgcggtgtggccaagggaggcaaagagatcctgctgagtgctgatcacattattatcgctaccggcgggcgcccacgctatccaacccacattgagggagcattggagtacggcatcacttccgatgatattttctggttaaaggagtcacccggcaagacatgtgttgtagctcacgcttatgtggctttagagtgcgcagggttcctgaccggcatcgggcttgatacaactattatgatgaggtccatcccactccgcggctttgatcagcaaatgtcgtccatggtcatcgaacacatggccagtcatggtacccgatttttgaggggctgtgctcctagcagagttcgccgtcttcccgacggtcagctgcaggtgacttgggaggattcaacgacgggcaaagaggatactggaaccttcgatactgttttgtgggcaatcggccgcgtaccagatacacggagtctaaacctcgagaaggctggcgtcgatacttctcctgacacgcagaagatcctcgtggactcccgcgaagcgacaagcgttccccacatatatgcaatcggtgatgtggtggaaggaaggccagagctcacacctattgccatcatggccggcagactgctcgtgcagagactattcggggggtcttcagatctgatggattacgacaacgtgccaaccactgtcttcacgcctctcgaatacggttgtgtaggactgtctgaagaggaggccgtggctaggcacggacaggaacacgtagaggtgtatcatgcccactacaaacccctcgagtttacagttgctggtcgagatgcaagccagtgctacgtcaaaatggtgtgtctgcgcgagccgcctcagcttgtcctcggcctccactttctcggcccaaatgccggcgaggtcacacagggtttcgctctggggattaagtgtggtgccagctatgcacaagtaatgaggactgtaggcatccatcctacttgctctgaggaggtggtaaagctgagaatctctaagcggagcggtctggatccgactgttacaggctgttag

SEQ ID NO: 208554 - DNA, 1479 bp, synthetic construct
  misc_feature 1..1479: note = Description of Artificial Sequence: Synthetic coding sequence
  source 1..1479: mol_type = other DNA
atggaggaccaggccggccagcgggactacgacctgctggtggtgggaggggggtccggtgggctggcgtgcgcaaaagaggcagcccagctgggtaggaaagtggcagttgtcgactacgtggaacctagtcctcaagggactcgctggggcttgggcggcacctgcgtgaacgtgggttgcattccaaagaagctcatgcatcaagcggctttgctgggtgggctaattcaggatgcacctaactatggctgggaagtcgcacagcctgtcccgcacgattggcgtaaaatggctgaagctgtgcagaatcatgtgaagtcattgaactgggggcaccgggtgcagctacaggatcgaaaggttaaatattttaacattaaggcctcctttgtcgatgagcataccgtgtgtggggtggcgaaggggggaaaagagatcctgctgtcggcagaccacattattatcgctacaggcggccgacccagatatccaacgcatatagagggcgccttggagtatggaattacgtccgacgacatattctggctgaaggaatcaccgggaaaaacgctggtcgtgggcgcatcgtatgtggccctggagtgcgccggattcctgacaggaattgggctggacactaccatcatgatgaggagtattcctctgcgagggtttgaccagcagatgtcgagcatggtgatcgaacatatggccagccacggaactaggttcttgcggggctgtgctccgtctagagttagacgcttgccagatgggcagctgcaagtgacctgggaagatagtaccacaggcaaagaggatacgggtacctttgacacagtcttgtgggcaatcggacgggtgccagacactcgatcactgaatcttgaaaaagccggagtggacactagtcccgatactcaaaagattcttgtagactccagagaagcaacatcggttccacacatctatgccataggcgatgtcgtggaaggtcggcccgagctcaccccaattgccattatggcaggaaggctgctcgtacagaggctgttcggaggaagttctgacttaatggactacgacaacgtgcctaccaccgtgttcacacccctcgagtacggatgtgtgggactgagcgaggaagaggcagtagcaagacacggacaggaacatgtagaagtttatcatgcccactacaagccactggaattcacagttgccggaagagatgctagccagtgttatgttaaaatggtgtgcctcagggaacccccacagttagtactgggcctgcattttttagggccgaatgccggcgaagtgacccagggtttcgcacttggcattaaatgcggagcttcgtacgctcaggtgatgagaactgtgggcatccaccccacctgctccgaggaggtggtgaaattacgaataagcaaaagatccgggttggatcccaccgtgaccggctgctag

SEQ ID NO: 208555 - DNA, 429 bp, synthetic construct
  misc_feature 1..429: note = Description of Artificial Sequence: Synthetic coding sequence
  source 1..429: mol_type = other DNA
atgagctacatgctgccccacctgcacaacggctggcaggtggaccaagccatcttgtcagaggaggacagggtggtcgtcatccggttcggccacgactgggaccccacttgcatgaaaatggatgaggtgctttacagtatcgcagagaaggtcaaaaacttcgcagtcatctatctagtcgacataacagaggttccagactttaacaaaatgtatgagctctacgacccttgtacagtgatgttcttcttccgcaacaaacacattatgatcgacctgggtacaggaaataataataagataaactgggctatggaggataagcaggagatggtcgacatcattgagactgtttatcgcggggctcgcaaggggaggggcctagtggtgagccctaaggactactccacgaagtacaggtattag

SEQ ID NO: 208556 - DNA, 276 bp, synthetic construct
  misc_feature 1..276: note = Description of Artificial Sequence: Synthetic coding sequence
  source 1..276: mol_type = other DNA
atgagctacatgctgccccacctgcacaacggctggcaggtggaccaggctatactgtccgaggaggacagagtagttgtaattcgattcggccatgattgggatccaacttgtatgaagatggacgaagtgctctactctatcgctgagaaggtgaagaatttcgccgttatctacctggtagacatcaccgaagtgcccgattttaataagatgtacgagctgtacgacccctgtaccgttatgttcttcttttcataccatcgcgggtggtag

SEQ ID NO: 208557 - DNA, 894 bp, synthetic construct
  misc_feature 1..894: note = Description of Artificial Sequence: Synthetic coding sequence
  source 1..894: mol_type = other DNA
atggtgcaccaggtgctgtaccgggccctggtgagcaccaagtggctcgccgagagcatacggaccggaaagctcggaccaggactccgcgtactcgacgcatcttggtactcacccggtacccgcgaggcccggaaggagtacctcgagcgccacgtccctggagcctccttttttgacatagaggagtgtagggatacagcctcgccatatgagatgatgctgcccagcgaagccggattcgccgagtacgtcggccgacttggtatctctaatcacacccacgtcgtggtttacgacggcgagcaccttgggagcttctatgccccaagagtttggtggatgtttcgcgtgtttggccatcgcaccgtcagtgtgctgaatggaggatttcggaactggctgaaagaagggcaccctgtgaccagcgagccatcacggcctgaaccagctgtctttaaagcaactctggaccggtcactcctcaaaacatatgagcaggtgcttgagaaccttgaatctaaacgcttccagctcgttgactcacggagtcagggtagattcctggggactgaaccagaacctgacgctgtcgggctagattcggggcacatacggggggctgtgaacatgccatttatggatttcctgaccgaggacggtttcgaaaaaggcccggaggagctgcgggcactgttccagaccaaaaaagtcgacttgtcacaaccactcatagctacctgcagaaagggcgtcaccgcctgccacgtggccctcgctgcttacctgtgtggcaaaccagacgttgcagtatacgacgggtcttggtccgagtggttcagaagggcaccgccagagagcagagtgtctcaagggaaatctgaaaaggcctag

SEQ ID NO: 208558 - DNA, 894 bp, synthetic construct
  misc_feature 1..894: note = Description of Artificial Sequence: Synthetic coding sequence
  source 1..894: mol_type = other DNA
atggtgcaccaggtgctgtaccgggccctggtgagcaccaagtggctcgcggagtctattcggacggggaaactgggacctgggctcagagtcttggacgcatcatggtattcgccgggcactcgcgaagccagaaaggagtaccttgaaaggcacgtgcccggagcctcattttttgacatcgaagagtgtcgcgataccgcttccccatatgaaatgatgcttccctccgaggctggttttgcagagtacgtggggcggctggggatttctaatcatacacatgtcgtagtctatgacggcgaacacctgggtagcttctatgcccccagagtatggtggatgtttcgtgtgtttggacatcgcacagttagtgtcctcaatgggggctttcgcaactggctcaaggaaggacatcccgtaacatctgaaccaagccgccccgagccagcagttttcaaggccaccctagatagaagtctcctgaagacatatgagcaggttcttgagaatcttgaatcaaagaggttccagcttgtggattcccgttcccagggacgcttcttgggtaccgaacctgagcctgacgctgtggggcttgactctggccacatccgtggtgctgtgaacatgccctttatggacttcctcaccgaggacggattcgagaaggggcccgaagaactccgggctctgttccagacaaaaaaggtagacctgagtcagcctctaatcgctacatgtaggaaaggcgtgacagcgtgccatgtcgcccttgcagcatatctttgcgggaagcccgatgtggctgtgtacgacggttcttggtccgaatggtttcgccgggctccgcctgagtctcgcgtcagccaagggaaaagtgaaaaagcatag

SEQ ID NO: 208559 - DNA, 735 bp, synthetic construct
  misc_feature 1..735: note = Description of Artificial Sequence: Synthetic coding sequence
  source 1..735: mol_type = other DNA
atggtgcaccaggtgctgtaccgggccctggtgagcaccaagtggctggccgaaagtatccggaccgggaagctggggccaggcctccgcgtacttgacgccagctggtactcaccgggtacccgcgaggcacgcaaggagtacctggaaagacatgttcctggagcttctttctttgatatcgaggagtgtcgcgataccgcctctccgtacgagatgatgctgccttcagaggccggcttcgcagaatacgtcggccggctagggatctccaatcatactcatgtggtggtttatgacggagaacatctcggctccttttacgccccccgcgtgtggtggatgtttagggtttttggtcatcgaacggttagtgtactgaacggcggcttccgtaattggttgaaggaaggtcacccagtcacctctgagcctagtagacccgaaccagcagtgttcaaggcaacactagatcggtcccttctgaaaacttacgaacaggtactggagaacttagagagcaagcgcttccagctggtggacagccgtagccagggccgtttcctggggaccgaaccggagcccgacgctgtgggacttgattccggccacattcggggagcagtgaacatgccgtttatggactttttgacagaggacggcagctggagcgaatggttccgccgggccccgccagagtctagagtgtcccagggcaaatctgaaaaagcttag

SEQ ID NO: 208560 - DNA, 375 bp, synthetic construct
  misc_feature 1..375: note = Description of Artificial Sequence: Synthetic coding sequence
  source 1..375: mol_type = other DNA
atggtgcaccaggtgctgtaccgggccctggtgagcaccaagtggctcgccgagtcaattcgaacaggcaagctaggacctggcctgcgcgtattagacgcatcctggtacagccctggcacacgagaagcaagaaaagagtatttagagcgacatgtcccaggagcaagttttttcgacatcgaagagtgtcgtgacacagcaagcccatatgagatgatgttgccttccgaggctgggtttgccgagtacgtcggacgcctggggattagtaatcacacacacgtggtggtttatgatggagagcacttggggtctttttacgccccacgcgtttggtggatgtttagggtcttcggacataggactgtgtag

SEQ ID NO: 208561 - DNA, 1974 bp, synthetic construct
  misc_feature 1..1974: note = Description of Artificial Sequence: Synthetic coding sequence
  source 1..1974: mol_type = other DNA
atgagccccaccccccccctgttcagcctgcccgaggcccggaccaggttcactaaatccacacgggaagctttaaataacaagaacattaaaccccttctatctacattctcccaggtacctgggtccgagaacgagaagaagtgcactctcgaccaggctttcaggggcatcctggaagaagaaatcatcaaccactcaagttgcgaaaatgtcttggctataatcagtctcgctatcggcggggtaacagaaggaatctgcacagctagcacgcccttcgttctacttggggatgtactggattgcctccccctggaccaatgcgacacgatcttcacctttgtcgaaaagaacgttgctacttggaaatccaacacgttctacagcgccggcaaaaactatctactacgaatgtgtaatgacctgttacgtagactgagcaaaagtcagaacacagtcttctgtggaaggatccagctgtttcttgccaggctgtttcccctgtcagagaaaagcggcttgaacctccaatctcagtttaacttggagaatgttacagttttcaatactaatgagcaggagtcaaccttagggcagaaacacacagaggatcgggaagaagggatggatgtcgaagagggagaaatgggagacgaggaagctcccaccacttgctcaataccaattgattacaatctgtaccgcaaattttggagtttacaagactacttcaggaatcccgttcagtgctatgaaaagattagttggaagacatttctgaagtattcagaggaagttctggctgtgttcaaatcctacaagcttgatgatacgcaagcctcacgaaagaagatggaggagctgaaaactggtggagagcatgtctactttgcgaagttcctcacgagcgagaaactcatggatctccaactgtcagatagcaacttccgccgtcatatcctgttgcagtatctgatcctcttccagtacctgaaggggcaagtcaagtttaaaagtagcaattatgtattaactgacgaacagagcctgtggattgaagacacaacaaagagcgtttatcagttgctgtcggaaaatcccccagacggcgagcgttttagtaaaatggtggagcacatcctgaacaccgaagagaactggaattcttggaagaatgagggctgcccctcgttcgttaaagagcgcacgtcagataccaaaccaacaaggatcatccggaagcgcactgctcctgaagacttcttaggaaaagggcccactaagaagatccttatggggaacgaagaactgacgcggctttggaacctgtgccccgataacatggaagcgtgtaaaagcgaaaccagggagcacatgcctacgttagaggaattcttcgaggaggccatcgagcaggccgaccccgagaacatggtcgaaaacgaatacaaggccgtgaacaatagcaattatggctggcgggcattacggctgctcgcccggcgctcaccgcatttttttcaacctactaatcagcagttcaagtctctgcctgagtacctcgaaaacatggtaatcaagctcgccaaggaactcccaccaccgagcgaggaaattaagaccggcgaagatgaggatgaggaggataacgatgctctgttgaaggaaaatgagagccctgatgtccggcgcgacaaaccggtgactggagagcagattgaagtgttcgccaacaagcttggtgaacaatggaagattcttgccccctaccttgagatgaaggattctgagattcggcagatcgaatgcgacagcgaggacatgaaaatgcgagccaaacagctgctcgttgcttggcaggatcaggagggcgttcatgccactcctgagaatctgatcaacgcactgaataagtctggtctttcggatcttgccgaatcccttactaacgataacgagacaaatagctag

SEQ ID NO: 208562 - DNA, 4782 bp, synthetic construct
  misc_feature 1..4782: note = Description of Artificial Sequence: Synthetic coding sequence
  source 1..4782: mol_type = other DNA
atggccgccgccgccgtggtggtgcccgccgagtggatcaagaactgggagaaatcaggacgtggcgagttccttcacctctgccgaatcttgtctgagaacaagtcacatgactcaagtacctacagagatttccagcaggctctctatgagctctcctatcacgtcattaaaggcaaccttaagcatgaacaagccagcaatgtgttgtccgatatttctgagttccgcgaagacatgccgtcaatacttgctgacgtattttgtattctcgatatagaaacaaattgtctggaggaaaagagtaagcgggactatttcacccagttagtgctcgcatgtctgtaccttgtgtcagacaccgtgctgaaggaacgactggaccccgaaactctggaaagtctgggtctgattaagcaaagtcagcagttcaatcagaaatcagtgaaaatcaagacaaagcttttctacaagcagcaaaagtttaacttgctaagagaagagaacgagggttatgctaaactgatcgcagagctaggacaggatctcagcggctccattaccagtgatctgatacttgaaaatatcaaatctctgattggctgctttaacttagacccaaacagagtacttgacgtaattttggaagtgttcgaatgccgccccgaacacgacgatttcttcatttccttgctggaatcctacatgtcgatgtgtgagccccaaaccttatgtcatatccttggatttaagtttaagttctaccaagagccaaatggcgagactccgtcaagtctttacagggtagccgcagttcttctgcagttcaacctgattgacttagatgatctctatgtccacctgcttccagccgacaactgtataatggatgagcataagagagaaattgccgaagcaaagcagatcgtgaggaagttaaccatggtcgtattgagtagcgaaaaaatggacgaacgcgagaaggagaaggagaaggaggaagagaaggtggagaagccacctgataatcaaaaactaggactgctggaggctctcctcaagatcggcgattggcaacacgcccagaacattatggaccagatgccaccctactacgccgccagccacaagttaatcgctctggcgatttgcaaacttattcatatcactattgagcctctgtacaggcgtgttggagtccccaaaggcgccaaaggctcaccagttaacgcactgcagaacaaaagagcccccaagcaggccgaaagtttcgaggacctcagaagggatgtatttaacatgttctgctacctgggccctcatctgtctcacgatcccattctcttcgcaaaagtagtccgcattggcaaaagctttatgaaggagttccaatcagatgggagtaaacaagaggacaaggagaaaacagaagtgattctcagctgcctgctgagcattactgatcaggtgctcctgcctagcctctctctaatggactgcaacgcatgtatgagcgaggaactgtggggtatgttcaaaaccttcccctaccaacaccggtatcgcttgtacgggcagtggaagaatgaaacgtataactctcatcccctgctggtaaaagtcaaggcccagactattgatcgggccaagtatattatgaagcgtcttacaaaggagaatgttaagcccagtgggcggcagattggcaaactgtcgcatagcaaccctacaatcttgttcgattacattctgtctcagatccaaaagtatgacaacctcatcacacccgtcgtcgattcactaaaatatcttactagtctgaactatgatgtcttggcatattgtatcattgaagcactcgccaacccggagaaggaaagaatgaaacatgacgatactaccataagctcgtggctccagtctctcgcgtcgttctgtggtgccgtgttcaggaaatacccaattgatttggccggtctgctgcagtacgtggcgaatcagctaaaggctggcaagagtttcgatctactgatactcaaggaggtggtccagaagatggccgggatagaaattacggaggaaatgaccatggagcagctcgaagccatgactgggggtgaacagctgaaggctgagggtggatacttcggccagatccgcaatactaaaaaaagctctcaacgcctaaaagatgctctgctggatcatgaccttgccttgccgttatgccttttaatggcgcaacagaggaacggcgtgatcttccaggaggggggcgagaaacatttaaaactcgtcgggaagctgtacgaccaatgtcacgataccctggtgcaattcgggggctttcttgctagcaacctgagcacggaggattatatcaaaagggttccctctatagacgtgttatgcaatgagttccacactcctcacgatgctgccttttttctttctcggccaatgtacgcacaccatatctcatccaagtatgacgagctcaaaaagtctgaaaagggctccaagcagcagcacaaggtccacaagtacattacctcctgcgagatggtgatggctcctgtacacgaggcggtggtgagcctgcatgtgtcaaaggtctgggacgacatcagtccgcaattttacgctaccttttggagccttacaatgtacgacctggcagtaccccatacatcttatgagcgagaagtcaacaaacttaaggttcagatgaaggctatcgacgataatcaggagatgcctcccaataagaagaagaaggaaaaggaacgatgtactgccctgcaagacaagctgctggaggaggaaaagaaacagatggaacatgtgcagagggtgctacaacggctcaagttggagaaggataactggctgctcgccaaatccactaaaaacgaaacaataactaaatttttacagttgtgcattttcccgaggtgtatcttcagtgccattgacgcagtctactgcgcaagattcgtcgagctggtacaccaacagaaaactccaaactttagcacattgttatgctatgatcgagtcttttcagatatcatttacactgttgcgtcatgcacggagaacgaggcctcccgctacggcagatttctgtgctgtatgctagaaaccgttacgcgttggcattccgatagagcaacttacgaaaaggagtgtggcaactaccctggcttcctgacaatcctgcgtgctacgggatttgatgggggcaacaaagcggatcagctggattatgaaaactttaggcacgtggtccataaatggcactataagttgaccaaggcttcagtccattgtctggagactggcgaatacacacatatccggaatatactaattgtgctcacaaaaatacttccatggtaccccaaggtgttgaacctgggccaggcactagaacggcgggtacataagatttgtcaagaagagaaggaaaaaagacctgacttgtacgccctcgctatgggatactcgggtcagctgaaatcacggaaaagctacatgatccccgaaaacgagtttcaccacaaagaccccccacctcgcaacgcggtcgcctctgtccaaaacggccctggtggaggtcctagctcctcttctatcggtagtgcttcaaaaagcgacgaatctagcactgaagagaccgacaaaagcagagagcgaagccagtgtggtgtgaaagccgtcaataaagcttcctctacaaccccaaaaggaaacagctctaatggcaattctggcagtaatagcaacaaggccgtaaaggagaacgacaaggaaaaaggcaaggagaaagagaaagagaaaaaggaaaaaaccccggcaacaactcccgaagcccgtgtcctgggcaaggacgggaaggagaagccgaaggaagagcgaccgaataaggatgagaaagctagagagactaaagaacggactccaaaaagtgataaagagaaggaaaagttcaaaaaggaggagaaggcaaaagacgagaagtttaagactacggtaccgaacgccgaaagtaagtcgactcaggaaagggagcgggagaaagagcctagtagagagcgtgatatcgccaaagagatgaagtcgaaggaaaatgtgaagggtggcgaaaagacccccgtgagtggaagcctaaaaagccccgtgcctagaagcgatatccccgaacctgaaagggagcagaagagacggaagatagacacccacccttccccaagtcattcaagtacagtaaaggacagtttgatcgaattgaaagaatcaagtgcaaaactgtatatcaatcacaccccacccccactttccaagagcaaagagagagaaatggataagaaggacttggacaaaagcagagaaagatcccgggaacgcgagaaaaaggacgagaaggaccgcaaagaacggaagagggaccactctaataacgatagggaggtgccgcccgacttgactaagagacgcaaggaagaaaacggcaccatgggggtcagtaaacacaagtcggaatcaccgtgcgaatcaccttatccaaatgaaaaggataaggagaagaacaaatccaagtcatcaggtaaggaaaagggctctgactcatttaaaagcgagaagatggacaaaatctccagcgggggaaaaaaagagtcccgacacgataaagaaaagatagaaaagaaagaaaagagagacagctctgggggaaaagaagagaagaagcaccataaaagctctgacaagcataggtag

SEQ ID NO: 208563 - DNA, 4782 bp, synthetic construct
  misc_feature 1..4782: note = Description of Artificial Sequence: Synthetic coding sequence
  source 1..4782: mol_type = other DNA
atggccgccgccgccgtggtggtgcccgccgagtggatcaagaactgggagaaaagcgggcgaggagagtttttgcatctgtgtcgcatcctgtccgagaacaagtcacacgatagcagtacctaccgtgactttcagcaggcgttgtacgaactgagctaccacgttatcaagggcaacttaaaacacgaacaggcctctaatgtgttgtcagacatctcggaatttagagaggatatgccctccatcctggccgacgttttctgcattttggatatagaaaccaactgtctggaggagaagtcaaagagggattacttcactcaactggtcctggcctgcctgtatcttgtcagcgacacggtgttgaaggaaaggctcgaccccgaaactctcgaaagcctggggctgataaagcagtcccaacaattcaaccagaagtctgtaaagattaagactaagctgttctacaaacagcagaagtttaacctcctccgagaagaaaatgagggttatgcaaagcttattgccgaattgggccaggatttaagtgggagcattacatccgatctgatccttgaaaacatcaagagtctgattggctgtttcaatcttgaccctaacagggtgctcgatgtgattctcgaggtgtttgagtgtagaccagagcacgatgacttcttcatttccctgttagaatcttatatgtcaatgtgcgagccacagaccctttgtcatattcttggattcaagtttaaattctaccaggaaccaaatggcgagacccccagctcattgtaccgcgtggcagccgtacttcttcagttcaacttgatcgatcttgacgacttatatgtccatttgctgccagctgataattgtataatggatgagcacaaaagggagatagctgaggccaaacaaattgtgagaaaactcaccatggtagtgctatctagtgaaaaaatggacgaacgcgagaaggagaaagaaaaggaagaggaaaaggttgaaaagcctcccgacaatcagaagctgggactattagaggccttgctgaagattggtgactggcagcatgctcagaatatcatggatcagatgcccccctactatgcagcttctcacaagttaattgccctggcaatctgtaagttgattcacatcaccatagagccactgtaccgaagggtgggcgtgcctaagggagcaaaaggttccccagtaaatgcactacaaaataagagggctccaaagcaggccgaatcttttgaggacctgaggcgagacgtgttcaatatgttttgctatcttgggccgcacctgagtcatgatcctattctcttcgccaaagtcgttaggatcggaaagtccttcatgaaagaatttcagtccgacggatcgaaacaggaggataaggaaaagactgaggtcatcctgtcttgtcttcttagtataacggaccaagtgctgcttcccagtctgagcctgatggactgtaacgcctgcatgtccgaagaactctggggcatgtttaaaacattcccctaccagcaccgctaccggctttatggccagtggaagaacgaaacctacaatagtcacccgctgctggttaaggtcaaggcacaaaccatagaccgcgctaaatacattatgaagcggctcactaaggagaacgtaaaaccgagtggtaggcaaatcgggaagttgagccatagtaatcctacaattttattcgactatatactgagccagatacagaaatatgacaacctgatcacccctgtcgtggattctctgaagtatctgacatccctgaattacgacgtgctggcctactgcattatcgaagccctggcaaatccggagaaagaacggatgaaacatgatgataccacaatttccagctggctccagtctctcgcctcattctgtggcgcagtttttcgtaaatatcctatcgacctcgctggtctgctgcagtatgtcgctaaccagctgaaggctggtaagagttttgatctgttgattctcaaagaagtggtgcaaaaaatggcggggatcgaaatcaccgaggaaatgacaatggagcaactggaagccatgactggaggggaacagcttaaggcagagggagggtatttcggccagatccgaaatactaaaaaatccagccagcgactcaaagatgcgctacttgatcatgatctagctctgcctctgtgccttcttatggcccagcagcgtaacggggtgatcttccaggaaggaggagaaaagcatcttaagctagtgggaaagctgtacgatcagtgtcatgatactctcgtgcagttcggcggattccttgcttcaaacttatcaaccgaagattacatcaaaagggttccatctatcgatgtactgtgtaacgaattccatacaccccatgatgcggctttttttttgtcaaggccaatgtatgcacaccacatttcaagcaagtacgacgagctgaagaagtccgagaaagggagcaagcaacagcataaggtgcacaagtatatcacctcatgcgagatggtcatggcccctgtgcatgaagccgttgttagcctccacgtgtccaaggtctgggatgatatttccccacagttttacgctactttctggtcattgaccatgtacgacctcgcagttccccacacatcctacgagcgagaggtcaataagctcaaggtccagatgaaagccattgatgacaatcaggagatgcctcccaataaaaagaagaaggagaaggagagatgcactgccctgcaggataaactgctggaggaggagaaaaagcagatggagcatgtgcagagagtgttgcagcggttgaagctggagaaggacaactggctgctggctaagtctacgaagaatgaaaccatcaccaagttcttgcagctgtgtatatttccacggtgtatttttagcgcaattgacgctgtttactgtgcgaggttcgttgagctcgtgcatcaacaaaagacacccaatttcagcaccctcctgtgttatgaccgcgtgttttctgacatcatctacactgttgcttcatgcacagaaaacgaagcaagtaggtacggaaggttcctgtgttgtatgcttgaaactgtcacacgatggcactcagacagagctacgtacgaaaaagagtgcgggaattaccccggattcttaactattttgcgggccacgggatttgacggaggaaataaggccgaccagttggactacgagaattttaggcacgtcgttcataagtggcactataagctgaccaaggccagcgtacactgtctggagaccggggagtacactcacatccggaacatcttaattgtgcttactaagatcctcccatggtatccgaaagtgttaaatctcggccaagccctcgagcgccgagtacataagatttgtcaggaggagaaagaaaaacgaccagacctgtatgccctggctatgggctatagcggccaattaaagagtaggaagtcatacatgatcccagagaatgaatttcaccataaggaccctccgccgcgtaatgcggttgcctccgttcagaacggcccggggggtggtccctccagtagcagcattggctctgcaagcaagtccgacgaatcaagcactgaggagacagataaaagtcgcgagaggagccagtgcggcgttaaggccgtaaataaggcctctagcactaccccaaagggtaacagtagcaatggcaattcaggtagcaactctaacaaagctgttaaggaaaatgacaaagaaaaaggcaaagagaaagagaaggaaaagaaagagaaaacacccgcaactacacctgaggccagggtgttgggaaaagacggtaaggagaaacctaaggaggagaggccgaacaaagacgaaaaagctagagagacaaaggagcggacgcccaagtccgacaaggagaaggagaagtttaagaaagaagagaaggcaaaggacgaaaaattcaagacaacagtgcccaatgctgagtctaagtccacacaggagcgagagagggagaaagagccaagtcgcgaacgagacatagctaaagagatgaagtcaaaggagaatgtgaagggaggagaaaagactccggtaagtggatcgctgaagtcaccagtgccacgctccgacatcccggaacccgagcgggagcaaaaacgccggaagatcgatactcacccatccccatctcactcttcaaccgtcaaggacagcctcattgagttaaaagagtcctcagccaagctctatataaaccacaccccccccccgctgtcaaagtctaaggagagagagatggacaagaaagacctcgataagagtagagaaagaagtcgagagagggaaaagaaggacgagaaggaccggaaagagcgcaaaagggaccattccaataacgaccgagaggtccctcccgatctgaccaaacgccggaaggaggaaaacggcacaatgggtgtgagcaagcacaagagtgaatctccatgtgaatccccgtatcctaatgaaaaggataaggagaagaacaagagcaagtcatctgggaaagaaaaaggaagtgacagctttaagtctgagaaaatggacaaaattagctccggaggaaaaaaggaaagccggcacgataaggagaaaatcgagaagaaggagaagagagattcctcaggggggaaagaggagaaaaagcatcacaaatcctcagacaagcaccgctag

SEQ ID NO: 208564 - DNA, 2547 bp, synthetic construct
  misc_feature 1..2547: note = Description of Artificial Sequence: Synthetic coding sequence
  source 1..2547: mol_type = other DNA
atgcccagcatcctggccgacgtgttctgcatcctggacatcgagaccaattgtctagaggagaagtctaaacgcgattattttacacagttagtactcgcctgtctgtatctcgtgagtgacaccgtgttgaaagagaggctggatccagaaacattagaaagccttggcttaattaagcaaagccagcagtttaatcagaagtcagtgaagattaagacgaagctgttttacaaacaacagaagttcaatttgttgcgtgaagagaacgagggatatgctaaactcattgctgagttaggacaggacttatctgggagtatcacatcagaccttatcctggagaacataaaatcattgattggctgctttaacctcgatcctaaccgggtgctagatgtgattctggaagtgtttgagtgtagaccagagcacgacgatttcttcatatccctgctggagtcttacatgagtatgtgtgagccccagaccttatgtcatatactggggtttaaattcaagttttatcaggagcctaacggtgagacgccctccagcctctaccgggtcgcggcagtgcttcttcagttcaatctgatcgatctggatgacttatacgttcatttactgccagctgacaattgcattatggacgagcataagcgggagattgcagaagccaagcagatcgtcagaaagctgactatggtggtgctgtcctcggagaaaatggatgaacgcgaaaaagagaaagagaaggaggaggagaaagtcgagaagccccctgataatcaaaagctagggcttttggaagcccttttaaaaatcggggattggcagcatgcccagaatattatggaccaaatgccaccctattatgccgcctcacataagctgattgcactcgcgatttgcaagctgatacacattacaatcgagccactgtataggcgcgtaggcgtaccgaagggagctaaggggtctcctgtgaatgctctccaaaataaaagggcaccgaagcaagccgagtcctttgaggatctccggcgcgacgtattcaacatgttttgctatctggggccccacctttcccacgaccctatattatttgccaaggttgttagaatcggtaaatctttcatgaaagagttccaatcagacggcagcaagcaggaagacaaagaaaagacagaagtgatactgtcatgcctactctctatcactgatcaagtgctgctgccttccctgtccctgatggactgtaacgcttgtatgtccgaggagctgtggggaatgttcaagaccttcccatatcagcatcgttataggctttacggccaatggaagaacgaaacgtataatagtcatcccttattggtgaaggtgaaggcccaaaccattgatcgcgccaaatatatcatgaagcgtctgacaaaggaaaatgtcaaacccagtggacgccaaattggaaaactgtcccactccaatcctacaattctgttcgactacgtctgtttcgagatcctgagccaaatccagaagtatgacaacctcatcacccccgttgtcgactcattgaaatacctgactagcctgaattacgacgtgctcgcttattgtattattgaagccttggccaatccagaaaaggaacgaatgaagcacgatgataccactatctctagctggctccagtctctggcatcattttgtggtgcagtgtttcgcaaatacccgatcgatctggccggcctactacaatatgtggccaaccagctgaaagccggtaagagcttcgatctgcttattctcaaagaagtcgttcagaaaatggcgggcattgagataacggaggaaatgaccatggaacagctggaagccatgactggcggggaacagttaaaagccgagggggggtattttggtcagatccgcaacaccaagaagtcctctcagcggttaaaagacgctcttctggaccatgatctggcgctcccgctttgtctcctgatggcgcagcagcgcaacggcgtcatatttcaggagggaggggagaagcatctcaagttggtgggaaagctttatgatcagtgccatgacactctggttcagttcgggggatttctagcttccaacttgtcaaccgaagactatattaagagagtcccatctatcgacgtactgtgcaatgagttccacacccctcacgacgccgctttctttctgtccaggccaatgtacgcccaccatatttcctcgaaatacgacgagctgaagaagtcagaaaaagggagtaagcagcagcataaggttcataaatatattacaagctgcgagatggtaatggcaccggtccacgaggctgtggttagcctgcacgtaagcaaagtatgggacgacatttcccctcagttctatgctactttctggtctttgaccatgtatgacctggccgtaccccatacatcttacgaacgggaggtcaacaagctcaaggtgcagatgaaagcaatcgatgacaaccaggaaatgatccccccgcagtag

SEQ ID NO: 208565 - DNA, 570 bp, synthetic construct
  misc_feature 1..570: note = Description of Artificial Sequence: Synthetic coding sequence
  source 1..570: mol_type = other DNA
tgagagcagaagcggcggaagatcgacacccaccccagccccagccatagttccaccgtaaaggattctctgatcgagctgaaggagtcttcggccaagctgtatattaaccacacccccccacctttgagtaagtctaaggagagggaaatggacaaaaaagaccttgacaaaagcagggagcgaagtagggaaagagaaaaaaaagatgagaaagatcgaaaggagagaaagcgagatcactccaacaacgatcgggaggtgcctcccgaccttacaaaaaggaggaaggaagaaaacggaaccatgggcgtcagcaagcataaatctgagtcgccttgtgaaagtccatatccaaacgaaaaggataaggaaaagaacaaaagcaaatcgtcgggcaaagaaaagggttccgacagctttaagagtgagaagatggacaagatcagcagcggaggcaaaaaggagtctcgccacgataaggagaaaatcgagaagaaggagaaacgagattctagcggcggcaaggaggagaaaaaacaccacaaatcatccgacaaacatcggtag

SEQ ID NO: 208566 - DNA, 1056 bp, synthetic construct
  misc_feature 1..1056: note = Description of Artificial Sequence: Synthetic coding sequence
  source 1..1056: mol_type = other DNA
atggccgtgcccgccgccgccatgggccccagcgccctgggccagagcggccctggttccatggctccctggtgctccgtcagcagtggtcccagcaggtatgtgcttgggatgcaggagctgtttcgggggcatagcaaaacgcgggagttcctggcgcactcagcaaaggtgcattcagtggcctggtcctgtgatgggcggcgactggccagcggttcattcgacaaaaccgcatcagtgttcctgctggagaaggaccggctggtcaaggaaaataattatcggggccacggtgactctgttgatcagctgtgctggcacccctctaaccccgatctctttgtaacagcaagtggggacaagacgattagaatttgggatgtgcgaacaacgaaatgcattgccacagttaatacaaagggcgagaacataaacatctgttggagtcctgacggacagaccatagctgttggcaataaggatgacgtagttaccttcattgacgctaagacccatagatctaaggctgaggagcaatttaagttcgaggtgaatgaaatctcgtggaacaacgataacaacatgttcttcctgaccaatggaaatgggtgcatcaatatcttgtcttacccagaactaaagcctgtgcagtctatcaacgcgcacccatcaaactgcatctgcataaagttcgatccgatgggaaaatatttcgccacaggttccgccgatgccctggtgtctctctgggacgtggacgaattagtgtgcgttcggtgcttctcgaggttagactggcctgtgcgcacactaagcttttcgcacgatggaaaaatgctggcgtcagcttcagaggatcactttattgacatcgcagaggtcgagactggcgacaagttgtgggaagtccagtgcgagtctcccaccttcacagtggcctggcaccctaagaggcctctgttagcctttgcgtgtgacgataaggatggaaagtacgactcttcaagggaggccggcaccgtgaagttgttcggtctgccaaatgactcatag

SEQ ID NO: 208567 - DNA, 2052 bp, synthetic construct
  misc_feature 1..2052: note = Description of Artificial Sequence: Synthetic coding sequence
  source 1..2052: mol_type = other DNA
atgagcagcgagagcagcaagaagcggaagcccaaggtgatccggagcgacggtgcccccgcagagggcaaacggaacagatccgacaccgaacaagaagggaagtactatagcgaagaggcagaagtggacctgcgcgacccggggagggactatgagctctacaagtacacatgtcaggaactgcagagacttatggctgagattcaggacttaaagtcccgcgggggtaaggacgtagccattgagatagaggaaaggaggatccaatcttgcgtccatttcatgactcttaaaaaactgaatcggctggcccatatcaggttgaagaaaggaagggatcagacccatgaggcaaagcagaaggtggatgcttaccacctgcagttgcagaatcttctgtatgaggtgatgcacctgcagaaagagatcaccaaatgcctcgagttcaaatcaaaacacgaggagattgacttagtgagcctggaggaattttataaagaagcccctcccgacatctcaaaagcggaagttacaatgggagaccctcatcagcagaccctagcccggctggactgggaactggaacagcggaagaggctagctgaaaagtaccgggaatgcttgagcaataaagagaaaattctgaaagagattgaggtgaaaaaagagtacttaagctcattgcagcccagactgaattctatcatgcaggcctcactccctgtccaagaatacctgtttatgccatttgaccaggctcacaaacagtatgagactgctcggcacctccctccacccctgtacgtcctgtttgtgcaagcgacagcctacggccaggcatgtgataaaactctgagtgtagccatagaaggcagcgtcgacgaggctaaggctttgtttaaaccgccagaggacagccaggacgacgaatccgattcagacgcagaggaggagcaaactacaaagagaagacggccgactctcggcgtacagctggacgacaagcggaaagagatgttgaaacggcacccactgagcgtgatgctggacttaaagtgcaaagatgatagcgtcctgcacctgaccttttattatttaatgaacctgaacatcatgacggtgaaggcgaaggtgactaccgcaatggagttaattactcctataagcgctggggatttgctgtctccagactcagtactttcttgcctttatcccggcgatcatggtaaaaaaacccccaatcccgcgaatcagtatcagttcgacaaggtcggcatccttactctgagcgattatgtgctagagctgggccacccctacctctgggtacagaagctgggtggactgcacttccccaaagaacagcctcagcagactgtgatcgctgaccacagtttgtccgcaagccatatggaaactaccatgaagctgctgaagacccgcgtgcagagccgcctcgctctccacaaacagttcgcttccctcgagcacggaattgtacccgtgaccagtgattgccagtatttgtttccagcgaaggtggtttctcgcctggtgaagtgggtcactgtggcccacgaggactacatggagctacactttactaaagatattgttgacgctgggctagctggggatacaaacctgtactacatggctctgatagagcggggaaccgctaaactgcaagcggccgtggtacttaatcctgggtacagttcgatcccccctgtgttccagctctgtctcaactggaaaggagaaaagacgaacagtaatgatgataatatcagagcaatggaaggggaagtgaacgtctgttacaaagagctctgcgggccttggcccagccatcagctcctcaccaatcaattgcagagactctgtgtcctgttagacgtgtacctcgagaccgagtcccacgatgacagtgtggaaggccctaaggaatttcctcaggagaagatgtgtctgagactgttccgggggccatctcggatgaaaccatttaagtataatcacccccagggtttcttcagtcacagatag

SEQ ID NO: 208568 - DNA, 2052 bp, synthetic construct
  misc_feature 1..2052: note = Description of Artificial Sequence: Synthetic coding sequence
  source 1..2052: mol_type = other DNA
atgagcagcgagagcagcaagaagcggaagcccaaggtgatccggtccgatggcgcccccgccgaaggtaagcgtaaccgtagcgacactgagcaggagggcaagtactactcagaggaggccgaggtggatttgcgggatcctggcagggactacgagctgtacaaatatacatgccaggagctgcagaggctcatggcagagattcaggacttgaagtctcgtggaggcaaagacgtggccatcgagatcgaggagagaagaatccagtcttgcgtccatttcatgacattgaagaagttaaacagactggctcatattagactgaagaagggccgtgaccagacacatgaagctaagcagaaggtcgacgcttatcatctccagctgcaaaacctgctctacgaggtgatgcatctccaaaaagagattactaagtgtcttgaattcaagagcaagcatgaagaaatcgatctggtttctttagaggaattctataaggaagcgcctcctgatatctcgaaggcggaggttactatgggcgatcctcaccaacaaacactggccagattggattgggaactcgagcagcgcaaaaggcttgctgagaagtatagggagtgcttatctaataaggagaagattctaaaggaaattgaggttaagaaggagtatctgtcctcactgcagccgcgtctgaactccataatgcaagcgtccttgcccgttcaagagtatctgtttatgcctttcgaccaggcccacaaacagtacgagacagctcgtcatcttccaccgcccctctatgttcttttcgtgcaggcaacagcctatggtcaggcttgcgataaaaccctgtccgtcgctatagaagggtccgtggacgaggccaaagctttgttcaagcctccggaagactcccaggacgatgaaagcgactccgacgccgaagaggagcaaactacgaaacgacggcggcccaccctcggagtgcagctcgatgacaagagaaaggaaatgctgaagagacaccctctgagcgttatgctagatctcaagtgcaaagatgacagtgtgcttcatctcacattttactatctcatgaaccttaacatcatgaccgtgaaagcaaaagtgacaaccgctatggagctcataaccccgatctctgcaggcgacctcctctcacctgattccgtcctttcctgtctttatccgggcgatcacggtaaaaaaacaccaaatcccgcaaaccagtaccaatttgataaggtgggaatcctgaccctgtccgactacgtgctggaacttggtcatccttacttatgggtacagaagctgggaggtctgcatttccccaaggagcagccccaacaaaccgttatcgccgatcacagcctgtccgcatcacacatggagacaacaatgaaactgctgaagaccagagtgcagtctagattagcacttcacaaacaattcgccagcttggagcacgggatcgtgccagtgacatctgactgtcagtacctgtttccagccaaggtggtgagcagactggtgaagtgggtgacggtggcccatgaggattatatggaactgcacttcaccaaggacatcgtggacgcaggactagctggcgataccaatctgtattacatggccctgatcgagagagggacagctaaactccaggccgcggttgtcctgaaccctggctattcctcgatcccccccgttttccaactgtgtctaaactggaaaggcgaaaagaccaactccaatgacgacaatattcgcgctatggaaggcgaggtcaacgtgtgctataaagaactgtgtggaccctggccatcgcaccaattgttgaccaatcagctccaacggttatgcgtactgcttgacgtatatctggaaaccgaatcacatgacgatagtgtagaaggccccaaggagtttccccaggaaaaaatgtgcctgagactgttcaggggccccagcagaatgaagcctttcaagtacaatcaccctcagggctttttttctcatagatag

SEQ ID NO: 208569 - DNA, 2052 bp, synthetic construct
  misc_feature 1..2052: note = Description of Artificial Sequence: Synthetic coding sequence
  source 1..2052: mol_type = other DNA
atgagcagcgagagcagcaagaagcggaagcccaaggtgatccggtccgacggggccccagctgaggggaagcggaatcggtctgacaccgaacaggagggcaaatactacagtgaggaagccgaggtggatctgcgcgatccaggccgcgattatgaactgtataaatatacttgtcaggaactgcagcggctgatggcggagattcaggacctcaaaagcaggggcggtaaagacgtcgcaatcgaaatcgaagagaggcggatccaaagttgcgtccattttatgacactcaagaagctcaaccggttggcccatatcaggttaaagaaaggtagagatcagacacacgaggcgaaacaaaaagtagatgcctatcatctgcagctgcagaatctgctttatgaagttatgcacttgcaaaaagaaattaccaagtgtctggagttcaaatcaaagcacgaggagatcgacctggtgtctctcgaagaattttataaagaggccccccccgatatctccaaagctgaagtgacaatgggagacccccaccagcagacactggccagactggactgggaactggaacagcggaaaagactggcggaaaagtatcgagaatgtctgagcaataaggaaaaaatattaaaggagatcgaggtgaaaaaggaatacctttccagtctccaacccaggctcaattcaataatgcaggcgtcgctgccagttcaggaatatctgttcatgccatttgaccaagcgcataagcagtacgaaacggcccgtcatttgcctccaccgctttatgtgttgtttgtgcaggctactgcctacggacaggcttgcgataagacattgagtgtcgccatcgaagggtccgtggacgaggcgaaagctctcttcaaaccccctgaggattcacaagatgacgaaagtgattccgatgcagaggaagaacaaaccactaaaagacggaggcctactttaggagttcagctcgacgacaaaaggaaggagatgttgaagagacaccctctgtccgtaatgctggacctcaaatgcaaggacgatagcgtgttacatcttacattttactacctcatgaacctgaacattatgactgtgaaggctaaggtaactacagccatggagctgattacacccatcagtgctggcgacctgttgtccccagactctgtgctttcctgtctgtatcccggcgaccatgggaagaagacaccaaatccagccaaccagtatcagtttgacaaggtaggcatccttacactgagtgattacgtcctagagctgggacatccatatctctgggtccagaagctagggggtctgcattttccaaaggaacagcctcagcagacagttatcgccgatcactccttgagcgcgtctcacatggagactacaatgaagcttttaaagacaagagtacaatcgagactggcactgcacaaacagtttgcttctctggaacatggcatcgtgcccgtgacctccgactgtcagtatctgtttccggctaaggtggttagtagattagtgaagtgggtgacggtggctcacgaagattacatggagctacacttcaccaaggatatcgtggacgctggcctggccggagataccaatctttattatatggcactgattgagcgtggcacggccaagctccaggctgcagttgttctcaatcctggatattctagcatcccccctgtgtttcaactgtgcttaaactggaagggcgaaaagaccaattcaaacgacgataacattagagcaatggaaggcgaagtgaacgtatgctacaaggaactgtgcggtccatggccttcacaccagcttctgacaaaccagttacagcgtctctgtgtcctcttggatgtctacctcgagacggagtcgcatgacgattctgtggaggggccaaaggaattccctcaggaaaaaatgtgtctgagactgttccgaggacccagcagaatgaaaccgtttaagtacaatcacccacagggatttttctcacaccgatag

SEQ ID NO: 208570 - DNA, 282 bp, synthetic construct
  misc_feature 1..282: note = Description of Artificial Sequence: Synthetic coding sequence
  source 1..282: mol_type = other DNA
atgagcagcgagagcagcaagaagcggaagcccaaggtgatccggtcagacggagcacctgcagagggcaaaagaaaccgctctgacaccgaacaggaaggcaaatattacagcgaagaggcggaggtggatctgagagaccccgggcgggactacgagctgtacaagtacacctgtcaggagctgcagagattgatggctgagatacaggacttgaaatcgcgggggggcaaggacgtggctatcgaaatagaagagcggcgaatccaatcctgcgtgtag

SEQ ID NO: 208571 - DNA, 486 bp, synthetic construct
  misc_feature 1..486: note = Description of Artificial Sequence: Synthetic coding sequence
  source 1..486: mol_type = other DNA
atgagcagcgagagcagcaagaagcggaagcccaaggtgatccggtctgatggcgcacctgcagaagggaagcggaatcgcagcgatactgagcaggaaggtaaatattattccgaagaggcagaagtggacctgagagatccaggccgcgattacgaactgtacaagtacacgtgtcaagagctgcaacggctgatggccgaaatccaggatctgaagtccaggggagggaaagatgtcgctatcgagattgaagagaggcggatccagtcttgtgtccactttatgacccttaaaaaactgaatcgcttagcccatattcgcctgaaaaaggggagggatcagactcatgaagctaaacagaaggtcgacgcataccatttacagcttcagaacttattgtacgaggtgatgcacttacaaaaagaaattacaaaatgcctggagtttaagagtaagcacgaagaaattgatctggtgtcctag

SEQ ID NO: 208572 - DNA, 672 bp, synthetic construct
  misc_feature 1..672: note = Description of Artificial Sequence: Synthetic coding sequence
  source 1..672: mol_type = other DNA
atgagcagcgagagcagcaagaagcggaagcccaaggtgatccggtccgacggagcacccgcagaaggaaagcgcaacaggtctgacacagaacaggagggcaagtattattccgaggaggccgaggtcgatctgcgggaccctggtcgcgactatgaactgtacaagtatacttgccaggagctgcagcgccttatggccgagatccaagatctgaaaagtagaggtgggaaagacgtcgctattgaaattgaggagaggcggattcagtcatgcgtgcacttcatgacattaaagaagttgaatagactagctcacatccgcctgaagaaaggaagggaccaaacccatgaagcaaagcaaaaggtcgatgcttaccatctgcagcttcaaaatctgctctatgaagttatgcacctacagaaggagatcactaagtgtctggaatttaagtcgaagcatgaagagatcgatttagtgagccttgaggagttctacaaggaagcgcctcccgacatcagtaaggcagaggtgaccatgggagatccacaccaacagacccttgctcgattagactgggagctggaacagaggaaaagactggcagagaagtatcgagagtgcctgagcaataaagaaaaaattttgaaagaaatagaggtaaagaaatag

SEQ ID NO: 208573 - DNA, 2052 bp, synthetic construct
  misc_feature 1..2052: note = Description of Artificial Sequence: Synthetic coding sequence
  source 1..2052: mol_type = other DNA
atgagcagcgagagcagcaagaagcggaagcccaaggtgatccggtcggacggggcgccagcggagggaaagagaaatcggagcgacaccgaacaggagggtaagtattatagcgaggaagctgaggtggatttaagagaccccggacgcgactatgaactatacaagtacacatgtcaggagctgcagaggctcatggcggagatccaagacctcaaatctcgaggaggaaaagatgtggccatcgagattgaggaacgcaggattcagtcctgtgtgcacttcatgacgctgaagaagttaaatagactagcacacatccgattgaagaagggcagggaccagacccacgaagcaaagcagaaggtagatgcgtatcatctgcagctgcagaatctgttatacgaggtgatgcatttgcagaaggagataacgaaatgcctcgagttcaaatctaagcacgaggagatagacttggtttccttagaagagttctataaagaggctccccccgacatctctaaagctgaagtcacaatgggtgatccacaccagcagacactggctcgtctggactgggaacttgaacagcggaaacgcctcgccgagaaataccgagaatgtctaagcaataaggaaaagatcctcaaagagattgaagtgaagaaggagtaccttagttccctccagcctagattgaatagcattatgcaggcctctctcccggtgcaggaatatctttttatgcccttcgatcaagcccataaacagtatgagactgccaggcacctgccacccccgctttacgtgctgtttgtccaggctaccgcatacggccaagcttgtgacaaaaccttatcggtcgcgattgaaggaagcgttgacgaggccaaggctttatttaagccccccgaggactcccaggatgacgagagtgattccgacgcagaggaagagcagacaactaagaggcggcgccctacacttggcgtccagcttgacgataaaagaaaggaaatgctgaaaaggcaccctctgagcgttatgctcgatctcaagtgcaaagatgactccgtacttcacctaacattctactacctgatgaatctgaacatcatgaccgtcaaggcaaaagtcaccaccgccatggaactgatcacaccaatttctgcgggggatctactgtctccggattctgtgctttcctgtttgtacccaggagatcacggtaaaaagacacccaacccggctaatcagtaccagttcgataaggtggggattctgaccctatctgattacgttcttgaactcggtcatccctacctgtgggtgcagaaactggggggtttacacttccctaaagaacagccccagcagaccgtgattgcagaccactctcttagcgcatcccatatggagactacaatgaaactgctcaagactcgggttcaatcgcgcttagccctgcacaaacagttcgcaagcttggagcacggtatagttccagtgacatccgactgtcaatatctttttccggcaaaggtagtatcccgtttagtgaaatgggtaacggttgcccacgaagattacatggaattgcatttcacaaaggatatcgttgatgccggtctcgccggggacaccaatctgtactacatggctctgatcgagcgcggtaccgcaaaactgcaggccgccgtagtgctcaatcccggctatagcagcatccccccggtattccagctgtgtcttaattggaaaggggaaaagaccaatagcaatgacgataatatcagggctatggagggtgaagtgaacgtgtgctataaggagttgtgcggaccatggccaagccaccagctgctcaccaatcaactccaaaggttgtgcgtgctgcttgatgtttacctcgagactgaatctcacgatgacagcgtggaggggcctaaagagtttccccaagagaagatgtgtcttagactgttcagaggcccatccaggatgaagcccttcaagtacaatcacccccaaggattctttagtcaccgatag

SEQ ID NO: 208574 - DNA, 615 bp, synthetic construct
  misc_feature 1..615: note = Description of Artificial Sequence: Synthetic coding sequence
  source 1..615: mol_type = other DNA
atgggcgccgtgaccgacgacgaggtgatccggaagcggctgctgatcgacggcgacggcgccggtgatgacaggcggatcaacctgctcgttaagtcttttattaaatggtgcaactctggaagtcaggaagagggctacagccaatatcaacgcatgctcagcaccctttcacaatgtgagttcagtatgggtaagactctcctcgtttatgacatgaatctaagggagatggagaattatgagaagatttataaggagatcgaatgttctatcgcaggcgcccatgaaaaaatcgccgaatgtaaaaaacagatcctgcaggctaagaggattaggaagaatagacaggagtatgatgcactggccaaggtaatccagcaccatcccgatcggcatgaaactctcaaagaactggaggctctaggtaaggaattagagcacttaagccacattaaagaaagcgtggaagacaaactcgaactgcgcaggaagcagttccacgtcttgctctctactattcatgagctccaacagactctcgagaatgacgagaagctctcggaggtggaggaagcccaggaggcttcaatggaaactgaccccaagccctag

SEQ ID NO: 208575 - DNA, 711 bp, synthetic construct
  misc_feature 1..711: note = Description of Artificial Sequence: Synthetic coding sequence
  source 1..711: mol_type = other DNA
atgagcgaggccccccgggccgagaccttcgtgttcctggacctggaagccacaggactaccttccgtcgaaccagagatagcggaattgagcctattcgccgtccaccgcagcagtctcgaaaaccctgaacacgatgagagcggtgcattagtactcccacgggtactcgataaactgaccctctgtatgtgcccagaaagaccctttaccgcaaaggcttctgagatcaccggcttgagtagcgagggtctggcgcggtgcaggaaggccggtttcgacggagccgttgtgcgaaccctgcaggcctttttatctaggcaggccggcccaatttgtctggtcgcccacaacgggtttgattacgactttcccctgctttgcgcggaactcaggcgcttaggtgccaggcttcctagggatactgtgtgccttgatacgctcccagcacttagagggctggatcgcgcccatagtcatggcactagagcccgagggcgccaggggtattcattaggctctctgttccatcggtacttccgagctgaaccctcggctgcccacagcgccgagggggacgtccatactctgctcctgatctttctacaccgcgctgcggaattactggcatgggccgatgagcaggcacgaggctgggcccacattgagccgatgtatttgcctcccgatgaccccagcttggaggcatag

SEQ ID NO: 208576 - DNA, 840 bp, synthetic construct
  misc_feature 1..840: note = Description of Artificial Sequence: Synthetic coding sequence
  source 1..840: mol_type = other DNA
atgggccgggccggcagccccctgccccggagcagctggccccggatggacgattgcgggagtagatctcgctgttccccaacactctgctcaagtttgaggacctgttaccctcgaggcaacattacaatgtcggaggctcctcgcgccgagacctttgtgttccttgacctcgaggcgacagggctgcccagcgttgagcctgagattgctgaactgagcctgtttgccgtccatcgcagcagtctcgagaaccccgaacacgacgaaagcggcgcactggtgttgccaagggtgctggataagcttaccctgtgtatgtgtccagaaaggccattcactgcaaaggcgagcgagatcacaggtctctcctccgaaggcttggcaaggtgtaggaaggcaggcttcgatggcgccgtggtccgcactctacaggcattcctctccaggcaagcgggacctatctgtcttgtggcacataacgggttcgactacgattttcctctgctctgtgcagaactcaggcgactgggagcccgactgccaagggacaccgtatgcctcgacacactgcctgccctgaggggacttgaccgggcgcactctcacggaacccgggctcggggccgacagggttactccttgggcagcctgttccatcggtactttcgagctgaacccagtgccgctcattctgccgagggcgatgtacacactctacttttgatttttctgcaccgggcagcagagctgctggcatgggccgatgagcaggctcgcggttgggcacacatcgaaccaatgtatctgccacccgacgacccttctctggaggcttag

SEQ ID NO: 208577 - DNA, 711 bp, synthetic construct
  misc_feature 1..711: note = Description of Artificial Sequence: Synthetic coding sequence
  source 1..711: mol_type = other DNA
atgagcgaggccccccgggccgagaccttcgtgttcctggacctggaggcaactggccttccaagcgtggagccggagatagcagagctctcattatttgccgtgcatagatctagtcttgagaatccagaacacgatgaaagcggagctcttgtcctcccacgggtactcgacaaattgactctctgtatgtgtccagagaggccttttactgcaaaggcatccgagatcactggcctcagttccgaagggttagccaggtgtaggaaagcgggcttcgatggagccgtagtccggaccctgcaggcctttctttctagacaggccggcccgatttgcctcgttgcgcataacggattcgattacgatttcccactgctgtgtgccgaactacggcgtctgggcgcccgcctgccccgggataccgtgtgtttggacactctgcctgcccttcgcggcctcgaccgcgctcattcgcacgggacgagagcccgcggccgccaaggctacagcctgggatcactgtttcatagatattttcgagccgagccatccgctgcccactccgccgaaggggacgtgcatacactacttctgatctttctgcatagagccgccgagctgctggcatgggctgatgaacaggccaggggatgggcacacatcgagcccatgtatctgccccctgatgaccccagcctggaagcctag

SEQ ID NO: 208578 - DNA, 711 bp, synthetic construct
  misc_feature 1..711: note = Description of Artificial Sequence: Synthetic coding sequence
  source 1..711: mol_type = other DNA
atgagcgaggccccccgggccgagaccttcgtgttcctggacctggaggcaacgggcctgccttctgtcgaaccagaaattgcagagctctctctgttcgcagtgcacaggagtagcctcgaaaaccctgagcatgatgaatctggggcactcgtcctacctcgggtgcttgacaaactgacactctgcatgtgtccagaacggccctttacggcaaaggcgtcggagattaccgggttaagctcggagggactggcacgctgcagaaaagctgggttcgacggcgccgtggtgcggacattacaggctttcctgagccggcaggctggacctatttgtctggtggcacataacggctttgattacgactttcctctgctgtgcgctgagctgagacggcttggggcaaggctgccccgcgacaccgtttgcctagatacactcccagcgctcagaggcttggaccgtgcccatagtcacggcaccagagctaggggaaggcagggatactcccttggttctctttttcatcggtacttccgagcagaacccagcgctgctcacagcgccgagggagacgtccatacactgcttctcatctttctgcaccgcgcggcagaactcctggcatgggccgacgagcaggctagagggtgggcacacatagagcccatgtaccttccgccggacgacccaagccttgaggcctag

SEQ ID NO: 208579 - DNA, 840 bp, synthetic construct
  misc_feature 1..840: note = Description of Artificial Sequence: Synthetic coding sequence
  source 1..840: mol_type = other DNA
atgggccgggccggcagccccctgccccggagcagctggccccggatggacgactgtggaagtaggtcgcgctgcagcccaacgctctgctcaagcttacgcacctgttacccccggggcaacatcaccatgtccgaggctccgcgggccgaaacttttgtgttcctggacctcgaggcaacgggtttgccatctgttgaacccgagattgctgagctgagcctgttcgctgtccaccgcagtagtcttgagaatcctgaacacgatgaaagtggtgccctcgtgttgccaagagtactggataagctcacattgtgtatgtgtccagagagaccattcacagctaaggcttcggagattacaggcttgtcctccgagggcctggctcgatgcagaaaagctggtttcgatggggccgtggtgcgcaccctgcaggcatttctgtcccggcaagctggccccatttgtcttgtcgctcataatggcttcgattacgactttcctctcctttgcgccgaattaagacggctgggcgcccgcctgccacgagacaccgtgtgcctggatactctcccggcattgagaggcttggatcgggcacactctcatgggacccgagcccggggtagacaaggctattccctcggaagtctgttccacagatatttccgcgccgaaccgtcagcagcacatagcgcagaaggtgacgtccataccctccttctgatattccttcaccgggctgctgaactgctggcatgggccgacgaacaagcccgtgggtgggctcatattgagccgatgtacctgccgccggacgacccctcactcgaagcctag

SEQ ID NO: 208580 - DNA, 711 bp, synthetic construct
  misc_feature 1..711: note = Description of Artificial Sequence: Synthetic coding sequence
  source 1..711: mol_type = other DNA
atgagcgaggccccccgggccgagaccttcgtgttcctggacctggaagcaacaggcttacctagcgtggagccggaaattgccgaactgtccctttttgccgtacacagatccagcttggagaacccagagcacgacgagagcggagccttagtattgccgcgtgtcttggataaactgaccctctgcatgtgcccagaaaggcctttcacggccaaagcatctgaaatcaccggattgtcatctgaggggcttgctcgctgcaggaaggcaggcttcgatggggccgtggtcagaacgctgcaggctttcctttctcgacaggcaggccccatatgtctcgtggcacacaatggcttcgactacgatttcccactgctgtgcgcagaattgcggcggctcggcgcgaggcttccgcgggacacagtgtgcctggacaccttacccgcccttagaggactggatagggcccattctcatggaactagagcacgcggccgccagggttactcactcggtagtctgttccacaggtacttccgggctgaaccctcggctgctcatagtgcagaaggcgacgttcacacactactgctaatcttcctccatcgcgccgccgagctgctagcatgggctgacgaacaggcccgggggtgggcccacatcgagcctatgtatctgccacccgacgatccaagcctggaggcttag

SEQ ID NO: 208581 - DNA, 840 bp, synthetic construct
  misc_feature 1..840: note = Description of Artificial Sequence: Synthetic coding sequence
  source 1..840: mol_type = other DNA
atgggccgggccggcagccccctgccccggagcagctggccccggatggacgactgcggatctagaagtagatgctcaccaaccctgtgttcctcgcttcgtacatgctacccacgggggaacatcacaatgtccgaggcccctagagcagaaaccttcgttttcctggatctggaggccactggcctccctagcgttgaacccgagattgccgaacttagcctgttcgctgtccaccgcagcagtcttgaaaatcctgaacatgatgagagtggtgccctcgtcttacctcgagtgctggataagctcaccctctgcatgtgccctgaacgcccttttaccgccaaagcctctgaaatcaccggcttgagctctgaggggctggccaggtgtcgcaaggccggcttcgatggtgcggttgtgcgcaccctccaggccttcctctcccgccaggcaggacccatctgtcttgtcgcacataatggctttgattacgattttccactcctctgtgccgaactacgaaggctgggtgcaaggctgccgcgggataccgtgtgcctcgacacacttccagctttacgcgggctggatcgtgcccatagccacggaacgcgcgccagaggacggcaagggtacagcctgggaagtctctttcaccggtattttcgagccgaaccctcagccgcgcactcagctgaaggtgacgtgcacacactgttgctgatcttcctgcaccgggcagcagagctgctcgcatgggccgatgagcaggcccgaggctgggcacacattgaaccgatgtacctgccacctgacgatccatccctcgaggcttag

SEQ ID NO: 208582 - DNA, 837 bp, synthetic construct
  misc_feature 1..837: note = Description of Artificial Sequence: Synthetic coding sequence
  source 1..837: mol_type = other DNA
atgatcgtggccgccgaggccgtggccgccccccggtgcgccctggtcggagatcggagtggagcggacgcaccgagagccaaaggccattcactgaggacatgttaccctcgaggcaacatcactatgtctgaggcgcctagggcggagacttttgtgtttctcgacttggaagcaacaggcctgccaagcgttgagcccgaaattgctgagctttcgctgtttgcagtccacaggagctctctggagaatccagagcacgatgagagtggggcactcgtactgccccgggtcctggacaaactgaccctgtgtatgtgtcctgagcggccctttacggccaaggctagtgagattacagggctctcgtccgaaggcctggccaggtgtcgtaaggctgggtttgacggagccgtcgtgcgtaccctacaagccttccttagcaggcaagccggaccgatttgtctcgtcgcacacaatgggtttgactatgatttccccctgctctgtgctgagcttaggaggctgggggcaaggctgcctcgtgacaccgtctgcctcgatacactgcctgcacttagaggcctggacagggcgcactctcacggaacacgcgcccgggggcgccaggggtattcactgggctctctgttccatcggtacttcagggcagagcctagcgccgcacactctgctgaaggggacgtgcatacactgttgctgatcttcctgcacagggctgccgagttactcgcatgggctgatgagcaggctagaggatgggctcacattgagcctatgtatctccccccagatgatcccagcttggaagcatag

SEQ ID NO: 208583 - DNA, 2172 bp, synthetic construct
  misc_feature 1..2172: note = Description of Artificial Sequence: Synthetic coding sequence
  source 1..2172: mol_type = other DNA
atgttcgaggagaaggccagcagccccagcggcaagatgggcggcgaggagaaacctattggcgccggagaagagaagcaaaaagagggcggcaaaaaaaagaacaaggaaggaagcggggatgggggtagggccgaattaaacccatggcccgagtatatctacaccagacttgagatgtacaacatcttaaaagcggaacacgattcgatcctggctgagaaagcggagaaagactctaagccaatcaaagtgaccctccccgatgggaagcaggtggatgctgaatcatggaagacgaccccataccagatcgcgtgcggaatctcacaggggctggcggacaacactgtgattgcaaaggtcaacaatgtcgtatgggatctcgaccgccctctggaggaggactgtactctcgaattgctcaaatttgaagatgaggaggcccaggccgtttattggcactcttctgcgcatattatgggtgaggctatggagcgtgtgtacggaggctgcctttgctacggcccacctatagagaacggtttttactacgacatgtacctcgaagaggggggagtgtctagcaacgatttctcaagcctcgaggctctgtgcaagaagataattaaagagaagcaggcctttgaacgcctggaggtgaaaaaagaaacactgctcgctatgtttaaatacaacaagtttaaatgcagaatccttaacgagaaggtgaatacccctaccactaccgtttacaggtgtgggcctctgatagacctgtgtcgaggcccccacgtccggcacactggcaagatcaaagccctgaagatccataagaattcttccacctattgggagggtaaggcggacatggagactctgcagcggatctacgggatatctttccctgaccctaagatgctgaaggagtgggaaaagttccaagaggaagcaaaaaaccgagatcacaggaaaatcgggcgggaccaggagctttactttttccacgaactgagtcccggttcatgtttctttctacctaaaggagcttatatctacaacgctctgatagaatttatccggagcgaatacagaaagcgtgggtttcaggaagttgtgacacccaatattttcaattcccgcctgtggatgaccagcggccactggcaacactattctgaaaatatgttctctttcgaagttgaaaaagaacttttcgcacttaagcccatgaactgccctggacactgcctcatgttcgaccacaggccaagatcttggcgagagcttccgctgcgcctcgctgactttggtgttctccaccgaaatgagctgtcaggggccctcacgggactgaccagggttagaaggtttcaacaagacgatgcgcatatcttttgtgccatggaacaaattgaggacgagatcaagggatgtctggacttcctgaggaccgtgtatagtgtcttcggcttcagtttcaaattgaacctctctacaagacctgaaaagttcttaggcgacatcgaggtgtgggaccaagccgagaagcagcttgaaaattcgctgaacgagttcggggaaaaatgggagctgaacagtggggacggcgctttttacggacctaaaatcgacatacagatcaaggacgctataggccgatatcaccaatgcgctacaatccagctagatttccagctgccgataagattcaacctaacatatgtgtctcatgacggagacgataagaaacgacctgtgatagtgcatagagctatcctgggtagcgtcgagcggatgattgcaatcctcaccgagaactacggaggaaagtggcctttttggctgtcaccgagacaggtgatggtggtccccgtcggaccaacgtgcgacgagtacgcccaaaaggtgcgacagcagttccacgacgccaagtttatggcggatattgacctcgaccccggctgcaccctgaacaaaaaaattcggaacgctcagcttgcacagtataactttatcttagtggtgggcgaaaaagagaagatctcagggacggtgaacattcggaccagagacaacaaggtccacggagagaggaccatcagcgagaccatcgagcgcctccagcaattaaaggaatttcggagtaagcaagccgaagaagaattttag

SEQ ID NO: 208584 - DNA, 1809 bp, synthetic construct
  misc_feature 1..1809: note = Description of Artificial Sequence: Synthetic coding sequence
  source 1..1809: mol_type = other DNA
atgatccccttctggcagaagcggcagaagaagatcgccagccagctaaagagtctgtgcctgatggttaacagattaatgcgaaatctggggaagctccaccatattaaactgcctgtggaactggccatggaacgcgtgtacggcgggtgcctgtgttacggcccacctattgagaacggattttactacgacatgtatctggaagaggggggggtttcatctaacgatttttcaagtctggaggcactgtgtaagaaaatcattaaagagaaacaggccttcgagagactggaggtgaaaaaggagactctgctggccatgttcaagtataacaaatttaaatgcaggatattgaacgagaaggtcaacacgcctacgacaacggtctaccgatgtggtcctttgatcgatctctgtaggggcccacatgtgcgtcacacgggcaaaatcaaggctctgaaaatccataaaaactcctccacttactgggaggggaaggctgacatggagaccttgcaacggatctatgggatttccttccccgacccgaagatgctgaaagagtgggaaaagttccaagaagaggctaaaaacagggaccataggaagataggaagagatcaagagctgtatttcttccacgaattgtcccctggtagttgctttttcttacccaagggagcctacatctataatgcccttattgaatttattcgaagcgaatatagaaaacggggttttcaggaagtggtgacacctaatatatttaatagccgcctatggatgacgtccggacactggcagcattacagcgaaaatatgttctcctttgaggtcgagaaggagctttttgcactcaagccaatgaactgtcctggacactgccttatgttcgatcaccgtcctcgcagctggagagagctgcccttgcgcctcgcagattttggagtcctgcatcggaacgagctgtctggggcattaaccggactgacgcgcgtgcggcgtttccagcaggatgacgctcatatattttgcgctatggagcagatcgaagatgagatcaaggggtgtctggatttcttgcgaaccgtgtattccgtgtttggattttcctttaaattgaacctgtctaccagacccgaaaaatttcttggcgatattgaggtctgggatcaggctgagaagcaattggagaacagcctgaacgagtttggcgaaaagtgggagctcaatagcggtgatggggccttctatggccctaagatcgatattcagatcaaagacgccattggccgctatcatcagtgcgcgactatacagctggacttccagctgcctatcaggttcaacctgacatatgtgtcacatgatggagacgacaaaaaacggcctgtaattgtgcaccgcgcgatattgggctctgtggagagaatgatcgcaatccttacagagaattacggcgggaagtggcctttttggctcagtcctaggcaggtgatggtggtacctgtcggtcctacgtgtgacgagtatgcacaaaaggtacgtcagcagttccacgatgcaaaattcatggctgacatcgacctcgatcctggttgtaccctcaacaaaaagattagaaacgcacaactcgctcaatataactttatcctagtggtgggggaaaaggaaaagatttccggtactgtcaacatccgtactcgggataacaaagttcatggcgagagaaccatatccgagactatcgaaagactgcagcagcttaaagagttccggtcaaagcaggccgaggaggagttctag

SEQ ID NO: 208585 - DNA, 2271 bp, synthetic construct
  misc_feature 1..2271: note = Description of Artificial Sequence: Synthetic coding sequence
  source 1..2271: mol_type = other DNA
atgttcgaggagaaggccagcagccccagcggcaagatgggcggcgaagaaaagccaattggcgccggcgaagagaaacagaaagagggaggaaagaaaaagaacaaagagggttccggcgatgggggacgtgccgaacttaatccctggcctgagtatatatatacaagactagagatgtacaacattctgaaagcggagcacgacagcattctggcagagaaagctgagaaggacagtaaacccattaaggtgaccctccccgatggcaaacaagtcgacgccgagtcctggaagaccactccatatcagatcgcttgtggaatctcgcacaccgcctcttgcaagaacctgtctagtctcgcatctctgctggcttccgtcgcgattccatccagtggaatgccgtggccccccctgttttttctgcaagggctcgctgataacacggttattgctaaggtcaacaacgtggtctgggacctcgatcgccctttggaagaggactgtaccctggagttactgaagtttgaagatgaagaggcccaggccgtgtattggcacagttctgcccatattatgggcgaagccatggaacgggtgtacgggggctgcctatgttacggcccaccaattgagaatggtttttactacgatatgtacctggaggaaggaggtgtgagcagcaatgacttcagtagtctggaggctctttgcaaaaaaataattaaagaaaagcaagctttcgagcggctagaggttaagaaggagaccctcctcgctatgtttaaatacaacaagttcaagtgtcggatactgaatgaaaaagtgaatactcctaccactaccgtgtacagatgcggcccactcatcgatctttgccggggccctcatgtgcgacatacaggaaagattaaggctctaaaaattcacaaaaacagctctacgtactgggaaggtaaggccgatatggagactctacagaggatatatggcattagcttccccgaccccaagatgctgaaagaatgggaaaaattccaagaggaggcaaagaatcgggaccataggaagatcgggcgggaccaggagctgtactttttccatgaactttcccccgggtcgtgcttttttctgccaaaaggagcttatatttataacgcgctgatcgagttcattaggtccgaatatcgtaagagagggtttcaggaggttgtgaccccaaacattttcaattcccggctatggatgacaagtgggcattggcagcactattccgaaaacatgttctcatttgaagtcgaaaaagaacttttcgctctgaaacctatgaactgtccaggacattgtttaatgttcgatcatcgccctcgaagttggagggagcttccactgaggctcgccgacttcggtgtgctgcatcgcaatgaattgagcggtgcattaacaggcctcacaagggtgagacggttccagcaggacgacgctcatatattctgcgccatggaacagattgaggatgagattaagggatgcctagatttcctacgaaccgtgtatagcgtttttggtttctcgttcaagctgaatttgtccacgaggcccgagaaatttctaggcgatatagaagtttgggaccaggccgaaaagcagctcgagaacagcctgaatgagtttggggagaagtgggagttgaactcaggtgacggagcattttatgggccaaaaattgacatacagataaaggatgccattgggcggtaccatcaatgtgcgaccattcagctcgacttccagttgccaatacgctttaatttgacctacgtctctcacgacggggacgataaaaagagaccagtaatcgtgcatcgggccatcctgggaagcgttgagaggatgatcgccatactgactgagaactacggaggcaagtggccattctggctgtcaccacgccaggtgatggttgttcccgtgggtcctacatgcgatgagtatgcccaaaaagtgcggcagcaatttcacgatgctaagtttatggcagatatcgacttggatcctggttgtacgctcaataagaagatccgtaatgcacaactagctcaatacaactttatcctcgtggtgggcgaaaaggagaagatctctgggaccgtaaatatcagaaccagagacaacaaggtccacggggagcggacaatttccgaaacaatcgaaagattacagcagcttaaggaattccgaagcaagcaagccgaggaagagttttag

SEQ ID NO: 208586 - DNA, 2172 bp, synthetic construct
  misc_feature 1..2172: note = Description of Artificial Sequence: Synthetic coding sequence
  source 1..2172: mol_type = other DNA
atgttcgaggagaaggccagcagccccagcggcaagatgggcggcgaggaaaagcccattggagctggtgaagagaagcaaaaggaaggtgggaagaagaagaacaaggaaggcagcggtgacggtggcagggccgaattgaatccctggcctgagtacatttacacccggctagaaatgtataacattctgaaggctgaacatgattcaattctggccgagaaggccgaaaaagactccaaacctatcaaagtgactcttcctgatgggaagcaggtggacgctgaaagttggaagaccaccccctatcagatcgcctgcggcatttcccagggcctggctgacaacacagtgattgctaaagtgaataacgttgtgtgggacctcgaccgacctctagaagaggactgtacactagaattgctcaagtttgaagatgaagaagctcaagcagtctactggcatagctccgcacacatcatgggggaggctatggagcgcgtttacggagggtgcctatgttacggcccccctattgagaacggcttctactacgacatgtacttagaggaaggaggagtatcttcgaatgatttctcttctcttgaagccttgtgtaagaagatcatcaaagaaaagcaggcctttgaaaggctcgaagtgaaaaaagagacactcctggccatgttcaagtataacaagttcaaatgcaggatcctgaacgaaaaggtgaataccccgaccaccaccgtctaccgttgcggccctctgatcgatctgtgcagagggccacacgtgcgccacacggggaagatcaaggcactgaagatccacaagaattcgtctacctattgggagggcaaggctgacatggagactctgcaaaggatttatggaataagcttccctgatcctaaaatgctgaaggaatgggaaaaattccaagaagaggccaaaaatcgcgaccacaggaaaataggtcgtgaccaagagctctacttctttcacgagctctcccctggtagttgcttcttcctacctaagggggcgtacatttacaatgcgttgattgagtttatcaggtcagagtataggaaacggggcttccaggaggtcgtcacgcccaatatatttaattcgcgactctggatgacaagtgggcactggcagcactacagtgagaacatgttcagttttgaggttgaaaaagaactttttgcactgaaacccatgaattgtcctggccactgtcttatgtttgatcacagaccccggagttggagggaactgccactaaggctcgccgactttggggtcctccatagaaatgaactatctggggcactcaccgggctaacgcgggtgcggcggttccagcaagacgacgcgcacattttttgcgccatggagcagatcgaggatgagattaaggggtgcctggacttccttaggacagtttactctgtgttcggcttcagcttcaagctgaacctatccacaagaccagagaaattcctgggcgacatcgaagtgtgggaccaggcagagaagcagcttgagaattcactcaatgagtttggtgaaaagtgggagcttaactctggggatggagcattttacgggcctaagatcgatattcagattaaggatgcgattggtcgctaccaccagtgtgccaccatacagctggatttccaattacctatcagatttaatctgacttacgtgagtcacgatggcgacgataaaaagcgcccggtaatcgtgcaccgtgctatcctcggaagcgtcgagcgcatgattgccatactcaccgagaactacgggggcaagtggcccttctggttgtcccctcgacaagtaatggtagtgccagttggtcctacttgtgatgagtatgcccaaaaggtccggcaacaattccatgatgctaagtttatggccgatatcgacttagaccctgggtgcactttaaataagaagatccgcaacgcccagctggcgcagtacaatttcatattagtagtgggtgaaaaagagaaaatttccggaacagttaatatcagaactcgggacaacaaggtacatggcgaacggacaatctccgaaacgatagagcgcctccaacagcttaaggaatttcgttctaagcaggcagaagaggagttttag

SEQ ID NO: 208587 - DNA, 390 bp, synthetic construct
  misc_feature 1..390: note = Description of Artificial Sequence: Synthetic coding sequence
  source 1..390: mol_type = other DNA
atgttcgaggagaaggccagcagccccagcggcaagatgggcggcgaggagaaacctataggggcaggagaggaaaagcagaaggagggcggaaagaaaaaaaataaagaggggagtggcgatggagggagggccgagttgaatccgtggccagagtatatatacacacggcttgaaatgtacaacatcctcaaggctgagcacgatagcatcctcgcggaaaaggccgagaaggactccaaacccatcaaggttaccctgcccgacgggaagcaagtggacgccgaatcttggaaaaccaccccctatcagatcgcatgcggaatatcgcagggcttagccgataacaccgttattgccaaggtgaataacgtcgtgtgggacctgtag

SEQ ID NO: 208588 - DNA, 1860 bp, synthetic construct
  misc_feature 1..1860: note = Description of Artificial Sequence: Synthetic coding sequence
  source 1..1860: mol_type = other DNA
atggaggtggagctgagccagggcctggccgacaacaccgtgatcgcaaaagtcaacaatgtcgtgtgggatctggatcggccgctggaagaggactgtaccctcgagctgcttaagttcgaggacgaggaagctcaggcagtttactggcactctagtgcgcacatcatgggagaggccatggagcgagtctacggagggtgcctctgttacggccctcccattgagaatgggttttactacgatatgtatctggaggagggcggtgtgagcagcaacgacttctcctctcttgaggcattgtgcaaaaagataattaaggagaaacaagcattcgaaagactggaggtgaagaaagagactctgctggctatgttcaaatataacaagttcaagtgtagaattctgaacgagaaagtgaacactccaaccaccaccgtgtaccggtgtggtccattgatagatctgtgcaggggcccacatgtgcgccatactgggaagatcaaagcactcaaaatccataaaaatagtagtacgtattgggagggaaaagccgatatggaaacgttgcagagaatctacggaatctcctttcccgaccctaagatgctgaaagagtgggaaaagttccaggaggaggccaagaacagagaccatagaaaaatcggacgggaccaagaactgtatttctttcacgagctgtccccaggatcttgtttttttctgcccaagggcgcatatatatacaacgcacttatcgagttcattagaagcgaatacaggaagaggggcttccaggaggtagtgaccccaaatatttttaattctaggttatggatgacatctggtcattggcaacactattcagagaatatgttctcctttgaggtcgaaaaggaactatttgcactgaaacctatgaattgccccggccattgtctgatgttcgatcacagaccccgcagttggcgcgagcttcccttaagattggccgatttcggggttctgcaccgaaacgaattatccggcgctctaacaggccttaccagggtacgccgattccagcaggacgatgctcacattttttgcgcgatggaacaaatagaagacgaaattaagggctgtcttgactttctgagaaccgtgtactctgtctttggattttcgtttaagcttaatctcagcaccaggcctgagaaatttctgggggatatcgaagtgtgggaccaagctgaaaagcaactggagaattcgctgaacgaattcggggagaaatgggagctgaattccggagacggagcgttctatgggcctaaaatcgacatccaaatcaaggatgcaataggccggtaccatcagtgcgccaccattcagttggatttccagctccctataaggttcaacctgacctatgttagccacgatggcgatgacaagaagaggcctgtaatagttcaccgggccatactggggagtgttgagcggatgatcgctatcttaacagaaaattatggcggaaagtggcccttttggctgtccccccgacaggtgatggtggtgccagtggggccaacctgtgatgagtatgcccagaaggtgcgccagcagttccacgatgccaaattcatggctgatattgacctcgatccaggttgtaccttgaataagaagatacggaacgcccagcttgcgcagtataacttcatactggtagtgggagaaaaagaaaagatctccggaacagtgaatattcggaccagggacaataaagtgcatggcgagagaaccattagcgaaacaattgaacggttacagcagttaaaggagttcagaagcaagcaagctgaggaagagttctag

SEQ ID NO: 208589 - DNA, 1332 bp, synthetic construct
  misc_feature 1..1332: note = Description of Artificial Sequence: Synthetic coding sequence
  source 1..1332: mol_type = other DNA
atggagcacaaccccctgcccaccagccccgccgaccagttcaacactgggcggtattgctctggaccctcgacagaatatgggttttatcacgatttctttcttggaaaagagcgctgtgggactctcgtggacctatgtcagggcccccatttgaggcataccggtcaaattggcggcctgaaactcttgtccgctgagtacgcccataggggattctccgaggttaagacaccaactctgttcagcactaaactttgggagcagagtgggcactgggaacactatcaagaggacatgttcgccgtccagccgccgggatctgataggcctccctcaagtcagtccgacgatagcactagacacatcactgatacattggcactcaagccaatgaattgcccggcccactgcctgatgtttgcgcaccggccaagaagctggcgagagctgccactgaggttagccgactttggcgctctgcacagggcggaagccagcgggggcttaggcggcttaaccagacttagatgtttccaacaggacgatgcccatatcttctgcacgaccgaccagcttgaagccgaaatccagagctgcctggacttcctgcggagcgtgtatgccgtccttggcttctctttccggctggcactttccacacgacctagcggctttttaggcgacccatgcctttgggaccaggccgaacaggtactgaagcaagcactcaaagaattcggcgaaccctgggacttaaacagcggagatggggcattttatggacccaaaattgatgtgcaccttcatgacgccctggggagaccgcatcagtgcgggacaatccagctcgatttccaattgcccctccgattcgacctccaatataaaggacaggctggggcactggagcgccctgttctcatccatcgggctgtgctgggtagcgtagaaagacttttgggagttctggcagagtcctgtgggggcaaatggcctctgtggctgagtccattccaagtcgtggtcattcccgtcgggtccgaacaagaggaatacgccaaagaggctcagcaaagccttcgggccgccggactagtgagcgatctggacgctgactccgggctcaccctctccagacgcatccgccgagcccagttagctcactataacttccagttcgtcgtcggtcaaaaggagcaaagtaaacgtacagtgaatatcaggactcgcgacaataggagactgggagagtgggacctgcctgaagctgtacagaggctggttgagctccagaatacacgggtccccaacgccgaggaaatcttctag

SEQ ID NO: 208590 - DNA, 1332 bp, synthetic construct
  misc_feature 1..1332: note = Description of Artificial Sequence: Synthetic coding sequence
  source 1..1332: mol_type = other DNA
atggagcacaaccccctgcccaccagccccgccgaccagttcaacactggtaggtactgcagaggcccaagtacagagtacggcttctatcacgacttctttctgggcaaagaaaggtgcggaacgctcgtagacctgtgtcaggggccccatctgcgccacacggggcaaatcggagggctaaaactgctttcagcggaatacgcccacaggggtttctctgaggttaagacccctactctcttctcaaccaaactgtgggagcaatctgggcattgggagcactatcaggaggacatgttcgccgtccagccaccaggcagcgatagaccaccctccagccagtctgatgattcgactcgacacatcactgacacactggccctgaagccgatgaactgtccggctcattgtctgatgttcgctcaccgtccacgcagctggcgggaacttccactccgccttgctgatttcggagcactccatcgcgcggaggcgtcgggtggtctgggtggactcaccagactacgctgcttccagcaggatgatgctcacattttctgcactaccgaccaattagaagctgagatccagagctgcctggatttcttacgctctgtgtatgcagtgctgggctttagttttcgcctcgccttatccacccgcccatcaggcttcctgggggatccctgtctgtgggatcaggcagaacaggtcttgaagcaggccctgaaagagttcggtgaaccctgggacttaaactccggcgacggcgctttctacggcccaaagattgatgtacacctgcacgacgccctagggcgacctcaccagtgcgggacgatacagcttgattttcagttgcctttgcggttcgacctgcagtataagggccaggccggggccttggagagaccggttctcatacatcgagccgttttgggaagcgtagagagactgctgggggttttggcagagagttgcggaggaaaatggccgctgtggctttccccatttcaggttgttgtgatacccgtgggatcagaacaggaagagtacgccaaagaggcacagcagtccctgcgcgccgcaggactcgtgagcgacctcgacgccgatagcggcctaacgttgagtcgaagaattagaagagcacagctggcacattataatttccagttcgttgtgggacagaaagagcagtcaaaaaggactgtgaacataaggacaagggacaaccggcggctgggagaatgggacctcccagaggccgttcagcggctcgttgagctccaaaacacacgagtccccaacgctgaagagattttttag

SEQ ID NO: 208591 - DNA, 537 bp, synthetic construct
  misc_feature 1..537: note = Description of Artificial Sequence: Synthetic coding sequence
  source 1..537: mol_type = other DNA
atggccctgtaccagcggtggcggtgcctgcggctgcagggcctgcaggcctgtcgcctgcacaccgctgttgtgagcaccccaccccggtggctcgcggagaggcttggcttattcgaggagctgtgggctgcccaggtgaaacggctcgctagcatggcacagaaggagccaaggacaatcaaaattagcctgccggggggacaaaaaatcgacgcagtagcttggaacacgacaccctaccagcttgcgaggcagatatcatcaaccctagctgacacagccgttgccgcccaggtgaatggtgaaccatatgacctggaacggcccctggagacagattctgacctgagattcttgacctttgacagccctgaaggaaaggccgtctcattttttcttatcaggaataccgtcacgactaaacctcgtgatattgaggcggggaatagtaacatcctgtttttctgccggtcctttagtatttgttcgtgggaaggcgacttgcctcagaccgttctcacaatcagcggttag

SEQ ID NO: 208592 - DNA, 1767 bp, synthetic construct
  misc_feature 1..1767: note = Description of Artificial Sequence: Synthetic coding sequence
  source 1..1767: mol_type = other DNA
atggccctgtaccagcggtggcggtgcctgcggctgcagggcctgcaggcctgtagactgcatactgcagtcgtttccactccgccccgctggttggccgaacggttagggctttttgaggagctgtgggcagcacaggtgaaacgcctcgcatccatggcacagaaagaaccgagaacgataaaaattagtctgcctggtggacaaaagattgacgccgtcgcttggaataccacaccatatcagctggccagacagatctccagcacattagcagacacagcggttgccgcccaagtgaatggtgaaccctacgacctggaaagacctctggaaactgattccgacctgcggttcctaacctttgacagtcctgagggaaaggcagtgttttggcacagcagcacacatgtgttgggagcggcagccgaacagtttctgggcgccgtactgtgtcgcggcccatcgaccgaatacgggttctaccatgacttttttctcgggaaagaacgtaccattagaggatctgaacttcctgtcttggagcgaatttgtcaggagttgactgcggctgctcgtccattccggcgcctcgaggccagtagggatcaactgcggcagctgttcaaggccgagtacgctcaccgaggctttagcgaggtcaagactccaactctgttcagcactaagttgtgggagcagagcggccactgggaacactaccaggaagacatgttcgccgtgcagccccctggtagcgacagacctccctcctctcagtccgatgacagcaccaggcatattacagatacactagcattgaaacctatgaactgtccagcccactgcttgatgttcgcccaccggccccgtagctggcgcgagcttccactaagactcgcagactttggtgccctgcatagggcagaagcctccggaggcctaggaggcctgacccggctacgttgttttcaacaggatgacgcccatatcttctgtactacggaccagcttgaggcggagatccagtcatgtctcgacttcctaaggagtgtgtatgctgtgctgggtttctcattcaggttagcccttagcacacgaccctcaggattccttggcgatccgtgcctgtgggaccaggcagaacaggtgcttaagcaggctctcaaggaattcggagagccctgggatctcaactcaggggacggcgccttttacggcccaaagattgacgtgcacctacacgacgctttaggccgccctcaccagtgtggcaccatccagcttgatttccaactacccttgaggtttgacctgcagtacaaggggcaggccggcgcccttgaaagaccggtgctgattcaccgggctgttcttgggtccgtggaaagactgctgggtgtcctggctgagagctgtggtgggaaatggccactctggctgtctccctttcaggtcgtggtaattcccgtcgggtcggaacaggaagaatatgccaaagaagctcaacagagtttgagagcagctggcttggtgtctgacctcgatgccgacagcggcctgacgctgtcccgtagaatcaggagggcccagctggcccactataactttcaattcgtggtgggccaaaaagagcaatcaaaacgaacggtcaacattagaactagggataatagacggctcggcgagtgggacctccctgaggccgtacagaggctggtggagttgcagaatacacgggtgcccaacgcagaagaaattttctag

SEQ ID NO: 208593 - DNA, 2157 bp, synthetic construct
  misc_feature 1..2157: note = Description of Artificial Sequence: Synthetic coding sequence
  source 1..2157: mol_type = other DNA
atggccctgtaccagcggtggcggtgcctgcggctgcagggcctgcaggcgtgcaggctccataccgctgtggtgtccacgcctcctagatggctcgcagaaagactgggtcttttcgaggagctttgggccgcacaggtaaagcgcttagctagtatggctcagaaggagcccagaacgattaagatatcgttgccgggcgggcagaaaattgacgctgtggcttggaatactactccgtatcagcttgctaggcagatctcatcaacactcgccgatacagcagttgcggcccaagtgaatggcgagccctacgatctagaaagacccttagagaccgactcagacctccggtttttgacgttcgactcaccggaaggtaaggcagttttttggcattcgtctacccacgttttgggagcggcagcagagcaattcttgggtgcggtcctctgccgcggcccgtccactgaatacggattttaccatgacttttttctgggcaaagaacggacgatcagagggtctgagctgcctgtgctggagagaatctgtcaggaactcacagccgccgcccggccttttcgccgcctggaagctagccgcgaccaactgagacagctgtttaaagataacccatttaagctgcacctcatcgaagaaaaggtcaccggccctacagcaaccgtgtacggctgcggaactttggttgacctgtgtcaaggacctcacctgagacacactggacaaatcggtggtttaaagctgctgagcaattcatcatcgctgtggaggagctccggagcgccggagactcttcaacgggtctcaggtattagctttcctacgaccgaactcctgcgggtgtgggaagcatggagagaagaggctgaactgcgggaccacaggcggatcggcaaggaacaggagctgttcttctttcatgagctgtcccctggatcgtgttttttcctgcccaggggaacccgcgtgtataacgcgctagtcgcattcatccgtgcggaatacgcccacagaggattctcagaagtcaaaactcctacccttttctcaaccaagctctgggagcagtcaggccattgggagcactaccaggaggatatgtttgcagtgcaaccgcctggcagcgatcgccccccctctagtcagagcgacgatagtacgagacatattaccgacacactggcgctcaagccaatgaactgccctgctcattgtctgatgttcgcccataggcccaggtcatggcgggagctccctcttcggctggcagactttggggcacttcaccgggccgaagctagtggggggctgggcggcctgactaggctccgatgtttccagcaagacgacgcccacatattctgtacaaccgatcagcttgaggccgaaattcagtcgtgtctggacttccttcgcagtgtttacgccgttctcgggttttctttccgtctggcactgtcaacacggccctcagggtttctgggcgacccttgtctctgggatcaggccgaacaggtgctgaaacaggctttgaaagagtttggcgaaccatgggatttgaactctggggacggagccttttatgggcctaagatcgatgtgcacttacacgacgccctgggcagaccccaccagtgcggcactattcaactcgactttcaactgccgctcagattcgatctacagtacaaaggccaggcaggagcccttgagaggcctgtgctgattcatagggctgtcctgggatctgtggaaagactgctcggagtcctggccgaaagctgtgggggaaagtggcccctatggctgtccccttttcaagtggtggttatcccagtgggctcagaacaggaagaatacgctaaagaggcccaacaatccctacgggctgctggactggtgagcgatctggacgcagattccggcctgacactgtcccgccggatcaggagggcccagctagcccactataactttcagttcgtggtcggccaaaaagagcagagtaagcgtaccgttaacatacgaacaagggataatagaaggctgggagagtgggatttaccagaggcagtgcagagactggtcgagctgcaaaacacaagagtccctaatgcagaagagattttctag

SEQ ID NO: 208594 - DNA, 510 bp, synthetic construct
  misc_feature 1..510: note = Description of Artificial Sequence: Synthetic coding sequence
  source 1..510: mol_type = other DNA
atggccctgtaccagcggtggcggtgcctgcggctgcagggcctgcaggcctgtaggctgcacaccgccgttgtttctacgcctccccgctggctggccgaacgactggggctcttcgaagagctgtgggcagctcaagtcaagagacttgccagcatggcacagaaagagcctcggaccatcaagatcagtttgccaggcgggcagaagattgatgccgttgcgtggaacacaaccccttatcagctggcacgccagattagctctactttggccgatactgccgtcgcagcccaggttaatggcgagccatatgacctcgaacgtccgttggagaccgactccgatctcagattcttaacctttgactctcccgaggggaaggctgacaatcccggactgcgggctgcctgtttcggcgcagacctccccggtacatatagctgttgttcgaccttgccagaagcgcgggggtttacgggctctgcgagtccagtggtgcaggggtag

SEQ ID NO: 208595 - DNA, 4974 bp, synthetic construct
  misc_feature 1..4974: note = Description of Artificial Sequence: Synthetic coding sequence
  source 1..4974: mol_type = other DNA
atgggcctgcaggcccggcggtgggccagcggcagccggggcgccgccgggcctcgcagaggagtcttgcaactccttcccctgccattgcccctaccgctcctgctgctgctcttgttaagacctggggccgggcgggctgctgctcagggagaagccgaagccccgaccctctacctttggaaaaccggaccatggggcagatgtatgggcgacgaatgtgggccaggcggtattcagacacgcgccgtgtggtgtgcacacgtagagggttggacgaccctgcataccaactgtaagcaagctgagcgtcccaataatcaacagaattgctttaaagtctgcgattggcataaggagctttacgattggcgcctgggtccatggaatcagtgtcaacctgtaataagcaagagccttgagaaaccacttgagtgtattaaaggggaggagggcatccaagtgcgggagattgcttgcatccagaaggacaaggatatccccgccgaggacatcatttgtgagtatttcgaaccgaagccactcctcgaacaggcatgcctgattccttgtcaacaggactgtatcgtctcagagttctctgcatggagcgaatgttccaagacgtgcgggtcgggcttacagcacaggacccggcatgtggtcgcccccccgcagtttggtgggtctggctgtcctaatctcaccgaatttcaggtctgtcagagcagcccttgtgaggccgaagagctccgttactctctgcacgttggcccatggtcgacgtgctccatgccccatagccgccaggtgcgacaagcccgcagacggggcaaaaataaagagagggaaaaggatcgcagtaaaggcgttaaagatcctgaagcgagagaattaataaagaagaagcgtaatcggaataggcagaaccggcaagaaaataagtactgggatatacaaatcggctaccagactcgggaagtaatgtgtatcaataaaaccggtaaggctgcggatctatcgttttgtcagcaggagaaactgcccatgaccttccagagctgcgtaataacaaaagaatgtcaggtttccgaatggtctgaatggtctccctgctctaaaacctgccatgacatggtgagcccggccggcacacgtgtgcgaacacggaccattagacaatttcccataggatcggaaaaggagtgccccgaattcgaggagaaggagccgtgtttatcccaaggcgatggcgtggtgccttgtgccacatacggttggcgtacaacggagtggactgaatgtagggtggaccccttgttgagccagcaggataagagaagaggaaatcaaactgccctgtgcggagggggaattcagaccagagaggtctactgcgtgcaggccaacgagaatttacttagccaactctctacccataagaataaggaggcaagcaagcccatggaccttaagctgtgcactggaccaattccgaatactacccagctatgtcacatcccgtgcccaacagaatgcgaggtgtcaccatggagtgcgtgggggccctgtacatatgagaactgcaatgaccaacagggcaagaaaggattcaaactgcgcaaacggagaatcactaacgagccgacgggaggctctggggtcactgggaactgtcctcacctgcttgaggcgatcccttgtgaggaacccgcatgttatgattggaaggccgtgcgcctgggtaattgtgagcctgacaatggtaaggaatgcgggcctggtacccaagtgcaggaggttgtgtgcattaactcagatggggaggaggtggacaggcaactctgtcgggatgccatcttcccgatccctgtcgcctgcgatgccccctgccccaaggattgcgttctgtcaacctggtctacatggtccagctgttctcacacctgttcagggaagaccaccgagggcaaacagatcagagcgcgctcgattcttgcgtacgctggggaagagggagggatccgctgcccaaactcgtccgccctgcaggaagtgaggtcctgcaacgagcacccatgcaccgtgtaccactggcaaacagggccctggggccagtgtatagaagataccagcgtttcttccttcaacaccacaaccacatggaatggtgaggcttcttgttcggtgggcatgcaaacaaggaaagtcatctgcgtgcgcgtcaatgtgggccaggtagggcccaaaaagtgtcccgagtctctcaggcctgagacagttaggccttgcttgttgccctgtaaaaaggattgcatcgtcaccccttactcggactggaccagttgcccatcctcctgcaaagaaggcgactcatctataagaaaacagagccgccacagggttataattcagctacctgctaacggtggacgtgattgtaccgacccattatatgaggagaaggcttgtgaagccccccaggcatgccagagttacaggtggaaaactcacaagtggcggcgatgccagctggtgccttggagtgtgcaacaggacagcccgggcgctcaggagggctgcggtcccggtagacaggcgagagctattacatgcaggaagcaagacggtgggcaggccgggatccatgaatgtttgcaatacgctgggccagtgccagcgctaacccaggcctgccaaattccctgtcaggatgactgccaactgacttcctggtctaaattctcctcctgtaacggtgactgcggtgccgtaaggacacgaaagaggacactggttggtaaatctaagaagaaggagaagtgcaaaaattcacacctttatccactcattgagacacagtactgtccctgcgataagtacaacgctcagcctgtaggcaattggagtgattgtatactgccagaggggaaggtagaagtgttactaggaatgaaggtgcagggagacatcaaggagtgtgggcaaggctatcgttaccaagccatggcttgctatgaccagaacgggaggcttgtggaaaccagtcgttgtaactctcatgggtacatagaggaggcatgcataatcccttgcccatctgattgtaagctatcagagtggtcaaattggagtaggtgtagtaagagctgcgggtccggtgtcaaagtgcgatccaagtggctcagagagaagccgtacaacggcggaagaccctgccccaagctggaccacgtgaaccaatttcaggtgtacgaggtagttccgtgccactctgactgtaaccagtatctgtgggttaccgagccttggtccatttgcaaggtgacctttgtgaatatgcgtgaaaattgtggcgagggcgtgcagacaaggaaggtgagatgcatgcaaaatacggctgatggcccatcagaacatgtcgaggactatctctgcgatcctgaggaaatgccactgggatcccgagtgtgcaaactgccttgtccagaagattgtgtaatctccgagtgggggccatggacacaatgcgtgctgccctgcaaccaaagctcttttcggcagcgttctgccgatcccataagacagcccgctgacgagggccgcagttgtcccaatgccgtcgaaaaggagccttgtaaccttaacaaaaactgttatcactatgattacaatgtgactgattggtctacttgtcaactgtcagagaaggcagtgtgcggaaatggaataaagactagaatgctggactgtgtccgatccgacgggaagtctgtcgacctcaagtattgtgaagcacttggcctcgagaagaactggcagatgaacaccagttgtatggtcgaatgccccgtcaactgtcagctgtcagactggagcccttggtccgagtgctcccagacctgtggtctgaccggcaagatgatacgtaggcgcacggtaacacaaccattccagggagacggtcgaccctgtccttcactgatggatcagagcaagccatgccctgtcaaaccatgttatcgctggcagtacggccagtggagcccatgtcaggtgcaggaagcccagtgcggcgaaggaactaggactcgtaatatcagctgcgtggtctccgacggtagtgccgacgattttagtaaggtggtggatgaggagttctgcgccgacatcgagctgatcatcgacggaaataagaatatggtgcttgaggaaagttgtagtcaaccctgcccaggcgattgctacttgaaagattggtcctcttggtcactgtgtcaacttacttgtgtaaatggagaggacctcggttttggaggcattcaggtaaggtccaggcccgttattatacaggagttggaaaaccagcatctctgtcctgagcagatgctagagactaaatcttgctatgatggtcagtgctatgaatacaagtggatggcttctgcttggaaaggctcgagcaggaccgtttggtgtcagcggagcgacggcattaacgtcaccggggggtgtctcgtgatgagccagcctgacgcggaccggtcgtgcaaccctccgtgcagtcagccccactcatactgctccgagaccaagacatgccactgtgaggaaggatatactgaggtgatgagttctaacagcactttggagcagtgtaccttgattcccgttgtggtgctgcctactatggaggataaaaggggcgatgtcaagaccagtcgggctgtccatcccactcagccatcttctaatccagccggccgaggcagaacttggtttctgcagcccttcggccccgacggccgactgaagacatgggtgtacggtgttgccgccggggcgtttgtgcttcttatttttattgtatccatgatttacctggcatgtaaaaagcccaagaagccccaacggcgtcaaaacaaccgattgaagccgctgaccctggcctatgacggggacgccgacatgtag

SEQ ID NO: 208596 - DNA, 4974 bp, synthetic construct
  misc_feature 1..4974: note = Description of Artificial Sequence: Synthetic coding sequence
  source 1..4974: mol_type = other DNA
atgggcctgcaggcccggcggtgggccagcggcagccggggcgccgccggcccgcggcgcggcgtcctgcaattgcttccactaccactacctctgccgctcctgctcttattgctgctgagacctggtgctggcagagccgcagcgcaaggcgaagcagaggcaccaacactttacctttggaagacgggaccctggggtaggtgcatgggagacgagtgtggccctggcggaatccagacacgagcagtatggtgtgctcatgtggagggatggacaacattgcatacaaattgcaagcaagccgagaggcccaataatcagcaaaattgcttcaaggtgtgcgactggcacaaagagttatatgactggcggttgggcccttggaaccaatgtcaacccgtgatctcaaagtctttagagaaaccgttagagtgcatcaagggcgaggaaggcatccaggttcgtgaaattgcatgtatccaaaaagataaagacatcccagccgaggatatcatctgtgaatactttgagccaaagccactcctcgagcaagcgtgcttaataccatgccaacaggactgcatcgtttctgaattttccgcgtggtctgagtgctctaagacatgtggctcgggacttcagcatcgcaccaggcacgttgtcgcccctcctcagttcggcggctcaggctgccccaacctcactgaattccaagtgtgtcagagtagcccatgtgaggctgaggagcttagatactccctccatgtcgggccatggtccacctgcagcatgcctcactctcggcaggtccgacaagcaagaaggagggggaagaataaagagagggagaaagatcgatccaagggggtaaaagatcctgaggcccgagagcttattaaaaaaaaacggaaccggaacagacagaacagacaagaaaacaagtactgggacatccagatcgggtaccagacgcgagaggtgatgtgcattaataaaaccggcaaggctgcagatctatctttctgtcaacaggagaagcttcctatgactttccaatcctgcgtcataacaaaggagtgccaggtgtcggagtggagcgagtggtccccctgttctaaaacatgtcacgatatggtgtctcctgctgggaccagggtgcggactaggaccatccgccaattccctattggatccgagaaagaatgtcctgagttcgaagaaaaggagccgtgcctgtctcagggggacggcgtcgtcccctgtgccacctacggctggaggacaacagagtggaccgagtgccgggttgatcctttgctgagccagcaagataagcgtcgtggtaatcagaccgctttgtgcggtggtggtattcaaactcgggaagtgtactgcgtgcaggctaatgagaatttactgtctcaactctctactcacaaaaacaaggaggcttccaagccaatggacctaaagttgtgcactggccctattccaaacacgacccagctatgccacatcccatgtcccacagagtgcgaggtctctccgtggtcagcttggggcccgtgcacatatgaaaactgcaacgatcagcaagggaagaaagggtttaagctccgaaaacgccggatcacaaacgaacctacaggaggatccggcgtgacaggtaactgtcctcatctgctggaagcaatcccttgtgaagagccggcatgctacgactggaaagcggtgaggctaggtaattgcgagcctgataatggcaaagaatgtggccctggaacacaggtacaggaggtagtgtgtatcaattccgatggcgaggaagtggatcgtcagctgtgccgggacgcaattttccctatccctgtggcatgtgacgccccatgtcccaaggactgtgtactctcgacttggtcaacctggagttcctgtagtcacacatgctcaggcaaaactaccgaaggaaagcagatccgagccagaagtatcctcgcgtatgcgggggaggagggaggtattcggtgtcctaatagctcggcactacaggaggtaaggtcatgtaacgaacacccatgtaccgtatatcactggcaaactggtccttggggccagtgtatcgaagataccagtgtctccagtttcaatacgaccactacttggaatggcgaggcaagctgcagtgtgggaatgcagacccgaaaggtcatctgtgtaagagtaaacgttggccaagtcggtccgaaaaagtgccccgaatcattacgtccagaaacagtccggccgtgtttgctgccttgcaaaaaagactgcattgtaacaccatattccgactggacgagctgtcccagcagctgtaaggagggggatagttccatccgaaaacaaagtcggcaccgcgtgattattcagctgccagccaacggcggtagagactgcacggatccgttgtatgaggagaaggcttgtgaggccccgcaggcttgccaaagttatcgctggaagacccacaagtggagaaggtgccagttagtaccttggagcgtgcagcaggacagtcccggagcacaagaaggctgcggccccggtagacaggctagagcaattacttgtcgcaaacaagatggaggccaggccggtattcatgagtgcctgcagtatgcaggcccggtgccagccttaactcaggcatgccaaattccttgtcaagacgactgtcaattgaccagttggagcaaattttcatcctgcaacggcgactgtggtgccgtgcgcacccggaaaagaaccttagtgggaaagagtaaaaagaaggaaaaatgtaagaactcacatctctatccactgatcgaaacacagtactgtccctgcgataagtacaacgcccagcccgtcggcaactggtccgactgtatcctaccggagggcaaggtagaggtgctactcggaatgaaggtccagggtgatataaaagagtgtggtcaagggtatagataccaggccatggcgtgctacgatcaaaacggccggctggtcgagacatccagatgcaatagtcacgggtacatagaagaagcttgcattattccgtgcccctcagactgtaaattaagtgagtggtctaattggagtagatgctccaagagttgcggatctggcgtcaaggtacggagtaaatggctgcgggaaaagccatacaacggcggccgaccgtgccctaagctggaccacgtgaaccaggcccaggtgtatgaggtcgttccatgtcattccgactgcaaccagtatctgtgggtgactgagccctggagcatatgcaaagttacgttcgtgaacatgcgggagaactgtggggagggtgtgcaaacaagaaaggttcgttgcatgcaaaatactgccgacggcccttcggagcacgttgaggattatctgtgtgatccagaggaaatgccccttggaagcagggtctgcaaactgccctgtcctgaagactgtgtgatcagcgagtgggggccttggactcagtgtgtgctaccctgtaatcagtcctcctttcgccagcggagcgctgaccccatcagacagccggccgacgaaggaaggagctgcccaaatgccgtggagaaggagccctgcaatctgaacaaaaattgctaccactatgactataatgtcaccgactggtctacctgtcagttgtctgagaaggccgtgtgcggtaacggcattaagacaaggatgctggattgtgtgagatcggacggaaaaagtgttgacctcaaatattgcgaggccctagggctggagaaaaattggcaaatgaatacttcctgtatggtcgaatgtccagtcaattgtcaactgtcagactggtctccctggtctgaatgctcacaaacttgcggactcacaggaaaaatgatccgacggcgtaccgtgactcaaccctttcagggtgatgggcggccctgccccagcttgatggatcagagcaagccttgtcccgtgaagccatgttaccggtggcagtacgggcagtggtctccttgtcaggtgcaggaagcccagtgcggagaggggacgagaacaaggaacatctcctgcgtcgtcagtgatggttccgccgacgatttcagtaaagtggttgatgaggaattttgcgccgacatagagctcatcattgacggaaacaagaatatggtgctggaggaaagctgttcccagccgtgcccaggtgactgctatctgaaggactggagctcctggtccttgtgccaactgacgtgcgtcaatggagaggacttagggttcggcgggattcaggtccgttcacggcccgtcatcattcaggaactcgagaaccagcatctgtgtccagaacaaatgctggaaacgaaaagttgctacgatgggcagtgttacgaatataaatggatggcgagcgcctggaaagggtcatcaaggacagtctggtgccagcgaagcgacggtataaacgtgaccggtggctgcctagtgatgagtcagcctgacgctgatagatcctgcaacccgccatgtagccaacctcattcctactgctctgaaactaagacttgtcattgtgaagaagggtacactgaggttatgtccagtaactctacattggagcaatgcactttgatcccagtggtggttctcccgactatggaagacaaacgcggtgacgtaaaaacgtccagggctgtgcatcctacacagccctccagcaaccctgcaggaaggggtcggacatggtttctgcaaccatttggaccggacggaaggctaaaaacttgggtgtacggagtcgcggccggcgcctttgttctgctgatttttatcgtgtctatgatttacctggcttgcaagaagccgaaaaagcctcagaggcgtcagaataacaggctgaagcctctgacactggcctatgatggcgacgccgatatgtag

SEQ ID NO: 208597 - DNA, 2010 bp, synthetic construct
  misc_feature 1..2010: note = Description of Artificial Sequence: Synthetic coding sequence
  source 1..2010: mol_type = other DNA
atgagcgccctgctgagcctgtgcttcgtgctgcccctggccgcccctggtcacgggacacagggttgggaaccatgcactgacctgcgccccttggatatcctagctgaagtggttcctagcgacggcgcaacgagtggaatccgcatcgtgcaggtgcacggagctagagggctgcagctctctgtggctgcaccccgcaccatgtctttccccgcctcaaggattttcagccagtgcgatttattccctgaggagttcagcattgtcgtgactctgagagtgccaaaccttcctccgaagcggaatgaatacctcctgacggtggtggcggaagaatcggacctgttacttttaggtctccggctgagccccgcgcagttgcattttctatttttgagggaagacaccgccggcgcgtggcagactagagtgagctttaggtcccccgcattggtggatggtagatggcataccctagttctggcggtgtcagccggagtgttctcactcaccaccgactgcggtctccccgtcgatattatggccgacgtacccttccccgccacattaagtgtaaaaggagcaagattctttgtcggcagcagaaggcgcgctaaaggcctgttcatgggtctcgtcagacagctggtgctgctgccgggtagtgacgctaccccgagactgtgccccagcaggaatgcccccctggccgtgctatctattccacgagtacttcaagccttaactggcaagcccgaggataacgaagtgctgaaatatccatatgagacaaatattcgcgtcactttaggaccgcagcccccgtgtacggaggttgaggatgcccagttctggtttgacgcttctcggaaaggactgtatctttgtgtgggcaatgaatgggtgagtgtgcttgctgccaaggagcgcctggactacgtcgaagagcaccaaaatctgtcaaccaattccgagacactagggatcgaggtgtttcgtatcccccaggtcggcttgtttgtagcaaccgccaataggaaggctactagcgcagtctacaagtggacagaggagaaattcgtgtcatatcagaatatccctacacaccaggcccaggcctggcgacattttactattgggaaaaaaatttttcttgccgtggccaactttgagcccgacgagaaaggccaggagttttccgtcatatacaagtggtcacatcgcaagttgaaattcaccccctatcaaagtatcgctactcactccgctcgagactgggaagcctttgaagttgacggcgaacacttccttgccgtggccaatcatcgcgaaggcgataaccacaatatcgactcagtcatctacaagtggaaccccgcgacgcggcttttcgaggccaatcagacaattgctacctctggtgcatacgactgggagtttttcagtgtggggccttactcatttttggtggtggccaatactttcaacggcacctccactaaagtgcactctcacctatacattcgcctgttgggttcattccagctttttcagagtttcccgactttcggtgctgctgattgggaggtgttccagataggcgagcgtatctttttggctgttgccaacagccactcatacgacgtggaaatgcaagtgcagaacgactcatacgtcatcaacagcgtaatttacgaactcaacgttactgcacaagcattcgtgaagtttcaggatatactaacctgctccgctctggattgggaatttttttccgtcggcgaagactacttcctggttgtggctaacagctttgatggacggacctttagtgttaacagcatcatatatcgatggcagggctacgagggtttcgtggccgtccattctcttcctacagtgggttgcagagactgggaggctttcagtacaaccgcaggtgcatatctcatatatagctccgcgaaagagcctctttctagggtcctgcgtctcaggacgaggtag

SEQ ID NO: 208598 - DNA, 1800 bp, synthetic construct
  misc_feature 1..1800: note = Description of Artificial Sequence: Synthetic coding sequence
  source 1..1800: mol_type = other DNA
atgagcgccctgctgagcctgtgcttcgtgctgcccctggccgcccccggacatggaacccaggggtgggagccctgcaccgatttgcgccccttggatattctagccgaggtcgtccccagcgacggagccacttcaggtatccgcattgtgcaagtgcacggagcgcgtggcttgcaactaagcgtagctgcaccaagaacgatgtccttccccgcctctcggattttctcgcagtgtgatctttttccagaagagttcagcatcgtcgttacactgagggttccaaatctcccccctaaacgcaacgaatatctgctcacagtcgtggccgaggagtcggatctgctgctgcttgggctgcgactatccccggcacaattacacttcttgtttcttagggaggatactgccggggcgtggcaaaccagagtctccttccgctcccctgcattggtggacgggcgttggcacacactagtccttgctgtgagcgctggtgtctttagtctgacaaccgactgcggcctgcctgttgacataatggccgacgtgcccttcccagctaccctttccgtcaaaggggcacgcttcttcgtgggcagcaggagacgagctaaaggcctttttatgggcctggtgagacaactcgttctcctgcctggtagcgatgctactccgcgactctgccctagccgtaacgccccactggctgtcctcagtattccccgggtcctccaggccctgacgggtaagcccgaggacaacgaagttctaaagtatccatacgaaactaacataagggtgaccctcggcccacagcccccatgcactgaagtcgaggatgcccagttttggttcgatgcaagccgtaaggggctctacctctgtgttgggaacgagtgggtcagcgtgctagccgaagccaaggaacgcctcgattatgtggaggagcatcagaacctgagtactaatagcgagactctggggattgaggtgttcaggattccacaggtagggttgttcgtagctaccgcaaacagaaaggcaaccagtgcagtctacaagtggaccgaagagaagttcgtaagttaccagaatattcccactcaccaggcccaggcatggcggcacttcacgatcgggaagaagatcttcttagctgtggcaaatttcgaaccagatgagaaaggtcaggagttctcggtgatttataaatggtcacatcggaaactcaagtttaccccatatcaaagtattgctacccactccgcgagagactgggaggctttcgaagtggacggggaacacttcctggctgtggcaaaccaccgagaaggagacaatcacaacatcgattccgtgatctataagtggaatccagctacgagactgttcgaggcgaaccagaccattgctactagtggagcttacgattgggagttcttttctgtggggccttacagttttctggtggtcgccaatacgttcaacggcactagcacgaaagtgcactctcatctctatatccgccttctaggcagcttccagctgtttcagagcttccccacgtttggagctgccgattgggaggtcttccaaataggcgagagaatttttttggcagtggctaactcacattcttacgacgtggaaatgcaggtccagaatgacagttacgtgatcaacagtgtgatctacgagttaaatgtcacagcccaggcttttgtaaagtttcaggacatcttgacatgtagtggggggaggcgcgggttacacgctaggcgtgcggagggatag

SEQ ID NO: 208599 - DNA, 1569 bp, synthetic construct
  misc_feature 1..1569: note = Description of Artificial Sequence: Synthetic coding sequence
  source 1..1569: mol_type = other DNA
atgagcgccctgctgagcctgtgcttcgtgctgcccctggccgcccctggtcacggaacccagggatgggaaccctgcacagacctgagacctctggacattttagctgaagtagttccgtctgacggggcgaccagcgggattaggatcgtgcaggtgcatggcgctagaggcttgcagctatccgtcgccgccccccggaccatgtcgttcccagcaagcagaattttcagtcagtgtgacctgtttccagaggagtttagtattgtggtgaccctcagagtgcctaacctgcctcccaagaggaatgagtacctcctgacagttgtcgccgaggaatccgatttgctgcttttaggcctccggctctctcctgcccagcctccatgcaccgaggtcgaagacgcccagttctggtttgacgcttccaggaaggggctgtacctgtgcgtgggcaatgagtgggtgtctgtgctggctgctaaagaaaggctcgattatgtggaggagcaccagaatctgtcaactaacagcgagacactgggcatagaagtgttcagaataccccaggttggcctgtttgtggctaccgcaaatcggaaggctacgtcggccgtatataagtggactgaggagaagtttgtgtcatatcaaaatatacctacccaccaggcccaagcctggcggcactttaccatcggtaaaaagatttttcttgccgttgctaactttgagcctgacgaaaaggggcaagaattctccgtgatctataagtggtctcaccgcaagttgaagtttacaccttatcagagcatcgccacacatagcgctcgcgattgggaagctttcgaagtggacggtgaacacttcctggccgttgctaaccatcgggaaggggacaatcacaatattgattccgttatatacaagtggaaccccgccacccgcctatttgaagctaatcagactatagcgacaagcggagcttacgactgggaatttttcagcgtaggtccttacagtttcctggttgtggcgaacacatttaacgggacttctactaaggttcactcccatctatacatccggcttctcggttcctttcagctattccagtcattccccacatttggagcagcggattgggaagtgtttcaaatcggggagcgcatattcctggccgtcgccaacagccattcctatgatgttgagatgcaggtgcagaatgactcgtacgtgattaattctgtgatatacgagttgaacgtaacggcacaagcatttgtcaagtttcaggatatactgacttgctcagctctggattgggagtttttttcagtgggcgaggattattttctggttgtggctaattcattcgacggtagaacattttctgtcaactcaattatctatcgctggcaggggtatgaaggattcgtggcggtgcactctctgcctactgtggggtgtcgcgactgggaggcgttctccactactgcaggcgcctatctgatttatagtagtgcaaaagaacctctcagtagggtgctccgactgagaactagatag

SEQ ID NO: 208600 - DNA, 1605 bp, synthetic construct
  misc_feature 1..1605: note = Description of Artificial Sequence: Synthetic coding sequence
  source 1..1605: mol_type = other DNA
atgatggaggccctgggcttcctgaagctggaggtgaacggccccatggtgacagttgcactgtctgtcgcacttcttgctttactgaagtggtatagcacttctgccttcagccggctcgaaaagttagggctccgccaccccaagccctccccctttattggcaacttaaccttttttcgccagggattctgggaaagccaaatggagctcaggaaactctacggcccgctgtgcggatactacctgggaagacggatgttcatcgtgatatcagaaccggatatgatcaagcaggtgctggtcgaaaatttcagtaactttacaaaccgaatggcaagtggacttgagttcaaatctgttgctgactccgtcctgttcctgcgcgacaagaggtgggaggaggtcaggggggcactcatgagtgctttctccccagagaaactgaacgaaatggtccccctgatcagtcaggcatgcgagctgttactagctcatcttaagagatatgcggagtctggcgacgctttcgacatccagcgttgctactgcaactatactacagatgtcgtggcctccgtcgccttcggaacccccgtggatagctggcaggcacctgaagatccatttgtaaagcactgtaagagatttttcgagttttgcatcccgcggcccatacttgtcctgctgctcagctttccaagtataatggttcccttggcacgcattctgcccaataagaatagagatgagctgaatggctttttcaataaactgattagaaacgttattgccctgcgcgatcagcaggccgcagaggagaggaggagagattttctccagatggtgttagatgctagacattccgcgtctcctatgggcgtccaggactttgacattgtcagagatgtcttttccagtacgggttgcaagccaaatccttctcgacagcaccagccgagccctatggcccgcccgctgactgtagacgagatagtagggcaggcctttatctttcttatagcaggctatgaaatcatcaccaacactctgagttttgccacatacctgctggctaccaacccagattgccaagagaaactgctgcgggaagtggatgtcttcaaggaaaaacatatggccccagaattttgctccctggaggaaggcctaccttatttggatatggtcattgccgagaccctaagaatgtatcctcctgcgtttcggtttacaagggaagctgcgcaggattgtgaggttctgggtcagagaattcctgctggggccgtgctggaaatggctgtcggtgcactgcaccacgatcccgaacattggccctccccagagacttttaatccagagagattcactgccgaggctaggcagcagcacagacctttcacttacctgcccttcggcgccggtccaagatcgtgtctcggagtgcggctggggctgctggaggtgaaactaaccctcctacacgtgcttcacaaattcagatttcaggcctgccctgagacccaggtgccacttcagctggagtctaagtcagcgctcgggcctaagaatggagtctatatcaagatcgtcagtcggtag

SEQ ID NO: 208601 - DNA, 1602 bp, synthetic construct
  misc_feature 1..1602: note = Description of Artificial Sequence: Synthetic coding sequence
  source 1..1602: mol_type = other DNA
atggaggccctgggcttcctgaagctggaggtgaacggccccatggtcacagtcgctctatccgtcgcactgcttgctctgctcaagtggtatagtactagcgctttctccaggctcgagaagctcggcttacgccaccctaaaccttctcccttcattggtaatcttacgttttttcgccagggattttgggagagccagatggaactccgcaagctgtatggacccctgtgcggatactatcttggtcgacggatgttcatagtaatctctgagcccgacatgataaagcaggttttagtcgaaaattttagcaatttcactaacaggatggccagcggtctagagtttaagagtgtggccgattcagtgttatttttgagagataagcgatgggaggaggtgcgaggcgcgctcatgtcagctttttcccccgagaagttgaatgagatggtccctctgatcagccaggcctgtgaactgcttctggctcatctcaagaggtatgccgaatctggtgatgcattcgatatacagcggtgctattgtaattataccactgacgttgtggcgtccgtggcctttggaacgcccgtggacagctggcaggctccagaggaccccttcgtgaagcattgcaagcggttcttcgagttttgcatcccaagacctatcctcgtgttgctgcttagtttcccatctattatggtgcccctggcccgaattctgcctaataagaaccgcgacgagttgaacggatttttcaacaagctgatccgcaatgtaatagccctacgtgatcagcaggccgccgaggagaggcgtagagacttcctgcagatggtcttagatgcccggcatagtgctagtcccatgggggtgcaggacttcgatatcgtgcgcgatgttttctccagcacaggttgcaaaccaaatccatctagacagcaccagcccagtccaatggcccgacctctgaccgtggatgagattgttggacaggcctttatatttctcatcgccggctatgaaatcattactaacaccttatctttcgccacgtatctgctagccactaatcccgattgtcaggagaaactgttgcgcgaggttgacgtgttcaaggaaaagcacatggcacctgagttctgcagtctggaggaaggactcccttatttagatatggtgatcgccgagaccctgcgtatgtatccccctgccttccgatttaccagagaggccgctcaggactgtgaggtcctgggacaacggatccccgcaggagcagttttagagatggccgtcggggcccttcaccatgacccagagcactggccaagccctgaaacctttaaccctgagcgtttcacagccgaggcccggcagcagcatcgtcctttcacttacctaccattcggggcaggaccacggagttgtctcggcgttcggcttggcctcttggaggtgaagttaactctactacacgttctccacaaattccggttccaggcatgtcctgaaacgcaggtccccctgcagctggagagcaagagcgcgctgggccctaaaaatggggtttatataaaaatcgttagcagatag

SEQ ID NO: 208602 - DNA, 1380 bp, synthetic construct
  misc_feature 1..1380: note = Description of Artificial Sequence: Synthetic coding sequence
  source 1..1380: mol_type = other DNA
atggaggccctgggcttcctgaagctggaggtgaacggccccatggttacagtggcactctccgtcgccctgctcgcgctgctaaaatggtacagcacatccgcgttttcccgactagaaaagctaggtcttagacacccaaaaccatccccattcattggaaatctaacattctttcggcaggggttttgggagtcccaaatggagttgcggaaactgtacggccccctgtgcggttactatttggggcgccgcatgttcatcgtgatcagtgagccagacatgataaagcaggtcctcgtggaaaacttctcaaatttcacgaatagaatggcctctgggctggagtttaaaagcgttgcagactccgtattgtttttgcgggataaaagatgggaggaagtcagaggtgctctgatgtccgctttcagcccggagaagttaaacgagatggtgcccctaatctctcaagcttgcgagctcctgctggcccatctgaagagatacgccgagtcaggggacgcctttgatattcagaggtgctactgtaattacactacggacgtagtggcctctgtggcctttgggaccccagtagactcttggcaggccccagaggacccattcgtgaaacactgcaagcgattcttcgaattttgcataccaagaccgatcctggtgctgctgctgtccttcccctcgataatggtgcccctagcccgtattctgcctaacaagaacagagatgagttaaatggctttttcaataagctgatcaggaacgtcatcgcgttaagggatcagcaggccgcggaggagcgccgaagagacttcctacagatggtgctggatgccagacactccgcctccccgatgggcgtgcaggattttgatatcgtgagggacgtgttctcttccacaggatgtaagccaaacccttcaaggcaacaccagcctagtcccatggcccgacccctgactgtggacgaaattgtcggacaagcttttatattcttgattgctgggtatgagataataactaataccctgtctttcgcgacctatttgcttgctactaacccagattgtcaggaaaagctgcttcgcgaagtggacgtgttcaaagagaaacacatggcaccagagttctgcagtctcgaagagggcttgccctaccttgacatggtcatcgccgaaacgttacggatgtatccacccgctttccgatttacaagagaggccgcgcaggattgtgaagtactgggccagagaataccagccggggccgtcctagagatggcggtgggcgccctccaccacgacccggaacattggccttcccctgaaaccttcaatccggagcgataccgctgttcttag

SEQ ID NO: 208603 - DNA, 1383 bp, synthetic construct
  misc_feature 1..1383: note = Description of Artificial Sequence: Synthetic coding sequence
  source 1..1383: mol_type = other DNA
atgatggaggccctgggcttcctgaagctggaggtgaacggccccatggtcaccgtggctctgagcgtggctcttctggccctgctaaagtggtattccacatccgcctttagcagactggagaagctgggcttgcgtcatcctaagccatccccatttatcggcaatttgactttctttaggcagggtttctgggagtcccagatggagcttcgcaagctgtatgggcctctgtgtgggtactacctcggccgccggatgtttatagtaatcagcgagcccgatatgattaagcaggtcctggtggagaactttagcaacttcacaaatcgaatggccagcggactagagttcaagagtgtggcggacagcgtgcttttcctgcgcgacaaacgatgggaggaagttagaggcgcgctgatgtctgcgttctcacccgaaaaattaaatgagatggtacccctgatatcacaggcatgtgaactgctgttagctcatcttaaaaggtacgctgagagtggcgacgcgtttgatattcagagatgctattgcaattatactacagatgttgtagcgtccgtagcttttggcacccctgtcgatagttggcaggcacccgaggaccccttcgttaagcattgtaaaagattttttgagttttgtattccaagacctattctggtgttgcttttgtcattcccttctattatggtgccactggcaaggatcttacccaataaaaaccgagatgagctcaacggtttttttaataaactgatccgaaatgtgattgccctcagggatcaacaggcggcagaggaacgaaggagggactttctccagatggtacttgacgcccgccatagtgctagtcccatgggagtccaagacttcgacatagttcgagatgtgttcagctccacagggtgtaagcctaatcccagccggcagcatcagccaagcccgatggctagacctttaaccgttgatgaaatcgtgggccaggcgttcatcttcctaattgcaggctatgagattattacgaatacgctctcctttgccacctacctgctcgcaactaacccagattgccaggaaaagctcttaagggaggtagatgtttttaaagagaagcacatggcccccgaattctgttcgctggaggaaggtctgccctatcttgatatggtgatcgctgagaccttgaggatgtaccctcccgctttcaggttcaccagagaggctgcccaggattgcgaggttttaggacagagaatccccgcgggggctgttctagaaatggctgtcggcgccttgcatcatgacccagaacattggcccagccctgagacgttcaatcctgaacgatatcggtgttcatag

SEQ ID NO: 208604 - DNA, 1743 bp, synthetic construct
  misc_feature 1..1743: note = Description of Artificial Sequence: Synthetic coding sequence
  source 1..1743: mol_type = other DNA
atgatggaggccctgggcttcctgaagctggaggtgaacggccccatggtaactgtggcactgagcgttgccctgctcgccttgcttaagtggtactcaacatctgccttcagtaggctggagaagctgggccttaggcatccgaaaccaagcccgtttattggtaatctgacgtttttcagacaggggttctgggagagccagatggagttgcggaagctgtatggaccactgtgtggttactatctgggaaggcgaatgtttattgttatctcggagccagacatgataaagcaggtgctggttgagaacttctccaactttacgaataggatggcgtcaggcttagagtttaagagcgtggctgactctgtactgtttcttagagacaagcgttgggaggaggtaaggggggcccttatgtcagctttttccccggagaagctgaatgaactgggtcttctcatcatgcaggagaggattaaggggcacatgggaggacagcaggccccacagcgcattcctccgactcggctatctaagcccagtggcatctacgtgaatttacactacgccactctacctttttgcatggtgcctttaatttcacaggcctgcgagctattgctggcgcacctcaagaggtatgcagagtcaggcgacgctttcgacatacagcggtgctattgtaattatacgaccgatgtggtggcatccgtggccttcggaacacctgtggactcttggcaagctcccgaggacccgttcgttaaacactgtaagcgcttttttgagttctgtattcctagacctatccttgtcctgcttctaagttttccttccatcatggtccctctcgcacgtatactcccgaacaagaacagagacgaactcaatggtttttttaacaagctcatccgaaatgtcatcgccctgcgcgatcaacaggcagcagaagaacgccgtcgtgacttcctccagatggtgctcgatgccaggcattctgcttcccccatgggtgtgcaagatttcgacatagtccgcgacgtgttctctagcaccggctgcaagcccaaccctagccgccagcaccagccctcgccaatggccaggcctctgactgttgatgagattgtcgggcaggctttcatatttttgattgctggctacgagatcataaccaataccctcagcttcgctacctaccttctggcgaccaatcctgactgccaagagaaacttctaagggaagtggatgtgttcaaggaaaagcacatggccccggagttttgctctctagaagagggtctaccttacctggatatggtgatcgcagaaacactgcgtatgtaccctcccgctttccgcttcactagagaggcggctcaggattgtgaagtcctggggcagcggatccccgctggcgccgtcttagaaatggctgtaggcgcacttcaccacgacccagaacactggccatctccggagacattcaacccagagagatttaccgcagaagctcgtcaacagcatcgcccattcacctatcttcctttcggggctgggccccgctcctgtttaggagtacgcctgggtctgctggaggtgaagctgaccctgctccacgtgctccataagttcagattccaagcttgtccggaaactcaggtgccgttgcagctcgaaagtaaatccgcattgggccctaagaacggcgtgtacattaagatcgtcagccgatag

SEQ ID NO: 208605 - DNA, 1605 bp, synthetic construct
  misc_feature 1..1605: note = Description of Artificial Sequence: Synthetic coding sequence
  source 1..1605: mol_type = other DNA
atgatggaggccctgggcttcctgaagctggaggtgaacggccccatggtgacagttgctctcagcgtcgccctattagccctgcttaagtggtattcaaccagcgccttttcacggcttgagaagctgggtcttagacatcctaagccaagtccctttattggcaacctgacgtttttccgacagggcttttgggaatcccagatggagttgaggaagctgtatggacccctttgtgggtattacctagggcggagaatgttcattgtgatttctgagcccgacatgataaaacaggtgctcgtggaaaactttagcaattttactaaccggatggccagcgggctggagtttaaaagtgtggccgactccgtcttattcctgcgggataaacgctgggaggaggtgagaggtgccttgatgagcgccttttcccctgaaaaactgaacgagatggttccgctcatcagtcaagcatgcgagttactgctcgctcatctaaagcggtatgctgaatctggcgacgcgtttgacatccagcgttgctattgcaattacacaacggacgtggtggcatccgtcgcttttggtactccagtagactcatggcaggcccctgaagaccctttcgtcaagcattgcaagaggtttttcgaattctgtatcccaagacccatcctcgttctactgctcagtttccccagcatcatggtgccactagccagaatcctgccgaacaagaacagggatgaacttaatggtttttttaacaagctgatccgcaatgtcattgctctgagggaccaacaggcagccgaggagcgaagacgggatttcttgcagatggtcctggacgctcgccactccgcttccccaatgggcgttcaggatttcgatatcgtccgggacgtgttttcctctaccggctgcaaacccaatccatccaggcagcatcagccttcgccaatggctaggcctttgaccgtcgacgagatcgtgggacaggctttcatctttctcattgcaggttatgagattataactaataccttgtcctttgcaacataccttcttgccactaaccccgactgtcaggagaagctcctgcgcgaggtggacgttttcaaagagaagcacatggctccagagttctgtagcctggaagaaggtttgccctacttagatatggtgatagcagagacccttcggatgtatccgcctgctttccgtttcacccgggaagctgcacaggattgtgaggtgttaggacagcggatccccgcaggagcagtgctagagatggccgtgggagccctgcaccatgatccagagcactggccatctccggaaacattcaatccagagcgcttcacggctgaagcccggcagcagcacaggccatttacgtatttgccattcggtgctggaccgagatcatgcctgggcgtgaggctaggcttactcgaagtgaagctgaccttactgcatgtgctgcacaagttccggttccaggcgtgccctgagacacaggtgcccctacagctggagtcaaaatccgctcttgggcctaaaaacggtgtctatatcaagatcgtaagcaggtag

SEQ ID NO: 208606 - DNA, 453 bp, synthetic construct
  misc_feature 1..453: note = Description of Artificial Sequence: Synthetic coding sequence
  source 1..453: mol_type = other DNA
atggaggccctgggcttcctgaagctggaggtgaacggccccatggtaacggtggctctgagcgttgcactgctggcactactgaaatggtacagcacttccgctttctcgagactggagaaactcggactgcgacaccccaagccttccccctttatcggaaacctgacattctttaggcaagggttctgggaatcacagatggagctcaggaagctctatggccctctgtgcggctactacctcggcagacgtatgttcatcgtaatctctgagccagatatgattaaacaggtgcttgtcgagaacttctccaactttacgaataggatggcatccggcctggagttcaaatcggtggctgattccgtgctattcctgcgcgataaacggtgggaagaagttcgtggagccttaatgtcggctttttcaccagagaaactcaatgagtag

SEQ ID NO: 208607 - DNA, 1602 bp, synthetic construct
  misc_feature 1..1602: note = Description of Artificial Sequence: Synthetic coding sequence
  source 1..1602: mol_type = other DNA
atggaggccctgggcttcctgaagctggaggtgaacggccccatggtgaccgttgcgctcagtgtagccctcctggcccttcttaagtggtattctactagcgccttcagtagattagagaaactcggtctgagacaccccaaaccaagccctttcattgggaatcttacatttttcaggcaagggttttgggagtctcagatggaactccggaaactgtacggccccctttgtggctattacctgggaagaaggatgttcatcgtcataagcgagcctgacatgattaaacaagtgctggttgaaaattttagcaacttcactaacagaatggccagcgggctggaattcaaatcagtggctgatagcgtcctattcttgcgggataagagatgggaagaagtgcggggagccttgatgagcgccttttcacctgaaaaactgaatgaaatggtgccccttatctctcaggcttgcgagcttctgctagcccatcttaaacgctacgctgagtcgggagatgcctttgacatccagcggtgctactgtaactatacaactgacgtagtggcaagtgtggccttcggaactccagtggatagctggcaggcgcccgaggatccttttgtgaaacactgtaagagatttttcgaattctgcatacctcgaccaatcctggttctgctcctgtcattcccttccatcatggtgcctctagcaaggatacttcctaataagaaccgtgacgaactgaatggattttttaataaattgatccggaacgtgatcgctctgagggaccaacaggctgctgaagaaagaagaagagactttctgcagatggtgcttgacgccaggcacagtgcttctcctatgggagtccaggactttgacatcgtgagagacgtattcagttccaccggatgcaaacctaatccaagtcgtcagcatcaaccatcgccgatggctcgtcccctgaccgttgacgaaatagttggtcaggccttcatcttcttaatcgccggatacgagatcatcaccaatactctaagttttgctacctatctgcttgccacaaacccagattgccaggagaaactactgcgcgaagtggatgtctttaaagagaagcatatggcgcccgaattttgcagtcttgaggagggtctgccatacttggacatggtcatcgccgaaacgctccggatgtatccaccggcattcagatttactcgggaggcggctcaggattgcgaagtcctcgggcagagaatccctgccggcgctgtgttggaaatggccgtgggggctcttcaccatgaccccgagcactggcctagtccagaaacgtttaaccccgagcgcttcaccgcagaagcccgtcagcagcatagaccatttacatacctgccatttggcgccgggccacgcagttgcctgggagtgcgtctcggcctcctggaagtgaagctcaccttgctacacgtgctccacaaattccgatttcaggcttgccccgagacccaggttccactgcaattggaaagcaagagcgctcttggtcctaagaacggggtgtacattaaaattgtatcccgatag

SEQ ID NO: 208608 - DNA, 459 bp, synthetic construct
  misc_feature 1..459: note = Description of Artificial Sequence: Synthetic coding sequence
  source 1..459: mol_type = other DNA
atgatggaggccctgggcttcctgaagctggaggtgaacggccccatggttacagtggcactgtccgtggccctgctagcccttctgaagtggtattcaacaagtgcgttttccaggctcgaaaagctaggcctacggcaccccaagccttcgccttttatagggaatctcacctttttccgtcaaggcttctgggaatcccagatggagctgcggaaactctatgggcccctgtgtggctattacctgggccggagaatgtttatcgttattagtgagccagacatgatcaaacaggtcttggtggaaaacttcagtaactttacaaaccgcatgccccagtcaattatgcctaattcacgccaccacgttgcaagtcggggaatgtggcctggaggtaggaggttggcatgctacctgcatcctttccggatggctgagggcattgcagaggtgtag

SEQ ID NO: 208609 - DNA, 1401 bp, synthetic construct
  misc_feature 1..1401: note = Description of Artificial Sequence: Synthetic coding sequence
  source 1..1401: mol_type = other DNA
atggagctgcggaagctgtacggccccctgtgcggctactacctgggtcgtcgtatgttcatcgtgatttcggagcccgacatgataaaacaggtccttgtggagaatttctctaacttcaccaaccgaatggcctcgggcttagagttcaagagtgtcgccgactccgttcttttcctccgggataagcggtgggaagaggtgcgcggcgcgctgatgtccgcattcagtcccgaaaaattgaatgaaatggtacccttgatcagtcaggcctgtgaactgttgttggcccacctgaaaaggtatgcggagtcgggggacgccttcgatatccaacgttgctattgtaactatacgacagacgtcgtagccagcgttgcttttgggactccagttgactcatggcaggcaccggaagaccccttcgtcaagcactgtaaacgcttttttgagttctgcattccccgtccgattcttgtgttactcctgagctttcctagtatcatggtgccgctggccagaatcctaccaaataagaacagagacgaattgaatggcttttttaataagttgattaggaatgtcatcgcgttgcgggatcaacaggccgctgaagaaaggcgcagggacttcctgcagatggtcctggatgcaaggcacagtgcctcccccatgggagtgcaggacttcgatatcgtgcgcgacgtgttctcctctacaggctgcaaacctaatccctcacgccagcatcagccaagtcctatggcacggccgctcactgtcgacgagattgtcggccaggccttcatcttcctcatcgccggctatgaaatcatcactaataccctgtcctttgccacctacttgttggccacaaaccccgactgccaggagaaactgctccgagaagtggacgtatttaaggaaaagcacatggccccggaattctgtagtttagaagagggattgccgtacctggacatggttattgctgagactttgcggatgtacccacctgcctttcggttcactagagaagcagctcaggactgtgaagttctaggccagcgcatacctgctggggctgtcctggaaatggccgtcggcgctctccaccacgaccccgagcactggccgagccccgagacgttcaatccagaaagattcaccgctgaggctaggcaacagcatcgacccttcacctatttgccgttcggagcaggtcccaggagttgtctgggagtaaggttgggcctcctggaggttaaattaactctgctgcacgtactgcataagtttaggtttcaggcctgtcctgagacgcaagtgccactacagttggaatctaagagtgctttaggcccaaagaatggagtctacatcaaaatcgtgtcccgctag

SEQ ID NO: 208610 - DNA, 1032 bp, synthetic construct
  misc_feature 1..1032: note = Description of Artificial Sequence: Synthetic coding sequence
  source 1..1032: mol_type = other DNA
atgtggcccaacggcagcagcctgggcccctgcttccggcccaccaatatcacactggaggagcgacggttaattgcctccccctggttcgctgcatccttctgtgtggtgggcctggcttctaaccttcttgccttgtcagtcctcgcaggggcccggcagggcggatctcatactcgatcctcgtttctcactttcctgtgcggcttggtactcaccgacttcctcggtctgcttgttaccggtaccatcgtggtctcccagcacgctgctctgtttgagtggcatgctgttgatcctggctgtcggctctgtaggtttatgggggtggtaatgatcttcttcggcctgtcccccctcctcctgggcgccgctatggcgtctgaacgatacctagggatcacacgcccgttcagtcgaccagctgtggcttcacagagaagagcctgggcaacagtggggttagtgtgggccgccgctttggcgctggggctcctgcctctgctgggcgtcggcagatacaccgtgcagtatcctggctcctggtgcttcctaacgctgggggctgaatctggggatgtcgctttcggactgctattcagcatgctcgggggactgtcagtgggcctgagcttcctgctgaatactgtctcagtggcaactctgtgtcacgtgtatcatggtcaagaagcagcacaacagcgtcctagagattcagaggtcgagatgatggcacagttgctcggcataatggtcgtcgcatcagtgtgctggctgcccctgttagtgttcattgctcaaacagtgcttcggaatccacctgctatgtcacccgccgggcagctatctcggacaaccgagaaagagctcctgatttatctgagagtcgctacatggaaccaaatcttggatccttgggtgtatatcctgttccggcgcgcagtcctcaggcgtctgcaacccaggctgtccactcgccctagatcactcagcctccagccccagctgacacaaaggagcggccttcaatag

SEQ ID NO: 208611 - DNA, 1224 bp, synthetic construct
  misc_feature 1..1224: note = Description of Artificial Sequence: Synthetic coding sequence
  source 1..1224: mol_type = other DNA
atgtggcccaacggcagcagcctgggcccctgcttccggcccaccaatattaccctggaagagcgccgtctgattgcatcgccctggttcgccgcttcgttctgtgtcgtgggccttgcttccaaccttctggcccttagcgtgcttgccggagccagacagggaggaagtcacacacggagcagtttcctgacattcttatgcgggctagtactcaccgacttcctgggtctcctggtgaccgggacaatcgtggtgagccaacacgcggcacttttcgagtggcatgccgttgatcccggatgtagattatgccgcttcatgggagtggtaatgattttcttcgggttgtccccactcttactgggagctgcgatggccagtgagaggtatttaggtattacccggcctttttcccgccctgccgtggcctcccagcggcgggcttgggccaccgtgggccttgtgtgggctgccgccctggcactaggtctccttcctcttctgggggtcggccgatacacggtccagtaccctgggagttggtgctttctgactttgggggcagagtctggggatgttgcattcggcctcctgttctctatgctcggagggttgtcagtcgggctgtcatttctcctcaatactgtcagcgtggcgaccctgtgccacgtataccacggccaggaagctgctcagcagaggcctcgggatagcgaagtggagatgatggctcagctgctaggaattatggtcgtcgccagcgtctgttggctcccattactagtgtttatcgcacagaccgttctccggaatccacccgccatgagcccagctggacagctgtcaagaacaaccgagaaagagctattgatttatttaagagttgctacctggaaccaaattctggacccttgggtttacattctattcagacgggcagttttacgaagactacagcctagactgtcaacccggccaagacgctcactcactctctggcccagtctagagtacagtggcaccatctcagctcactgcaatctgcggcttccaggctcctcagactcacgggccagcgccagccgggccgcggggatcaccggcgtttctcattgcgcacgaccctgcatgctgttcgacccagaatttgatctcctcgctggagtacagctgcttccttttgagcctcccaccggcaaagcactgtcgcgaaaggattag

SEQ ID NO: 208612 - DNA, 1422 bp, synthetic construct
  misc_feature 1..1422: note = Description of Artificial Sequence: Synthetic coding sequence
  source 1..1422: mol_type = other DNA
atgcgggaggtgcgggcccggctggccgccacccaggtggagtacatcagcggcaaggtgttcttcaccacgtgtagcgacctgaatatgctgaaaaagctaaagtccgcggaacgcctgtttctgttgatcaaaaaacagtttcccctcatcatttcttccgtgtctaaagggaagatcttcaatgagatgcagagactgatcaatgaagacccaggttcttggttaaacgcaattagcatatggaagaacctcctggaactggacgcgaagaaggagaagctttcccagcgtgacgataaccaactaaagcggaaagttggcgagaatgaaatcattgccaagaagttgaaaatcgaacagatgcagaaaatcgaggagaacagagattgccaactggaaaagcagataaaggaagaaacactcgagcagcgcgactttacaacaaaatcagagaagttccaagaagaagagtttcagaacgatattgaaaaggccatcgacacgcacaaccagaatgatttgacattccgcgtgtcttgccggtgttctggcacaattgggaaggcatttaccgcacaagaggtgggaaaggtcatcggcattgccattatgaagcacttcggatggaaggcagacttgaggaacccgcagttggagatattcatccatctgaacgatatctatagcgtagttgggatccccgtgttccgcgtttcactggcttctagggcatatattaagacagccggcctgcgtagcacaattgcgtgggccatggcttcgctggcggacataaaagctggagccttcgtgttggaccctatgtgcggattggggaccattctcctggaggcagccaaagagtggcccgatgtttattacgtgggcgccgatgtgtcagatagtcaactcctggggacctgggacaatcttaaagcagcggggcttgaggacaagatcgagcttcttaaaattagcgtcatcgaactgcctctcccatccgagagtgtggacattatcatttcagacattcctttcggaaaaaagtttaagctcggaaaagatattaaatcgattctgcaggagatggagcgggtactccatgtcggtggtaccatagtgttgctgctgtccgaggaccaccacaggcggctgacagattgcaaggagtctaatatcccttttaactcaaaggattcacacaccgacgaaccgggcattaagaagtgccttaaccctgaggaaaaaacgggggcatttaaaactgcgtcaacatcatttgaggcctctaatcataaattccttgatagaatgtctcctttcggttcgcttgtgcctgtagagtgctataaggtgtccctcgggaagacagatgcttttatttgtaaatataaaaaaagccacagttcaggtttgtag

SEQ ID NO: 208613 - DNA, 873 bp, synthetic construct
  misc_feature 1..873: note = Description of Artificial Sequence: Synthetic coding sequence
  source 1..873: mol_type = other DNA
atgcgggaggtgcgggcccggctggccgccacccaggtggagtacatcagcggaaaagtttttttcaccacttgtagcgatctcaatatgctaaagaaacttaagagcgccgaacgcctcttcttattgattaaaaaacagtttccactgattataagcagcgtgtccaagggcaaaatcttcaatgaaatgcagaggttaattaacgaggacccaggttcatggttgaacgccatctccatctggaagaacttgctcgagttagacgccaagaaggagaagttgtcccagcgagatgacaaccagttgaagagaaaagtgggtgagaacgagatcattgctaaaaagctgaagattgaacaaatgcagaagatagaggagaaccgtgactgtcaattggagaagcagattaaagaggagaccttggagcagcgcgattttacgacaaagagcgagaaatttcaggaggaagagtttcagaatgacatagagaaggcaattgatacccacaatcagaatgacctgactttcagggtgtcctgccggtgctccggaacaatcggcaaggcatttacggcccaggtcctttacatgggtctgagccctggtcctcgcttacagatgcatatgaggtcccagcaatgtagagaggaaaggactccgcagaccgtggctatcacgaggcctcaccagctcgccctgaccaagttctcggatgtgaagggtcactggagcgagtatttcataaacctaaaaatatcccagactctcaaagggggacgcaagtcgaactggaactgctactatgagacattgtggatggaatcgcgtctcgaagagtctacaatccgtgacttgtacacgtctaaatag

SEQ ID NO: 208614 - DNA, 1512 bp, synthetic construct
  misc_feature 1..1512: note = Description of Artificial Sequence: Synthetic coding sequence
  source 1..1512: mol_type = other DNA
atgagcgaggcccggggcgagcccggcagcggccccgaggccggcgcacgcttcttctgtacagcgggacgcggcctggaacctttcgttatgcgggaggtgcgggctcgcttggcggccacacaggtggaatatatttcggggaaagttttcttcactacctgctccgacttgaatatgctgaagaaactaaagtcagcagagcgattgttcttactgatcaagaagcagtttccgctgatcatctcatccgtgtccaaaggaaaaattttcaatgaaatgcagaggttgattaacgaggacccggggtcctggctgaacgcgatatcaatttggaagaatctcctggaactcgatgctaagaaggaaaaattgagccagagggacgacaaccaattgaaaagaaaggttggcgaaaacgagatcatcgcaaagaagctgaagatcgagcaaatgcagaaaatagaagagaacagggattgtcaactcgagaaacagattaaagaagagacccttgagcagcgcgatttcactactaaatcagagaagtttcaggaggaagaattccaaaacgacatcgaaaaagcaattgacacgcataaccagaatgatctcactttccgggttagctgcaggtgcagcggaactatcggcaaggcgttcacagcccaagaagtgggaaaggtgatcggcattgccatcatgaaacattttgggtggaaggctgacctgagaaatccacaactcgagatattcatacacttaaatgatatttactcggtcgtgggtattcctgtgtttcgggtgagcctggcctcacgagcttatattaaaacagcaggtctacggagcactatcgcctgggctatggcaagtttggctgacattaaggccggcgcattcgtgctcgacccaatgtgtggcctgggcactatcttgttggaagccgcaaaggagtggcccgacgtgtactacgtgggtgcagacgtgagcgatagccagctgctgggtacctgggataacttgaaagccgctggactggaggacaaaatcgaactcttaaagatctccgtcatcgagctgccactgcccagcgagtccgtggacatcattatatcggacattccgtttggcaaaaagtttaaactggggaaagacatcaagtcgattcttcaggagatggagagagtactgcacgtcggaggcaccattgttctcttactgagtgaagaccatcacagaaggcttactgattgcaaggagagcaatatcccgttcaatagtaaggacagccacaccgatgaacctgggatcaaaaaatgtctgaaccctgaagagaaaactggcgccttcaagactgcctctacaagcttcgaggccagtaaccacaaatttctggataggatgtccccctttgggagcctagtacctgtcgagtgttataaagtaagtctgggcaagacagatgccttcatatgtaaatataaaaagagccactcctcagggctgtag

SEQ ID NO: 208615 - DNA, 486 bp, synthetic construct
  misc_feature 1..486: note = Description of Artificial Sequence: Synthetic coding sequence
  source 1..486: mol_type = other DNA
atgaacctggccatcagcatcgccctgctgctgaccgtgctgcaggtcagtagaggacagaaagttacctctcttacagcttgtctggttgaccagagcttaaggctcgactgtcgccatgagaatacctcttcatcccccatccagtatgaatttagcttaactcgcgagaccaaaaaacatgttctgtttggcaccgtgggggtaccagagcacacataccgctcaagaacgaatttcacctccaaatacaacatgaaggtcctgtatctgtcggccttcaccagtaaggacgagggcacctacacatgtgctctgcatcattccggtcactcccctcctatctcatcccagaacgtcacggtgttaagggataagctagtcaagtgtgaaggcatttcactgctggcacagaatacctcctggctcctgctgctgctcctttcactgagtctgctacaggccaccgacttcatgagtctgtag

SEQ ID NO: 208616 - DNA, 486 bp, synthetic construct
  misc_feature 1..486: note = Description of Artificial Sequence: Synthetic coding sequence
  source 1..486: mol_type = other DNA
atgaacctggccatcagcatcgccctgctgctgaccgtgctgcaggtctctcgcggtcagaaggtgactagcctcacagcttgcctggttgaccagtcactcagactcgattgtcgccacgagaacacgtcctcaagccccatccagtacgaattttcattgacgagggagacaaaaaaacacgtgctgtttggaacagttggggtgcccgaacacacatatagaagtcgcaccaattttacttcgaagtacaatatgaaggttctgtacctctctgcatttacttcaaaagatgaaggaacctatacgtgtgctctgcaccatagtggccatagtcccccaattagtagccaaaacgttacggtcctgcgggacaaactggtgaagtgtgaaggaatcagtctcctagcacagaatacaagttggctgctgttactcctcctgtctctgagcctcttacaggccaccgatttcatgtctctttag

SEQ ID NO: 208617 - DNA, 480 bp, synthetic construct
  misc_feature 1..480: note = Description of Artificial Sequence: Synthetic coding sequence
  source 1..480: mol_type = other DNA
atgttccccttcgccctgctgtacgtgctgagcgtgagcttccggaagatcttcattttgcagctagttggacttgtcctgacttacgactttacaaactgcgatttcgaaaagatcaaggctgcctacctgtccaccatttctaaagatttgattacttacatgagcggcactaagtctaccgaattcaataacactgtgtcctgttccaacagaccccactgcctgacagagattcagagcttaacttttaatcctacagccgggtgcgcttccctagctaaagagatgtttgcaatgaaaaccaaggccgctctggccatttggtgccccggttatagtgaaacccaaattaacgctacccaagcgatgaagaaacgtcgcaaaaggaaggtgaccaccaacaagtgtctcgagcaggtgagccagctgcagggactctggaggcgatttaacaggccactcctcaaacagcagtag

SEQ ID NO: 208618 - DNA, 192 bp, synthetic construct
  misc_feature 1..192: note = Description of Artificial Sequence: Synthetic coding sequence
  source 1..192: mol_type = other DNA
atgttcgccatgaagaccaaggccgccctggccatctggtgccccggctactccgagacacagattaacgcgactcaagcaatgaagaagaggagaaagcgaaaggtgaccaccaacaagtgcctcgaacaggtgagccaattacagggcttgtggagacggtttaatcgcccattgcttaaacagcagtag

SEQ ID NO: 208619 - DNA, 705 bp, synthetic construct
  misc_feature 1..705: note = Description of Artificial Sequence: Synthetic coding sequence
  source 1..705: mol_type = other DNA
atgagctgcatcaacctgcccaccgtgctgcccggcagccccagcaaaacaagaggacagatccaggtgatcctcgggcccatgtttagtgggaaaagtaccgagctcatgagaagagttagacgttttcagatagctcagtataagtgccttgtcatcaagtatgctaaagatacgcgctactcttctagtttttgcacacacgatcggaataccatggaggcgcttccggcttgccttttgcgcgatgtcgcgcaggaggcacttggcgtggccgtgattgggattgacgagggtcaattcttcccggacatcgttgaattctgtgaggccatggctaacgccgggaagactgtaattgttgctgcgctcgacggcacctttcaacgaaaacctttcggcgccatcctcaacctcgtgcctctcgccgaaagcgttgtgaagctgacggccgtgtgtatggagtgtttcagggaagctgcctacaccaaacggttaggcacagaaaaagaagtggaagtgatcggaggtgccgacaaatatcattccgtttgccggctctgttattttaaaaaggcctccggtcagcccgcgggccctgacaataaggagaactgccccgtcccggggaagcctggggaggccgtggccgcacggaaactcttcgctccgcagcagatccttcagtgttctccagcaaattag

SEQ ID NO: 208620 - DNA, 705 bp, synthetic construct
  misc_feature 1..705: note = Description of Artificial Sequence: Synthetic coding sequence
  source 1..705: mol_type = other DNA
atgagctgcatcaacctgcccaccgtgctgcccggcagccccagcaaaacaagaggacagatacaggtgattttggggcccatgttctccggcaagtctaccgagctgatgcgtagggtgaggaggtttcagatcgcacagtacaagtgcctcgttatcaaatatgccaaggatacaagatactccagctccttttgcactcatgaccgcaacacaatggaagccttacctgcttgcctgttaagggatgtcgcgcaggaggcacttggcgtagcagtgatcggcatcgatgagggacaattcttccctgacatcgtcgaattctgtgaggccatggctaacgctggcaaaacagtgatcgttgcggccctggacgggacattccagcgcaaacccttcggggccatccttaatctggtcccactggctgaaagtgtcgtgaaactgaccgcagtgtgtatggagtgtttccgtgaagctgcttacaccaagaggcttggcacggagaaagaggtggaggtgattggcggagctgataaatatcacagcgtgtgccgactctgctacttcaaaaaggcgagtgggcaacccgctggacctgacaacaaggagaactgccccgtgccagggaagcctggcgaggccgttgccgcccgcaaattatttgcccctcaacagatcctccaatgctctcccgctaattag

SEQ ID NO: 208621 - DNA, 924 bp, synthetic construct
  misc_feature 1..924: note = Description of Artificial Sequence: Synthetic coding sequence
  source 1..924: mol_type = other DNA
atgcggcccggcctgttcaagggccaggcccccggcagccggcggaggcctactgcagggctcgccgtcgtccgggctgacagccataaaaaggagccgcgggcctccggttccgcgagacctgctatgcttctgtggcctctacgtgggtgggccgctagggcactgcgatgctttgggccaggttccagaggctctccggcctccggacccgggcctcgacgtgtccagcggcgcgcatggcctcctgacaaagaacaagaaaaagaaaaaaagagtgtgatttgcgtcgagggcaacattgcttccggcaagaccacatgtttggaatttttttccaatgcgacagacgtcgaagttcttactgaaccagtgagcaagtggaggaatgtgcgaggacacaatcccctggggctgatgtatcacgatgcatctcggtggggcctgactctgcagacatatgtgcagcttacaatgctcgaccggcacacccgtccccaggtgtcctccgtgaggcttatggaacggagtatccactctgcccgctacatattcgtggaaaacttgtatagatccggcaagatgccagaagtcgactacgtggtattgagcgaatggtttgactggatactgcggaacatggatgtttctgtggatttgatcgtctacctgcggaccaaccccgagacctgctaccaacgcttgaagaaaaggtgtagagaggaagagaaagtgataccattggagtacctagaggccattcatcacctgcatgaagaatggttgattaaaggaagtctgttcccaatggccgctccggtgttggttatcgaggctgaccatcacatggaacggatgctggaactttttgagcagaaccgtgatcgcatactaacaccagaaaacaggaagcattgtccatag

SEQ ID NO: 208622 - DNA, 744 bp, synthetic construct
  misc_feature 1..744: note = Description of Artificial Sequence: Synthetic coding sequence
  source 1..744: mol_type = other DNA
atgctgctgtggcccctgcggggctgggccgcccgggccctgcggtgtttcggcccaggatccaggggaagccctgccagtggcccagggccaagacgcgttcaaaggcgagcctggcctcccgataaagagcaagaaaaagaaaaaaagtcggtgatatgcgtggaaggtaacattgccagcggcaagacgacatgtctggagtttttctcaaacgctaccgacgttgaaggccttatgtatcacgatgcatcccgatgggggttgacccttcagacttacgtccagctaaccatgctggatcggcatacccgccctcaggtttcatctgtgcggctgatggaaagatcaattcactctgcccggtacatctttgtggaaaatctataccggtccggaaaaatgcctgaagtcgattacgtagtgctgagtgaatggttcgattggatcctgagaaatatggacgtctccgtagatttgatagtgtatcttagaactaatcccgagacctgctaccaaagacttaagaagcgatgccgggaagaagagaaagtcattcctctcgaatatctcgaagccatccatcacttgcatgaggagtggctgatcaagggaagcctattccctatggctgctccggtactcgttatagaggccgaccatcatatggagcggatgctcgagctgttcgagcaaaatagagataggattctgacccccgaaaacagaaagcattgtccgtag

SEQ ID NO: 208623 - DNA, 798 bp, synthetic construct
  misc_feature 1..798: note = Description of Artificial Sequence: Synthetic coding sequence
  source 1..798: mol_type = other DNA
atgctgctgtggcccctgcggggctgggccgcccgggccctgcggtgttttgggccagggtcacgtgggtccccagcctcaggcccagggccgaggagggtacaacgtcgggcgtggccccctgacaaagagcaggaaaaagagaagaaatccgtgatctgcgtggagggtaatatcgcaagcgggaagaccacatgcctggaattcttttctaacgccactgacgtggaggttttgactgaaccggtgtccaagtggcggaatgtgaggggtcataatccactgggactcatgtaccatgacgcctctcggtgggggctgaccctgcaaacttacgtgcaacttaccatgttggaccggcatacacggcctcaggtatcctcagttaggttaatggaacggagcatccattctgccagatacatatttgtcgagaatctgtatagaagcgggaagatgccagaggtcgactatgtcgtgttgagtgagtggtttgactggatattaagaaacatggatgtttctgtagatctgattgtgtatttgaggacgaaccctgaaacctgctaccagagattgaagaaacgttgccgcgaggaggagaaagtaattcctttagaatatctggaagctatccatcatctacatgaagaatggcttatcaaaggaagtctcttccctatggctgcacctgttctcgtcattgaagcggaccatcacatggagagaatgttagagttgttcgagcagaaccgcgaccggatcctgacccctgagaatcgtaaacactgtccgtag

SEQ ID NO: 208624 - DNA, 507 bp, synthetic construct
  misc_feature 1..507: note = Description of Artificial Sequence: Synthetic coding sequence
  source 1..507: mol_type = other DNA
atgtaccacgacgccagccggtggggcctgaccctgcagacctacgtccaactgactatgttggaccgtcacacccgtccccaggtgtcctccgtaaggctgatggaacgaagcatccattctgctaggtacatctttgtagaaaacctgtacaggtccggaaagatgccagaggtggattatgtggtgctgagcgagtggttcgactggatccttcgaaatatggacgttagcgttgacctgattgtgtatctcagaactaaccccgagacctgctaccagcggttgaagaaacgctgcagggaggaagaaaaggttatccctctggagtacttggaagcgattcaccatctccacgaggagtggctcataaaaggctcgctctttccgatggctgcacctgtcttggtcatcgaagctgaccaccatatggagaggatgctcgagctcttcgagcagaaccgcgaccgcatcctgactccagagaatcggaagcactgcccttag

SEQ ID NO: 208625 - DNA, 705 bp, synthetic construct
  misc_feature 1..705: note = Description of Artificial Sequence: Synthetic coding sequence
  source 1..705: mol_type = other DNA
atgggcgccttctgccagcggcccagcagcgacaaggagcaggagaaggagaaaaaatcagtgatatgcgtggagggcaacatcgcgagtggaaagacgacatgtctggagtttttctctaatgcaactgatgtagaagtgcttacagagcctgtttcgaaatggagaaacgtgaggggacataaccctttaggcctgatgtaccacgacgcaagtagatggggcctgacactgcaaacgtacgtgcaattgaccatgctggatagacacactaggccacaggtctcctccgtacgattgatggagcggagcattcactctgcaagatacatttttgtcgagaatctctatagatctgggaaaatgcctgaggtagattatgttgtgctctctgagtggttcgattggattctccgtaatatggacgtctcagtggatctgatcgtatacttgcgaaccaatccagaaacttgctaccagcgcctgaagaagcgctgtagggaggaggagaaggtgattcctcttgaatatttagaggcaattcaccacctacacgaggaatggttgataaaaggcagcctgttccctatggccgcccctgtactggtgatagaggccgatcaccatatggagcgcatgttggagttgttcgaacaaaatcgggatcggattctcacaccagaaaacagaaagcactgcccctag

SEQ ID NO: 208626 - DNA, 507 bp, synthetic construct
  misc_feature 1..507: note = Description of Artificial Sequence: Synthetic coding sequence
  source 1..507: mol_type = other DNA
atgtaccacgacgccagccggtggggcctgaccctgcagacctacgtgcagctgacaatgttggatcggcacaccagaccgcaggtgtcctcagtgcggttgatggagcgttcgatccactctgccaggtacatcttcgtagagaatttgtacaggagcggcaagatgcccgaggtggactatgtggtgctgtccgaatggtttgactggatcctgcggaacatggatgtgagtgtggacctgatcgtttatctgaggactaatcccgagacctgttatcagaggctgaagaagagatgtcgtgaagaggaaaaagtaatcccccttgaatatctggaggcaattcaccatctgcacgaagaatggctgattaaagggtccctatttcctatggctgcaccggttttagtgatcgaggcggaccaccacatggaaagaatgttggaactgtttgagcaaaacagggacagaatcctaacccctgaaaatagaaaacactgtccatag

SEQ ID NO: 208627 - DNA, 651 bp, synthetic construct
  misc_feature 1..651: note = Description of Artificial Sequence: Synthetic coding sequence
  source 1..651: mol_type = other DNA
atgaccagcatctgcgtggagggcaacatcgccagcggcaagaccacttgcctggaattcttttccaacgccactgatgtcgaggtcctgaccgaacccgtatccaagtggcgaaacgtccgcggacataatcctctcgggttgatgtaccatgacgcaagtaggtggggtctaacactccagacttacgttcagctgactatgctcgaccggcacaccaggccgcaggtctcctcagtgcgtctgatggagcgctctatccatagtgccagatatatttttgttgaaaatctgtaccggagcggtaagatgccagaggtggactacgttgttctctctgaatggtttgactggatattaaggaacatggatgtgagtgtggatctgatagtgtacctgcgtaccaatccagagacttgctaccagcgcctcaaaaaaaggtgtagggaagaagagaaggtcattcccttggagtatctggaggcaatacatcaccttcacgaagaatggctgataaaaggcagcctctttccaatggctgcaccagtattggttatcgaggccgatcatcacatggaacgtatgctggaactgtttgagcagaaccgtgatcgcatcctcactcctgagaacaggaaacattgtccttag

SEQ ID NO: 208628 - DNA, 723 bp, synthetic construct
  misc_feature 1..723: note = Description of Artificial Sequence: Synthetic coding sequence
  source 1..723: mol_type = other DNA
atgctgctgtggcccctgcggggctgggccgcccgggccctgcggtgctttggcccaggatcccgcggcagccccgcaagcggccctggcccaagacgagtgcaaagacgggcctggccccctgacaaggaacaagagaaggaaaagaaaagtgtcgtacttaccgagcctgttagtaagtggaggaacgtccggggtcacaaccccctcggtctgatgtaccacgatgccagtcgttggggcctcactctgcagacatatgtgcagctgacaatgctcgaccggcacactcgcccccaggtctccagtgtgcgcttaatggaacgctctattcatagcgctcgttatatttttgtagagaatttgtaccggtccggcaaaatgcctgaggtggactacgtggttttgtcagagtggtttgattggatcctgcgcaatatggacgtatcagtcgatctcatcgtctatctaaggacaaacccggagacgtgctaccagagactcaaaaaacgttgccgcgaggaggaaaaggtgatcccgctggaatatctcgaggcgatccatcatcttcatgaagagtggttgattaagggttcgctgttcccgatggctgctcctgtcctggttatagaagctgatcatcatatggagcgaatgctcgagctgtttgaacagaaccgtgaccgaattttgacgccagagaacagaaaacattgtccatag

SEQ ID NO: 208629 - DNA, 840 bp, synthetic construct
  misc_feature 1..840: note = Description of Artificial Sequence: Synthetic coding sequence
  source 1..840: mol_type = other DNA
atgcccgtggccggcagcgagctgccccggcggcccctgccccccgcagcacaggaaagagatgccgagcctcgtccgccacacggtgagctgcaatatctgggtcaaatccagcacatcctgcgctgtggagtccgcaaagacgaccgcacaggcaccggaactctgagtgttttcgggatgcaagctaggtactctctgcgagatgaattccctcttctgacaacaaaaagagtattttggaaaggtgttcttgaggagctgctgtggttcattaaaggaagcacaaacgctaaggaattgagctcaaaaggtgtaaagatttgggacgctaacggatccagagatttcctagactccctcggcttctcaacgcgtgaggagggcgatcttggtcctgtgtacggcttccagtggcgacacttcggcgctgagtatcgcgacatggagagtgacctgcccttgatggccctcccgccctgtcacgccctgtgtcagttctatgtggtcaacagcgagttgtcctgccagctatatcagaggagcggagacatgggactgggggtgccgtttaacattgctagctatgcccttctgacgtatatgattgcgcacattactggtctgaaaccgggcgactttatccacactctgggtgatgcgcatatctaccttaatcacatagagccattaaaaattcaattgcaacgtgaaccaagaccatttcctaaactccgcattttgcgcaaggtcgagaagattgacgacttcaaggcagaagactttcagattgaggggtacaacccgcatcctacaataaaaatggagatggccgtgtag

SEQ ID NO: 208630 - DNA, 693 bp, synthetic construct
  misc_feature 1..693: note = Description of Artificial Sequence: Synthetic coding sequence
  source 1..693: mol_type = other DNA
atgcccgtggccggcagcgagctgccccggcggcccctgccccccgcagcccaggagcgggatgcagaacctcgccctccgcatggtgaactgcaatatctcggccagattcagcatattctgcggtgtggagtgaggaaagatgaccgaacaggcactggtactcttagcgtgttcgggatgcaggcaagatattctctgagggactactctggacagggcgtggaccagctccaacgcgtaatcgacactatcaagaccaatcctgatgacaggcgtataatcatgtgcgcatggaacccgcgggatctccccctgatggccctccccccttgccatgctttgtgccagttctacgtggttaacagcgagctcagttgccagctgtaccagaggagcggtgacatggggctaggagtgcccttcaatatcgcctcgtacgctctgctaacgtatatgattgctcatattaccggactcaaaccgggcgattttatccatacactaggggacgcccatatctatctaaaccacattgagcctctgaagatccagcttcagcgggagccccggccattccctaagctgcgtatcttgaggaaagttgagaaaattgatgacttcaaggctgaagatttccaaatagaaggttacaacccccaccccacaattaagatggaaatggcagtctag

SEQ ID NO: 208631 - DNA, 942 bp, synthetic construct
  misc_feature 1..942: note = Description of Artificial Sequence: Synthetic coding sequence
  source 1..942: mol_type = other DNA
atgcccgtggccggcagcgagctgccccggcggcccctgccccccgccgcccaggagagggacgccgagcccaggcctccacacggggagctgcagtacctcgggcaaatccagcacatcctaaggtgtggagtgagaaaggatgacagaaccggaaccggcaccctctctgtctttggtatgcaggcccgctacagtttgagagacgagtttccactgctcacaaccaaaagggtgttctggaagggcgttctggaggagctgctctggtttataaaaggaagcacaaacgcaaaggagttgtccagtaagggagtgaagatttgggatgctaacgggagccgagactttttggattctctaggattctcaacccgcgaggagggtgacctcggccccgtgtatggttttcagtggcgacatttcggcgcggaataccgggatatggagagcgattactcaggacagggggtggaccagctgcaacgggtgatagatactattaaaacgaatcctgacgacaggcgtattattatgtgcgcttggaatccacgcgacctcccgctgatggccctccctccgtgtcacgccttgtgccagttttatgtcgtcaactcagagttgtcttgccaactctaccagcgttctggggacatgggccttggagttcccttcaacatcgcgagttatgcattgctgacctacatgatcgcccacattactggcctgaaacctggagatttcatccatacccttggcgacgctcacatttacctgaatcacatcgagccccttaagatccaactgcagagagagccaagaccttttccaaagttgcgaatcttgcgtaaagtggagaaaatagatgatttcaaggctgaggactttcaaattgaaggttacaatccccaccccactatcaagatggagatggcagtgtag

SEQ ID NO: 208632 - DNA, 678 bp, synthetic construct
  misc_feature 1..678: note = Description of Artificial Sequence: Synthetic coding sequence
  source 1..678: mol_type = other DNA
atgagccggccccggaagcggctggccggcaccagcggcagcgacaaagggctaagtggcaaacggaccaaaacggagaattcgggggaggctcttgctaaagtggaggactcaaaccctcagaagacctcagccacgaaaaattgcctgaagaatctcagcagccattggcttatgaaatccgagcctgaaagcaggctggaaaaaggggtggacgtcaagtttagtattgaggacctgaaggcccaacccaagcaaaccacatgctgggatggagtcagaaattaccaggctaggaactttctacgcgcaatgaagctcggggaggaggctttcttttaccattctaattgcaaagaacctggcatcgcaggactgatgaagattgttaaagaggcttatccggaccatacccagttcgagaagaataatccacactatgacccatcctccaaggaagacaacccaaaatggagtatggtggacgtgcaatttgtaaggatgatgaaaaggttcatcccactcgccgaattaaaatcctaccaccaggcacacaaagccacaggcggccccctcaaaaatatggtattgttcacccgtcagagactgagtatacagcctcttacccaggaggaattcgactttgtcctgtcactcgaagaaaaagaaccatcctag

SEQ ID NO: 208633 - DNA, 501 bp, synthetic construct
  misc_feature 1..501: note = Description of Artificial Sequence: Synthetic coding sequence
  source 1..501: mol_type = other DNA
atgagccggccccggaagcggctggccggcaccagcggcagcgacaaggggctgtctggcaaaagaacaaaaacggaaaactctggtgaagcgctagcaaaggtggaggactctaacccccaaaagacgtccgcaaccaaaaattgtctaaagaacctgagtagccattggttgatgaagtcagaacccgaatcccgattagagaaaggggtggatgttaaattttcaatcgaagatcttaaagcccagcccaagcagaccacttgctgggatggtgtgaggaattatcaggcccgtaattttctgagggcaatgaagctgggcgaagaagcttttttctaccattccaactgcaaagaaccgggaatcgccgggttgatgaaaatcgtgaaggaggcctatccagatcacacacagtttgaaaagaataacccacactatgaccctagtagcaaagaagacaaccccaagtggtctatgaagagccttatcctgttttag

SEQ ID NO: 208634 - DNA, 678 bp, synthetic construct
  misc_feature 1..678: note = Description of Artificial Sequence: Synthetic coding sequence
  source 1..678: mol_type = other DNA
atgagccggccccggaagcggctggccggcaccagcggcagcgacaaaggcctgtctgggaaaaggactaagaccgagaactcgggggaggcactggcgaaagttgaggactccaatcctcaaaaaacctcggccactaaaaactgccttaaaaacctgagcagccactggctgatgaagtccgagcctgagagtcgacttgagaaaggggtggacgttaaatttagcatcgaggatctgaaggctcagcctaagcagaccacttgttgggacggagtgcggaactatcaggctaggaattttctccgggccatgaaactgggtgaggaggcttttttttaccatagtaattgtaaagaacccggcattgcaggactcatgaagattgtcaaggaggcttaccctgaccacactcagtttgagaagaacaaccctcactacgaccctagcagcaaggaggataacccgaagtggtccatggtagacgtgcagtttgttcggatgatgaaaagatttatacccttagccgagttgaaatcatatcaccaggcccataaggcgacaggaggtccactaaaaaacatggtgctctttacccggcagagactgagcatccagccgctgactcaggaggagttcgacttcgtactctccctggaagaaaaagagccctcctag

SEQ ID NO: 208635 - DNA, 678 bp, synthetic construct
  misc_feature 1..678: note = Description of Artificial Sequence: Synthetic coding sequence
  source 1..678: mol_type = other DNA
atgagccggccccggaagcggctggccggcaccagcggcagcgacaagggactttctggaaaacgaactaaaactgagaacagcggcgaggcgttggccaaggtggaggatagcaaccctcagaagaccagcgcgaccaaaaattgtctgaagaacctgtcatctcactggctgatgaaatcagaacccgagagcagattggaaaagggcgttgatgtaaaattttctatcgaagacctgaaggctcagccgaagcagactacctgctgggacggtgtgagaaactaccaggccagaaatttcctaagagcaatgaagttaggcgaggaagcattcttttaccatagcaattgcaaggagccaggcatcgccggcttgatgaaaatcgttaaggaggcttaccctgaccatactcaattcgagaagaacaacccccattacgatccaagcagtaaggaggataaccccaagtggtctatggtggatgttcagtttgtgagaatgatgaagaggtttataccactcgcggagctgaagtcataccaccaggcccacaaagcgacaggcggtcccctgaagaacatggttctctttacacgtcagagactctccattcagccactgacccaagaggaattcgactttgtgttgtccctcgaggagaaagagcctagttag

SEQ ID NO: 208636 - DNA, 1926 bp, synthetic construct
  misc_feature 1..1926: note = Description of Artificial Sequence: Synthetic coding sequence
  source 1..1926: mol_type = other DNA
atggccctgagcctggaggagttcgtgcacagcctggacctgcggaccttaccaagggtcctcgagatccaggccgggatctacctggagggatcaatctacgaaatgtttggaaatgagtgttgtttctccaccggtgaggtgatcaaaatcacgggccttaaggtgaagaaaatcatcgctgagatttgcgaacagattgagggctgtgagagcctgcagccctttgagctgccgatgaatttcccgggtcttttcaagatcgtcgcagacaaaactccctatctgacaatggaggaaataaccaggacaattcacattggaccaagcaggctcggtcacccctgtttttaccatcagaaggatataaaactcgaaaatttgattatcaagcaaggagagcagatcatgttaaactccgtcgaggaaatcgatggtgagattatggtgtcttgcgctgttgcccgcaatcatcagacccacagcttcaatcttcccttgtcccaggagggcgagttctacgagtgtgaggacgagcgaatttacaccctgaaggaaattgtagagtggaaaatcccgaagaaccggacgaggaccgtgaatctaacagatttctccaacaagtgggattccacaaaccccttccccaaggacttttacggaaccctgatcttaaaacctgtgtacgaaatccagggggtgatgaagtttagaaaagacatcatccgcattctcccctctctggatgtggaggtgaaagatataacagattcttatgacgcaaattggttcctgcagctgctttcaaccgaggacctgttcgagatgacttccaaggagttccccatagttaccgaggtgatcgaggcaccggagggcaatcatcttccccagagtattcttcagcccggtaaaactatcgttattcacaagaaataccaggcatccagaatactggcctctgaaattaggtcaaactttcccaaacggcactttttgataccaacctcttacaaaggtaagtttaagagacgcccgagagagtttccgacagcatacgatctggaaatcgccaagtccgaaaaagagcccctgcatgttgtcgctacaaaggcctttcactcaccacatgataaactttccagcgtctctgtgggcgaccagttcttggttcaccagagtgaaactacagaggtcctgtgcgaaggcatcaaaaaggtcgttaatgtgctggcgtgtgagaaaatactgaagaaaagctatgaggccgccctgctccccttatatatggaaggggggttcgtggaagtaatccacgataaaaagcagtaccccatttctgaactctgcaaacagtttcgactccccttcaatgttaaagtgtctgtccgggatctgagcatcgaggaggacgttctagcagccactcccggactccagctcgaggaggacattacagactcttatttgctcattagcgatttcgcgaacccaactgaatgctgggagatcccggtgggccgccttaatatgaccgtgcaacttgtgtctaacttctctcgggacgcggaaccatttctggtgcgcactttggtcgaggaaataacggaagaacagtattacatgatgaggcggtatgagagttctgcttcacatccacctcctagacctcccaagcacccctccgtagaagagacaaagctgacattgctgacactcgctgaggaaaggaccgtagatcttccaaagagccccaagcggcaccacgttgacataaccaaaaaattgcaccccaatcaagcgggactggactcgaaggttttaatcggttctcagaacgatttagtggacgaagagaaagagcggagcaatcggggcgctacagcaatcgccgagacatttaaaaatgagaaacatcagaagtag

SEQ ID NO: 208637 - DNA, 1689 bp, synthetic construct
  misc_feature 1..1689: note = Description of Artificial Sequence: Synthetic coding sequence
  source 1..1689: mol_type = other DNA
atgaacttccccggcctgttcaagatcgtggccgacaagaccccctacctgacaatggaggaaattactcggacaatccacattggtccctcacgtctgggtcatccttgcttctaccaccaaaaagacattaaactggagaatctgattatcaaacagggcgagcagattatgttgaattctgtggaagagattgacggcgagattatggtgtcttgcgccgtcgccaggaaccaccagactcacagctttaatcttccactcagtcaagaaggtgaattttacgagtgtgaggacgagagaatttacactctgaaggaaatagttgagtggaaaatccccaaaaaccgtacaaggacagttaaccttacagatttcagcaacaagtgggattcaaccaacccgttccctaaagacttctatggtacactgattttaaagcctgtctacgaaattcagggggtgatgaaatttcgcaaggatatcatcagaatcttaccatcactagacgtggaagtgaaagacatcacggatagttatgacgcaaattggttcttacaattactgagcaccgaagacctgtttgaaatgacgagcaaggaatttcccatcgttactgaggtcatcgaggcccccgaggggaatcatctcccacaaagtattttgcagccgggaaaaaccatcgtcattcacaagaaataccaggcctcacgtattttagcatcagagatccgctctaactttcctaaaaggcattttcttatccccacttcctacaaaggcaagtttaagaggcgtccacgggaatttcccacggcgtatgacctggaaatcgcaaagtccgagaaggaacctttgcacgttgtggccactaaagcctttcactcccctcatgataagcttagctctgtttctgttggggatcagttcctggttcaccaaagtgaaactacagaagtcttgtgcgaagggattaagaaagttgtaaacgtcttggcatgtgaaaaaatcctaaaaaaaagctatgaagccgccctcttacccctttacatggaaggcgggtttgtggaagtgatccacgacaagaaacagtacccaatatctgagctatgcaagcaattccgactgccgtttaacgtgaaggtgtcagtgcgcgacttatcaattgaagaggatgtcttggccgccacaccaggcttgcaattagaggaagatattactgatagctatctcctcataagcgacttcgcgaatcccaccgagtgctgggagatcccagtgggcaggctaaacatgacggtgcagttggtgtcgaatttttcgcgagacgctgaaccctttctcgtacgcaccttggtcgaggagatcacagaggaacaatactacatgatgcgacgctatgaatcgtccgcttctcacccacctccacgaccaccaaaacacccatccgtggaggaaaccaagcttacactgctcaccctggctgaggaaaggactgtggacctacctaaatccccaaagcgtcatcatgtggacatcaccaagaagttgcatccaaatcaggccggcttggactcgaaagtgttaatcggctcacagaatgacctggtagacgaggagaaagaacgatccaatcgcggtgccacagccattgctgagacctttaagaacgaaaagcatcaaaagtag

SEQ ID NO: 208638 - DNA, 372 bp, synthetic construct
  misc_feature 1..372: note = Description of Artificial Sequence: Synthetic coding sequence
  source 1..372: mol_type = other DNA
atgaacttccccgtgcggaaggacatcatccggatcctgcccagcttagatgtggaagtcaaggacataacagattcatatgatgcaaattggttcctccagctgctatctacagaggacctgtttgagatgaccagtaaagagttcccaatcgtgacagaagttattgaggcaccagaaggcaaccacctacctcaatctattctccaaccaggcaagaccattgtgatccacaagaaatatcaagcctcgaggatcctggcttccgagatcaggtccaatttcccaaagagacacttcctcattcccacaagctataagggtaaattcaaaaggcgaccacgtgagttcccaaccgcctacgacctgtag

SEQ ID NO: 208639 - DNA, 1821 bp, synthetic construct
  misc_feature 1..1821: note = Description of Artificial Sequence: Synthetic coding sequence
  source 1..1821: mol_type = other DNA
atgttcggcaacgagtgctgcttcagcaccggcgaggtgatcaagatcacgggacttaaagtcaagaaaattattgccgaaatatgcgagcaaatcgaaggatgtgaatctttgcaaccattcgaattgcctatgaacttcccaggcctgtttaaaatagttgctgataaaactccatatctcaccatggaggaaattactaggactatccatattggccccagccggctaggacacccgtgtttctaccatcaaaaggatataaaactcgaaaacttgattattaaacagggcgagcagattatgctcaacagtgtagaagagatcgatggcgagatcatggtctcctgtgcagtggcgagaaatcatcagacgcacagttttaacctacctttgagccaagagggtgagttttacgagtgtgaagatgagcgtatttacacactcaaggagattgtggaatggaagattcctaaaaatcgaacccgtacagtgaacctcacagatttttcaaacaagtgggatagcaccaatccttttccaaaggatttttatggcaccctcatactcaagccagtctatgaaatccaaggagtgatgaagttccgcaaggatatcattagaattctgccaagcctggatgtggaggtgaaggacattacggatagttacgacgcaaactggttcctgcaactgctgtctacagaagacctgtttgagatgacatcaaaggaattcccgattgtcacagaggtgatagaggccccagagggcaaccatttgccgcagagtattttgcaaccgggaaagactattgttatccacaaaaaatatcaggccagtagaatcctggcctccgagattaggtcgaattttcccaagcgtcacttcctaatcccgacaagctataaggggaaattcaaacgcaggccaagagaattccccaccgcctacgatttggaaattgcgaaatcagagaaggagcctctccacgtcgtggcgaccaaagcatttcactccccccatgataagctgtcgagcgtgtccgtgggagaccagtttctggttcaccaatccgaaaccactgaagtcttgtgtgagggaatcaagaaggtggtcaatgtgctggcctgcgaaaaaattctaaaaaagagctacgaggctgctctactgccgctctacatggagggcgggttcgtggaagtgatccatgacaagaagcagtatccgatatctgaactatgcaagcagtttaggctgccctttaatgtgaaggtgtctgtacgcgatctgagcatcgaagaggacgtgctggcagccactcctggtcttcaactagaagaagatattactgattcttacctgctaatttccgacttcgccaatcccaccgaatgttgggagattcccgtggggcgacttaatatgacagtgcaattagtgtctaactttagtcgggatgcagaaccgtttcttgtgaggaccctcgtggaggagatcacggaagaacagtattatatgatgcggagatatgaaagctctgctagccacccccctcccaggccgcccaaacatccttcagtagaggagacaaagctgaccttactcactttggccgaagagcgcacagtggaccttccgaagtccccaaagcggcaccacgtggacatcactaaaaagctgcaccccaatcaggccggattagacagtaaggtgctcattgggagccagaacgacctagtcgatgaagagaaagagagatctaaccgcggggccaccgctattgccgaaacgttcaaaaacgaaaagcatcagaagtag

SEQ ID NO: 208640 - DNA, 2043 bp, synthetic construct
  misc_feature 1..2043: note = Description of Artificial Sequence: Synthetic coding sequence
  source 1..2043: mol_type = other DNA
atggccctgagcctggaggagttcgtgcacagcctggacctgcggaccttaccacgcgtgcttgagatccaggccggcatttacctggaggggtccatttacgaaatgtttggaaatgagtgctgtttttccaccggagaagttattaagatcacgggtctgaaggtgaaaaaaatcattgccgagatctgcgagcagatcgaagggtgtgagagtcttcaaccctttgaattacctatgaattttcctggacttttcaaaatcgtggcagataaaacaccctacctgacgatggaggagatcacacgaacaattcatattggaccgtctagacttggtcacccatgtttttatcatcaaaaggatattaagctagagaacctgataattaaacagggtgaacagattatgctgaacagtgtggaggagatcgacggagagatcatggtgtcctgtgctgtcgctcgcaatcaccagacccattcatttaatctgcccttatcacaggagggtgagttctatgaatgcgaggatgagaggatttacacgcttaaggaaatcgtggaatggaaaattccgaagaacaggacccgtacagttaatttaaccgacttcagcaacaagtgggatagcacaaatcccttcccaaaggatttttatggcacactcatcctgaaacctgtctacgagatacaaggcgtcatgaagttcaggaaggacattattagaattctgccatcattggatgtggaagtgaaggacatcactgactcttatgatgccaattggtttctgcaactgctctccaccgaagatctgtttgagatgacctcaaaggaatttcccatcgtgacagaggtgatagaagctcctgaaggcaatcatctgccacaaagcattctacaacccggaaaaacgatcgtcatccataagaagtaccaggcctccagaatcctcgcctctgaaattcgtagtaactttcccaagagacacttcctaatacctacttcgtataagggaaagtttaaacggaggccgagagagtttcccacagcatatgacctggaaattgctaaaagcgaaaaggagcccttgcacgtggtggcgaccaaggcctttcattcaccgcacgataaactctctagcgtgagcgtcggtgaccaattcctcgtgcaccagagcgagactactgaggtactgtgtgaggggataaagaaggtcgtcaacgtactcgcttgtgagaagattttaaagaagagttacgaggcagcattgttgccactgtacatggaaggaggtttcgtagaagttatccatgataaaaaacaataccctattagcgagctgtgcaaacagttcaggcttccattcaatgtaaaagtgtccgtgcgtgacctgagcattgaggaggacgttctggctgcaacccctggacttcagctggaagaagacatcaccgatagctaccttctgattagcgattttgctaacccaacagagtgctgggaaatcccagtcgggcgtctgaacatgaccgtgcagttagtttctaatttttcgcgggatgctgagccatttctagtgaggactctcgttgaagagatcaccgaagaacagtattacatgatgcgcaggtacgagtcatccgcctctcacccccccccccgccccccgaagcacccatcagtcgaagaaaccaagctcaccctcctgactctcgctgaggaacggactgtggacctgcccaaatctcctaaagccggagtccagtggagggaccttggatcgctccaacctctgccccctggatttaagcaattcagcgcctcagcatctcatgtggccgggattactggaaccccccaccacgtccaacgccatcatgtggatattaccaaaaagctgcaccctaaccaggcaggcttagacagtaaggtacttataggaagtcagaatgacctggtggatgaggaaaaagagaggagtaatcgaggagccaccgcaatcgccgagacttttaagaacgaaaagcatcaaaaatag

SEQ ID NO: 208641 - DNA, 1581 bp, synthetic construct
  misc_feature 1..1581: note = Description of Artificial Sequence: Synthetic coding sequence
  source 1..1581: mol_type = other DNA
atggacgtgcggttctaccccccccccgcccagcccgccgccgccccagatgcgccttgcctgggcccttcaccttgcctagacccctattactgtaacaagtttgatggcgagaacatgtatatgtcaatgactgagccctcacaggactacgttcctgccagccaatcttatcctgggccttctcttgagagcgaggatttcaacattcctccaatcacacccccttctttgcctgatcactctctggttcacctgaatgaagtggagagtgggtaccacagcctctgtcaccctatgaatcataatgggttgttaccctttcaccctcagaatatggatctgcccgagatcactgtgtctaatatgctcggacaggatggaactctgttgtccaacagcatctcagtgatgccggatattcgtaaccctgaaggtacccaatattcaagccatccccagatggcggctatgcgccctaggggccagcccgccgatattcgtcagcagcctggcatgatgccacatggacagctcaccacaattaaccagagtcaactctccgcccagctcggtctcaacatgggtggctccaatgtgcctcataactctcccagcccaccaggttccaaatctgcgactcccagcccttctagttctgtccacgaagatgaaggcgacgatacttctaagataaatggtggcgaaaagcgaccggcatccgacatgggcaagaagccgaagacaccaaaaaagaagaaaaaaaaagatccgaacgaacctcagaaacccgtatctgcgtacgccctttttttccgagacactcaagccgccatcaaaggccagaaccctaacgcaaccttcggcgaggtcagcaaaatagtggcaagcatgtgggatgggctgggggaggagcaaaaacaggtgtataagaaaaaaacggaagctgccaagaaggagtacctcaagcagttggccgcataccgggcctctctggtctccaaatcttattccgagcctgtagacgttaagacctctcagcctccacagttaattaattccaagccatcagtgttccacggaccttcacaagcccattccgcactctacttgtcctcacactaccatcagcagccaggcatgaacccacacctcacggctatgcacccatctttaccacgaaacatcgctccaaaacctaataatcagatgcctgtaaccgtgtctatagccaacatggccgtgagtccaccgcccccgttgcagataagcccccccctgcatcaacaccttaatatgcagcaacatcagcccctgacgatgcagcagcctctaggcaaccaactcccaatgcaggtgcaatccgccctgcattctcctacgatgcagcaaggcttcaccctgcagcctgattatcaaactatcataaaccccactagtaccgcagcacaggtcgtgacacaggcaatggaatacgtccgctccggctgtcgcaacccaccaccccaaccggtcgactggaacaatgactattgcagcagcgggggcatgcagcgtgacaaagctctgtaccttacatag

SEQ ID NO: 208642 - DNA, 831 bp, synthetic construct
  misc_feature 1..831: note = Description of Artificial Sequence: Synthetic coding sequence
  source 1..831: mol_type = other DNA
atgggcaagaagcccaagacccccaagaagaagaagaagaaggaccctaacgagcctcagaagcccgtctccgcttatgctctgttctttcgggacactcaagccgccattaagggccagaaccctaatgccacgtttggcgaagttagcaagatcgtcgcaagcatgtgggacgggcttggagaagagcagaagcaggtctataagaagaaaactgaagcagccaagaaggagtatcttaagcaactggccgcctatcgggcaagtctggtgagcaagagttactccgagcccgtggatgtgaaaacgagccagcccccccagctgatcaattcaaaaccatccgtgttccacggccccagtcaggcacactatcaccaacagccgggaatgaatccccacctaaccgcaatgcatccatcactgccaaggaatattgctcccaaaccaaacaaccagatgccagttactgtatctatagccaacatggcagtctccccgccacctcccttacaaatatcacccccccttcaccagcacttgaacatgcagcaacatcagccactcaccatgcaacagcctttaggaaaccagctgcctatgcaggtgcagtccgcactacattcccccacaatgcaacagggcttcactttacagcccgattatcagactattattaacccaacatcaactgctgcacaggtggtaacgcaggccatggaatatgtgcggtccggttgcaggaaccctcctccgcagcccgtcgattggaataacgattattgtagctccggcggcatgcaacgcgacaaagccttgtaccttacttag

SEQ ID NO: 208643 - DNA, 747 bp, synthetic construct
  misc_feature 1..747: note = Description of Artificial Sequence: Synthetic coding sequence
  source 1..747: mol_type = other DNA
atgcccgagttcctggaggaccccagcgtgctgaccaaggacaagttgaagtctgagctggtcgcgaataacgtgactctgcctgctggagagcagcggaaagatgtgtatgtacaactgtatttacagcatctgacagcacggaatcgacccccactccccgccggaacaaattctaagggccctcccgacttcagtagtgatgaagaacgtgaaccaacaccagttctgggatcgggcgctgctgctgccggaagatcccgtgcggcagttggccgcaaggctaccaaaaagacagacaaacctcggcaggaagataaggacgatcttgacgtgacagaattaactaacgaggatctgctggatcagctggttaagtacggggtcaaccctgggccaatagttggcactacacggaaactctacgaaaagaaactcctgaagctgcgcgaacaaggcactgaatctagatcctcaacaccactgcctaccatcagctcctccgctgaaaatactcgccagaatggttccaacgacagtgatcggtattcggacaacgaggaggattctaagatagagctgaagctggagaaacgcgaaccgctgaaaggaagggctaagacgccggtcactctgaagcaaagaagagtggaacacaatcaggtaagtctcgtactcctaccaccatgtacgggaataaataacctgctcactaccctaatccatgtgttagcatttaacggatag

SEQ ID NO: 208644 - DNA, 2085 bp, synthetic construct
  misc_feature 1..2085: note = Description of Artificial Sequence: Synthetic coding sequence
  source 1..2085: mol_type = other DNA
atgcccgagttcctggaggaccccagcgtgctgaccaaggacaagttgaaatcagagcttgtggcaaacaatgtaaccttgcccgccggtgagcagcggaaagacgtctacgtacagttatatcttcagcacctgaccgctcgtaatagacctccactccctgctgggaccaacagtaagggtccccctgacttcagttccgacgaagagagagagcccacacccgtactcggatctggcgccgcagctgccggtcggagtagggccgcagtcggccgtaaggctacaaaaaaaaccgataaaccgcgtcaggaagacaaagacgatctcgatgtgactgagcttacaaatgaggacctgctggaccagttggtgaagtacggagtgaacccaggaccaatagtgggaacaacgcgaaagctctatgagaagaaacttctgaagctgagagagcagggtacggaatcgcgaagcagcacccccttgcccacaatcagttccagcgcggagaatacccgacaaaatggaagcaacgactccgaccgctacagtgacaatgaagaggggaagaagaaggaacataaaaaggtgaaaagcacccgcgacattgtacccttttctgagctggggacaactccctcgggcggaggatttttccagggcatatcctttcctgagatttcgactcggcctccactcgggagcacggagctccaagccgccaagaaggtgcacacttctaaaggtgacctccccagagaaccactggttgccacaaacctcccaggacgcggtcagttacaaaagctggccagcgagaggaatctctttattagctgtaagagcagccacgacaggtgcctcgagaagtcatctagctcctcctcacaacccgagcactctgccatgttagtgtctacagcggcttctccctccctgattaaagagactacgacgggatactataaagacattgtggagaacatctgcgggcgggagaagtctggcatacagcctttatgtcccgagcgatcgcacatctccgatcaatctcctctaagtagcaaacgaaaggctctagaagagagtgagtcttcacagttgatttcacctcctcttgctcaggctatccgcgactacgtcaactctttactcgttcagggcggagtgggaagtttgccaggcacctctaattccatgccaccattagacgtggagaatatccaaaaacggatcgatcaaagcaagtttcaggagacggagtttctgagcccccctcgtaaagtgcctagactatctgagaaatctgttgaggagagagatagcgggtccttcgtggcattccagaacatcccagggtcagaactaatgagtagcttcgccaaaactgtcgtcagccactctctgacaaccctcgggctagaggtagctaagcagagtcagcacgacaaaattgatgccagcgagctgtccttcccatttcacgagagcatactgaaagttattgaagaagagtggcagcaggttgacaggcaattgcccagtctggcttgtaaatacccggtcagcagccgagaagcaactcagattctatctgtgcccaaagttgatgacgagatcctgggttttattagcgaggctactcccttgggaggcatacaagccgccagcacagagtcgtgtaaccagcagcttgaccttgctctttgccgggcctatgaggccgccgcatcagccctccagatcgcgacacacactgcttttgtagcaaaggccatgcaggcagatatttctcaggcggcacagattctaagcagcgatcccagtcggacccatcaggccctcggaatcttgtcaaagacctacgacgcggcaagctacatttgtgaagccgcatttgatgaagtgaaaatggcagcccataccatggggaacgcaaccgtaggacggcgctatttgtggcttaaagactgcaaaattaatctagcctctaaaaacaagctagcatccactccgtttaagggcgggaccctgttcgggggtgaagtgtgcaaggttatcaagaagagggggaacaagcactag

SEQ ID NO: 208645 - DNA, 1245 bp, synthetic construct
  misc_feature 1..1245: note = Description of Artificial Sequence: Synthetic coding sequence
  source 1..1245: mol_type = other DNA
atgcccgagttcctggaggaccccagcgtgctgaccaaggacaagctgaagtctgaactagttgcaaacaacgtgaccctcccggccggtgagcaacgaaaagatgtgtacgtccaactctacttgcagcacctgaccgcccggaataggcctcctctcccagctggcactaacagtaaagggccccccgacttctccagcgatgaggagcgtgagcctactccagtgcttgggagtggagctgctgctgcaggaagatccagggccgccgtcggaaggaaagccacaaagaaaaccgacaaacctcggcaagaagacaaggacgacctggacgtgaccgaactgacaaatgaggatttgctggaccaacttgtaaagtacggcgtaaatccgggccccatcgttgggacgacaaggaagctttacgagaagaaactcttaaaactccgcgaacaaggcacggagtcaagaagcagtactccgctcccaaccattagtagtagcgccgagaacacccgacagaacggatctaacgatagtgacaggtactccgataacgaagaggacagtaaaattgagttgaagcttgaaaagagagagccactaaaggggagagctaagacgcctgtgactcttaaacaaagacgggttgaacataatcaggtggagacgagcgagcactttagaatagatggccctgtaatcagcgagtcaacacccatcgctgaaacgattatggcctcatcaaatgagtcgctcgtggtgaatcgcgtaacgggtaatttcaagcacgcatcgccaattctgcccatcaccgagttcagtgatattccacgccgagcccccaaaaaacccctgacacgagcggaggtcggtgaaaaaacagaggagcgccgagtggaaagagatatcctgaaggaaatgtttccatatgaggctagcacccctactggaatcagtgccagttgccggagaccaatcaagggcgcagccgggcgtcctcttgaactatccgatttcagaatggaagagtcattctcatcaaaatacgtcccaaagtacgtgcctctagccgacgtcaagagcgagaagaccaaaaaagggcgtagcattcctgtatggattaagatacttctgttcgtagtcgtggctgtttttctgttcctggtctatcaggcaatggagaccaaccaggttaatcccttttctaacttcttgcatgtcgacccaaggaagtctaactag

SEQ ID NO: 208646 - DNA, 1038 bp, synthetic construct
  misc_feature 1..1038: note = Description of Artificial Sequence: Synthetic coding sequence
  source 1..1038: mol_type = other DNA
atgcccgagttcctggaggaccccagcgtgctgaccaaggacaagctgaagagtgagctcgtagcgaataacgtgacgctgccagccggggaacagcgcaaggatgtgtacgttcaattatatctgcagcatctgactgccaggaatcgaccaccgctccccgcaggtaccaactccaaaggccctccagactttagtagtgacgaggagagggaaccaacccccgtcttgggttctggtgctgccgctgctgggaggagtagagctgccgtgggccgtaaagcaaccaagaagaccgataagcccaggcaggaggataaagatgacctcgacgtcaccgagctgacaaacgaggatctccttgatcagctagtgaaatacggagtgaatcccggacctattgtgggcaccaccaggaaactttacgagaagaagctgctcaagttgagggagcagggcaccgaatcccggtcatcgacacctctgccgactatttccagttctgcggaaaacacaaggcagaatggcagtaacgatagtgaccgctatagcgataatgaagaggacagcaaaattgagctgaagctcgagaagcgggaaccattaaagggccgagccaaaacacctgtgactctcaagcagaggagggtcgaacacaaccaggtcggtgagaaaactgaggagcggcgcgtggagagggatattctgaaagagatgttcccatatgaagcttccacccccactggaatttctgcttcctgccgtaggcctatcaagggggctgccgggcgccctctggaactctccgatttcaggatggaagagtcctttagtagtaaatatgttcccaagtacgtgcccctggctgacgttaagagcgagaaaacaaaaaagggccgtagcatccctgtgtggatcaagatcctgcttttcgtcgtagtggcagtgttcctatttctagtgtatcaagccatggaaacaaaccaagtgaatcccttctcgaacttcttgcatgtggaccctagaaagagcaactag

SEQ ID NO: 208647 - DNA, 1365 bp, synthetic construct
  misc_feature 1..1365: note = Description of Artificial Sequence: Synthetic coding sequence
  source 1..1365: mol_type = other DNA
atgcccgagttcctggaggaccccagcgtgctgaccaaggacaagctgaagagcgaactggttgccaacaacgttacacttccagctggagagcagaggaaggacgtatacgtgcagctttacttacaacacctgactgcccgaaaccgccctcctctgccagcggggaccaactctaaagggcctccagacttttcttccgatgaggagcgggagcctactcccgtgcttgggtcaggagcagctgccgctggcaggtctagagccgccgttgggcgtaaggctactaaaaagacagacaaaccccgccaggaagacaaggatgatctggacgtcaccgaactgaccaacgaggatctgctcgatcagcttgtcaaatacggcgtgaaccctggccctatcgtggggaccacgcgaaaactatacgagaagaaactactgaaactgagggaacaggggaccgagtctcgaagttctacacccttgccaaccatttcttcctcagccgagaacactcgccaaaatgggtcaaatgattcagacaggtactccgataatgaggaagattccaagatagaattaaagcttgagaagcgtgagcccctgaagggacgcgccaaaacccccgtgactctgaagcaacggagagtcgagcacaaccagtcgtactctcaggccgggatcaccgagacagaatggaccagcggatcgtccaagggggggcccctccaggctctcacaagggaatcaactagaggttccagacggacgccgcgaaaaagagtggagaccagcgaacattttcgcatcgacggacccgtgatctccgagtcaacgccgattgcggaaaccataatggcttcgtccaatgagagcttggtggtcaaccgggtgacaggaaatttcaaacatgctagcccaatcttgcctatcactgaattcagcgacattccgagacgggcccctaaaaagcccctgacacgtgctgaggttggggagaagactgaagaaaggagggtcgagagagatatactgaaggagatgtttccatatgaggcaagtacccccacaggaatctctgctagttgcaggcggccgatcaagggcgctgccggccgccccctggagctgagcgacttcaggatggaagagagcttctcgagcaaatacgtgcctaagtatgtcccgctcgcggacgttaaaagcgagaagaccaaaaaaggacgctcgattcccgtctggattaaaatcctgctgttcgtggtcgttgctgtctttctgtttctggtctatcaggccatggagacaaaccaggtgaacccattcagtaacttcttgcacgtcgaccctcgcaagagtaactag

SEQ ID NO: 208648 - DNA, 135 bp, synthetic construct
  misc_feature 1..135: note = Description of Artificial Sequence: Synthetic coding sequence
  source 1..135: mol_type = other DNA
atgagcgacaagcccgacatggccgagatcgagaagttcgacaagagtaaactgaaaaagactgaaacgcaggagaaaaaccctcttccctccaaagaaaccatcgagcaggagaagcaggccggcgagtcttag

SEQ ID NO: 208649 - DNA, 135 bp, synthetic construct
  misc_feature 1..135: note = Description of Artificial Sequence: Synthetic coding sequence
  source 1..135: mol_type = other DNA
atgagcgacaagcccgacatggccgagatcgagaagttcgacaagagcaagctcaaaaaaactgagacacaagagaaaaatcctctcccctcgaaagagacgatcgaacaagagaaacaagcaggcgagtcctag

SEQ ID NO: 208650 - DNA, 135 bp, synthetic construct
  misc_feature 1..135: note = Description of Artificial Sequence: Synthetic coding sequence
  source 1..135: mol_type = other DNA
atgagcgacaagcccgacatggccgagatcgagaagttcgacaagagcaaactcaagaagacggagacacaagaaaagaatcccctaccatcaaaggaaaccattgaacaggagaaacaagctggcgagtcatag

SEQ ID NO: 208651 - DNA, 135 bp, synthetic construct
  misc_feature 1..135: note = Description of Artificial Sequence: Synthetic coding sequence
  source 1..135: mol_type = other DNA
atgagcgacaagcccgacatggccgagatcgagaagttcgacaagagcaaactaaagaaaactgaaacgcaggagaagaatccccttccatcaaaggagacaattgagcaggagaagcaagccggcgagtcctag

SEQ ID NO: 208652 - DNA, 135 bp, synthetic construct
  misc_feature 1..135: note = Description of Artificial Sequence: Synthetic coding sequence
  source 1..135: mol_type = other DNA
atgagcgacaagcccggcatggccgagatcgagaagttcgacaagtctaagttgaaaaaaacagaaacccaagagaagaaccccctcagctcaaaagaaaccattgagcaggagcgccaggccggggaatcatag

SEQ ID NO: 208653 - DNA, 1299 bp, synthetic construct
  misc_feature 1..1299: note = Description of Artificial Sequence: Synthetic coding sequence
  source 1..1299: mol_type = other DNA
atgggccccgccggcagcctgctgggcagcggccagatgcagatcaccctgtggggctccctcgccgccgttgctatcttctttgtcattacattcctgatctttctttgctcgagctgcgatcgagagaaaaaacccagacagcactcaggcgaccatgagaacctgatgaacgttccctctgataaagagatgttttctaggagtgtgacgagcctcgccaccgatgctcctgccagcagcgagcaaaatggagctctgaccaatggggatattctaagtgaggactcaacgctaacctgtatgcaacactatgaagaagtgcaaacttctgctagcgatctccttgattcgcaggattcaacgggcaagccaaagtgccaccagtccagagaactgccccgcattccacccgaatcagccgttgacaccatgttgactgcgcgttctgtcgacggcgaccaggggcttggtatggagggcccttatgaagtgctcaaagacagcagctcccaagagaatatggtcgaggattgtctgtacgaaacggtgaaggagattaaggaggtcgcagccgccgcccacctcgagaaggggcattccgggaaagctaaaagcacgtctgcctctaaagaactgcccggcccccagaccgagggcaaagctgaatttgccgaatacgcctctgtggaccgaaataagaagtgccgtcagtcagtgaacgtggaatctatactggggaattcttgcgatcccgaggaagaggctccccctcctgtgcccgtgaaactactggatgagaatgagaacctgcaggaaaaagaaggcggtgaggcggaggagtcggccacggacaccacatctgagaccaataaacgcttttccagcctctcctataagtccagggaggaagaccctactctgaccgaagaagaaataagtgctatgtacagctccgttaacaaaccaggccagctcgtaaataagtccggtcaaagcttgaccgtgccagagtctacatatacgtctatacagggcgacccccagcgcagcccaagtagctgcaacgatctatatgccacagttaaggatttcgagaaaactcccaacagcacccttcccccagctggtcgccctagcgaggaaccagagcccgattacgaagctatacagacgctaaatagggaggaggaaaaggctaccctgggtactaatgggcatcatgggctggtgcctaaggaaaatgactatgaaagtatcagtgaccttcaacagggccgggatatcacccgtctctag

SEQ ID NO: 208654 - DNA, 8136 bp, synthetic construct
  misc_feature 1..8136: note = Description of Artificial Sequence: Synthetic coding sequence
  source 1..8136: mol_type = other DNA
atggccctggtgctggagatcttcaccctgctggccagcatctgctgggtatcagctaatatatttgaatatcaagttgacgcccaaccactgagaccttgtgagcttcaaagggaaactgctttcctcaagcaggctgattacgtccctcaatgcgcagaggatggtagtttccagaccgtgcagtgtcagaacgatggccgatcatgctggtgtgtgggggctaatggaagcgaggtgttgggctcccgacaacccggtagaccagtggcgtgtttgtccttctgtcagctccaaaaacagcaaatactcctgtctggatatattaactccacggacacatcctacctgccccagtgccaggatagcggggattatgcaccagtgcagtgtgacgtgcaacaggtgcaatgttggtgcgttgacgctgaaggaatggaagtttacggcacccgccagctgggaagaccgaaaaggtgcccccgatcttgcgagattcggaatcgtcgtttactgcacggagtaggcgacaaaagtcccccacagtgttccgccgagggagaattcatgcccgtgcaatgcaagtttgtcaacacaactgacatgatgatcttcgacttagtccactcttacaatcggttccccgacgcatttgtgacattttcgagctttcaaaggaggttccccgaagtgagtggttactgtcattgtgccgactcccaagggagggagctggccgaaacaggactagagctcctgctcgatgagatatatgataccattttcgcgggcctcgatctgccctctaccttcacagagacaacactgtaccgaatcctgcagaggaggttcctggctgtgcaaagcgtgatctctggtcgcttccggtgccctaccaagtgtgaggtggagagatttaccgccaccagttttgggcacccgtatgtaccctcatgtagacggaatggagactaccaggcagtacaatgccagaccgagggaccctgttggtgtgttgacgctcaaggtaaagaaatgcacgggacccgacaacaaggtgagcctccaagctgtgccgaaggtcagtcatgtgccagtgaacggcagcaggccctctcacgtctttacttcgggacatccgggtacttctctcagcatgacctgtttagctcaccagagaagcgttgggcttcgcccagagtcgcacgcttcgcaacctcctgtcctcctaccatcaaagaactgtttgtggactcaggcctactgagacctatggtggaaggacaatcgcaacaatttagcgtgagcgagaacttgttgaaggaagctatacgcgccatctttccctcacgaggactcgccagacttgctttacagtttacaactaatccaaagaggttacagcagaacctgttcggtggaaaatttctggtgaatgtgggacagttcaatctctccggtgccctgggtacccggggcacctttaacttttctcagttctttcagcagctgggtcttgcatcgtttctcaatgggggccggcaggaggaccttgctaagcccctatccgttgggctcgactctaactcaagcacaggcacacccgaagcagcgaagaaagacgggaccatgaataagcccacggtggggagctttggtttcgaaattaacctgcaagaaaaccagaatgcactgaagttcttggcctccctactagagttgccggagttcctgctcttcctgcagcacgctataagtgtccctgaagacgtggcacgagacctgggggatgtgatggagactgttttgagttcacagacgtgtgaacaaactccagagcggctcttcgtacctagttgcacaacagagggcagttacgaagacgtgcagtgttttagcggggagtgctggtgtgtgaactcctggggcaaagagctcccggggtcacgcgtgcggggaggccagccacggtgccctaccgattgtgaaaaacaaagggcccggatgcagagcctgatgggttctcaaccagccgggtcaaccctgtttgtgcctgcttgcacgtcagagggacatttcttgcctgtgcaatgctttaactcggagtgttattgcgtagatgccgaggggcaggcgatccccgggacgcggagcgccattggcaagccaaagaagtgtcccactccctgccagctgcagagcgaacaagcttttcttcgaacagtccaggctctgctttccaacagctcaatgttgccaactctcagcgatacatacatcccacagtgttcgaccgacggacagtggaggcaggtacaatgtaatggccctcccgagcaggtgtttgaactctaccagcgttgggaggctcagaacaagggccaggacctgacgcctgccaagctattggtcaagataatgtcatacagagaagcagcctctggcaacttttcactgttcattcagtctttgtatgaggccgggcagcaagacgtattccccgtcctgtctcagtatcctagcctccaggacgtcccgctcgcggccctggaggggaagagaccccagccacgcgagaatatcctgcttgagccctacctgttctggcagattctgaatgggcagctctctcaataccctggctcctactctgatttctccactcctctggcacacttcgacctcagaaattgctggtgtgtggacgaagccggacaggaacttgagggcatgcgctctgaaccttcgaagcttccgacatgcccggggagctgtgaagaggcaaaacttcgcgtgttgcagttcatccgcgaaaccgaggagatcgtgagcgctagtaattcatcaaggtttcctctcggtgagtcgttcttggttgccaaaggtattcggctgaggaatgaagatcttggcctgcctcctctgtttcctcccagagaagcattcgccgagcaatttcttcggggttcagactacgctattaggctggcagcacagagtacgctttccttttatcagcgccggaggttctcacccgacgatagcgccggagcctccgcgctgctacggtcaggcccctacatgccacagtgcgacgcctttggctcctgggagccagtacagtgccatgcaggcactggacattgttggtgtgtcgatgagaaaggcggctttatcccggggagcttgaccgctcgatcactgcagatcccacagtgcccgacgacgtgtgagaaaagccgcacctccgggctcctgagttcgtggaagcaggcccgaagccaggagaaccccagccctaaggatctgttcgtgccggcttgtttagagacaggcgagtacgcacggcttcaggcgagcggcgcaggaacatggtgcgtggatcccgccagtggcgaagaactgaggccaggctcatcttcaagcgctcagtgcccctcactctgcaacgtactgaagtcaggcgtgctttctagaagggtctccccaggctatgttcccgcctgccgcgctgaggatggcggtttttctcctgttcaatgtgatcaggcccagggtagttgttggtgtgtcatggactctggggaggaggtcccaggcacccgcgtaaccggtggtcaacctgcgtgcgaatcccctaggtgtcctctccccttcaatgcaagcgaggtagtgggcggaactatcttgtgtgaaaccatctcgggacctaccggctctgccatgcagcaatgccagctgctttgccgccagggctcctggagtgtgtttcccccaggtccactaatctgctcactcgagagtgggcggtgggagtcccaactcccacagcctagggcttgtcaaaggccgcagttgtggcaaaccatccagacgcagggtcacttccagctccagctgccccctgggaaaatgtgctcggccgactatgctgatttgctccagacgtttcaggtgtttattctggatgaattgacagcccggggtttttgtcagatccaggtgaagacgttcggaactttggtgtctattcccgtctgcaataacagtagcgtccaggtcggatgcttgacccgcgagagattgggcgtgaacgtgacctggaagagcaggcttgaggacattcccgtggcatccttgccagacctccacgacatcgagcgggctttagtgggtaaggatttgctcggccgctttacggacctcatccaatccgggagcttccaacttcatctggacagcaaaacttttcctgctgagacaatccgcttcctgcagggtgaccattttgggacatcaccacgtacctggtttgggtgctctgagggattttatcaggtgctaacctctgaggcctcccaggacgggcttgggtgtgtgaagtgtccggaaggatcatactctcaggacgaggagtgcattccctgccccgtgggcttctaccaagaacaggccggatcactcgcctgtgtgccctgccccgtagggcgcacgacgatttcagccggcgcttttagtcagacccacctgatgcagaaattcgagaaggttcctgaaagcaaggtgatatttgatgcgaacgcacctgtcgcagttagatcgaaggtgcccgacagcgaatttcctgttatgcagtgcctcacagattgcactgaagacgaagcctgttctttttttacagtgagcacaaccgagccagagattagttgcgacttttacgcctggacaagcgacaatgtcgcttgcatgacaagcgatcaaaaacgcgacgcccttggaaactccaaagccacgagtttcggcagtctccgttgccaggtgaaagtgagaagccacggacaggattcccccgctgtctacctgaagaagggacagggttctacaactacgctccagaaaagattcgagcccaccggcttccagaacatgctgagtgggctctacaatcccatagtatttagcgcttccggtgccaacctaaccgatgcccatcttttttgcttgcttgcttgtgatagggatttgtgctgcgacgggtttgtcctcacacaggtgcaagggggagctataatttgcggcctcctctccagtccatccgtgctactctgcaatgtgaaagattggatggacccgtctgaggcctgggctaacgctacctgtcccggtgtcacctatgaccaagagtctcaccaggtgatccttcgcctgggcgatcaagagtttataaaatctcttactccgctggaggggactcaggacacgtttactaatttccaacaggtgtatctgtggaaagactccgacatgggtagtagacctgagagtatgggatgtaggaaggatacagttcctcggccagccagcccgactgaggcaggtcttacaaccgaacttttctccccagtggatcttaatcaagtcatagtgaacggaaatcagagtttgagttcacagaaacactggctcttcaagcacttgttctcggcccaacaggcaaatctctggtgcctgtctcgttgtgtgcaggagcatagcttctgtcagctcgcagagatcacggaatcagcttcactgtacttcacatgcacactctacccggaagcccaggtgtgcgacgatattatggaaagcaatgcccagggctgccgcttgattcttccccaaatgcctaaagctctgttcagaaagaaggtgatcctcgaagacaaggttaagaacttttataccaggctgccatttcagaagctgatgggaatcagtatccggaacaaggtgcccatgtcggagaaatccattagcaacgggttcttcgaatgtgagcgtaggtgtgatgctgacccttgctgtactggcttcggctttcttaacgtttcacagctgaaggggggagaagtcacctgtctcacattaaactctctaggaattcaaatgtgctccgaggagaatgggggcgcgtggcgtatcctcgattgtggcagccctgacattgaagtgcatacttacccctttggctggtatcagaagcccatcgcccaaaacaatgcaccaagcttttgtcctctggtcgttcttccctccttgactgagaaagtcagcttggatagctggcagtctctggcattgtcctccgtggtggtggatccatcgatcagacactttgacgtcgctcatgtgtcaacagccgctacatcgaacttttctgcggtgcgtgatctgtgtttaagcgagtgttcacagcacgaggcgtgcctcattaccaccctccagactcaaccaggagccgtgaggtgcatgttctacgccgatacacagagctgcacccacagtctccagggacaaaactgtcggctgctgctcagggaagaggccacccacatctacagaaagcccggcattagcctattgtcttatgaagccagtgtcccttcagtccctatctctacacacggcagattactcggccgttctcaagctatacaagtggggaccagttggaaacaggtggaccagttcctgggcgtgccttacgccgcccctccacttgccgagagacggtttcaggccccagagcccttgaattggactggctcatgggatgcttctaagccacgcgccagctgttggcagccagggacccggacctccactagtccaggagtatctgaagactgcctttaccttaatgtgttcatcccccagaatgtggcccctaacgcgagcgttctggtgtttttccacaacacaatggatagggaagagagcgagggatggccagcgatcgatggcagtttccttgcggcggtaggcaacttgattgtggtaacggcaagttacagggtgggcgtctttgggttcctgtcatcggggtcaggcgaggtatcaggaaactggggtctcctggaccaagtggccgcgttgacttgggttcaaacccatatcaggggattcggcggtgacccccggagagtgtcacttgcagcggaccgtgggggtgctgatgtggccagcatccaccttctcaccgcccgggcgactaatagccagttgtttcggagggcagtcctgatgggagggagcgccctgtcacccgccgctgtgatatcccacgagcgcgcccaacagcaagctatcgccctggctaaagaggtctcttgccctatgtctagttcccaagaggttgtttcatgcttaagacaaaaacccgctaacgtgctcaatgacgcccaaactaagctccttgccgtgtctggaccatttcattattggggccctgttatcgacggccactttctcagggaaccgcccgcgcgcgccctcaaacggagcctgtgggtggaggttgatcttcttattgggtcttctcaggacgatggcttgattaatcgcgctaaggcagttaaacagtttgaggagagtcggggcaggacatcttcgaagactgccttctaccaggcactacaaaactcactcggtggggaggactcggatgcacgagtggaggctgccgctacatggtactatagcctggaacatagcacagacgattacgcaagcttttctagagctctcgagaatgcaaccagagattactttattatttgccccatcatcgacatggccagcgcctgggcaaaacgggctcggggaaatgtttttatgtaccacgcccccgagaattatggacacggcagcctggagttactcgcagatgtgcagtttgcactcggtttaccattctatccagcatatgagggccagtttagtttagaagaaaagtcactgtcactcaagatcatgcagtatttctcacactttatcagatctgggaaccccaactatccatatgagttcagcaggaaggtgcccacgttcgctaccccctggcctgatttcgtcccacgcgcgggcggggaaaactacaaagagtttagtgagttgcttcctaatagacaaggtctgaagaaagcagattgctctttctggagcaagtacatatctagcctgaaaacatccgctgatggcgccaaaggagggcaatcggccgagtcagaagaagaggaactgacggctggatctggactgagggaggacctcctgagcttacaagaacccggcagcaagacctactccaagtag

SEQ ID NO: 208655 - DNA, 2664 bp, synthetic construct
  misc_feature 1..2664: note = Description of Artificial Sequence: Synthetic coding sequence
  source 1..2664: mol_type = other DNA
atggccctggtgctggagatcttcaccctgctggccagcatctgctgggtgagcgccaacatctttgagtatcaagtggatgcccagcctctgaggccctgcgagcttcaaagggagacggcctttctgaagcaggccgactacgtgccccaatgtgccgaggacggaagtttccagaccgtacagtgccagaatgacggtcgcagttgttggtgcgttggcgccaacgggagcgaggtgttaggctctaggcagcccggtcgccctgtagcctgcctgtccttctgtcaacttcagaaacagcagatactgctcagtggctatattaactctacagacacttcgtatttgcctcagtgtcaggattccggcgactatgccccagtgcaatgtgacgtgcaacaagtgcaatgctggtgcgtggacgcagaaggaatggaagtgtacggtactcggcagcttggtcggccaaagagatgtcctcgctcgtgtgaaatccggaaccggagactgctccacggggtgggcgataaatccccgcctcagtgctccgcagagggagagtttatgcccgtgcagtgcaagttcgtcaacacaactgacatgatgatcttcgacctggtacatagttataacaggttccccgatgcgtttgttacgttttcttcgtttcaaagaagattcccagaggtaagtgggtactgtcactgtgccgattcgcaggggcgggaactggccgagacaggcctggaactgctgctcgatgagatctacgataccatctttgctggcctcgatctcccatctacctttaccgagaccactctttataggatattacagcgcaggttcctggcggtccagtctgtgatctctgggaggttccggtgccctacaaagtgtgaggtggagcgctttaccgcaacctccttcgggcatccctatgtaccatcatgtagaagaaacggggactatcaagcagtccagtgtcaaaccgagggcccatgctggtgtgtggacgcacaaggcaaggagatgcacggcactaggcagcagggtgagccacccagctgcgctgaagggcagtcctgtgccagcgaaagacagcaggccctgagtcggttgtacttcgggacaagcggttacttttcgcagcacgatctcttcagctcacccgagaaaagatgggcgtctcctcgagtcgctagattcgcaactagctgcccccccacgattaaagaactttttgtcgattccggtttgctgaggcccatggtagaaggccagtcacagcaatttagcgtgagcgagaacttactaaaggaggccattcgggcgatcttccccagccggggactcgccaggctcgcgctgcagtttaccacgaaccccaagcgactgcagcagaatctctttgggggaaaatttttagtgaatgtcggacagtttaacctgagtggtgcactcggaactagaggcacattcaatttctcccaattcttccagcaactgggtctggccagcttcctaaatggcggccggcaagaagatctcgcgaaaccattaagtgtgggtctggatagcaactcaagcaccggcacccccgaggccgccaaaaaagatggcacgatgaacaaacccaccgttgggtcattcggattcgagatcaatctacaggagaatcagaacgccttgaagttccttgcttccctgcttgagcttcctgagtttctccttttccttcagcatgccatcagtgtacctgaggacgttgcacgagacctgggggatgttatggagaccgtactatcttctcagacctgcgagcagacacctgagcggctgtttgtccctagttgcaccacggagggctcgtacgaagatgtgcagtgcttttctggcgagtgttggtgcgtaaactcctgggggaaggaactcccagggagtagggtacgaggcggacagccgcggtgtccaacagactgcgaaaaacagcgggcccggatgcaatcccttatgggatctcagccagccggcagcactctgtttgtgcccgcctgtacaagcgaggggcatttcctgcccgtgcagtgctttaactccgagtgttattgcgtggacgcagaagggcaagctatcccgggtacgaggtcagctattgggaagcctaagaagtgtccaacaccctgccagctgcaaagcgagcaggcttttctgaggactgtacaggccctcctgtccaactcatcgatgctccctacactgtctgatacctacgaagggcaatttagcctggaagagaagagcctcagcctcaaaatcatgcagtacttttcacacttcataagaagcgggaatcccaattatccgtacgagttctccagaaaggtcccaaccttcgccaccccctggcccgattttgtaccaagggccggcggcgagaactataaggaattttccgaacttctgccaaacaggcagggcctgaagaaagccgattgtagcttctggtcgaagtacatctccagccttaaaacatctgccgacggcgccaagggcggccaatccgccgagtccgaggaggaggagcttactgctggctccgggttgcgtgaagaccttctttctctccaggaaccgggatcaaagacctactccaagtag

SEQ ID NO: 208656 - DNA, 3417 bp, synthetic construct
  misc_feature 1..3417: note = Description of Artificial Sequence: Synthetic coding sequence
  source 1..3417: mol_type = other DNA
atgatgcagaagttcgagaaggtgcccgagagcaaggtgatcttcgacgccaatgccccagtggccgttcggtctaaagtacccgactctgaatttccagtgatgcagtgtcttactgactgcaccgaagatgaagcatgctcattttttaccgtgtcaaccacggagcctgagatttcatgtgacttttacgcttggacgtcggacaatgtcgcctgcatgacatccgatcagaagagggacgctctgggcaatagcaaagccaccagctttggatcattgagatgtcaggtaaaggtccgatctcacgggcaagacagcccagctgtttatctaaagaagggagccatcatatgcggtcttttgtcatccccaagcgtgttactctgtaatgtcaaggactggatggatccttctgaggcatgggccaatgcgacatgtcccggtgtgacctacgaccaggaaagtcaccaggtgatcctgagactaggagaccaggagttcatcaagagcctgacccctctggagggaactcaggacacatttactaactttcaacaggtgtatctgtggaaagattcagatatgggctcacgacctgaatccatggggtgccgaaaggacactgtccctcgccctgcctccccaactgaagcaggcctcactacagagctcttttcacctgtagatctgaatcaggtcattgtaaacgggaaccaatcactttcgtcccaaaaacattggttgtttaaacatctgttttccgcgcagcaagctaatctgtggtgcctctctcgctgcgtacaggagcacagcttttgccagttggcagagataacagaatctgctagtctttactttacttgtaccctttacccagaggctcaggtatgcgacgacatcatggaaagcaatgcacagggctgtcgcttaatcctcccacagatgccgaaagcccttttcagaaagaaggtgatcctcgaggacaaagtgaagaatttttacacccgcctccccttccaaaagttaatggggatttctatacgcaataaggtccctatgagtgagaaatctattagcaacggattcttcgagtgcgaacgcagatgcgatgccgacccatgttgcactggcttcggcttcctcaatgtgtcacagctaaaagggggggaggtaacatgtctcaccctgaatagtcttggtatccagatgtgctccgaagaaaacggcggcgcttggaggattctggactgtgggtcacccgacatcgaggttcatacctatccctttgggtggtaccaaaagcccatagctcagaacaacgcgcctagcttctgccccctcgtggtgctccctagcctcaccgagaaggttagcctggactcttggcaatctctcgctctgagctctgtagtagtggacccctctatcagacactttgacgtagcgcatgtctctacagcagccactagcaatttttccgctgtgagagatttgtgtctgtctgagtgctcacagcacgaggcgtgtctcatcacaaccttgcaaactcagcctggagccgtgcggtgtatgttttacgccgacacccaatcttgtacacacagtctgcagggccagaactgccgcctcctgcttagggaggaggcgacccacatctaccggaaacccgggatctctctgctcagttacgaagcctcggtccctagcgtgcctatttctactcacggccgcttactaggtaggagtcaggcaattcaggttggcacctcctggaagcaggtggaccagttcctgggcgtgccgtacgcagccccccctctcgctgagcgccggttccaggctcctgagccattgaactggacaggttcctgggacgcaagtaagccgcgtgcaagctgctggcagcctggcacccgcacctcaacttctcctggggtgagcgaggactgtctgtatcttaatgtgtttattccccaaaatgtggccccaaatgcatctgtgctcgttttctttcataataccatggacagagaagagtcggagggatggcccgcaatcgacggctcattcctggccgccgtcggaaaccttatcgtggtaacggcctcctaccgcgtgggcgtgttcggttttcttagcagcgggagcggagaagtgtcaggtaattggggcctgcttgatcaggttgccgcactcacatgggtacaaacccatatcaggggttttggaggtgatcctagacgcgtgtctctggcagcggatcggggcggggccgatgtggcctccattcatctgcttacagctagggccacaaactcccagctcttccggagggcagtgttaatggggggttctgccctttcacccgcagctgttatttctcacgaacgggcacagcaacaagctatcgccctggccaaagaggtctcatgtcctatgtcaagctcacaggaggttgttagctgtctgagacagaagccagccaatgtcttaaacgatgcacagacaaagttgctggccgtcagcggcccgtttcactactggggcccagtaattgacgggcacttcctaagagagccccctgcacgggcgctcaagagatcactgtgggtggaggtagatctgctgatcggatcttcccaggacgatgggctaattaaccgcgctaaagcagttaagcagtttgaagagtctcgaggaaggacatcaagcaagaccgctttctatcaagccctccagaatagtttgggaggggaagattcggatgcacgtgttgaagcggccgcaacctggtactactccttggagcattccaccgatgactacgcctccttttcacgtgctctagagaacgctacacgggactatttcatcatttgccccataatagacatggcatcagcctgggcaaagcgagctcgggggaatgtatttatgtaccacgctcctgagaattatggccatggcagtctggaactcctcgccgacgtgcagtttgcactcggactgcctttttaccccgcttacgaaggacaattttctctcgaggaaaaatcgttgagtcttaagattatgcaatactttagtcactttatacggagtggaaatcctaactacccctatgagttctcgcgcaaggtgcccacgttcgcaacaccctggcctgattttgttcctcgagccggcggcgagaattataaggaattttcagagctgctgccaaatcggcaaggtctcaagaaagccgactgtagcttctggtcaaagtacatctccagcttgaagacttctgctgatggtgctaaaggaggacagtccgcagagagcgaggaggaggagctgaccgctggcagtgggctccgcgaggatctgctctctttacaggaacctggttctaaaacgtacagtaaatag

SEQ ID NO: 208657 - DNA, 4725 bp, synthetic construct
  misc_feature 1..4725: note = Description of Artificial Sequence: Synthetic coding sequence
  source 1..4725: mol_type = other DNA
atcccccggaagcccatcagcaagcggcccgtgcggcccagcctgccaagatctccgcggtgtcctctgcctttcaacgcttcggaagtcgtgggcggtaccatcctttgcgagaccatctcagggcctacagggtcagcaatgcagcagtgtcagctactctgtaggcagggatcctggtccgtgtttccccctgggcccctcatctgcagcctcgaaagcggccggtgggaaagccagctgccacagccgcgagcttgccaaagaccccagctttggcaaaccatccagacacaggggcacttccagctccagctgccacccggaaaaatgtgttcggccgattacgccgacctgttacagacgtttcaagtcttcatactggacgagcttacggctagaggattttgtcaaatccaggtcaaaacttttgggaccttagtgtccataccagtgtgcaataatagctccgtccaggtcggatgcttgactcgggagcgccttggggtcaatgtgacctggaaaagtaggctggaggatattcccgtcgcctctttgccagatctgcatgatatcgagcgggctctggtgggaaaagatctactgggacgtttcacggaccttattcagagcgggtcctttcagctgcatttggacagcaagacctttcccgccgaaacaattcggttcctacagggagaccacttcgggacctctccacgaacatggtttggatgtagtgaagggttttatcaggtgctgacctcagaggcctcgcaagacggactggggtgcgtcaagtgtcctgagggatcttattcacaggacgaggagtgtatcccatgtccagtcggattttaccaggagcaggctggctcactcgcatgcgtcccatgccctgtaggaagaaccaccattagcgctggtgcatttagccagacgcactgcgtgacagactgtcagagaaatgaggctggactccagtgtgaccagaatggtcagtatagggcttctcagaaggatagaggatccggcaaggcgttctgcgtcgacggggaaggcaggcgcctaccctggtgggagacagaagctcctctggaagatagccaatgtctaatgatgcagaagtttgaaaaagtccccgagagcaaagtaattttcgacgctaatgctcccgtggccgtgcgctcgaaagtgcctgattcagagtttcccgtaatgcagtgcctgaccgattgtacggaggacgaagcttgctcgttttttactgtatccactaccgagccagaaatctcctgtgacttttatgcatggacatcagacaatgtcgcttgtatgaccagtgatcagaagcgggatgccctgggaaattcaaaggccacttccttcggaagcctccgctgtcaagtgaaggtgcgcagtcatggacaggattcaccagcagtgtacttgaaaaaaggccagggctcaaccaccaccctccagaagcgattcgagccaaccggcttccagaacatgttgagcggactgtacaaccctattgttttcagcgcatcaggcgcaaatttgaccgacgcacacctgttttgtctgttagcttgtgatagagatctttgctgcgatggatttgtgcttacccaggttcaaggaggggctattatctgcggcctgctatctagtccatctgtgctgctgtgtaacgtaaaagactggatggatccttcagaggcttgggccaatgcgacctgcccaggagtgacttatgatcaagagagtcatcaagtcatcttgaggctcggggaccaggaattcatcaagtccctgactcctttagagggtactcaggatacctttactaatttccaacaggtgtacctttggaaagattcagatatgggcagccgccccgaaagtatgggttgccgcaaggacactgtgcctcgacctgcctcaccaactgaagcgggattgaccaccgaactgttctctccggttgatttaaaccaagtgatcgtgaatggcaaccagagcctgtcttcccagaaacactggcttttcaaacatctcttttccgctcagcaggccaatctttggtgtctgtcacgttgcgtacaggagcactccttttgtcagcttgcagagatcaccgagtcagcttctctgtacttcacctgtaccttataccctgaagcccaggtttgcgacgatatcatggagagcaacgcccagggctgtagactgatattacctcaaatgccgaaggccttattccggaaaaaggtcatcctcgaagacaaggtaaagaatttttacaccaggcttcccttccaaaagcttatgggaatctctatccgtaataaggtgccaatgtctgaaaagtcaatatcgaatggctttttcgaatgtgagagaaggtgtgatgctgatccttgctgcactggcttcggtttcttaaacgtgagtcagctcaaggggggggaagtgacctgtcttactctgaacagcctcggaattcagatgtgttcggaggaaaacggtggcgcctggcgaatcctagattgcggatcacccgacatcgaggttcacacatacccgtttggttggtatcaaaagccaatcgcccagaacaacgcaccatccttctgtccacttgtggtcctgcctagtctgaccgagaaagtcagtctggacagctggcagtcgctggcgctctcatccgtggtggttgatccttccattcggcatttcgacgtagcccatgtgagcaccgccgccacctcaaacttctctgccgtacgtgacctgtgcctttccgagtgctcccagcacgaggcctgccttatcacaaccttacagacacaacctggggctgtgagatgtatgttttatgcggacacacagagctgcactcacagcctgcaaggacagaactgccgactgcttctccgagaagaggcgactcatatatacagaaaaccggggatctctcttctctcttacgaagctagcgtaccttctgttcccatctccacgcacggccgactgctgggccgctcacaggccatccaggtggggactagctggaaacaggtcgaccaatttctcggggtgccatacgcggctccacccttggccgagcgccggtttcaagcacctgaacctctgaattggactggttcatgggacgcgtcaaaaccccgtgcgtcatgttggcagcccggcacccgtaccagcacctccccaggtgtgtccgaggattgtctttatttgaatgtattcatccctcagaacgtcgctcctaacgcttctgttctcgttttttttcataacacgatggatagggaggagagtgagggctggccagcgatagacggctcatttctggcagccgtgggcaatcttatagttgtgaccgcctcatatcgcgtcggcgttttcggcttccttagttcaggaagcggcgaggttagcggcaattgggggctcctcgatcaggtagctgcgttaacctgggtccaaacacatatccgcggattcggcggggatccccgccgcgtatccctcgccgctgaccgtggcggcgcggatgtcgcctccatccatctgttgaccgcccgggcaacaaacagccaattgttccgtagggccgtcttgatggggggcagcgctttgtcccccgccgcggtgatctctcacgagcgcgctcaacagcaggctattgcgctggcaaaagaagtgagctgtcccatgtcgtccagccaggaagtggtttcgtgtttgcggcagaagccagccaatgtattgaatgacgcccagactaaactcctggccgtgtcggggccatttcactactggggacctgtcatcgacggccacttccttcgggagccccccgcccgcgccctgaaacgttctctgtgggtggaggtagatctcttaatcgggtcctcacaagatgacgggctgatcaatcgagccaaagccgtcaagcagttcgaggagtccaggggcagaacttcatccaagaccgccttctaccaggctctgcaaaacagtttgggcggtgaggactctgacgccagagttgaagcagcagcaacttggtactattctctcgagcacagtactgacgactacgcctccttttcacgggccctggagaatgccacaagggattatttcatcatctgtcccataatcgatatggcctcagcctgggccaagagggcccgcgggaatgtgttcatgtaccacgcacccgagaactacggtcacggcagcctggagcttctcgctgacgtacagttcgcactgggtcttccattttatccggcctacgaaggacagttcagcttagaagagaaatcactttccctgaaaattatgcagtattttagccacttcatacggtctggaaatccaaactacccatacgaattttctcggaaggtccccaccttcgcaacgccgtggcccgattttgtgccacgtgcgggaggagaaaactataaagaattcagcgagttgttacccaatcgacaggggttgaaaaaggctgactgctcgttctggtccaagtatatatccagcctcaaaacatccgccgacggtgcgaaggggggtcagagcgcagagtctgaggaggaggaactcactgcaggatccggtcttcgggaggacctgctgagtctgcaggagcctggctcaaaaacttattcaaagtag

SEQ ID NO: 208658 - DNA, 1356 bp, synthetic construct
  misc_feature 1..1356: note = Description of Artificial Sequence: Synthetic coding sequence
  source 1..1356: mol_type = other DNA
atggagcagaagcccagcaaggtggagtgcggcagcgaccccgaggaaaactctgctaggtcccccgatggaaaaagaaagagaaagaacggacagtgcagcctcaagacgtccatgagtggttatattccaagttaccttgacaaggacgaacagtgcgtagtgtgcggcgacaaagcaaccggctaccactataggtgcataacatgcgagggctgtaaggggttcttccgacggactatccagaagaatctgcacccaacatacagctgcaagtacgactcttgctgtgtgatagacaagattacacgcaatcagtgtcaattatgccggtttaagaagtgtatcgccgtggggatggccatggacttggtgctggacgatagcaagagagtggccaagaggaagctgatagagcaaaatcgggaaagacgcagaaaagaagagatgatcaggtccctgcagcagaggcccgagcctacccccgaggaatgggacctcatccacattgccaccgaggctcacaggtcaaccaacgctcagggctctcattggaagcagcggagaaagtttctcccagacgatatagggcagagccctattgtatcaatgcccgatggggataaagtcgatctggaagcattctcagagtttacaaagatcatcacccccgctatcacccgggtagtagattttgctaaaaagctccccatgttctctgagttaccatgtgaggaccaaatcattctcctaaagggatgctgtatggagataatgtccctgagggcagccgttaggtacgatcctgagagtgacacattgacactctccggagagatggccgtgaagcgggaacagctcaaaaacgggggattgggagtggtgtccgacgccatctttgagctgggaaagagcttatccgcgtttaatcttgacgatacggaggtcgcattgctgcaagctgtgctgcttatgagtaccgaccgttctggactgctctgtgtcgacaaaatcgagaagagtcaggaggcctatctgttggcatttgaacattatgtgaatcacaggaaacacaacattccccatttctggccaaagctgctcatgaaagggcctcaagtgagacagcttgaacagcagctgggagaggccgggtcgttacagggcccagtcctgcaacatcagagtccaaagagcccccagcagcggttactggagctattacatcggagcgggattctgcatgcccgcgcagtgtgcggggaggatgatagttcagaggccgactctccgagctcatccgaagaggagcccgaggtttgcgaggatctcgcagggaacgcagcaagtccgtag

SEQ ID NO: 208659 - DNA, 5940 bp, synthetic construct
  misc_feature 1..5940: note = Description of Artificial Sequence: Synthetic coding sequence
  source 1..5940: mol_type = other DNA
atgagcagctggctgggcggcctgggcagcggcctgggccagagcctgggtcaagtgggaggcagcctggcaagtctcactggccagatcagcaattttacaaaggacatgctgatggagggaactgaagaggtggaggccgaattgcctgactctcgcacaaaggagatagaggccatccacgccatcctgcgatcggagaacgaaagattaaagaaactctgtactgacttggaggagaagcacgaggcttccgagattcagatcaagcagcagagcacgagctataggaatcagctacagcagaaagaggtcgaaatttcccatctgaaggcccggcagatagccttgcaggaccaactgctaaagctccagtcagccgcgcagtctgttcccagtggcgctggagttcctgcgacaacagcttcgtctagttttgcatacgggatatcacaccacccaagtgcctttcacgacgatgacatggacttcggcgacatcatttcgtctcagcaggaaatcaatcggctgtccaacgaggtgtctaggttggagtccgaagtcggtcactggcgtcacattgcccaaacctctaaagcccaagggacggacaacagtgaccaatccgagatttgcaagttacagaatattatcaaggagctgaagcagaaccggtctcaggaaattgacgatcatcagcatgagatgagtgtcttacagaatgcccaccagcaaaaattaacagagatctccagacgtcacagagaagagctgagtgattatgaggaaaggattgaggagctcgagaacctgctgcagcaaggaggctccggagtgattgaaacagacctgtccaaaatttatgaaatgcagaagacgatacaggtgttgcagattgaaaaggtagaatccacgaagaagatggaacagcttgaagacaaaataaaagatatcaacaagaaactgtccagtgcagagaacgatcgcgacatcttgagacgggaacaggaacagctgaacgtggaaaagagacagattatggaggagtgcgaaaacctcaaactcgagtgtagcaaactgcagccaagcgcagttaagcaaagcgatactatgaccgaaaaagaaagaatattagcacagagcgcatctgttgaggaggtgtttaggctccagcaagccttgtccgacgccgagaatgagatcatgcggcttagtagcttgaaccaggataactctctagccgaggataatttaaagctaaaaatgcggatagaggtgctcgaaaaagagaaatccctgctgagtcaggagaaagaagagttacagatgtccctgctgaagttgaataacgaatacgaggttattaaatccactgccacccgagacatttccttggatagcgagctccacgacctgagattgaaccttgaagctaaggagcaagagctgaaccagtctatatcggaaaaggaaaccctgatcgctgagattgaagagcttgaccggcagaaccaggaggcgacaaaacatatgatcctcattaaagatcagctgtctaaacagcagaatgagggggatagtattatttctaaactgaaacaggacctgaacgatgagaagaaaagagtccatcaattggaagatgataaaatggatattacaaaagaattggacgtccagaaggagaaactcatccagtctgaagtggcactgaacgaccttcatctgacgaagcagaagcttgaagacaaagtggagaacctggtcgatcagcttaataaatctcaggagtccaatgtgtctatccagaaagagaatctggagctaaaagagcacatacggcaaaatgaggaagagttgtcccgcatccggaacgaattaatgcaatccctgaaccaggatagcaattccaattttaaggataccctgcttaaggagagggaagcggaagttcgaaacctgaaacaaaacctaagtgagctcgagcaactgaatgagaatctcaagaaagttgcttttgacgtgaaaatggaaaatgagaagttggtcctcgcatgtgaggatgtgcgccaccagctggaggaatgcctggccggcaacaatcagcttagcctggagaaaaacacaattgtggaaacacttaagatggagaaaggcgaaatcgaagctgagctgtgctgggctaagaaaaggttattggaggaagctaacaaatacgagaaaactattgaagagctgagcaacgccaggaacctgaatacgtctgccctccagcttgagcatgaacatctcattaaactgaaccagaagaaagacatggaaatagccgagttaaaaaaaaacatcgagcagatggacacagaccacaaggagacaaaggacgtcttgagctcctctctggaagaacagaaacaactcacccagttgattaataaaaaggaaatctttatagagaagctgaaagagcggagttccaaacttcaagaagaactcgataagtacagccaagctctgagaaaaaatgagatacttcggcagactatcgaagagaaggaccgctctctcggcagtatgaaggaggagaataatcacctgcaggaggagttagagcggttgcgtgaggaacaatctcgtaccgcgccggtagcagacccaaaaacactcgatagcgtcaccgagctagcctccgaggtgtcccagctgaacacgatcaaggaacatcttgaagaagagatcaagcaccaccagaagatcatcgaggaccaaaaccagagtaagatgcaattattgcaaagcttgcaggagcagaagaaggagatggacgaattcaggtaccagcacgaacagatgaacgccacacatacacagctttttctggaaaaggatgaggagataaagtccctgcaaaagacaattgagcagatcaaaactcagctgcatgaggagcggcaagacatccagacagacaactccgacatcttccaggagactaaggtgcaaagcctcaatattgaaaatgggagtgaaaagcacgatctgtccaaggccgaaaccgagcggctggtgaagggaattaaggaacgggaactggaaataaagctgctaaatgagaagaacattagcctgaccaaacagatcgatcaactgagtaaggatgaagttggtaagctcacacagataattcagcagaaagatctggagatccaggcactgcacgctcggattagtagtacaagccacacccaggatgttgtgtatctgcaacagcagttacaggcctatgctatggagcgtgagaaagttttcgctgtgctgaacgaaaaaaccagagaaaacagtcacctcaagactgaatatcacaagatgatggatatcgtagctgcaaaagaagctgctcttatcaagctgcaagacgagaataagaaactgtctacgagattcgaaagctccgggcaggatatgttcagagaaaccattcagaaccttagtagaatcatcagggagaaggatattgaaatcgatgcattatcccaaaaatgccagaccctacttgctgtccttcaaacctctagcacaggcaatgaagctgggggagttaattctaaccaatttgaggaactgctgcaggaacgcgataagcttaaacagcaggtcaagaagatggaggaatggaagcagcaggttatgaccacagtgcaaaacatgcagcacgaaagtgcccagctccaagaagaactgcatcaattgcaggctcaggtgctcgtcgatagtgataacaattctaagcttcaggtggattacacaggccttatccaaagctacgagcaaaacgaaacaaaactcaagaactttgggcaggaacttgcacaggtgcagcattccattggacagctgtgtaacactaaagatctactcctcggcaagctcgatataatttccccacagctgtcttcggcatctttactcacaccccaatcagccgaatgcctgagagcaagcaaatccgaggtgctctccgagtctagtgaattgctgcagcaagagttggaagagttgaggaaaagtctgcaagagaaggatgcaaccatcaggaccctccaggagaacaaccaccgccttagcgactcaattgcagcaacgagcgagctggaaagaaaggaacacgagcagaccgatagcgagattaagcagctcaaagagaagcaggacgtactacagaagctgttgaaggagaaggaccttctaatcaaagcaaaaagtgaccaactgttaagtagcaacgagaatttcactaacaaggtgaacgaaaacgaactgcttcgccaagccgtcaccaacctgaaagaacgtatcctgattttagagatggatattggcaagctgaagggagagaatgagaaaatcgtggagacttataggggcaaagagactgagtaccaggcattgcaggaaaccaatatgaaattcagcatgatgttgagggagaaggaattcgaatgccactcaatgaaggaaaaggctctcgcgtttgagcaactcctaaaggaaaaggagcagggaaaaaccggagagctgaaccaactgttgaatgccgtgaaatccatgcaggagaaaaccgttgtttttcagcaagaacgcgatcaggtaatgcttgctctcaagcaaaagcagatggaaaacaccgcactccaaaacgaggtgcaaaggttgagagacaaggagttccgatccaatcaggaattagagaggctacgcaaccacctcctggaaagtgaggatagctacactcgagaggcattggctgccgaagatcgggaagccaagctcaggaagaaggtgactgttcttgaggagaagctcgtttcctctagtaatgctatggaaaatgcgagccatcaagcgagtgtgcaggtcgagtccctgcaggagcagctgaatgtggtgagcaagcagagagatgagactgccctgcagcttagcgtctcacaagaacaagtgaagcagtacgccttgtccttagctaatctgcaaatggtgctggaacacttccaacaggaagagaaggctatgtactcagccgaactagagaaacagaaacaactgattgccgagtggaagaaaaatgcagagaatctggagggaaaagttatttcgctgcaggagtgtctggatgaggccaacgccgcccttgatagcgcttctaggttgaccgagcagctggacgtcaaagaagaacagatcgaggagctcaaaagacaaaatgaacttcgtcaggagatgctggatgatgttcaaaagaaactgatgtctctagccaactcaagtgaaggaaaggtggacaaggtactgatgagaaatctgttcattggacattttcatactcccaaaaaccagcgccatgaagtgctaagactgatgggctccattctcggtgtcaggagggaagaaatggagcagctgtttcatgacgatcaggggggggtgactcgctggatgactggctggctcggcggtggctcaaagtccgtgcctaatacgcccttgcggccaaaccagcagtcagtggtcaatagttctttctccgaactgtttgtaaagtttctcgagacggagagccacccctcgattcccccgccaaagcttagcgtgcatgatatgaaacctctcgacagtccaggacggagaaaaagagacacaaatgctccagaaagctttaaggacaccgcagaaagcagaagcggtcgccgcactgatgtaaacccctttctggcgccaaggtcagctgctgtgcccctgattaatccggctggcctaggcccaggcggtccaggccacctgctcttaaaaccaattagtgacgtgctgccaactttcaccccactgccagccctgcctgacaattctgcaggggttgtactcaaggatctgttgaaacaatag

SEQ ID NO: 208660 - DNA, 5148 bp, synthetic construct
  misc_feature 1..5148: note = Description of Artificial Sequence: Synthetic coding sequence
  source 1..5148: mol_type = other DNA
atgagcgtgctgcagaacgcccaccagcagaagctgaccgagatcagcaggagacatagggaggagttgagcgactatgaggagcggattgaggaattggagaacttactgcagcagggggggagcggtgttatcgagactgacctgagtaagatatacgaaatgcagaagaccatccaggtgctgcaaatcgaaaaagtggaaagcacgaagaagatggaacaattggaagataagattaaagacattaataaaaagctctcttctgccgagaacgacagagatatccttcgacgcgagcaggagcagttaaacgttgagaagaggcagattatggaggaatgcgagaacctgaaattggagtgctctaaactgcagccgagcgcagttaaacaatcagatactatgaccgagaaggagcgcatcctggcacagtctgccagcgtggaagaggtattccgccttcagcaggccttaagcgacgcggagaacgaaatcatgcgcctgagttccctgaaccaagaagaactgcagatgagcttgctcaaactgaataatgagtatgaagtgatcaaaagcacagctacaagagatataagcctggattccgagctccatgatcttcgcctgaaccttgaggctaaagagcaggagctgaaccagtccatctcagaaaaggaaacgttgatagctgaaattgaggaactggatcgccagaaccaggaagctaccaaacacatgatactaatcaaagatcaactcagcaaacagcagaatgaaggggacagcatcatttccaaacttaagcaggacctgaatgacgagaaaaaacgcgttcatcagctagaggacgacaagatggatattactaaagagctggacgtgcagaaggaaaaattaatccagtccgaagtagccttgaacgatctgcaccttaccaagcagaagctcgaggacaaggttgagaacctcgttgatcagctgaataaatctcaggagagcaacgtctcgatccagaaagaaaatctggagctgaaggagcacatacgccagaacgaggaggaactgtctcggattcgcaatgagctcatgcagtctctgaatcaggatagtaatagcaacttcaaggacacactgctcaaggaacgggaggccgaggttaggaacctgaaacaaaacctgagcgaactagagcagctgaacgagaacttaaaaaaggtggcatttgatgtgaagatggagaatgagaaacttgtgctggcttgcgaggacgtacgacaccagctggaagaatgccttgccgggaataaccaacttagcctcgagaagaacaccattgtggaaacacttaaaatggaaaagggcgaaatagaagccgagctgtgctgggccaaaaaaagactgctggaggaagctaacaaatacgaaaagacaatcgaggagttgagcaacgcccgaaacctcaacaccagcgcactccagttagagcacgaacacctgattaaactgaatcagaagaaggacatggagattgccgaactgaagaaaaatattgaacagatggataccgatcacaaagaaacaaaagatgtattgtctagttccctggaggagcagaaacaattgactcagcttattaacaaaaaggagatctttatagagaaactcaaagagcggtcctccaagctgcaggaggagctggacaagtattcccaggcacttaggaagaacgagatcctccgccagacgatagaggagaaggaccgcagcttaggcagcatgaaggaggagaataaccacttgcaggaggaactggagaggttaagagaggagcagtcaaggaccgcgcctgtcgccgacccgaaaactctggatagcgttacggagctagcttccgaggtgagccagctgaacaccataaaagagcacttggaggaagaaattaaacaccaccagaaaattattgaagatcagaaccagtctaagatgcagctgctgcaaagtctgcaggaacagaaaaaggaaatggatgaattccgatatcagcacgaacaaatgaacgctacacacacccagttatttttggaaaaggacgaggagataaaatcattacagaaaaccattgaacagattaagacccaactccacgaggaacggcaggacatccaaacagacaactcagatatattccaagaaaccaaagtccagtcgctcaatattgagaacggctccgagaagcatgacttgagtaaggctgaaactgagcgtctcgttaagggtataaaagagcgggagcttgaaatcaaacttctcaacgagaagaatatatctctgacaaagcagattgaccagctctcaaaggatgaagtgggaaaactgacacagattattcagcagaaggacttggaaattcaggctctgcacgccaggatttcgagcacctctcacactcaggatgtggtgtacctgcaacagcaactgcaggcgtacgcaatggaaagagaaaaagtattcgccgtcctcaacgaaaaaactcgtgaaaactcccacctcaagaccgagtaccataaaatgatggacattgtggctgccaaggaagctgccttaataaaactgcaggacgagaataagaagcttagtacgaggtttgagtcgagtggccaggacatgtttcgcgaaacgattcagaacttgtcacgcattatccgggagaaggacatagaaattgatgccctgagtcagaagtgccaaacccttcttgctgtcctgcaaacaagctccacggggaacgaggctggtggagtaaactccaaccagtttgaagaactgctgcaggagagagacaagctcaagcaacaagtaaagaaaatggaggaatggaaacagcaagtcatgacaaccgtccagaacatgcaacatgaatcggcacagctgcaagaagaactgcaccagctgcaggcccaggtattggtggacagtgacaataacagcaagcttcaagtggattatactgggttgatccagtcctacgagcagaacgagacaaagctaaagaacttcggccaggagttggctcaggtccagcacagcatcggacagttatgcaataccaaggatcttctgctggggaagctggacatcatcagcccccagctctcatctgcatccctcctgactccacagtcggccgaatgtctccgagccagcaaaagtgaggtcttgagtgagtcatcggagctgctgcagcaagaactggaggagctccgcaagagcttgcaagaaaaagacgcaacgatcagaactttacaggagaataaccacagactgtcggactctatagccgccactagcgaactggagcgaaaagaacacgaacagacggactcagaaataaaacagttgaaggaaaaacaggatgtacttcagaagttgctgaaggaaaaggacctgcttatcaaggccaagtctgatcaactcctcagttccaatgagaatttcacaaataaggtgaatgaaaatgagctgcttcgacaggccgtaaccaatttaaaggagaggatcctgatcctggagatggacattggcaaactcaagggtgagaacgagaaaatagttgagacctaccgaggcaaggaaacggagtaccaggccctgcaggagaccaatatgaagttctcaatgatgctcagagagaaggagtttgagtgtcatagtatgaaggagaaggctttggctttcgagcaattgctaaaggagaaggagcagggaaagacaggggaattgaaccagttactcaacgccgtcaagtccatgcaagaaaaaacagtggtgttccaacaggagcgagaccaggtcatgctcgcccttaagcagaagcagatggagaatacagcgcttcagaatgaggtgcaaagactgagggacaaagagtttagaagtaatcaggaactagagcggctgagaaaccacctgctagagtcagaagattcttatacaagagaagcactagctgccgaagaccgggaagccaagctccggaaaaaggtgaccgtcctcgaagagaagctggtctcatctagcaatgccatggagaatgccagccaccaggcctctgttcaggtcgagagcctccaggagcaactaaacgtcgtaagcaagcagagagacgagactgccttacaactgtctgtgagtcaggaacaggtgaaacagtacgcactctcactggctaacctacaaatggttctcgagcacttccagcaggaggagaaggccatgtatagcgccgagctcgaaaagcaaaagcagttaatcgccgaatggaaaaaaaatgctgagaatctggagggcaaggttataagccttcaggaatgtcttgacgaggccaatgccgcattggacagcgcaagccggctcaccgagcagttggatgtgaaggaggaacagattgaggagcttaaaaggcaaaacgagctgcgacaagaaatgctagacgacgtgcaaaagaaattgatgtccttagcgaatagcagtgagggaaaggttgataaagtcctaatgagaaaccttttcatcgggcactttcacaccccgaaaaaccaacggcacgaggtcctcaggctcatggggtctattttaggcgtgcgacgagaagagatggaacagctctttcacgacgatcagggtggagtgaccaggtggatgaccgggtggcttggtggaggatccaaatctgtgcccaacacccccctgcgcccaaaccagcaatctgttgttaacagcagctttagtgagctgttcgtcaaatttctggaaacagaatcacatccgtccattcctcccccgaaattatctgtgcacgatatgaagcctttagattcccctggtcgtagaaagcgggatactaatgcaccagagagtttcaaggacacagctgagagcagatctggccgacggactgacgtcaatccttttctggcccccaggagtgccgctgtgcccctgattaaccccgcgggtctcggtcccggtggcccagggcacttgcttctcaagcctatctcagatgtgctgcccacatttacccctttgccagccctgcccgacaatagcgctggtgtggtcttgaaagatttgctgaagcagtag

SEQ ID NO: 208661 - DNA, 5979 bp, synthetic construct
  misc_feature 1..5979: note = Description of Artificial Sequence: Synthetic coding sequence
  source 1..5979: mol_type = other DNA
atgagcaaccggcccaacaacaaccccggcggcagcctgcggcggagccagcgcaacactgccggagcccaaccccaggacgattccatcggcggtaggtcctgctcgtcttcctcagccgtgatcgtacctcaacctgaggacccagatagagccaataccagtgaaagacagaaaaccggccaggttcctaagaaggacaattcgcggggagttaagaggtctgcttctccagactacaatcgtactaatagtccctctagcgctaagaaacctaaagccctgcagcacactgaaagcccaagcgagacgaataaaccccactccaaatctaagaaacggcacctcgatcaggaacaacaactcaagagcgcgcagtccccgtccacatccaaggcccatactagaaagagcggggccacagggggtagtcggagccagaagaggaaacgaacggagtcatcttgtgttaagtcgggatccggctcagaaagcacaggagccgaggagcgctccgccaaaccaacaaagttagccagcaaatccgccacttctgctaaagcaggctgtagcaccattactgattcgtcttccgctgcctctacctcgtctagcagctcagccgtggcttccgcaagtagcacagtgcctccaggcgcaagagtcaaacagggcaaggatcagaacaaggcccggagaagtcggtcagccagtagcccgagcccgcgtagaagtagccgcgagaaggaacagagtaaaacaggtggctcaagcaagttcgattgggctgcccgcttcagcccgaaggttagtctccctaagaccaaactatctctccctggctcctcaaagtctgagacctccaagccaggacccagcggtctgcaggccaaactggctagtctgagaaaatccacaaagaagagatcagagtcaccaccagcagaactgccctcattgagacggtccacccgacagaagaccaccggtagttgtgcaagtacctcgcggcgcgggagcgggctgggaaagagaggtgcagctgaggcccgaaggcaggaaaagatggcagacccagagtcaaaccaggaagccgtgaacagctctgcagcccgcactgatgaagcaccccagggcgccgctggggcggtcggtatgacaacctcgggagaatccgagtcagatgattccgagatgggccgactacaggcgctccttgaagctagggggctgccgccacacctctttgggcctctgggccctcgcatgtcgcagctgtttcataggaccattggatccggtgcctcttctaaggcccaacagctgctacaggggttgcaggctagtgacgagtctcagcagcttcaggctgtgattgagatgtgtcagcttttagtgatggggaatgaagaaaccctgggaggcttccccgtcaagtcagtcgtacctgctctgattacgctgctacagatggagcacaactttgacattatgaaccatgcatgccgcgcgctgacatacatgatggaggcccttccccggtcctcagcagtggttgtggatgccattccagtgttcctggagaagctacaggtcatccagtgcatcgatgtggctgagcaagctctcactgctctggagatgctgtccaggcgacatagcaaggcgatactgcaagccggcgggctggccgattgtcttctatatcttgagttcttcagcatcaacgcccagcgcaatgctttggccatcgccgccaactgctgtcaatccatcaccccggacgaatttcacttcgtggccgacagtctgcctctgcttacgcaacgtcttacacaccaagacaaaaaatccgtcgagagtacatgcttatgttttgctcgcctcgtggacaactttcagcacgaagagaacctgctccagcaggtggcttctaaggacctgctgacaaatgttcaacaacttctggtcgttacacccccaattttaagctcagggatgtttattatggtggtgagaatgttctctctgatgtgctcaaactgccccaccctggccgttcagctgatgaagcagaacattgcagagaccctccactttctgctgtgcggggccagcaacggaagctgtcaggagcagattgatttggtacctcgtagcccgcaggagttgtacgagctcacgagtctcatctgtgagctgatgccttgcttgcccaaggaaggtattttcgctgtagacactatgttaaagaagggaaacgcccagaacacagatggcgctatttggcagtggcgcgacgaccgtggtctgtggcatccgtataatcgtatcgacagtaggattatcgaacagattaatgaagatactggaacagcccgggccatacaaaggaagcctaacccactggcgaattcaaacacctccggctactccgagagtaaaaaagacgacgctagagcacaactcatgaaggaggacccagaattggcaaaaagcttcataaaaacactcttcggcgtgttgtatgaggtgtattcaagcagcgctggtccagccgtgcgccacaagtgtctgagggctattctgcgcattatctatttcgctgatgccgaactcctgaaagacgtcctcaaaaatcacgctgtctcttctcacattgcatccatgctttccagtcaagatttgaaaatagtggtgggagcactccagatggccgagatcctcatgcaaaaattacctgatatcttcagcgtctattttaggcgcgagggagtgatgcatcaagtgaagcacctcgccgaaagcgagtctctccttacctctcctccgaaagcctgtacgaacggctcagggtccatgggcagcaccaccagtgtgagcagcggcaccgcaactgctgcgacgcacgcagccgccgatctgggcagccctagcttgcagcacagtcgggacgattctctggatctaagccctcaggggcggctctcagatgtgctgaaacgcaagagactgcctaaacgcgggccaaggcggccgaagtacagcccaccacgagacgatgataaggttgacaatcaagcgaagtcacctaccaccacacaatccccaaaatccagctttctggcaagcttgaaccccaaaacatggggtcgccttagtactcagagtaattccaataacatcgagcctgcacgaacagctggcggttccggtctggctagggccgctagtaaagacacaataagtaataacagggagaagataaaggggtggatcaaggaacaggctcataaatttgtggagcgatacttctcttcagagaacatggacggatctaatccagctctgaacgtacttcagcgcctgtgtgcggctacagaacagcttaatttgcaggtagacggaggcgctgaatgcttggtggaaatacgtagcattgtttcagaaagcgatgtaagcagttttgaaatacagcatagcggattcgtgaagcagctgctattgtacctgaccagcaaaagtgagaaagacgcagtgtctcgagagatccggctgaaaagatttctgcacgtctttttctcttcaccgttaccaggcgaggaaccaattggccgcgtagagcctgtgggcaacgcgcccctgctggccttggtgcacaagatgaacaattgtctgtcccagatggaacaatttcctgtgaaagttcacgatttcccatctggtaatggtactggaggaagcttttcgctaaacaggggcagccaggccctgaagttctttaacacccatcagctcaagtgccaacttcagcgacacccagattgtgcgaacgtcaaacagtggaaaggtggacctgtgaagatagacccactagcgcttgtccaagctatcgagaggtacctggttgttcgcggctatggccgcgttagggaagacgatgaggactccgacgatgatggttccgacgaggaaatcgacgagagtcttgctgctcagttccttaatagtggcaatgtgcgtcaccgcctgcaattctacattggagagcacctattgccctacaatatgacagtgtatcaggccgtgcgacagttttctatccaggccgaagacgaacgggaatccacggacgacgagtcaaaccccctgggcagggcgggtatctggaccaaaacccacactatttggtataagcccgtaagagaggacgaggaatcaaacaaggattgcgtgggtggaaaacgagggcgggcccagacagcgcccaccaaaacgtctcctcgcaatgccaagaaacacgacgaactctggcacgatggcgtgtgtccgtccgtgtccaatcctttggaggtataccttattccgacccccccagaaaacatcaccttcgaagatcccagtctggacgtaattctgctgctccgcgtgctccacgctatatctcggtactggtactatctttacgataacgcgatgtgcaaggagattattcccacttctgaattcatcaatagtaagctgacggcgaaggcgaatcggcaattgcaggacccccttgtaataatgacagggaatattcctacctggctgaccgagttgggcaaaacctgcccattcttctttcctttcgatactagacagatgctgttttacgttacagcgtttgatagagaccgggctatgcagagactgcttgacaccaatcccgagattaaccagtctgactctcaggattctcgcgtggctcccaggctagatagaaagaaaaggaccgtgaacagggaagaacttctgaagcaggctgagtcggttatgcaggatctcggatcctcgcgagccatgctggagatacagtatgagaatgaggtcggcaccgggcttggcccaaccctagaattctacgccctggtgagccaagaactccagcgcgccgacctaggcctgtggcgaggggaggaagtgacactcagtaatccaaaaggctcccaggaaggcacaaagtacatccagaacttgcaggggctctttgctctgcctttcggcagaacagcaaagccagctcacatcgccaaagtgaagatgaaattccggttcctggggaagcttatggctaaggctattatggacttccggcttgtggatctgcctttgggactccccttttacaagtggatgctgagacaagaaacctcactgactagtcatgacctgtttgatattgacccggtcgtggccagatcagtgtaccacctggaggatatcgtcagacagaagaagaggttagagcaagataaatcccagacaaaggaatcgctgcagtacgctctcgagacactcacaatgaatggctgttccgtggaagacctcggactagacttcaccttaccagggttccctaatatagaactaaaaaagggtggcaaagacatccctgttacaatacataatctcgaagaatatctgcgactggttatcttttgggcacttaatgagggagtgtcccgccagttcgactccttcagagatggcttcgaatccgttttcccactgagtcaccttcagtacttctatccagaggaacttgaccaattgctatgcggaagcaaggccgatacttgggatgctaagacactcatggagtgttgcagaccagatcacggctacactcatgactcacgggctgtcaaattcctgttcgagattctatcatcattcgataacgaacagcagcgtctcttcttacagttcgtcactgggagcccccgcctccccgtaggggggttccggtccctgaacccgccgctgaccattgtccgtaagacattcgagtctactgagaatcctgatgacttcctgccgtcggtgatgacgtgtgtgaactatctcaaacttcccgattattcctctattgagattatgcgagaaaaattgctgattgccgccagggaagggcagcagagctttcatctgtcctag

SEQ ID NO: 208662 - DNA, 300 bp, synthetic construct
  misc_feature 1..300: note = Description of Artificial Sequence: Synthetic coding sequence
  source 1..300: mol_type = other DNA
atgagcaaccggcccaacaacaaccccggcggcagcctgcggcggtcacagaggaatactgctggggcccaaccccaggacgactctatcggcgggagaagctgttcctcgtcgagcgccgttatcgttccacagccagaggatcccgatcgggccaatactagcgagaggcagaagaccggacaggtcccaaaaaaagacaactccaggggtgtgaaaagaagcgccagccctgactataaccgtacaaatagtcctagctctgccaagaagcctaaagctctgcagcatactgagtag

SEQ ID NO: 208663 - DNA, 6123 bp, synthetic construct
  misc_feature 1..6123: note = Description of Artificial Sequence: Synthetic coding sequence
  source 1..6123: mol_type = other DNA
atgagcaaccggcccaacaacaaccccggcggcagcctgcggcggagccaaagaaacacagctggcgctcagccccaggacgacagcatcggtggcagatcccacctggggcaggctaaacacaagggctactcaccgcccgagtccagaaaatccaacagcaaggcccctaaagtgcagtccaatactacgagcgagcttagcaggggccacttgagcaagcgttcatgttcaagttcctcagccgtgattgtgccacagcctgaggaccccgaccgcgccaacacgtctgaaaggcagaagacaggacaggttcctaaaaaagacaacagccgcggggtcaagcggtctgcttccccggactacaatcgcacgaactccccgtcttccgccaaaaaaccaaaggctctgcagcacaccgagtccccttcagaaacaaacaaaccacactccaagtccaagaaacgccatctggatcaggagcagcagttaaagtccgcacagtccccatccacctctaaggcacatacgagaaaaagcggtgctaccgggggtagccggagtcaaaagaggaagaggaccgagtcatcctgcgtgaagtctgggagtggctccgagtccacgggtgccgaagaacggagcgccaaaccaaccaagctggcatctaaaagtgccacaagcgcgaaggctgggtgctccactatcacagatagttcctccgccgccagcaccagtagtagctcatctgcagtcgcatctgcctcttccaccgtcccccccggggcccgggtgaaacagggaaaggaccagaataaggcccgcaggtccaggagcgcatcgagtcccagtcccagacggtcatcaagagagaaagagcagtctaaaaccggcggaagtagcaagttcgactgggctgcccgctttagtcccaaagtctcactaccgaagacaaaactctccctgcccgggtcaagcaagagtgaaacatctaagcctggcccctccggactccaagcaaaactcgcatctttgcggaaatccactaaaaagcgcagcgagtctccccccgccgaacttcccagccttcgccggagtacccgacaaaaaacaaccggttcttgcgcctcaactagtaggcggggcagcggtctgggtaagcgaggcgcagccgaagcaaggaggcaggagaaaatggccgatcccgagtcaaatcaggaggcagttaactcctctgctgctaggaccgatgaggcccctcagggtgcggccgcttcatcttctgtggctggcgcagtcgggatgacaaccagcggggagtcagagtcagatgacagcgaaatgggacgactgcaggctctgctggaagccagggggctccctccacacctatttggaccactcggcccgagaatgtcccagctgtttcatagaacaattgggtctggagcatcctcgaaggcacaacaactgctacagggtttgcaggcatcggatgagagtcagcagttgcaggctgtgattgaaatgtgtcagctcttggtgatgggtaacgaagagactcttggtggattcccagtcaaatccgtggtgcctgcgctgataaccctgctgcagatggagcacaattttgacatcatgaatcacgcatgccgagctctcacatatatgatggaggccctccctaggagttccgccgttgtagtggacgctattccggtgtttctggagaagctgcaagtcatccaatgtatcgacgttgctgaacaggccctcaccgcactggaaatgctgagccgccgtcatagtaaggctattctgcaggcgggcggcttagccgactgtctgctctacctggagttctttagcatcaatgcgcaacgtaatgccctggccatcgctgccaattgctgtcaatccatcactccagacgagttccatttcgttgcggacagcctcccgctgttaacccagaggctgacccatcaggataagaagagcgtcgagtccacctgcctttgttttgctcggttggtagacaacttccaacatgaggagaacttgctgcagcaagtggcttctaaagatctgcttactaatgtccagcagctgctggtagtcactcctcctatccttagctcaggtatgttcatcatggtggtgcgcatgttctccctgatgtgctccaattgtccaacacttgccgtgcagttgatgaagcagaatattgccgagaccttacatttcctgctctgtggcgcttctaacgggagctgtcaagaacaaatcgacttggtgccgcggagccctcaggaactctatgagttgacgtctctgatttgcgaacttatgccttgcctgccaaaggaaggcatctttgcagtggacacaatgctcaagaagggtaacgctcaaaatactgatggggcgatctggcagtggagagacgacaggggtctgtggcatccttacaacaggatcgactctagaatcattgagcagatcaatgaggataccggaacagcgcgtgcaatccaaaggaagccaaacccgctggcaaattcaaacaccagcgggtactctgagtccaagaaagatgacgcccgagcccaactgatgaaagaggacccagaacttgccaaaagctttatcaagacactgtttggagtgctgtacgaggtgtactcttcatcggcgggccctgcggtcaggcataagtgcttacgagctatattacgtattatatactttgccgacgcagaacttttgaaagatgtgctgaagaaccatgccgttagcagccacatcgccagcatgctgagcagccaagacctgaagatagtagtgggagccctccaaatggcagagatcctcatgcaaaaattacccgacattttttcggtctactttaggcgcgagggagtgatgcaccaggtcaagcatctcgctgaaagcgaatctcttctgacctcccctcctaaagcctgtactaatggctctggttccatgggaagtacaacttctgtgtcttccgggacagctactgctgctacccatgccgctgctgacttagggagcccttcgctgcagcattcacgcgacgattccttagacctcagcccacagggcaggttgtcagatgttctcaagcgtaagaggctacctaagcgaggcccccgcaggcccaagtattcccccccgcgcgacgacgacaaggtggacaaccaggccaagtcaccgactacgacacagtcgccgaagtctagctttctggcttctttgaacccaaaaacatgggggcgcctcagcactcagagcaattccaataacattgaacccgcaagaaccgcgggcggctcaggcctggcaagagcagcctctaaagatactataagcaacaacagggaaaaaataaaggggtggatcaaagaacaggctcacaagttcgtagagagatatttttcatccgagaacatggatggaagcaatcctgccttgaacgtgctgcagcgcctgtgtgccgctaccgaacaactgaatcttcaggttgatggcggagccgaatgcctcgtggaaattagatctatcgtcagtgaatccgatgtctcaagctttgagatccagcatagtggcttcgtaaagcaactcctgctctacttgacttctaagagcgaaaaggatgccgtcagtcgcgagatccgtttaaagcgattcctccatgtgttctttagcagtcctctacccggggaggagcctatcggaagggtagagccagtgggtaacgctcccctgttggctctggtgcacaagatgaataactgtctcagccagatggaacaatttcctgttaaagtgcatgacttccctagtggcaatggcaccggggggtccttctctcttaacaggggcagccaagccttaaagttctttaacacccatcagctgaaatgccaactgcagaggcatcccgactgtgcgaacgtgaagcagtggaaggggggccctgtcaaaatagaccccttggctctggtacaggctatcgagaggtacctggtagtgcgaggctatggacgcgttcgcgaggatgatgaggattcagatgatgatggatcagatgaagagatcgatgagtccctcgcagcccaattcctcaattccggcaatgttagacatcggcttcagttttatatcggggagcatcttctgccatacaacatgactgtgtatcaggctgttagacagtttagtattcaagccgaggatgagagggagtcaacagacgatgaatccaacccgctggggcgagccggaatttggaccaagacacacacaatttggtacaaacctgtccgcgaagacgaagaaagcaacaaggattgcgttggcggaaaaagaggcagagcccagacagcacctacaaagacatccccgaggaacgccaagaaacatgacgagctgtggcacgatggagtctgtccctccgtttctaaccctcttgaggtttatctcattccgacacctccagaaaacatcacttttgaagatccttccctggacgtgatcctgctgttgcgagtgcttcatgccatttctagatattggtactacctttacgacaatgcaatgtgcaaagaaatcattcccactagcgaatttataaactcaaaacttactgccaaggccaaccggcagctgcaggatcccctggttatcatgaccggcaacattcctacatggttgaccgagttgggaaagacctgcccgtttttttttccatttgacacgcggcagatgctgttttacgtcaccgcatttgatcgtgaccgcgctatgcagagacttctagacacgaatcccgagatcaaccagtcggatagtcaggacagccgcgttgcacctcgattggaccggaagaagcgcaccgtcaatcgcgaagagcttctcaaacaggctgaatcggtaatgcaggacctgggctcatccagagcgatgctggaaattcaatacgagaacgaggtaggcactggcctgggcccaactttggagttctacgctctggtcagccaggagttgcaaagagccgatttgggtctatggcgaggcgaagaggtaactctgtcaaatcctaaaggttctcaggagggtacgaagtatatccagaaccttcagggccttttcgcactgcccttcggccgtactgccaagcctgctcacatcgcgaaagtgaagatgaagttcagatttctgggaaaattaatggccaaagctattatggattttagattagtcgatctgccactggggctccctttctacaagtggatgctccgccaggagactagtcttacgtctcacgacctctttgacatcgatcctgtggttgctcgatcagtctaccatctggaggatattgttcggcagaaaaagcgcctggagcaagacaaaagtcaaacaaaagagtccttgcagtatgcccttgaaacccttacaatgaatgggtgtagcgtggaggatcttggattggattttacactgcccggattccctaatatcgagcttaaaaaagggggcaaagatatcccggtgacaattcacaatttagaagaatatcttcggctggttatcttctgggccctgaacgagggagttagccgccagttcgactcattccgagatggattcgaatcagtcttccccctgtcccatttgcagtatttctaccccgaagaactcgaccaattgttatgcgggtccaaggccgatacctgggacgctaagactctgatggaatgctgtcggccggatcacggctatactcacgactcaagggccgtgaaattcctgttcgaaattttgtcatctttcgacaatgaacagcagaggctgtttctgcagttcgttacaggttcccctaggctgcccgttgggggatttcggagcctgaacccaccattgaccatcgtccggaaaacatttgaatctacagaaaatcccgatgatttcctcccctcagttatgacctgcgtgaattacctaaaactgccggactattcaagcatcgaaattatgagggaaaaactgctgatcgccgccagggaaggtcagcagagcttccacttgtcttag

SEQ ID NO: 208664 - DNA, 5169 bp, synthetic construct
  misc_feature 1..5169: note = Description of Artificial Sequence: Synthetic coding sequence
  source 1..5169: mol_type = other DNA
atgagcaaccggcccaacaacaaccccggcggcagcctgcggcggagtcaacggaacactgctggcgcacaaccgcaggatgattccatcggaggcagccgccgcggaagcggccttggtaagagaggcgctgcagaggccagaagacaggagaagatggccgacccagaatcgaatcaggaggcagtgaactcttctgccgcccggacagatgaggccccccaaggcgctgctgcctcttccagtgttgccggagccgtgggaatgaccaccagtggggaaagcgagtcagatgatagcgaaatgggtcgcctccaggccctcttggaggctagagggttgcctccccatctttttggcccactcggcccaagaatgtctcagctgttccatcggaccataggtagtggtgcttcttcaaaggcacagcagctgctgcagggcctgcaggcctccgatgagagtcaacagttacaggcggtaatagaaatgtgtcagctgctggtgatgggaaacgaagagaccctgggaggattccccgtgaagagcgttgtcccagccctgattactctgctgcagatggagcataatttcgacatcatgaatcatgcatgtcgcgctcttacttacatgatggaagcactgccgaggtccagtgctgtggttgtcgacgcaattccagtcttcctggaaaagctgcaagtgattcagtgtatcgatgtggcagagcaggctctcacagccctggaaatgttaagcagaaggcattctaaggcgatcctacaggctggcggtctcgccgactgcctgctgtacctcgaatttttctccattaacgcacagaggaatgccctcgcaatcgccgcaaattgttgccagagtatcacacccgacgaattccacttcgtcgctgactccctgccattgttgacccagagacttactcatcaggacaagaagtccgtggagtccacttgcttgtgctttgcgcgcctggtggataattttcagcatgaggaaaacctcctgcagcaggtggcctctaaagacctgctgacgaacgtgcagcaacttttagtggtgacgcccccaatattatcgtccggtatgtttatcatggtcgtaaggatgttcagcctgatgtgctctaactgtccgaccctggctgtgcagctgatgaagcagaacatcgctgaaacccttcactttctgctgtgcggggcaagcaatggctcctgtcaggagcagattgatctcgtccctcggtcaccccaggagctttatgagcttacttcactgatatgtgaactaatgccatgcctccctaaggaaggtatcttcgccgtggacaccatgctgaagaagggtaatgcacagaacacggatggcgccatctggcagtggagggatgacagaggtctatggcacccatacaataggattgatagcagaatcattgaggcggctcaccaggtgggcgaggatgagatcagcctcagcactttaggcagagtttacaccattgacttcaattccatgcagcaaataaacgaagacaccgggacggccagggccattcagagaaagcccaatcctcttgcgaattccaacacatccggctactctgagtcaaagaaggatgatgcacgcgcacagcttatgaaagaggatcctgaactggcgaagtcttttataaagacactgtttggtgtgctgtatgaagtgtatagcagttccgctgggcctgccgtcaggcacaaatgcttaagggccatcctccggatcatatacttcgctgatgcagaattacttaaggacgtgctcaagaatcacgctgtgtctagtcacatagcatcaatgcttagcagtcaggatctgaagatagtggtgggcgctttgcagatggcagagattctaatgcagaagctgcctgacattttcagtgtgtattttcggcgcgagggcgtaatgcatcaagttaagcacctggccgagagcgagagcctcctaacatcccccccaaaagcctgtacgaatggctctggctctatgggttccaccacatcagtatcctccggaaccgccactgcggcaacacacgcggctgccgacctgggctctccctcgctgcagcacagtcgggatgacagcttggatctttcccctcagggccgtctgtcagatgtgctgaaaagaaagaggctgccgaaacgaggtccaaggcggccgaaatattctcccccacgagacgacgataaggtcgataatcaagctaagtcccctactaccacccagagtcctaaatcttcctttcttgcatctcttaacccaaagacgtggggtcgcctgagtacccagtcgaactccaataacatagagcccgctagaaccgctgggggtagcggactcgcccgagccgcctctaaggataccattagcaataacagagagaagattaaaggctggattaaagaacaggctcataaattcgtggaacgatattttagttcagagaatatggacgggagcaatccagctctgaacgttctccagagactgtgcgccgccacggagcagctgaatctgcaggttgacggaggtgctgagtgtctcgtcgaaattcggtccatcgtgtcagagtctgacgtttcctcatttgagatccagcattctggctttgtgaagcagctgctcctctatttgacgtcaaaatcagaaaaggacgccgtgagcagggaaattcggctgaaaagattcttgcacgtgttcttctctagcccgctgccaggagaagagccaatcggccgagtagagcccgtaggtaatgcccctctcctggctctggtgcacaaaatgaataactgtcttagtcaaatggagcagttccccgttaaagtgcatgactttccgtccgggaacggaactggcgggagcttttccttgaacagaggcagtcaggctctgaagttttttaacacccatcagctcaaatgtcaactgcagcggcacccagactgcgcaaacgttaagcagtggaagggtggcccagtcaaaatcgatcctttagccttagttcaagctattgagcgctatttagttgtgcggggctacggtcgcgtgcgggaggatgatgaagacagtgacgacgacggctcagacgaggaaatcgatgagagcctggccgctcagttcctaaacagtggaaacgtgcgccataggctgcagttctatatcggagagcatctgctgccttacaacatgaccgtgtaccaagccgtgaggcagtttagcattcaggccgaagatgagcgcgaaagtacggatgatgagagcaacccacttgggcgcgcggggatctggacaaagacacacaccatttggtataagcctgttcgagaagacgaggagtcaaacaaagattgcgttggaggcaagcgaggccgggcacagacagcacccaccaagacctccccaaggaatgccaaaaaacatgacgagctatggcatgatggcgtctgtccaagtgtatcgaacccactggaggtgtatctgatccctacgccgcccgagaatatcacctttgaagatccgtctcttgacgtaattctactattgcgcgtgttgcatgcaatctctcgctactggtactatctctatgataacgccatgtgcaaagagatcatacctacctcagagttcatcaattccaagctcaccgcaaaggccaatagacagctgcaggatccgttggtgatcatgaccggcaacataccgacgtggctcacagaactcgggaagacctgtccatttttctttcctttcgatacccgacagatgctattttatgtgaccgctttcgatagggacagagcaatgcaacggctgttggacaccaaccccgaaatcaaccaatccgattctcaggatagccgggtggcaccgaggcttgaccggaagaagcgcacagtgaaccgagaagaactgctgaagcaagcagaatccgttatgcaggacctggggagtagtagagctatgttggagatccagtatgagaatgaagtcggaacgggtctgggcccgacactggagttctacgcactggtgtcccaggagctgcaaagagccgacctcggactgtggagaggagaagaggtgactttgtccaaccccaaagggtcccaggaagggacaaagtacattcagaacctccaaggactgtttgcgcttcccttcggccgtactgccaagccagcgcatattgccaaggtgaaaatgaaatttaggttcctcggcaagttgatggccaaagccatcatggattttagactcgttgatttaccattgggcctgcctttctacaaatggatgctcagacaagagacttctcttactagccatgatctcttcgacattgatccggtcgttgcccggagtgtgtatcatttagaggacattgtccggcagaagaagcgattggaacaagacaagtctcaaacaaaggagagtttgcagtacgccctggaaacactgaccatgaacgggtgtagcgtagaggatctcggccttgatttcacactaccaggctttccaaatatcgagttaaagaagggcggtaaggacatccctgtaaccatccacaaccttgaggagtatctgaggctggtcatcttttgggcactaaatgagggcgtgagcaggcaattcgactcctttcgggacggtttcgagagtgtattcccactgtcacacttgcagtatttctaccccgaagagctggatcaactcctgtgtgggtcaaaggccgatacatgggacgccaaaactttgatggagtgttgccggccagaccacggctacacgcatgactccagggctgttaagtttcttttcgaaatcctcagcagctttgacaatgagcagcagcgcctttttctccagtttgttaccggctctcctaggcttcctgtgggaggttttcgttccctaaatccacccctgaccatagtgcgaaaaaccttcgaaagcaccgagaatcccgatgattttttaccaagtgtgatgacctgcgtcaattacctaaagctccccgactacagctctattgaaattatgcgagagaagcttctcatcgcggctcgagagggccagcagtctttccatctgagctag

SEQ ID NO: 208665 - DNA, 450 bp, synthetic construct
  misc_feature 1..450: note = Description of Artificial Sequence: Synthetic coding sequence
  source 1..450: mol_type = other DNA
atgagcaaccggcccaacaacaaccccggcggcagcctgcggcggagtcaacggaatactgcaggagctcagccacaagatgatagcattggtgggagaagctgcagctcctcaagtgcagtgattgtcccccagccagaggaccccgatcgtgctaacacgtcagagcgccagaagacaggccaggttccaaagaaagacaacagtagaggcgtcaaacgttccgcttctcctgattacaaccgaactaatagcccgtcctctgcgaagaaaccgaaagccttgcaacatacggaaagtccttccgaaaccaataaaccgcattccaagtcaaagaagcgccacctggaccaagagcaacagcttaaaagtgcacagtccccaagtacaagtaaagctcacaccaggaaaagcggagcgaccggtggcagtcggagccagaagcgctag

SEQ ID NO: 208666 - DNA, 465 bp, synthetic construct
  misc_feature 1..465: note = Description of Artificial Sequence: Synthetic coding sequence
  source 1..465: mol_type = other DNA
atgagcaaccggcccaacaacaaccccggcggcagcctgcggcggagtcagaggaacaccgcgggagcacagccacaggacgatagcatcggcggtcggagctgctctagcagctccgcagttatagttccgcagcccgaggaccccgaccgagctaatacctccgagcgccagaagaccggccaagtgcccaagaaggataatagcaggggcgtcaagcggagcgcttcccccgactataacaggactaatagtccttcctccgccaaaaaaccaaaggcactacaacacacggaaagcccgtccgaaacaaacaaacctcactctaagagcaagaagagacatctggaccaggaacaacagttaaaatctgctcagtcaccatctacgtccaaagcgcacacgcgtaaatctggggcgacaggcggtagccgttcccagaaaaggaagaggactgaatcatag

SEQ ID NO: 208667 - DNA, 1041 bp, synthetic construct
  misc_feature 1..1041: note = Description of Artificial Sequence: Synthetic coding sequence
  source 1..1041: mol_type = other DNA
atgagcaaccggcccaacaacaaccccggcggcagcctgcggcggtcacaacgcaataccgccggtgctcagccccaggatgatagcatcggagggcgctcccaccttggacaggccaaacacaagggatacagcccccctgagtcccgtaagtccaactccaaagcgcctaaggtgcagtccaacactacaagtgaactatcccgaggacatctctctaagcgatcctgcagctcatcttctgccgtgatcgtgcctcaaccggaggatccggaccgcgctaatacaagcgagcgacaaaaaacgggtcaggtgccaaagaaggataacagtcggggggtaaaaagaagtgcatcccctgactataacaggacaaatagtccctcatcagcaaagaagcctaaggcactacagcacactgagagccccagcgagaccaataagccccattctaagagtaaaaagcgccacctggaccaggaacagcagctcaaatctgcccagagcccatccacttccaaagcccatacacgtaagtccggtgcaacagggggcagccggtcccagaaacggaagcgtactgaaagttcttgtgtaaagtccgggagtggtagtgagagcactggcgcagaagagaggtctgctaagcccaccaaactggcatcgaaatcagccacctctgcaaaggctggttgctctacgattacggatagcagcagcgcagcatcaaccagtagctcctccagcgccgtggccagtgcttcatctaccgtcccgcctggtgcccgagtcaaacaggggaaggaccagaacaaggcccggcggagccggtcagcatctagcccttctcccagacgaagcagtcgagagaaagagcagagcaagacaggcgggagcagcaaattcgactgggctgctagattctccccaaaggtgagcttgcccaaaaccaagctctccttgcctggctccagtaaaagcgaaacgtcaaagccaggcccaagtgggctgcaagcgaaagtgctgacaagtaagcggtag

SEQ ID NO: 208668 - DNA, 1746 bp, synthetic construct
  misc_feature 1..1746: note = Description of Artificial Sequence: Synthetic coding sequence
  source 1..1746: mol_type = other DNA
atggccgtggccggcgccgtgagcggcgagcccctggtgcactggtgtacacagcagctgcggaagactttcgggctggacgttagtgaggaaattatccagtacgtattgagcattgagtctgcagaagagatccgagagtatgttacagacctgctccaggggaacgagggtaaaaaaggccagttcatcgaggagctgattactaagtggcaaaagaacgatcaggagttgatttcagaccccctccagcagtgcttcaaaaaagatgagatcctcgacggtcaaaagtctggtgatcatctgaagcgaggacggaagaagggccggaaccgccaggaagttccagcctttactgagccggacacgaccgcggaagtgaaaactccattcgatctggcgaaggctcaggaaaattctaactcagtcaagaaaaaaaccaagttcgtgaatctgtacacccgtgaaggacaagatcgacttgctgttctcctcccaggcaggcacccttgcgattgcctgggccagaagcacaaactcatcaacaactgtctcatatgcggtagaatagtgtgcgaacaggaggggagtggaccatgcctcttctgcggaactctcgtctgcacacacgaagagcaggacattcttcagcgggactccaacaagagccagaagttacttaaaaaactcatgtccggggtcgagaatagtggcaaagtggacatcagcacaaaggacttgctgcctcaccaggaactcagaatcaagagcggtctggaaaaggccataaagcacaaggataaactccttgaatttgaccggacatccattagaagaacccaggtcatcgacgatgagtcagattatttcgcctccgactccaaccaatggctcagcaaactcgaaagagaaactctgcaaaagagagaggaagaacttagggagcttcgccatgcctcccgtctttcaaaaaaggtgacaatcgattttgccggccgcaaaattctagaagaggagaattccctggccgagtaccattctcgcctggacgagacgatccaggccatcgctaatggcacactgaatcaaccactgaccaagctggaccggagctctgaggaacccctcggggtgctcgtcaaccccaacatgtatcaaagcccaccacaatgggtggatcacaccggcgctgcaagccaaaagaaagcctttagatctagcgggttcggcctcgaatttaattcttttcagcaccagctcagaattcaagatcaggagttccaagaaggattcgacggcggatggtgcctgtctgtccaccagccttgggccagtctcctcgtgcgcggcataaagcgggtcgagggccgaagctggtacacaccgcaccgcggaagactctggatcgccgcgacagcgaagaagccttccccacaagaggtatcagaattacaggctacttacaggctgttacggggcaaagacgttgaatttccaaatgattacccgagtggatgcctgctgggttgtgttgatctcattgactgcctgtcccaaaagcagttcaaggagcagttccctgacatctctcaggaatcagactctcctttcgtgttcatttgtaaaaacccacaagagatggtggtcaaattccctatcaagggaaacccgaagatatggaaacttgattccaaaattcaccagggtgcaaagaaggggttgatgaagcaaaacaaagccgtatag

SEQ ID NO: 208669 - DNA, 1431 bp, synthetic construct
  misc_feature 1..1431: note = Description of Artificial Sequence: Synthetic coding sequence
  source 1..1431: mol_type = other DNA
atgagcggccccacctggctgccccccaagcagcccgagcccgcccgcgccccccaaggccgagctattccaaggggcacccccgggccgccacccgctcacggcgcagcccttcagccccaccctagagtaaatttttgtccgttgccatctgaacagtgttaccaggccccagggggcccagaggatcggggacccgcttgggtggggtcccacggtgtgcttcaacacacgcaaggtcttccggccgacagaggcgggttgcggcccggttcactcgacgccgagatcgacctgttatcgtctaccctcgcagagcttaacgggggtagaggccacgcttcgcgcagacctgatcgacaggcatatgaaccaccccctcctcctgcctacagaacaggttcactgaagcccaatcccgctagcccactgcccgcttctccatacggagggcccacccctgcttcgtacacaaccgcctccactccagctggaccggctttcccagtgcaggtcaaggtggctcagcccgtgcgcgggtgcggccctccgcgacgaggcgctagccaggcaagtgggccactaccggggcctcacttcccactccccggtagaggagaggtgtggggaccaggttatcggagccagcgtgagcccgggccaggcgcaaaggaggaggctgcgggagtgagcggtcccgccggccgagggcgaggcggtgaacacggcccacaggtgcctttatcccagcccccagaagatgagttggaccgcctgactaagaagctcgtccatgatatgaatcacccccccagcggagagtacttcggccagtgcggcgggtgtggagaagatgtggtcggcgacggtgcgggtgtggtcgcgctggaccgcgtgtttcacgtcggttgctttgtctgttccacatgccgggcgcagctgcgaggacagcatttctacgctgtcgagagaagggcttattgcgaaggatgctacgtggccactctcgagaagtgcgctacctgctcccagcctattttggataggatcctccgggcaatgggaaaagcctaccaccctggatgcttcacctgtgtagtttgtcatcggggactggatggcattccgtttaccgtcgacgcgacgagtcagatccattgtatcgaggacttccatcggaagtttgcaccaaggtgtagcgtctgcggcggggcaatcatgccagagcccgggcaggaggagaccgttcggatcgtggctctggataggtccttccatattggctgctacaaatgtgaggaatgtgggctactgctcagttcagaaggcgagtgccagggttgttacccactagacgggcacatcctctgcaaagcttgcagcgcatggcggatccaagagctctccgccacagtaactactgactgctag

SEQ ID NO: 208670 - DNA, 1473 bp, synthetic construct
  misc_feature 1..1473: note = Description of Artificial Sequence: Synthetic coding sequence
  source 1..1473: mol_type = other DNA
atggagcagaagcccagcaaggtggagtgcggcagcgaccccgaggagaatagcgcccggtcccccgatggaaagcgcaaacgaaaaaatggacaatgttctcttaaaactagcatgtcagggtatatcccctcttaccttgataaagatgagcaatgcgtggtgtgcggcgataaagctaccggctatcactaccgctgcattacctgcgaaggttgtaaaggctttttccggagaacaattcagaagaacttgcacccgacatactcctgtaaatacgattcatgctgtgtgattgataaaataactagaaaccaatgtcagctctgccgattcaagaaatgcatcgcagtgggcatggcaatggacctggtcctggacgactccaaacgcgtcgccaagcgaaagcttatagaacagaatcgtgagcggcgccggaaagaggagatgatcaggagcctgcagcagcgtccagagccaacacccgaagagtgggacttgatccacattgccacagaagctcatcgctccacaaacgcacagggaagccactggaaacagaggcgcaaatttctcccagatgacattgggcagtctccaatcgtgtctatgcctgacggtgataaagtggacctcgaggcattctccgagttcacgaagattatcacacctgcgatcacacgggtagtggattttgctaagaagttgcctatgttttctgagttaccatgcgaagatcagatcatcctcctcaaaggctgctgcatggagatcatgtctctcagagcagcagtgaggtatgatccggagtccgatactctcacactaagtggcgaaatggccgtgaaacgcgagcagttgaaaaacggcggactcggcgtcgtctcggacgccatctttgaacttggtaagtctctaagtgcgtttaacctggacgatactgaggtcgctctcctccaggctgtgctactcatgagtacagatagatctggactgttatgcgtggacaagatcgaaaagagccaggaagcttacttgttggcgttcgagcactacgtgaaccacaggaagcacaacataccgcacttctggcccaaactgcttatgaaggaaagagaggtgcagagttccatcctgtataaaggggcggccgcagagggccgccccggaggcagcctgggagtgcaccccgaggggcagcagctgctgggtatgcatgtagtacagggccctcaggtgcgccagctggagcaacagttgggagaggcaggctccttgcaagggccggtccttcagcatcagtctcctaaatcacctcagcaacgcttattagagttacttcaccgatccggaatcctacacgctcgggcagtctgcggtgaagacgattccagcgaagccgacagtccatcctcatcagaggaggaaccggaggtatgcgaggatttggcaggaaacgctgcatcgccctag

SEQ ID NO: 208671 - DNA, 1473 bp, synthetic construct
  misc_feature 1..1473: note = Description of Artificial Sequence: Synthetic coding sequence
  source 1..1473: mol_type = other DNA
atggagcagaagcccagcaaggtggagtgcggcagcgaccccgaggagaattctgccaggagtcccgacggtaagaggaagaggaagaatgggcaatgctctctaaaaacgtcgatgtctgggtatataccctcctacttagacaaggacgaacaatgtgtggtttgtggggataaagcgaccgggtaccattaccgatgtattacctgtgagggttgtaaaggattttttcggcgaacaatacagaagaatctgcaccctacctacagctgcaaatacgatagctgttgcgtcattgataaaatcactcggaatcaatgccagctgtgtagattcaagaagtgcatagcagttgggatggcgatggatctggtgctcgatgattctaagagggtggcaaaacgaaagctcatcgagcaaaatagagagcgccggcgcaaagaggagatgataagaagtctgcagcaaaggccagagcccacgcccgaagagtgggatctgatccacatagcaacagaggcccatcggtccacgaatgctcaaggctctcactggaaacagaggaggaaatttttacccgatgatatcggtcagtccccaattgtgagtatgccagacggggacaaggtggatttggaagccttttctgaattcacaaaaatcataaccccagctattacgagggttgtcgacttcgctaagaaactccccatgttctccgagctaccttgcgaggaccagataatccttttgaagggttgctgcatggaaattatgagcctgagagccgcggtcaggtacgatcccgagtcagatactctgacactgtcaggggagatggcagtgaagagagagcagctgaaaaacggtggtttgggggtggtatccgacgccatttttgagcttgggaaatccctaagcgcgtttaacctggacgataccgaggtcgctttgctgcaggctgtcttactaatgtcaacagaccgctcgggccttctatgtgtcgataagatcgagaagtcccaagaggcgtatctgctagccttcgaacactatgttaatcaccgcaaacataacatccctcacttttggccgaaactgcttatgaaagagcgcgaggtacagtcatccatcctgtacaagggggccgcggctgagggccggccaggcgggtcattgggcgtgcacccagagggacagcagctcctggggatgcacgtcgtccagggtccccaggtgcgccagttggaacagcagttaggcgaggctgggtccctgcagggtcctgtccttcagcatcagtcccccaagagtccccagcagagactgctcgagctgctgcataggtcaggcattcttcatgcccgtgccgtatgcggagaggatgattcttccgaggctgattctccatcttccagcgaagaagagcccgaagtgtgcgaggacttggcaggaaacgccgcctctccttag

SEQ ID NO: 208672 - DNA, 1233 bp, synthetic construct
  misc_feature 1..1233: note = Description of Artificial Sequence: Synthetic coding sequence
  source 1..1233: mol_type = other DNA
atggagcagaagcccagcaaggtggagtgcggcagcgaccccgaggagaatagcgcccgcagccctgatggaaaacgaaaacggaaaaacgggcagtgttccttgaaaacttcaatgtctgggtacattcccagctatctggacaaagacgagcagtgcgtcgtatgtggagacaaggccaccgggtatcactataggtgcataacatgtgagggctgtaaggggtttttcagaaggaccattcagaagaaccttcaccctacttacagctgcaagtatgactcgtgctgcgttatagacaagattaccagaaaccaatgccaattgtgccgatttaaaaaatgcatagcagtcggaatggccatggacctagtgctcgatgacagcaaaagggtggcgaaaagaaaacttatcgagcagaaccgcgagaggcggagaaaggaagaaatgatcaggtcccttcagcagcgtcccgagcccacacccgaggaatgggacttgatccacattgcgaccgaggcacacaggtctactaacgctcagggaagtcattggaagcagcgaagaaaatttctgcccgatgacatcggccaatcccctatcgtgagcatgcccgacggcgacaaggtggacctggaggcctttagcgagtttacgaagatcatcaccccagcaataaccagggtggtcgattttgctaagaagcttccaatgttttctgagctgccctgcgaagaccagatcatcttactgaagggctgttgcatggagataatgagcctgcgggccgccgtccggtacgaccctgagtccgacacgctcaccctgtctggcgagatggctgttaagagagaacagttgaagaacggaggattgggggtggtaagcgatgcaatctttgagttggggaagtccctcagtgcttttaacttggacgacacagaagtagcactacttcaggccgtcttgctgatgtcgacggacagaagcggcctgctttgcgtggataagatcgaaaagagccaggaggcctacctgctcgcatttgaacactatgtcaatcacagaaagcataacatcccgcatttttggcccaaactgctgatgaaggttaccgatctccggatgatcggagcttgtcacgcctcccgattcctgcacatgaaggtcgaatgtcctaccgagctgtttcctcccttgtttttggaagtctttgaggaccaggaggtttag

SEQ ID NO: 208673 - DNA, 1233 bp, synthetic construct
  misc_feature 1..1233: note = Description of Artificial Sequence: Synthetic coding sequence
  source 1..1233: mol_type = other DNA
atggagcagaagcccagcaaggtggagtgcggcagcgaccccgaggagaattcggcccgcagtcccgacggaaagaggaagaggaaaaacggacagtgcagcctcaaaacatccatgtcaggttatataccatcgtatctggacaaagacgagcagtgcgtggtgtgtggtgataaagccactggttatcactatcggtgtattacttgcgaaggctgcaaggggttcttcaggcgcactattcagaaaaatctgcaccccacatatagctgtaagtacgatagctgctgtgtcatcgacaagataactcgaaatcagtgtcagttgtgtagattcaagaagtgcattgcggtgggaatggccatggacttggtactggacgacagcaagcgcgtggcaaagaggaagctgattgaacagaaccgtgagcgccggagaaaggaggagatgattagatcgctgcagcaaaggcctgagccaacacccgaggagtgggacctgatccacattgcaaccgaggcccaccgctcaaccaatgcacaaggatcccattggaagcaaaggagaaagttccttccggatgacattggacagtcacctatagtctccatgccagacggagataaagtggatctcgaggcattctcggagttcactaaaattatcacccccgctatcacgcgcgtcgtggactttgccaagaagctgccgatgttttcggagctcccatgcgaagaccaaataattctgttgaagggttgctgcatggagatcatgagcttacgggccgcggtgagatatgacccagaatccgacactctaactctttcaggcgaaatggccgttaagagagaacagctcaaaaacggtggtctcggggtggtaagtgatgccatatttgagctggggaagtcactttcagcctttaacctggacgacacggaagtagccctgctgcaggctgtgttactgatgtctacagaccggtctggcctgctgtgtgtggataaaattgagaaatcacaagaggcctacctcctggcgttcgaacattatgtgaaccatcgtaagcacaacatacctcacttctggccaaagctcctaatgaaggtcactgatttgcggatgattggcgcctgtcatgcatcacgatttctgcacatgaaggtcgaatgcccaaccgagctgttcccccccttgtttttagaagtcttcgaggaccaggaagtctag

SEQ ID NO: 208674 - DNA, 1386 bp, synthetic construct
  misc_feature 1..1386: note = Description of Artificial Sequence: Synthetic coding sequence
  source 1..1386: mol_type = other DNA
atgacccccaacagcatgaccgagaacggcctgaccgcctgggacaagcctaagcactgcccagacagggagcatgactggaaactcgtcgggatgtccgaagcatgtctacaccggaaaagccactccgagcgtcgaagtaccttgaaaaacgagcaatcctcacctcatctcattcagactacgtggacttcatccatttttcacttggaccacgacgacgtgaacgaccagtccgtcagttctgcgcagacatttcaaacagaggagaaaaagtgtaagggctatattcctagctacctggataaagacgagctctgtgtggtatgcggtgacaaggccaccgggtatcattaccggtgcattacctgcgagggatgcaaagggttttttcgccgcaccatacagaagaaccttcacccctcttactcctgtaagtacgaggggaagtgcgttatagataaggtcactaggaaccagtgtcaagagtgccggttcaagaaatgcatttacgtcggcatggctacagacttagtcctggacgattcgaaaaggctggccaagaggaagcttatcgaagaaaatcgcgaaaagcgccgccgggaagaactgcagaagtctattgggcacaagcccgagcccaccgatgaggagtgggaattaattaaaacagttactgaggcccacgtcgcgaccaacgcgcagggctcccattggaaacagaagcgcaagttcctcccggaggacatcggacaagcgccaatcgtgaacgcgccagaaggtggtaaagtggatttagaggcattttctcacttcacaaagataatcacccctgccatcacaagggtggtcgactttgcaaagaagcttccaatgttctgcgaactgccctgcgaagatcaaatcatccttttaaagggctgttgtatggaaattatgtcattgagggctgccgttcggtatgacccagaaagtgagacgctgaccctaaacggagagatggcagtgaccaggggccagctgaaaaacgggggccttggggtggtgagtgacgcaatctttgatcttggtatgtccttgagctcattcaacctggatgacacagaggttgcactactgcaggccgtcctgctcatgtcgtctgaccggcctgggctggcttgtgtagaacggattgagaagtatcaggactccttcctcttggcatttgagcattacattaattatcgtaagcatcacgtgacccatttttggcctaagttgctcatgaaagtgaccgacctgcggatgataggtgcgtgccacgcatcccgatttctgcatatgaaggtggaatgccccacagagctgtttcctccactatttttggaggtgtttgaggattag

SEQ ID NO: 208675 - DNA, 1386 bp, synthetic construct
  misc_feature 1..1386: note = Description of Artificial Sequence: Synthetic coding sequence
  source 1..1386: mol_type = other DNA
atgacccccaacagcatgaccgagaacggcctgaccgcctgggacaagcccaagcactgtcccgaccgcgagcacgattggaaacttgtgggcatgagtgaggcttgtctgcacagaaagagccacagtgaaagacggagcaccctgaagaatgaacagtcgtccccccacctgatacagaccacctggaccagctctattttccacctggatcacgacgatgtgaatgaccagtccgtgtcaagtgcacagacgttccaaactgaggaaaaaaagtgtaaaggctacataccttcttatctcgacaaagatgagttgtgcgtggtgtgcggtgataaggccacagggtatcactatcgctgcatcacttgcgaaggctgcaagggtttttttcgtagaacaatacagaaaaacctgcatccttcttatagctgcaaatacgaggggaagtgtgtgatcgataaagtcactagaaaccagtgccaggaatgccggttcaagaagtgcatttacgtgggcatggctacagatctggtgctggacgattctaagcgactagccaaaagaaaattgattgaggaaaaccgcgaaaagcgaaggcgcgaggaactgcagaagagcatagggcataaaccggaaccgactgatgaagagtgggaacttataaagacagtgacagaagctcacgtagccaccaacgcacagggcagccattggaaacagaaaaggaaattcttgccagaagacattggacaggcacccattgtcaatgcccctgagggcgggaaagtcgacctggaggctttcagtcacttcaccaagattattactcctgcaatcacgcgcgtggttgatttcgcaaaaaaactcccaatgttctgtgaactgccctgcgaggaccagatcattctgctcaaggggtgttgtatggagatcatgagtctgcgtgcagccgtgcggtacgacccagaaagcgaaaccctcaccttgaatggcgagatggcggtgactcgaggccagcttaaaaacggagggctgggtgtggtctctgacgcgatatttgatctggggatgtcactatcttccttcaacctggacgatactgaggtggccctacttcaggcagtcctcctcatgtcttccgatcggccagggttggcctgtgtcgaacgcatcgagaagtaccaggacagcttccttctcgcctttgagcattatattaattatcgcaagcatcacgttactcatttctggcctaagctgcttatgaaagttactgatctccgcatgataggcgcatgtcacgcctcgcgctttcttcacatgaaagtggagtgcccaaccgaactctttccccctctgttcctggaagtcttcgaggattag

SEQ ID NO: 208676 - DNA, 1386 bp, synthetic construct
  misc_feature 1..1386: note = Description of Artificial Sequence: Synthetic coding sequence
  source 1..1386: mol_type = other DNA
atgacccccaacagcatgaccgagaacggcctgaccgcctgggacaagccaaagcactgtcctgatcgagaacacgattggaaattggtgggcatgtcggaagcatgtttgcatcgtaaaagccactctgagcggcggagtacactcaagaacgaacagtccagcccacacctgattcagacaacctggacctcttctatttttcatctggaccacgacgacgtgaacgatcaatccgtgtctagcgcacagaccttccagaccgaagaaaaaaagtgtaagggctatatcccttcctaccttgacaaagatgaattgtgtgtggtctgtggagataaggccactggataccattatagatgtatcacttgcgaaggctgtaaaggcttcttccgacgtacgattcagaaaaatcttcacccctcttactcttgtaagtatgagggaaagtgcgtaatagacaaagtcacgcgtaatcagtgtcaggagtgtcgcttcaaaaagtgtatctacgtgggcatggcgaccgacctggttctagatgattctaaaagattggctaagcggaagctgatcgaggagaaccgggagaaacggcggcgggaagagctccagaagtctatcggacacaagcccgaacccactgatgaagagtgggaacttattaagacggtcacagaagctcacgttgctacaaacgcccagggttctcattggaaacagaaacgaaagttcctgccagaagacattggccaggccccaattgtgaatgcccccgagggaggcaaagtcgacctcgaagcttttagccatttcaccaaaataatcacccccgccatcactagggtagtggactttgcgaaaaagctccccatgttctgcgagttgccctgcgaggatcagatcattctgctcaaggggtgctgcatggaaatcatgtccctcagggcagccgtcaggtacgaccccgagtcggagaccttaacgttaaatggcgagatggcagtgacccgcggccagctaaagaatggagggcttggagtggtgtccgacgccattttcgacttgggaatgtcactcagcagtttcaacctcgacgatactgaggttgcccttctgcaggcagtgctcctaatgtcctcggaccggcccggcctggcctgtgtggagcgcatcgaaaagtaccaagactcttttttattagccttcgaacattatatcaactacagaaagcaccatgtgacccatttctggccaaagctcctgatgaaagtgaccgatctgcgaatgatcggagcctgccatgcctcccgcttcctacacatgaaagttgagtgccccactgagctctttccccctctctttctggaagtattcgaagattag

SEQ ID NO: 208677 - DNA, 87 bp, synthetic construct
  misc_feature 1..87: note = Description of Artificial Sequence: Synthetic coding sequence
  source 1..87: mol_type = other DNA
atgacccccaacagcatgaccgagatggccctgcagcccggcaccaaccgcagcacagtgcagactgagaacacgactggaagctag

SEQ ID NO: 208678 - DNA, 366 bp, synthetic construct
  misc_feature 1..366: note = Description of Artificial Sequence: Synthetic coding sequence
  source 1..366: mol_type = other DNA
atgacccccaacagcatgaccgagaacggcctgaccgcctgggacaaaccaaaacactgtcccgatcgtgagcatgattggaagctggtcggaatgagcgaggcctgtctgcaccgaaagtcccactcagagcgacgcagtacactgaaaaacgagcagagtagcccacatctgatccagaccacctggacctccagtatattccacctcgaccacgatgacgtgaatgaccagagcgtgagcagcgcccagaccttccagaccgaagagaaaaaatgtaaagggtatattccgtcttacctcgacaaagacgaactttgcgtcgtgtgtggcgacaaggccaccggctaccactatagatgctag

SEQ ID NO: 208679 - DNA, 441 bp, synthetic construct
  misc_feature 1..441: note = Description of Artificial Sequence: Synthetic coding sequence
  source 1..441: mol_type = other DNA
atgcaggtgctgaccaagcggtaccccaagaactgcctgctgaccgtcatggaccgctatgcggctgaggtccacaacatggagcaggtggttatgatcccatccctgctgcgcgatgtgcagctctccggccctggtggccaagcacaagcagaagcccctgatttgtacacctactttaccatgctcaaggctatttgcgtggatgtggatcacggcttgctaccacgcgaggagtggcaggcaaaagttgccggatctgaagaaaatgggacagcagaaactgaggaagtggaggacgagagtgctagtggggaactggaccttgaggcccagttccatctgcatttcagctcgctgcatcacattctcatgcacctgactgaaaaggcccaagaggtgaccaggaagtaccaggaaatgaccggtcaagtgtggtag

SEQ ID NO: 208680 - DNA, 2802 bp, synthetic construct
  misc_feature 1..2802: note = Description of Artificial Sequence: Synthetic coding sequence
  source 1..2802: mol_type = other DNA
atgcgggccctggccgtgctgagcgtgaccctggtgatggcctgcactgaagctttctttcccttcatcagccgaggaaaggaactgctctgggggaagccggaagagagcagagtctcgagcgttttggaagagagtaagcggctcgtggacaccgctatgtacgccaccatgcagaggaatctgaaaaagcgcggcatcttgagcccagcccagctgttgtctttctctaaattgcccgagcccacatccggagtaattgcccgggcggccgagatcatggagacaagtatccaggctatgaagagaaaggtgaacctcaagacccagcaaagccagcaccctacagacgccctctcagaggacctcctgtccattatcgcaaatatgtctggttgtcttccatatatgctgccccctaagtgtccaaatacatgccttgcaaacaaataccgaccaattactggagcatgcaacaaccgcgatcatcctagatggggcgcatctaataccgccttggccaggtggctcccaccggtgtacgaggatgggttttctcagcctcggggctggaatcctgggtttctttacaatggattccctttaccccccgtgagagaagtgacgagacacgtgatccaggtgagtaatgaggtcgttacagatgacgataggtactcagacctacttatggcgtggggccagtatatcgaccacgacatagcctttaccccgcagtctacctcaaaggcggcttttggtggaggtgcagactgtcagatgacatgtgagaatcaaaatccttgttttcctatccagttacccgaggaggcacggcccgccgctgggaccgcttgtctccccttctatagaagctctgctgcttgtgggaccggggatcaaggggcgctgttcgggaacctttccacggccaatccacggcagcaaatgaatggcctgacctccttcctggatgcaagcactgtctatggcagctcgcccgcgcttgagagacagctcagaaattggacttctgcagaaggtttgctccgagtgcacgcccgcttaagagattctgggagagcctatttaccctttgtgccacccagagctccggcagcctgtgccccagaacccggcatccccggagaaacacgtgggccctgcttcctcgccggggatggcagagctagcgaagtcccctccctgacagccctgcacaccctgtggctcagggagcataacaggctggctgcagccttgaaagccttgaatgctcactggtcggctgatgcagtatatcaggaggctagaaaggtagtgggagcccttcatcagataatcactcttcgagactacataccaaggatcctcggcccagaagccttccagcagtatgtgggaccctacgagggatatgactccactgctaaccccactgtgagtaatgtctttagcaccgcggcctttcgattcggccacgctaccatccaccctctagtcagacgcctcgatgcttcgttccaagagcatccagaccttcccggcctgtggctccaccaggccttcttttctccctggacgttgctaagaggagggggtctggatccactgatacgcggcctcttggccaggcccgcaaaactgcaagtgcaggaccagctgatgaacgaagaattgactgaaagattattcgttctcagtaattcatcaacattggacctggcatcaattaatctccagaggggaagggaccacggcctgcctggttacaacgagtggcgggagttctgcggcctgccgcgcctggagactcctgctgatttatcaacagctatcgcttcccgaagcgtggcagacaaaattctggacctgtacaaacaccccgacaacattgatgtgtggttggggggactcgctgaaaattttcttcccagggcaaggacaggccccctcttcgcctgtctcatcggcaagcagatgaaggccctgcgagacggcgactggttttggtgggaaaacagtcacgtgttcactgatgcgcagcggcgggagctcgagaaacactcattgtcccgagtgatatgtgacaatacgggcctcacacgtgttccaatggatgcttttcaggttggaaaatttccggaggatttcgagtcctgcgatagcattaccggcatgaacttagaagcatggcgagaaaccttccctcaagacgataagtgtggtttccccgaatccgtcgaaaacggggactttgtgcattgcgaggagagtggtcgccgggtattggtctattcttgtcgccatggatatgagttacagggccgggaacagcttacatgcacccaggaagggtgggactttcagcctcccctctgtaaagatgtaaacgagtgcgctgacggtgctcaccctccctgtcatgcttccgcacggtgccgaaacacaaaaggcggcttccaatgtctttgcgccgatccatacgagctcggtgacgacggaaggacatgtgtggacagtgggcgtctgcctcgtgtaacttggatcagtatgtccttagcagccctgctgatcggtggcttcgctgggctcactagtaccgttatttgtaggtggacacgtacaggaacaaagtcaacattgcccataagcgagaccggcggaggcacacctgaactccgttgtggaaagcatcaggccgtcgggacgagcccccagcgagcagctgctcaggattcagaacaggagtcagccggcatggaggggagggacactcaccgactgccccgagccctttag

SEQ ID NO: 208681 - DNA, 2790 bp, synthetic construct
  misc_feature 1..2790: note = Description of Artificial Sequence: Synthetic coding sequence
  source 1..2790: mol_type = other DNA
atgcgggccctggccgtgctgagcgtgaccctggtgatggcctgcacagaggctttttttccttttatcagcaggggaaaggaattgctttgggggaagcctgaagagtctcgagtgtctagcgttctggaagagtccaaacgcttagtggatacagcaatgtatgccacgatgcaaagaaacttgaaaaagcgggggatcctgagccctgcacagctgttaagcttcagtaagctgcccgagccaacttcaggcgtcatcgctagagcagctgagatcatggaaacatctatccaggctatgaaaagaaaggtgaacttaaagacccagcaatctcaacacccaactgacgccctgtccgaggatctcctgagtatcattgccaacatgagcgggtgcttgccatacatgctgcccccgaagtgccctaatacatgcctggctaacaagtaccgtccaatcacgggggcctgcaataacagagatcatcctcgctggggtgcctccaacactgcgttagcgagatggctgccaccggtgtacgaagatggattcagccaaccacggggatggaacccgggcttcttgtataacgggttcccactgcctcccgttcgagaggtgactaggcacgtgatccaagtgagtaacgaagtggtcacagacgatgataggtattccgatctcctaatggcatggggtcaatacatcgaccatgacatcgcattcactccacagtccacgtctaaggccgcattcggaggcggagctgactgtcagatgacatgcgagaaccagaatccttgctttcccattcagttgcccgaggaggctcgtcccgctgcgggtaccgcctgccttcctttttaccgttcgtccgcggcttgcgggaccggcgatcagggagcgctgtttgggaacctcagcaccgctaatccccgccaacagatgaacggcctcacgagctttctcgacgctagtactgtgtacgggagttcccctgccttggagcgtcagttacgcaattggacgtctgcagagggcctgctgcgcgtccatgctcgcctccgggatagcggccgggcgtaccttcccttcgtgccgccccgggctcccgccgcatgtgcccccgaacctggcatccccggggagacgagaggaccttgttttctggctggcgacgggcgtgccagtgaagtacccagcttgaccgctctgcataccctttggctgagagagcataatcgactcgcagccgccctcaaggccctgaatgctcactggtctgccgacgctgtgtaccaggaggctaggaaagtagtcggagccttgcatcagattatcaccctgcgcgactacattccccggatacttggcccggaagcattccagcagtacgtgggaccatatgaaggctacgacagcaccgctaatccgacggtttctaatgttttctccacggccgcatttagatttgggcatgcgacaattcatccactggtcaggaggttagacgctagctttcaagaacatcccgacctccctggcctatggctccaccaggcttttttctcaccttggacgctactgcggggaggaggcctagacccgcttatccgtggattactggcaaggccagctaaactacaggtgcaggaccaactgatgaatgaggaactcacggagagactcttcgtgctgagtaattctagcaccttggatctggcgagcatcaatctccagcgtggccgcgaccacgggctgcccggctataacgagtggcgggagttctgcggactgcctcgattagaaaccccagcagacctctccacagccatcgcatcacgcagcgttgccgataaaattctcgacttgtacaaacacccagataatatcgatgtctggttgggcgggctcgcagaaaacttcctgccccgcgcgcgcacaggcccgctgttcgcatgcttgattggtaaacagatgaaagcgttaagagacggcgactggttttggtgggaaaactcccacgtgtttactgatgctcagcgtcgcgagttggagaagcattccttgtcacgcgtcatctgcgacaatacaggtcttacccgggtaccaatggacgcattccaggtcggcaagttcccggaagacttcgagtcctgtgacagcattactgggatgaatctggaggcctggcgtgaaacttttccgcaagacgacaagtgtggtttccctgaatcagtcgaaaacggcgactttgtacattgtgaagaaagtggacggagggttttggtatatagctgccggcatggatacgagctgcaagggcgcgagcagctcacttgcactcaggaggggtgggactttcagccacctctgtgtaaagacgttaatgagtgcgctgatggcgctcaccccccctgtcacgcttccgcccgctgtcgcaataccaaaggaggtttccagtgtctctgcgcagatccttatgaactgggggacgatggaaggacctgcgtggactcgggtaggttgccaagagtaacttggatcagtatgtctttggcagcgttgctcattgggggctttgctggactgaccagcaccgtaatctgtcgatggcgagtcctgggttggaaggccggaattctgacggggtgccgggagccttcagaaggaaaggttgccgggcattgtcgtacagctagctgcagccagaatcaccggaccacactatttcagacacaggcgaatcccaagtcagccgggcgcctgtttagccagcacggatag

SEQ ID NO: 208682 - DNA, 2802 bp, synthetic construct
  misc_feature 1..2802: note = Description of Artificial Sequence: Synthetic coding sequence
  source 1..2802: mol_type = other DNA
atgcgggccctggccgtgctgagcgtgaccctggtgatggcctgcactgaagcatttttcccattcatctccagaggcaaggaacttttatgggggaagcccgaagagtcacgagtatcttctgtgctggaggagagcaaacgcctcgttgatacagccatgtacgcaacgatgcaacggaatctaaaaaaaaggggaatcctgagccctgcgcaactactgtcgttctctaagctgccagaaccgacaagcggcgtcattgcacgagccgccgaaattatggagactagcatccaagcgatgaagcgcaaagtcaatctgaaaacgcaacagagtcagcatcctaccgatgccctcagcgaagaccttctcagcattatcgcaaacatgagcgggtgcctcccttatatgcttccgccgaagtgccccaacacttgtctggccaataaatatcgacccatcaccggcgcatgcaacaacagggatcatcctaggtggggagcctctaatacagctttggcccggtggctgccccccgtatacgaggatggtttctcacagccacgcggctggaaccctgggttcttgtacaacggatttccgctgccacctgttcgtgaagtgacgaggcatgtgatccaagtgtcaaacgaggtagtaaccgatgacgaccgatacagcgaccttctcatggcttggggccaatacattgatcatgacatcgcctttacacctcaatcaacctccaaggcagccttcgggggcggagccgattgccagatgacatgcgaaaatcaaaatccatgctttcccatacaactaccagaggaggctcgcccagctgcaggcactgcatgtctgccattctaccggtctagcgccgcttgtggcaccggggatcagggagccttgttcggaaatctctccactgcaaatccaaggcagcagatgaatggcttgacaagctttctggacgcatctacagtgtatgggtctagcccggccctcgaaagacagctgcgaaattggacatcagcagaaggcctgctgagggtacacgctagactcagagattctggacgagcgtacctgccattcgtcccacctagggcgcccgctgcctgtgcccccgaacccggaatccctggggagacccggggcccgtgcttccttgcaggcgatggaagagcatcggaggtgccaagtttgactgcccttcacaccttatggcttcgagaacacaataggttagccgcagccctaaaggccttaaacgctcactggtccgcggacgctgtctaccaggaagctcgaaaagtggtcggtgctctgcaccaaattatcaccctgagggactacattccaaggatcctgggtccagaggcattccaacagtacgtgggaccgtacgaaggatacgactcaactgctaatccgacagtgagtaatgtcttctcaaccgcagcgttcaggttcggacacgccactatccaccccctggttaggcggctagacgcctcatttcaggagcatcccgacctcccgggtctgtggttgcaccaggcatttttcagtccttggaccctactgcgaggcggaggtctggaccctctgatccggggcctcctcgctcgtcctgccaagttgcaggtgcaggaccaacttatgaacgaagaactgaccgaacggctcttcgtgcttagcaacagtagcacacttgacctggcgtcaattaacttacagcgcgggcgggaccatggcctgccaggctacaatgagtggcgcgaattttgtggtctgcccagattagaaacacctgcggacctgtcaacggctatagcttcgcggtcagtcgccgacaaaatcttggatctgtacaaacatccagataacatcgacgtctggcttggcgggctggccgagaactttctcccccgcgcccgcactggccctctcttcgcttgcctaataggcaagcagatgaaagccctccgggatggcgattggttttggtgggagaacagtcatgtgttcacagatgcccagcgtcgtgagctggagaaacattcactgtcccgggtcatctgtgataacaccggactgacccgcgtgcctatggatgctttccaagtgggaaaattcccagaagatttcgagtcatgcgatagtataacgggtatgaacttagaggcctggcgcgagacattcccacaagacgacaagtgcggcttccctgagagtgtggagaatggggatttcgtccattgcgaggagtctggcaggcgcgttctcgtctacagctgtagacatggttatgaactgcagggccgcgaacagttgacgtgcacccaggagggctgggatttccagccacccctgtgtaaggacgtgaacgagtgtgccgacggcgcccatcctccatgccatgccagcgcaagatgccgcaatacaaaaggcggatttcagtgcctctgcgccgacccttacgaactgggggatgatggcaggacctgtgtggatagtggaagacttcccagagtcacctggattagcatgagtttagctgcactgttgataggcgggttcgccgggctgacctccacagttatttgcagatggactaggaccggaacaaagtccaccttacccatttccgagactgggggaggcacgccggagttgaggtgcggcaagcaccaggctgttggtactagcccacagcgcgccgcggcccaggactctgagcaggaaagcgcagggatggaaggacgggacacacacaggctcccccgggccctttag

SEQ ID NO: 208683 - DNA, 2670 bp, synthetic construct
  misc_feature 1..2670: note = Description of Artificial Sequence: Synthetic coding sequence
  source 1..2670: mol_type = other DNA
atgcgggccctggccgtgctgagcgtgaccctggtgatggcctgcacagaagctttttttccttttatctctcgagggaaagagctgctatgggggaagcctgaagagtctagagttagtagcgtgttggaggagtctaagcggctcgtggataccgcaatgtatgccaccatgcagagaaacctgaagaagagaggaattctaagccctgcacaactgttgtctttctcgaaactccccgagcctacaagcggcgtgatcgctcgcgcagctgaaattatggagactagtattcaggcaatgaagcgcaaggtgaatctcaaaacccagcagtcgcagcaccctacagatgccctgtcagaggatctgctttccatcattgcgaacatgagcggttgtcttccatacatgctccctccaaagtgccccaatacatgtctcgcgaacaagtatcgcccaataactggcgcatgcaacaatagagaccaccccagatggggcgcatccaataccgctctcgctagatggctgcctccagtatacgaggacggtttttcacagcctcgaggatggaacccaggcttcctgtacaacggattccctctcccgcctgtaagagaagtaacgcgacacgtgattcaggttagtaacgaagtggttaccgatgacgaccggtactctgatctactgatggcttgggggcagtatatagatcatgatatcgcatttacgccccagtctacctccaaggccgctttcgggggaggagctgattgtcagatgacatgcgaaaaccagaatccctgctttccgatccagttacctgaggaagctaggccagccgccggcacagcctgtttgccgttttataggtcctccgctgcatgtggaactggcgatcagggggctctgttcggtaacctgtccacggccaatcctagacagcagatgaacgggctaactagcttcctggacgcatcaactgtttacgggagcagtcctgcactcgagcgccagctgcgcaattggaccagcgctgaaggtctgcttagggtgcacgcaagactaagggattctgggcgggcctacctgccctttgtcccgcccagggcgcccgcagcatgcgccccagagcctggaatcccaggggaaacacgggggccttgcttccttgctggtgacggccgggctagcgaagtcccgtcactcaccgccctgcacactctttggttacgggaacacaacaggctggctgcagcactcaaggcattgaatgctcactggtctgccgatgccgtttaccaggaggcacgtaaggtggtcggcgccctacaccagatcataacgctcagagactatattccacggatattaggacctgaagcctttcagcagtacgtgggcccatatgaaggatacgatagcacagccaacccgaccgtgtcaaatgtgttttctacagcagcgtttcggtttgggcacgccacgatccatcctttagtgaggcggcttgacgcgagcttccaggagcaccctgatcttccggggctttggcttcaccaggcctttttttccccatggaccttgttgcgcgggggcgggttagatccacttataaggggattgctggctcgccccgcaaagctgcaggtacaggaccagctgatgaacgaggaacttaccgagagactgtttgtcctgtctaactcctccactctggatcttgcaagtatcaacctacagcgcgggcgggaccacggactcccaggctacaacgagtggcgggagttctgcggacttccacgcctggaaacaccggccgatctgtctaccgctatagcctcacggagtgtggcagataaaatcctggacctttacaaacaccctgacaatatcgatgtgtggcttgggggtctggcggagaatttcctgcctcgggcccgaactgggcctctctttgcctgcctcattggcaaacagatgaaagctctcagggatggagactggttctggtgggagaacagccacgtttttacggacgcacagagaagagaattagagaagcactctctgtccagagtgatttgtgataacactggacttactcgtgtccctatggatgcatttcaggtcggcaaattccctgaggacttcgaaagctgtgatagcattactggtatgaaccttgaagcgtggcgggagaccttccctcaggacgataagtgcgggttccctgagagcgtggaaaacggggatttcgtgcactgtgaagaatctggccggagagtgctggtgtattcctgccggcacggatatgagctgcagggcagggaacaactcacctgtactcaggagggctgggacttccagcctcccctgtgcaaggactccggaaggttgccccgggtaacctggatctcaatgtccctagccgcgctactgattggtggatttgcaggactcacaagtaccgtgatttgccgatggaccagaactggtaccaagagtacactgcccatcagcgaaaccggcggagggactccagagctgaggtgtggaaagcatcaggctgttgggacctcaccccagcgcgcggctgctcaggattcggagcaggaatcagctggaatggaaggtcgagacacacacaggctgcccagagcgctgtag

SEQ ID NO: 208684 - DNA, 2283 bp, synthetic construct
  misc_feature 1..2283: note = Description of Artificial Sequence: Synthetic coding sequence
  source 1..2283: mol_type = other DNA
atgcgggccctggccgtgctgagcgtgaccctggtgatggcctgcacggaggccttcttcccttttatcagtagaggtaaggagctcctttggggcaaacccgaggaatctcgcgtgtccagcgttctcgaagaaagtaagcggttagtcgacacagcaatgtacgctaccatgcagagaaaccttaaaaaacgcgggatcctgtcccctgcacagttactgtcattcagcaagctccccgagcctacttcaggcgttatcgccagggccgctgagataatggagacctccatccaagccatgaaacgaaaggttaatctgaagacccagcagtcgcaacatccaacagacgctctgtctgaggacctcctgtctattatcgcgaacatgtctggatgtttaccgtacatgcttcccccaaagtgtcctaatacatgccttgcaaataagtatcggcctattaccggagcctgcaataatcgcgaccacccacgttggggcgcgtctaatactgcccttgctcgctggttgccgcccgtgtacgaggacgggttttctcagcccaggggctggaaccctggattcctgtacaacggattccccctgcctccagttagagaggtgacacggcatgttatccaggtatctaacgaggtggtgaccgatgatgatcggtactctgaccttctaatggcgtgggggcagtacatcgatcacgatatcgcgttcaccccccagagcacctccaaggcggctttcggaggaggtgcagattgccagatgacttgcgaaaatcaaaacccctgtttcccgatacagataattactctaagggactatattccccggatcctgggaccggaagcattccagcagtacgtggggccctacgaggggtacgatagtacggccaatcctaccgtgagcaatgtgttcagcacagcggccttccggtttggacatgccaccatacaccccctggttcgacgcctggatgctagttttcaggagcatcccgaccttcctggcctttggctccatcaggcgttcttctctccctggacattgttacgtgggggcggcctggaccccttgattcggggactcctcgcccgtcctgcgaagctgcaggtccaggaccagcttatgaatgaagaattgacggagcgcctcttcgtgctgagcaacagcagtaccttggatctcgcctccatcaacctgcaacgtggcagagaccacggcctgccaggatacaatgagtggagggaattttgcggtctccctcgacttgagacacctgctgatctgagtaccgctatcgcctccaggtcagtcgccgataaaattctggacctgtacaaacacccagataatattgacgtttggcttgggggccttgcggaaaacttcctgccacgcgcacggacaggacccctgtttgcctgcctgatcggaaagcagatgaaggccctgcgtgacggcgactggttttggtgggaaaactcccacgtgtttacagacgcccagcggcgtgaactggagaagcacagcctgtctcgggtgatatgcgacaatacggggctaaccagagtaccaatggacgcattccaggtgggcaaattcccagaggacttcgagagctgcgatagtatcacaggtatgaaccttgaagcctggagggaaacctttccacaggacgacaaatgcgggttcccagagtccgttgagaacggggactttgtccactgtgaagagagtgggcggagggtcctggtttacagttgccgccacggatatgagttacaggggcgtgagcaattaacctgtactcaggagggctgggatttccagccccctctgtgcaaggatgtaaacgagtgtgctgatggagctcacccaccatgccacgcttctgccaggtgccgcaacactaaggggggtttccaatgcctgtgtgccgacccttacgagctcggtgatgatgggcgtacctgcgtggattccggccgcctgcctagggttacatggatcagtatgtctctcgccgctcttcttattggcggtttcgctggcctaactagcaccgttatatgtagatggacaagaactgggactaaatcaacgctgcctatctcagagaccggagggggcactccagagctgagatgcgggaaacaccaggccgtcggtaccagccctcagagagccgccgctcaggatagcgagcaggaatctgccggtatggagggaagagacactcatcggttaccccgggctctatag

SEQ ID NO: 208685 - DNA, 2283 bp, synthetic construct
  misc_feature 1..2283: note = Description of Artificial Sequence: Synthetic coding sequence
  source 1..2283: mol_type = other DNA
atgcgggccctggccgtgctgagcgtgaccctggtgatggcctgcactgaggccttctttccctttatctctcggggtaaagaattgctgtggggcaagcctgaggaaagtcgggtttcttctgtcctggaggagtcaaaacgccttgtagataccgctatgtacgctaccatgcagcggaatctgaagaaaaggggcattctttctccagcccagctcttgagcttctccaaattaccagagcccacatccggagtcattgctagagctgccgagattatggagacctctatccaggcaatgaaaaggaaagtgaacctgaagactcagcagtctcagcatcccacagatgcactttcagaggacctactgtctatcatcgctaacatgtctgggtgcctgccctatatgctgccgcccaagtgcccaaatacctgtcttgccaacaagtacaggcccataacgggggcatgtaataaccgagaccatcctaggtggggcgcttcgaacactgccctcgccaggtggctgccacccgtgtatgaagacggattcagtcagcctcggggttggaatcctggatttctgtacaacggctttccactgccccccgtgagagaggttacgagacacgtgatccaagtgtccaatgaagtagtcactgacgacgatcgatatagcgacctgctgatggcttgggggcaatatattgaccacgatatcgccttcactcctcagtcaacctcaaaggccgctttcgggggcggcgctgattgccagatgacatgtgagaaccagaacccctgttttcccatacagattattaccctgcgcgattacattcctcgaatccttgggccagaggctttccagcaatacgtcggcccttacgagggctatgattcaaccgccaaccccaccgtgagcaatgtcttctcaaccgctgcgttccgctttggtcacgcgacaattcatccgctcgtgcggagactcgacgcgtccttccaagagcacccagatcttccaggcctgtggctgcatcaggccttcttcagcccatggacactattaagaggcgggggactggacccactgatcagaggcctcctcgctcgacccgctaagctgcaggtgcaagaccaactgatgaatgaggagctgaccgagaggttattcgtgctcagcaactcatctactttagacttggccagcatcaatcttcaacgagggcgcgaccacggattgccaggctacaacgaatggagagaattctgcggcctgcctcggctggagactccagctgatctgagcacagctatcgcaagcaggtccgttgctgataagattttggacctctataaacatcctgacaatattgatgtgtggttaggtggactggccgaaaatttcctcccacgagcccgaaccggaccactgttcgcctgtctaattgggaaacagatgaaggcactccgcgatggcgactggttttggtgggagaattcacatgtcttcacagatgcccagcggcgcgaactggagaaacattccttgtcgcgcgtgatatgtgataatacaggcctgactagagtgcccatggacgcatttcaggtgggcaaatttcccgaggatttcgagtcatgtgactccattacaggaatgaatctggaggcttggagagaaactttcccacaagacgacaagtgtggattcccggagtctgtggagaatggggactttgtccactgcgaagaatcaggacggcgggtccttgtgtatagttgtagacacgggtacgagttgcagggacgcgaacagctgacctgtactcaagagggttgggattttcagccccccctttgtaaagacgtgaacgagtgcgccgatggagctcatccgccctgccacgctagcgctcgatgtagaaacactaaaggcggcttccaatgtctttgcgctgatccgtacgagcttggggacgatggacgaacttgtgtggattcaggtcggctgccccgtgttacctggatttccatgtcactggccgcacttctaatcggtggcttcgctggattgacctcgaccgtaatatgtcgatggaccaggactgggactaaatctactctgcccatttcggaaaccggcggtgggaccccagagcttagatgcgggaaacaccaagctgtgggaacatccccgcagagagcagctgcacaggacagtgagcaggagagcgccggaatggaaggtcgcgacactcaccggctgcctcgcgccctttag

SEQ ID NO: 208686 - DNA, 2631 bp, synthetic construct
  misc_feature 1..2631: note = Description of Artificial Sequence: Synthetic coding sequence
  source 1..2631: mol_type = other DNA
atgcgggccctggccgtgctgagcgtgaccctggtgatggcctgcaccgaggcgtttttcccttttatctccaggggaaaagaactgctctggggcaagccagaagaaagccgggtctcttcagtgctggaggagtccaagagactggtggacaccgccatgtacgctaccatgcagagaaatctcaagaagagaggaatcctctccccagcccagctgctgtccttcagtaagctgccagaaccaactagtggggttattgctcgggctgctgagatcatggaaacaagtatacaggctatgaagcggaaggtcaaccttaaaactcagcagtcccagcaccctaccgatgcactgtccgaggatctactgtctataattgcaaatatgtctggttgtctgccttacatgttgccccccaaatgccccaacacctgcctggcaaacaaatatcggcctataaccggagcctgtaacaatagagaccatccgagatggggtgcctctaatactgccctggcccgatggttaccacccgtgtatgaggacggctttagtcagcctcggggctggaatccagggtttctttataacgggtttcctctgccccccgtgcgggaggtgactcggcacgtcatacaggtcagcaatgaagtagtgactgatgacgacagatacagtgatctcctgatggcctggggccagtacattgaccacgacattgccttcacgcctcaaagtacaagtaaggcagcatttggtggcggcgctgattgtcagatgacttgtgaaaaccagaacccctgctttcccatccagctgcccgaggaggcgcggccagccgcgggaacggcgtgtcttcctttctaccggagttctgccgcttgtgggaccggcgatcaaggagccttgttcggcaacctgtcaacagccaatcccagacagcagatgaacggcctgaccagctttttggacgcctcaactgtgtacgggagctcacctgcgttagagcgacaactacgcaattggactagcgccgaaggcctgttgcgagtacacgctcggctgagagatagtggacgagcctatttgcccttcgtaccacctagggcacctgcggcgtgcgcaccagagccagggattcctggggaaacccgagggccttgctttctcgcaggcgacggaagggccagtgaagtcccctccctaaccgccctgcacacactttggctccgtgagcacaacagacttgccgccgccctgaaggctttgaatgctcactggtcagcagacgctgtgtaccaggaggcgcggaaggtcgtgggggcccttcatcagatcatcaccctacgtgattatatccctagaatactgggcccagaggcattccaacagtatgtcgggccatatgaaggctacgacagcactgccaaccccacagtaagcaatgtattttctaccgctgcgtttcgtttcggccacgctactatccacccccttgtgaggcgcttagacgcctcatttcaggagcaccccgatctccctggcctgtggcttcaccaagcgtttttttcaccctggactctgctgagaggtggctataacgagtggagggagttctgcggtctgccccgtttagagacacctgcagatctttccaccgctattgcatcccgtagtgttgccgacaagattttggatctctacaagcaccccgacaatattgatgtatggttggggggactggctgagaatttcctgccacgcgccagaaccggaccactattcgcatgtcttattgggaaacagatgaaagctttacgcgacggagactggttttggtgggagaacagccatgtcttcacagatgcccaacgcagagaactggagaagcacagcctcagcagagtgatttgcgacaatacgggcttaacccgtgtccccatggacgcctttcaggtgggaaaatttcccgaagattttgaaagttgcgacagtataacggggatgaatttggaagcttggagagagactttcccccaggatgataagtgtggttttcctgagtccgttgaaaatggggactttgtccactgcgaagagtccgggcgccgggttctcgtttactcttgccgccacgggtatgaactgcagggcagagagcaactcacctgcacacaagaggggtgggattttcagcccccactgtgtaaggacgtgaatgagtgtgccgatggcgctcacccaccctgccatgcttctgcgagatgccgtaacacgaagggtggcttccagtgtctgtgcgccgatccctatgagctgggggacgacgggcgtacatgcgtggattcaggccggctccctcgcgtaacatggatctccatgagtctggccgctcttctgattggaggattcgctggactgacttccaccgtgatttgtaggtggacgcgaacaggcacaaaatcaactttgccaatcagtgagaccggagggggcacaccagagctgcggtgtggaaaacatcaagcagtaggcacgtccccacaaagggcggccgcccaggactctgaacaggaatcagccggcatggaggggcgtgacactcatcggctgcctcgtgccctgtag

SEQ ID NO: 208687 - DNA, 519 bp, synthetic construct
  misc_feature 1..519: note = Description of Artificial Sequence: Synthetic coding sequence
  source 1..519: mol_type = other DNA
atgcgggccctggccgtgctgagcgtgaccctggtgatggcctgcacggaggctttttttccttttatctcacgcggaaaagagctgctgtggggcaagccagaagaatcccgtgtaagcagtgtcttagaggaatcaaagcggctggtggataccgcaatgtatgccacaatgcagaggaatttgaaaaagcgtggcattcttagcccagcccagctgttatcattctccaaacttcctgagcccacgagcggagtgatcgctcgtgccgcagaaatcatggagacttccatccaagccatgaagaggaaagtcaacctgaagacacagcagtcacagcatcctactgatgcactgtcagaggaccttctctccattattgccaatatgagtgggtgcttaccctacatgttgccaccaaaatgccctaacacgtgcctggccaacaaataccgccctatcacgggcgcatgtaataaccgggaccatccaagatggggcgcttctaatacagcctag

SEQ ID NO: 208688 - DNA, 462 bp, synthetic construct
  misc_feature 1..462: note = Description of Artificial Sequence: Synthetic coding sequence
  source 1..462: mol_type = other DNA
atgaacggcctgaccagcttcctggacgccagcaccgtgtacggctcaagtcccgctctggaacgtcagctccgcaattggacatccgccgagggtcttctgcgggtgcacgcccggcttcgcgattcagggagagcctatctcccatttgtgccgccccgagcccctgcagcttgcgcccccgaacctggcattccaggcgagacaaggggcccctgctttctcgcaggggacccccgccagagagggcccctcccagacggcactgctcacgcggtggcagctcgcgcccagccaccaggtcgcggcgctcaggggccccagtgtgcgttggaaaggggtcgccgggtcccaggaggggctcaggggcggggacgaagtgcccctgaccatcatccagaggggctgcacccccaggaccccgggacacgagggcttccagccgtgcgcggaagcctgtag

SEQ ID NO: 208689 - DNA, 525 bp, synthetic construct
  misc_feature 1..525: note = Description of Artificial Sequence: Synthetic coding sequence
  source 1..525: mol_type = other DNA
atgcgggccctggccgtgctgagcgtgaccctggtgatggcctgcaccgaggcctttttccctttcattagcagaggaaaggaactgctgtggggcaaaccagaggaatcccgggtgtcttcagttctggaagaaagtaagcgcctggtggatactgcgatgtatgcgacaatgcagagaaatctgaagaagagagggatcctaagccctgcccagttattgtcttttagcaagctcccagagcccacgtcaggcgttatagcccgggcagcggagataatggaaacatccatccaggcaatgaagcggaaagtaaatctgaaaacccagcaaagccagcacccaacagatgcgttgtctgaagatctactttctattattgcaaacatgtccggctgccttccatatatgctgccgccgaagtgccccaacacttgcctagccaacaaatataggcctatcaccggtgcatgcaataaccgtaagatgaaatacaaacccgatcactccgagacggcgaattag

SEQ ID NO: 208690 - DNA, 2295 bp, synthetic construct
  misc_feature 1..2295: note = Description of Artificial Sequence: Synthetic coding sequence
  source 1..2295: mol_type = other DNA
atgcggcccgccgacctgctgcagctggtgctgctgctggacctgccccgtgacctcggtggcatgggatgttccagtcccccatgtgagtgccatcaggaagaggacttcagagtcacctgcaaggatatacaacgtattccttccttgcctccaagtacacagaccctcaaactcatcgaaacccatctgcgcaccatcccctcgcacgctttttcaaacctgcctaacataagcagaatctacgtttcaattgacgtcactttgcaacagttagagtcccatagtttttataatttgtctaaggtgacacatattgagattcgtaatacaagaaacctcacttatatcgacccagatgcccttaaagagcttccgttgctgaagtttctcggcattttcaacaccggcctcaagatgttcccagatttaacgaaggtgtatagtaccgacatcttttttatcctggaaattactgacaacccatacatgacctcgattcctgttaacgcatttcaaggtctctgcaatgaaactctgaccctgaaactctataacaatgggttcacatccgtgcagggttatgcttttaacgggaccaaacttgacgctgtgtatctcaataaaaacaaatacctgacagtcattgacaaggatgccttcggtggcgtctactctggcccttcccttctggatgtcagtcagacgtctgttactgctctccccagcaagggcttggagcacctcaaagagctcatcgcacggaacacctggaccctgaagaaattgccgctgtcactcagcttcctgcatctgactcgagcagacttgtcttacccctctcactgttgcgcgttcaagaatcagaagaagatacgcgggatccttgagtcattaatgtgcaacgagagttctatgcagtccttgcgccagcggaaatcggtcaatgccttgaattcacctctgcatcaggaatacgaggaaaatctgggcgactccatcgtggggtacaaagagaaatccaagtttcaggatactcacaacaacgcccactattatgtcttcttcgaggagcaggaagacgagataatcggcttcgggcaggagctcaagaatcctcaggaggaaacgctgcaagccttcgactcacattatgattatactatttgtggtgattccgaagatatggtgtgcacccctaagtccgatgaattcaacccctgtgaggatatcatgggctataaatttctgcgcatcgtggtatggtttgtcagtctgcttgccctgctgggtaacgtgttcgtcctgctgattttgctcaccagccactacaagcttaatgttccccggtttcttatgtgtaacctagcattcgctgatttctgcatggggatgtacctcctactgattgctagcgttgacttgtatacacatagtgaatattataaccacgcaatagattggcagactgggccaggatgcaacaccgccgggttctttacggtgttcgcctccgaactgtccgtgtacaccctaaccgttattacactagagcggtggtatgcaatcaccttcgctatgcgtttggatcgcaaaatccgactgaggcatgcctgcgccataatggtgggaggctgggtgtgctgcttcctgcttgctctcctgccattagtggggatttcctcttacgctaaggtgtcaatatgcctccccatggataccgagaccccactagccctggcctatatcgtatttgtgctgaccctgaatattgtcgccttcgtcatcgtctgctgttgctatgtgaaaatatacatcacagtgaggaatccccagtataatcctggcgacaaggacacaaagatagccaagaggatggctgtgctcatctttactgattttatctgcatggctcctatttccttctatgccctttcagctatcttgaacaagcccctcatcactgtgagcaattctaagatccttcttgtattattctacccactgaactcgtgtgccaacccatttctgtatgcaattttcaccaaggcctttcaacgagatgttttcattctgctcagtaagtttggtatttgcaagcggcaggcccaagcctatcgaggccaaagagtgccccccaaaaattctactgacatccaggttcagaaggttacgcacgagatgaggcaggggctgcataacatggaagatgtctatgaactgatagagaattcccatcttaccccaaaaaaacagggccagatctccgaagagtatatgcagacagtcctctag

SEQ ID NO: 208691 - DNA, 762 bp, synthetic construct
  misc_feature 1..762: note = Description of Artificial Sequence: Synthetic coding sequence
  source 1..762: mol_type = other DNA
atgcggcccgccgacctgctgcagctggtgctgctgctggacctgccacgagatctgggaggcatgggttgctcaagccctccctgtgaatgccaccaagaggaggacttccgcgtcacatgtaaggacatacagcgaattccatccctgccgcccagcacccagactctgaaactaattgagacacacttacgaacaatcccctctcacgctttctcaaatctgccaaacatcagcaggatatatgtgtcaatagatgtcacgctgcagcagcttgagtctcacagcttctacaacctgtctaaggtgacacacattgagatccgcaacactcgcaatcttacatacatcgacccagatgcactaaaggagctgcctctgctcaagtttctaggaatttttaatacaggcctgaagatgttccctgacctgactaaagtgtacagtactgacatcttctttatcctggaaatcactgacaatccatacatgacttctattcctgttaacgctttccagggtctatgtaatgaaaccctgacgctcaaattatataacaacgggtttactagcgtgcaggggtacgcattcaatggaaccaagcttgacgcagtgtatctcaataagaacaaataccttactgttatcgataaagatgcttttgggggcgtgtacagtggcccatcactgctgttgcctctgggaagaaaatccttatcctttgagactcagaaagcacctcggtcttccatgccctcttag

SEQ ID NO: 208692 - DNA, 1236 bp, synthetic construct
  misc_feature 1..1236: note = Description of Artificial Sequence: Synthetic coding sequence
  source 1..1236: mol_type = other DNA
atgcggcccgccgacctgctgcagctggtgctgctgctggacctgcctcgggatctcggtggaatgggctgttcctcccctccctgtgaatgtcatcaggaggaggatttcagagtgacctgtaaggatatacagcgaataccgagtctgccgccctccacgcaaacactcaagctgattgagacgcacttgcggatcgtggtatggtttgtgtcacttctggctctgttggggaatgtcttcgtgctacttatactactgacatcccactacaagctgaatgtccctcggttcctcatgtgtaatctagcattcgccgatttctgtatggggatgtacctactgttgatcgcttcagtggatctgtatacacactcagagtactacaaccatgccattgactggcagactggtccaggttgcaatactgctggcttctttactgtattcgcctcagaactatctgtgtatacccttaccgtgatcaccctggaacggtggtacgccataacattcgcgatgcgcctggatcgaaaaattcggttaagacacgcatgcgcgataatggtgggcggttgggtatgctgcttcctccttgcgctgcttcccctagtaggcatctctagctatgcaaaggtctccatctgcctgcccatggataccgaaactccacttgctctggcctatatcgtcttcgtgctgactctgaatatcgttgcctttgtcatagtctgttgttgttacgtgaaaatctacatcaccgtgcgtaaccctcagtataatccaggggacaaggataccaaaattgccaagcgtatggccgtgcttatctttaccgacttcatttgcatggcaccgatctccttctacgccttaagcgcaattctgaacaagccgctgattaccgtttccaactcgaaaatccttctggtgcttttttacccactgaacagctgtgccaatcctttcctgtatgccatttttactaaagcctttcagagggatgtgttcatcctgttgagcaagttcgggatatgtaaacggcaggctcaggcgtatcgtggtcagcgggtgccaccgaaaaactctacagacattcaggtccaaaaagtgacccacgaaatgaggcagggtctccacaatatggaggacgtgtacgaactgattgaaaactcccacctgactccgaagaaacaggggcagatctctgaggaatacatgcagacagttctctag

SEQ ID NO: 208693 - DNA, 2295 bp, synthetic construct
  misc_feature 1..2295: note = Description of Artificial Sequence: Synthetic coding sequence
  source 1..2295: mol_type = other DNA
atgcggcccgccgacctgctgcagctggtgctgctgctggacctgccaagagatctggggggcatgggctgctccagtcccccctgcgaatgccatcaggaggaagactttcgcgtaacatgcaaagacatccagcgaatcccctctctgcctccctcaactcagactctcaagcttatagagacccatctgcgcactatcccctcccacgccttttcaaacctcccaaacatcagtcggatatacgtgtccatcgacgtgacacttcagcagttggaatcccatagcttctacaacctgagcaaggtgactcacattgagattaggaatactcgtaatctgacttatatcgatccagatgccctcaaagaactgcctctcctcaaattcctgggcattttcaatacggggctcaagatgttcccagacctgacaaaagtttactccaccgatatattcttcatacttgaaattaccgataacccttacatgacaagcattccggtcaacgccttccaagggctctgtaatgagacactgacattgaagttatataacaatggattcacgagtgtgcaaggctatgcatttaatggaaccaagctcgatgccgtgtacctgaataaaaacaaatatctaacagtcatcgacaaggatgccttcgggggggtatactccggaccgagtttgctggacgtctcccagacctccgtgactgcattgccttctaaaggtctcgagcatttgaaagaactgattgccagaaacacgtggaccctcaagaaattgccccttagcctctcttttctgcacttgacccgggctgatttgagctacccgtctcattgttgcgcatttaaaaatcaaaagaaaatccgggggattttggaatcactgatgtgtaacgagagttctatgcaatctctgcggcagaggaagtccgtgaatgcattgaacagtcccctgcatcaggagtacgaggaaaacctgggagatagcatcgttggatacaaggagaaaagcaagtttcaagatacacataacaacgcccattactacgtcttctttgaggagcaggaagacgagatcattggctttggtcaggaacttaaaaaccctcaagaggagacgctgcaggccttcgactcccactatgactacaccatatgtggggactctgaagacatggtgtgcaccccaaaatccgatgaatttaacccttgtgaggacatcatgggttataagtttctgcgtatagtggtctggttcgtgagcctcctggccctcctgggaaacgtcttcgtccttctgatactgctgacaagccattacaagctgaacgtgccaaggttcctgatgtgcaatctggcatttgccgatttctgcatgggcatgtatctcctgctcattgcttccgttgatctctacacccactcagaatattacaaccacgcaatcgattggcagactgggcccggttgtaataccgccggtttcttcaccgtcttcgcttcagagctgagtgtttataccctgacagtaattacactggagagatggtatgctataacttttgctatgaggctggacaggaaaattaggctgcgacatgcctgtgccattatggtgggcggatgggtctgctgctttctgttagccttgctcccgctcgttggcataagctcttacgcgaaagtctctatctgccttccaatggacacagaaactcctctcgccctcgcttacatagtgtttgtcttaaccctcaacatagtggccttcgttattgtgtgctgttgctacgtgaagatctacatcaccgtgcggaacccacagtacaaccctggagacaaggataccaagattgctaaaaggatggccgtgctaatttttaccgacttcatctgtatggcccccatctcattttacgccctgagcgctattcttaataagcctcttattacggtcagcaacagcaagattctccttgtactcttctatccgttaaactcatgtgccaatccttttctgtatgcaatctttacgaaggcattccagagggacgtctttatcttactatctaagttcggcatttgcaaaagacaagcacaggcctacagaggtcagcgcgttccgccaaagaattccacagacattcaggttcaaaaggtgacccacgagatgagacaagggctccacaacatggaggatgtgtatgaactcatcgagaactcccacctaacccccaagaagcagggccagatctccgaagagtatatgcagacagtgctgtag

SEQ ID NO: 208694 - DNA, 825 bp, synthetic construct
  misc_feature 1..825: note = Description of Artificial Sequence: Synthetic coding sequence
  source 1..825: mol_type = other DNA
atgcggcccgccgacctgctgcagctggtgctgctgctggacctgcctcgagacctggggggaatgggttgctcgagccccccttgtgaatgccatcaggaggaggacttccgggttacctgcaaggacatccaaaggatcccgtctctgccgccaagcacccaaactctgaagctgattgaaacgcacctgaggactattcccagtcacgcattctcaaatctgccaaacatctctcggatttatgtaagtattgacgtgacacttcagcaattggagtcgcacagtttttacaatctcagtaaagtcacacacatcgaaatccgcaacacccggaatttaacttacattgacccggacgcactgaaagagcttccactccttaagtttttgggtatctttaatactggattaaaaatgtttcctgacctgactaaggtgtactctactgacatcttctttatccttgagattaccgataacccttacatgacgtccatacccgtaaatgccttccagggtttatgtaatgaaactctgaccctgaagctctacaataatggatttacctctgtgcaaggatacgccttcaacgggactaagctcgatgctgtgtatctcaacaagaataaatatttgacggtgatcgataaagacgccttcggtggcgtctactcgggcccatccttgctggttgagaatgtggcagtctccggcaaagggttctgcaagtccttgttctcttggctgtaccggttgcccctgggcaggaagagcttatctttcgaaactcagaaggccccgcgctcctccatgccatcttag

SEQ ID NO: 208695 - DNA, 912 bp, synthetic construct
  misc_feature 1..912: note = Description of Artificial Sequence: Synthetic coding sequence
  source 1..912: mol_type = other DNA
atgagcgacgccggcggcggcaagaagccccccgtggacccccaggctgggccggggccagggccgggaagggcagcgggcgagcgcggtttatcaggttctttccccttggtattgaaaaagttgatggagaatcctccccgagaggcacgccttgacaaggagaaggggaaggagaaactggaagaggatgaagcggcagctgcttcaaccatggctgtctcggcctctcttatgccgccaatctgggacaagacaataccgtacgacggggagtcatttcatcttgagtacatggatttagatgagtttctgcttgagaacggtatccctgcaagtccaacccatctcgcacataacctgttgttacctgttgcagaacttgaggggaaagagtcagcaagtagcagtactgcctcccctccttccagttcgactgcaatcttccagccttccgagaccgtaagctccaccgaaagctctctcgagaaggaaagagaaacaccgtctcccattgatcccaattgtgtcgaggtggatgtcaatttcaatcccgatccggcagaccttgtgctcagctcagtgccgggcggcgagctgttcaaccctcgaaagcacaagttcgccgaggaggatctcaaaccacaacccatgatcaaaaaagcaaagaaggttttcgtgcctgatgaacaaaaagatgaaaagtattggacccggagaaaaaagaataatgttgccgccaagcgatctcgagatgctcgacgtcttaaagaaaaccagatcactatcagagctgctttccttgaaaaggagaataccgcgctgcgaacagaggtcgctgagttaaggaaagaggtagggaagtgcaagactatcgtgagcaaatatgagaccaaatatggccccttatag

SEQ ID NO: 208696 - DNA, 555 bp, synthetic construct
  misc_feature 1..555: note = Description of Artificial Sequence: Synthetic coding sequence
  source 1..555: mol_type = other DNA
tgattcatcttcctgccccggcccggcaccagcctgggccggatccgtaaagcagataaggagaagggcaaggaaaaattggaggaggacgaggcagcagctgcttcgaccatggctgtaagcgcttccctgatgccacccatttgggacaagacaatcccatacgacggggaatcatttcacctcgaatatatggacctcgacgaattcctcctcgaaaatggaattccagcttcacctacccacttagctcacaacctgcttctgcctgttgctgaactggagggtaaggaatccgcaagctcctcaacagcatctccccctagctcaagtacagccattttccaaccaagcgagaccgttagcagcacagagtccagcctggaaaaagagcgtgagacaccttcaccaatcgacccaaactgtgttgaggttgacgtcaatttcaatccagatcccgctgacttggttctcagcagtgtgccaggcggtgagctttttaatccaagaaagcataagttcgcagaggaggacctgaagcctcaacctatgtag

SEQ ID NO: 208697 - DNA, 822 bp, synthetic construct
  misc_feature 1..822: note = Description of Artificial Sequence: Synthetic coding sequence
  source 1..822: mol_type = other DNA
atggacatgcccgaggtgctgaagagcctgctggagcacagcctgccctggccggaaaagaggactgataaggagaaaggcaaagagaaactcgaggaggacgaagccgccgcggccagcaccatggctgttagtgcctcgctgatgccccccatatgggataagaccattccctatgacggggagtcctttcatcttgaatacatggacctggacgagttccttctggaaaatggaattcccgccagccccacacacttggctcacaacctgctccttccagtcgctgagttggagggaaaagagtccgcctctagctcgacagcttctccgccttcttcttctaccgcaatatttcagccaagcgaaactgtgagcagtacagagtccagcctagagaaggaaagggaaactccatcacccatagatcccaactgtgttgaagtggatgtgaacttcaacccagatcctgccgatcttgtcctgtccagtgtgcccggaggcgagctctttaatccacgcaagcacaaattcgccgaagaagacctgaagccccagcccatgatcaagaaagcaaagaaagtctttgtgccagacgaacaaaaagatgagaaatactggacacgtcggaagaagaataacgtggctgcaaagaggtccagggatgcccggcgcttaaaggagaaccagataaccattagagcagcatttctggagaaggagaacacagctttacggactgaggtcgccgagctccggaaagaagtcggaaaatgcaagacaattgtctccaaatatgagacgaagtatgggccactctag

SEQ ID NO: 208698 - DNA, 822 bp, synthetic construct
  misc_feature 1..822: note = Description of Artificial Sequence: Synthetic coding sequence
  source 1..822: mol_type = other DNA
atggacatgcccgaggtgctgaagagcctgctggagcacagcctgccttggcctgagaagcggacggacaaggaaaaaggcaaagaaaaattggaggaagacgaggctgcggccgcatcaacaatggcagtgtcagcatctctgatgcctccaatttgggacaaaactattccatatgatggggaatccttccatctggaatacatggatctggatgagtttttactagaaaacggcatcccagcttctccgacgcacctcgctcataacctactcttacccgtggctgaactggaggggaaagagtcggccagcagctcaactgcctctcctccatcatcgtccacagccatcttccaaccttcggagaccgtgtccagcactgaatcttccctggagaaggagagagagaccccttcccctatcgacccgaactgcgtggaggtggatgtgaattttaaccccgaccccgccgatttggtcttatcttccgtcccaggcggggaactgttcaaccctcggaagcacaaattcgcagaagaggacctcaagccccagcccatgattaaaaaagcaaagaaagtttttgttcccgacgaacagaaagacgagaagtattggaccagacgtaagaagaataatgttgcagcaaaacgcagtagagatgcccgaagattgaaagaaaaccagattacaatccgggctgcattcttggagaaggagaatacagcgttgcggacggaggtggcagagttgcggaaggaggtgggcaagtgtaagacaattgtttccaagtatgagaccaagtatggccccttatag

SEQ ID NO: 208699 - DNA, 729 bp, synthetic construct
  misc_feature 1..729: note = Description of Artificial Sequence: Synthetic coding sequence
  source 1..729: mol_type = other DNA
atgcccggcccctggctgctgctggccctggccctgaccctgaacctcaccggcgtccctggcggcagagcacagcctgaagccgcgcaacaggaggctgtgactgctgccgaacatcccgggctggatgatttcctacgccaggttgaaaggctcctttttctgcgggaaaacattcagagattgcagggcgaccaaggggagcattccgcttctcagatattccagagcgactggctatcaaagaggcaacaccctggcaagagggaagaggaggaggaggaaggcgtggaagaagaagaagaggaggaagggggcgcagtaggacctcacaaacgacagcaccctggccgccgggaggacgaggccagctggtccgtggatgtgacgcagcacaaaaggcaacatcctggacgaagaagcccttggctcgcttacgccgtgccaaaaagacagcacccgggccgcagactcgcggatccgaaagcacaacggtcctgggaggaggaggaggaggaggaggagcgggaagaagatctgatgcccgaaaagcgacagcatcccggtaaacgcgcgttaggaggcccttgtggccctcaaggggcctatgggcaggcaggtctcctgctgggactgttagacgacttgtcacgttcccaaggtgctgaggagaagaggcagcacccaggtcggcgggccgcgtgggtgagggaaccgctcgaagagtag

SEQ ID NO: 208700 - DNA, 3075 bp, synthetic construct
  misc_feature 1..3075: note = Description of Artificial Sequence: Synthetic coding sequence
  source 1..3075: mol_type = other DNA
atgggcgaggacgacgccgccctgcgggccggcagccggggcctgagtgacccgtgggccgatagcgtgggggtccgccctcgcacgacggagagacacatcgcagtgcacaagcgcctcgtgctcgccttcgcagtgagcctggtggcactcctggccgtcactatgctcgccgtgctcttgagcttgagatttgacgaatgcggtgcctcagctactcccggagcggatggcggcccctctgggtttcccgaacggggcggtaacggctccctgcctggtagtgcgagaaggaaccaccacgcaggcggggatagttggcagcccgaggccggcggagtggcgagtcccggcacaacttccgcccagcctccctctgaggaggaaagggaaccgtgggagccctggacacagttacgattatctgggcacctgaagcccctgcactataacctgatgctgaccgcctttatggagaactttacattcagcggcgaagttaatgtcgaaatcgcctgcaggaacgcgacgagatatgtcgtgcttcacgccagtcgggtcgccgtcgagaaagtgcagctggcagaggacagggccttcggagccgtgccagtggctggattttttctgtacccccagacacaggtcctggtggtcgtgcttaaccggaccttggacgcccagcgtaattacaatctgaaaatcatatataatgccttgattgagaacgagctccttggcttcttcagaagctcctatgttctccatggggagaggcgatttctgggcgtaacacagttctcccccacccacgcacgcaaggccttcccctgcttcgacgagcccatctacaaagccacgttcaagatctcaattaagcatcaggcaacctacctctcactgagcaacatgcctgtggagacctccgttttcgaagaggatggctgggttactgatcatttctcgcaaaccccccttatgtctacctactacctggcctgggccatctgtaattttacctacagggagaccaccaccaaatccggagttgtggtgaggctctacgcaagacccgacgccatacgccggggcagtggggattacgctctgcacattaccaagcgactgattgagttctacgaggattatttcaaagttccctattcccttccaaagctggacctgctagctgttcccaagcacccatacgccgctatggagaattgggggctctcaatcttcgtggagcagaggatcctgctggaccccagcgtgtcaagcatttcatacttgttggacgtaactatggttatagtacacgagatttgtcaccaatggttcggggaccttgttacacctgtgtggtgggaggacgtctggctgaaggagggcttcgcccactactttgagtttgtaggaactgactacttgtatcctggttggaacatggaaaaacagcggtttctgaccgatgtgctgcacgaggtgatgcttctggacggattagcatctagccacccggtgagccaggaagtccttcaggctacagacattgaccgggtgtttgattggatcgcctataaaaagggagccgccttaattcgaatgttggccaacttcatgggacattctgtgtttcaaaggggtttacaggactacctcacaattcacaagtacgggaacgctgccagaaacgatctgtggaatactcttagcgaagcgctgaagcgcaacgggaagtatgtgaatattcaagaagtaatggaccagtggaccctacagatgggataccccgtaatcaccatcttgggaaacaccacggccgaaaataggatcatcattacacaacagcactttatttacgacatctctgcgaagaccaaagccttgaaactccagaataactcttacttgtggcagatacccctgaccatcgttgtgggcaatagatcacacgtgagttctgaggcaatcatctgggtgagcaacaagagcgagcatcatagaataacatatttagacaaggggtcctggctgctgggcaatatcaatcagacagggtacttccgtgtaaactatgacctgagaaactggcgtctactcatcgaccagcttatccgaaatcatgaagtcctttcagtgagtaaccgcgctggattaatcgatgacgccttctccctcgcccgcgccggctatcttccacagaatattcctcttgagatcatacggtacctatccgaagagaaggacttcctcccttggcacgcagcttcgcgggccctgtatccgctggataaacttctggacagaatggagaactataatatattcaacgagtacattctcaagcaggtggctacaacttacatcaaactgggatggccaaagaacaacttcaacggttctcttgttcaagcttcctaccaacatgaggaactgagacgcgaggttattatgctggcatgttccttcggaaacaagcattgtcatcagcaggcctcaaccctcatctccgactggatcagcagcaaccgcaacaggattcccttaaacgtgcgggacatcgtgtattgcacaggggtgtccctgctcgacgaggacgtatgggaatttatctggatgaagttccactcaactacagcagtctccgaaaaaaaaattcttctcgaagccttgacttgtagcgacgaccgcaaccttcttaaccgcttactgaatttaagcctaaacagtgaagtggttctcgaccaggacgctattgatgtgatcatacacgtggcaagaaatccgcatggacgggatctcgcttggaagttttttcgggataaatggaagattcttaatacaaggtatggggaggctttattcatgaacagcaagctcatttcaggcgtgactgagttcctcaatactgaaggtgaactcaaggagctcaagaatttcatgaagaactatgatggtgtcgccgcagccagtttttctcgcgccgtcgagactgtcgaagctaacgtgcggtggaagatgctgtaccaggatgaactgttccagtggctgggcaaggccctgcgccactag

SEQ ID NO: 208701 - DNA, 1197 bp, synthetic construct
  misc_feature 1..1197: note = Description of Artificial Sequence: Synthetic coding sequence
  source 1..1197: mol_type = other DNA
atggagaacgagaccgtgagcgagctgaaccagacccagctgcagcctcgggccgttgtcgccctggaatatcaggtggtcaccattctgctagtactgattatctgcggacttggcattgtggggaatatcatggtagtgctggtcgttatgaggactaagcacatgaggactccaaccaactgttacctggtgagcctcgccgtcgcagatctcatggtcttggttgccgccggactccctaatataactgacagtatctatggatcttgggtctacggctatgtgggttgcctatgtattacatacttgcagtacctcggcattaatgccagctcttgtagtatcacagcgttcaccattgaaaggtacatcgccatctgtcacccaatcaaagcacaatttctatgcaccttctcccgcgcaaagaagatcattatctttgtgtgggcctttacctctctttactgtatgctgtggttctttctgcttgacttaaacataagcacatataaggatgcgattgtgatttcgtgtggctataagatctctcgcaactattatagtccaatttacctgatggacttcggagttttttatgtggtgcccatgattcttgctacagtgctgtacggctttattgctcgtatcctttttcttaatcccattccaagtgaccccaaagagaacagcaagacatggaaaaacgactctacccatcagaacactaatctgaacgtgaacacctccaatcgatgtttcaatagcactgtgtcaagccgcaagcaggttaccaaaatgttggcggttgtagtcatcctctttgctctcttgtggatgccatatcgtaccctggtagtggttaacagtttcctaagctctcctttccaggaaaattggtttctgcttttttgcagaatctgcatttatctgaacagtgctatcaacccagtcatttacaatctgatgtcccagaaattccgggccgccttccgcaagctgtgtaattgcaagcagaagccaacagagaaacccgcaaattattccgtggcacttaactacagcgtgatcaaagagagcgatcattttagtacagagctggatgatataacagtaacggacacatatttaagcgcaactaaggtttcttttgacgatacatgtctagcttccgaggtgtcgtttagccaaagctag

SEQ ID NO: 208702 - DNA, 1197 bp, synthetic construct
  misc_feature 1..1197: note = Description of Artificial Sequence: Synthetic coding sequence
  source 1..1197: mol_type = other DNA
atggagaacgagaccgtgagcgagctgaaccagacccagctgcagccccgcgcagttgtcgcattagaatatcaggttgttacaatcctgctggttctgataatttgcggcctcggcatcgttggcaatattatggtggtcctagtcgtgatgcggactaagcacatgcgtacccccaccaactgttatttagtgtcattggctgtagccgatcttatggttttggtagccgcgggtctgcctaatatcaccgacagtatttacggatcttgggtatacggatacgtcggatgcctgtgtatcacttatctccagtatctgggcattaacgcaagttcctgcagcattacggcttttaccattgagagatacatagcaatatgccatccaataaaagcacagttcctctgcacctttagtcgagcaaaaaaaatcataatttttgtctgggcttttacttctttatattgcatgctgtggttctttttgttagatctgaatatatctacatacaaagatgcaattgtgattagttgcggctacaagatctcaagaaattactatagcccgatttatctgatggacttcggggtgttctatgtcgttccgatgatcctggcaacggttctgtatggattcatcgccaggattctgttcctgaacccgatcccgagcgaccctaaggaaaattcaaaaacgtggaagaacgacagcacccaccagaacacaaatcttaatgtgaatacaagtaatcggtgtttcaactctaccgtgtcttccaggaagcaagtgacaaagatgctggccgtggtcgtgatcctgttcgcactcctgtggatgccgtatagaacactcgttgtggtaaactccttcttatcttcaccatttcaggagaactggtttcttctcttctgccgaatctgtatctatcttaactctgccattaacccagtgatctacaaccttatgtctcagaagttcagagccgcatttagaaaactgtgcaattgcaagcagaagcctacagagaaaccagcgaattactccgtggcactcaattatagcgtgataaaggaatctgatcatttctcgaccgagctagacgacatcaccgtaaccgatacatacctgagcgctaccaaagttagttttgatgacacctgtctcgcgtccgaggtatccttctcccagtcctag

SEQ ID NO: 208703 - DNA, 1128 bp, synthetic construct
  misc_feature 1..1128: note = Description of Artificial Sequence: Synthetic coding sequence
  source 1..1128: mol_type = other DNA
atggaggacgagatgcccaagaccctgtacgtgggcaacctgagcagggacgtgacagaggctcttatcttgcaattgttttcccagatcggaccttgtaaaaactgtaagatgatcatggatactgcaggcaacgacccttactgcttcgtggaattccatgagcaccggcacgccgctgcagcattagcagcaatgaacggacgtaaaatcatggggaaggaagtaaaagttaactgggccactacaccgtcatcccagaagaaggatacctcgaaccacttccatgttttcgtgggggatctgtctcccgaaatcacaactgaagacatcaaggctgccttcgcaccattcggtaggatatctgacgcgcgcgtcgtgaaagacatggccacaggtaaatcaaaaggctacgggtttgtgtcctttttcaacaaatgggatgcagaaaacgctattcagcagatgggcggacagtggctgggcggcagacagattcgcactaactgggccaccaggaaaccaccagccccaaagtcaacctacgaatctaacaccaagcagctgagttatgacgaggtcgtgaaccaaagttcaccgtccaattgcacagtttattgcgggggggtgactagcggcctgaccgaacagctcatgcgccagacctttagtccttttggccaaattatggagatcagggtgtttcccgacaaagggtactccttcgttcgattcaacagccatgaatccgcagcccacgcaatcgtttctgtcaatggaacaacgatagagggacacgtggtgaaatgttactggggcaaagagacattggacatgatcaaccctgtccagcagcagaaccaaatagggtacccccagccctacggtcagtggggacaatggtacggcaacgcgcagcagattggccagtatatgcccaacggatggcaagttccagcgtacggaatgtacgggcaggcgtggaaccagcaggggttcaatcaaacacagtcctctgctccctggatgggccccaactacggagttcaaccccctcagggccaaaacggcagtatgcttccaaaccagccatccggctatcgtgtcgctggatatgagactcagtag

SEQ ID NO: 208704 - DNA, 1161 bp, synthetic construct
  misc_feature 1..1161: note = Description of Artificial Sequence: Synthetic coding sequence
  source 1..1161: mol_type = other DNA
atggaggacgagatgcccaagaccctgtacgtgggcaacctgagcagggatgttacagaagcactgatcctccaattattctcacaaataggaccgtgcaagaactgtaaaatgattatggacactgctggcaatgatccctactgctttgttgaatttcatgagcatcgtcacgccgccgccgccctggcagccatgaatgggcggaagattatgggcaaggaagtcaaagttaattgggccaccacacccagttcacagaagaaggacacaagtagctctactgttgttagcactcaacggtcccaggaccacttccatgtgttcgtaggtgacctcagccctgaaatcacaacagaagacataaaagccgcctttgctccatttgggcggatctcggatgccagggtggtcaaggatatggccactggcaagtctaagggttatggctttgtttcattcttcaacaaatgggatgctgaaaacgcaattcaacaaatgggaggccagtggctgggtggccgacagattcgcaccaactgggccacccgaaagcctccagctccaaagagtacgtacgagtctaacaccaagcagctttcctatgatgaggtcgtgaatcaatcaagcccctctaactgcactgtctactgtggtggggttaccagtggactaaccgagcagttgatgcgccaaaccttcagcccgttcgggcagataatggaaatacgagtgttcccagacaaaggctactccttcgtacgcttcaacagtcacgagtctgcagcccatgccatagtaagtgtcaatggcaccaccattgagggtcacgtcgtcaagtgctattggggaaaggagaccttggacatgatcaaccccgtgcaacagcagaaccaaattgggtacccacagccgtatgggcaatggggtcaatggtatggcaacgcacaacagatcggacagtatatgccaaatggctggcaagtgcccgcatatgggatgtatgggcaagcctggaatcagcagggctttaatcagacacagtcctcagccccgtggatggggcctaactacggggtccagccccctcagggccagaatgggagcatgcttccaaatcagccaagcggctacagagtcgcaggctacgagacccaatag

SEQ ID NO: 208705 - DNA, 1392 bp, synthetic construct
  misc_feature 1..1392: note = Description of Artificial Sequence: Synthetic coding sequence
  source 1..1392: mol_type = other DNA
cccctggtgagccgggagacccccctgagctgcagccacaaccggctcaatgatttgggcggcagtgagggacagggtgccggccccggtggggctgccgccacggccgccgccatggaggacgagatgccaaagaccctgtacgtcggtaacctttcaagagatgttacggaagctttgattcttcagctctttagccagattggcccctgcaagaactgcaaaatgatcatggacacagctggcaacgacccatactgctttgtggaatttcatgagcacaggcatgccgccgcagctctggcggcaatgaacggcagaaaaatcatgggaaaggaggtgaaagtaaattgggcgaccacacctagtagtcaaaagaaagacacaagctcatccacggtcgtcagtacccagaggtctcaggaccacttccacgtgttcgtcggcgaccttagccctgaaataactacagaggacatcaaggccgcctttgcccccttcggccgtataagcgacgcgcgagtggtcaaagatatggccactgggaagtcaaagggttacggattcgtgtccttctttaataaatgggacgccgagaacgccatccagcagatgggcgggcaatggctcggtggcaggcagatcaggacaaactgggctacccgcaagccacccgcccccaaaagcacctacgagtgcagatgcatcggcgaggaaaaggaaatgtggaattttggggagaaatatgctcgcttttgctcacgtcgcttgatcgccgagattgatgaaaagcagattaaaacaactattcagaagtcaaacacaaaacagctctcatatgatgaggtcgttaatcagtcaagtccctcaaattgtactgtgtattgcggaggagtgacgtccggacttaccgagcaactgatgcggcagacgttctctccctttgggcagataatggagattagggtctttcccgacaagggctatagctttgttaggttcaatagccacgaaagcgccgcccatgccatcgtgtccgttaacggcacaacaatagagggacacgtggtgaaatgttattggggcaaagagaccctggacatgatcaaccctgtgcagcaaaatcaaataggataccctcaaccttatgggcagtggggccagtggtatgggaatgcccagcaaatcggtcagtatatgccaaacggctggcaggtgcctgcttatggaatgtacggccaggcctggaatcagcaagggttcaaccagactcagtcatctgccccttggatggggcccaattacggcgttcagcctccacagggacagaacggaagtatgctcccaaatcaaccctctgggtatagggtcgcgggctacgaaactcaatag

SEQ ID NO: 208706 - DNA, 258 bp, synthetic construct
  misc_feature 1..258: note = Description of Artificial Sequence: Synthetic coding sequence
  source 1..258: mol_type = other DNA
atgatcaccgagcacaccagcaacgacccctactgcttcgtggagttttacgagcaccgggacgccgctgcagccctagccgccatgaacggcaggaaaatactgggcaaagaagtgaaagttaattgggccactacccccagcagtcagaagaaagatacgtctaatcacttccacgtattcgtgggcgatttgagtcccgagatcaccacagaggacatcaaatccgcttttgctccattcggcaagatctcgtag

SEQ ID NO: 208707 - DNA, 759 bp, synthetic construct
  misc_feature 1..759: note = Description of Artificial Sequence: Synthetic coding sequence
  source 1..759: mol_type = other DNA
atggacgcccgggtggtgaaggacatggccaccggcaagagcaagggctatggttttgtctccttctacaataaactggatgcagagaatgcgatagtgcatatgggaggccagtggctgggaggccgacaaattcgcaccaattgggcaaccaggaagccccccgcacctaagtcaacgcaggagaataataccaagcaactgcgattcgaagatgtagtaaaccagagtagccctaagaattgcaccgtgtattgcggagggatcgcctcaggactgactgaccagttgatgagacagacttttagtccatttggccagataatggagattagagtgtttccggagaagggatacagcttcgtgagattcagtacgcatgagtctgcagcccacgccattgtctccgttaatggaaccacaattgagggacatgttgtgaaatgttactggggaaaggaatcacctgacatgacaaagaacttccagcaggtggactactctcagtgggggcaatggtctcaggtctacgggaaccctcagcagtatgggcaatatatggccaacggatggcaggtaccgccttacggagtctacgggcagccttggaaccagcaggggttcggggtggatcagtcgccctctgctgcctggatgggcggatttggcgcacagccaccccagggtcaggcaccccctccagtcattccacctccaaaccaggccggatacggcatggcttcatatcagacccagtag

SEQ ID NO: 208708 - DNA, 1179 bp, synthetic construct
  misc_feature 1..1179: note = Description of Artificial Sequence: Synthetic coding sequence
  source 1..1179: mol_type = other DNA
atgatggaggacgacggccagccccggaccctgtacgtgggcaacctaagccgggatgtaacagaagtccttattttgcagcttttctcccaaatcggtccctgtaaatcatgtaagatgatcacagaacagccagactccagacgagttaatagctccgtgggcttttccgtgctgcagcatacctctaatgacccatactgcttcgtagagttctacgaacaccgcgatgcagcagccgcactggcggcaatgaatggcagaaagatccttggcaaagaagttaaagtgaattgggctaccacaccaagtagtcagaagaaggatacaagtaaccacttccacgtcttcgttggcgacctgtcccctgaaatcactactgaagacataaaaagcgccttcgcccctttcggaaagatcagtgacgccagggtcgtcaaagatatggctaccggcaagagcaaaggatatggtttcgttagtttctataacaagcttgacgccgaaaatgccatcgtccacatgggcgggcagtggctcggaggccgccagatacggacaaattgggcaacaagaaagccaccagcccccaagagtactcaagaaaacaatacaaagcagcttaggtttgaggacgtcgtgaaccaatcttcacctaagaattgcaccgtctactgcgggggaattgcatctggtctgacggatcagcttatgagacagacattttctcccttcgggcagattatggaaattcgcgttttccctgagaagggatacagctttgtgcggttttctacacatgagtcagcagcccatgcaatcgtgtcagtgaatgggacaactatagaaggtcacgttgtgaaatgttattggggtaaggaatcaccagatatgacaaaaaattttcagcaggttgattacagtcagtggggacagtggagccaagtatatggcaatcctcagcaatatgggcagtacatggctaatgggtggcaggtccctccctatggggtatacggccagccttggaaccagcaaggctttggagtggaccaatctccaagcgctgcctggatgggcgggttcggagcccagcctccacaggggcaggcacctcctccggtcatccccccacctaaccaggcagggtatggaatggctagctaccagactcagtag

SEQ ID NO: 208709 - DNA, 399 bp, synthetic construct
  misc_feature 1..399: note = Description of Artificial Sequence: Synthetic coding sequence
  source 1..399: mol_type = other DNA
atgatcaccgagcacaccagcaacgacccctactgcttcgtggagttttacgagcaccgagacgcagcagcagccttggctgccatgaacggtaggaagatattgggcaaggaagtgaaggtgaactgggctacaacaccttcctcgcagaagaaggatacaagtaaccactttcacgtgtttgtcggtgatctatctccggaaattaccaccgaggacatcaaatccgcgtttgctccctttgggaaaatctcagacgccagagtggtaaaggatatggctacaggaaagagtaagggttacggttttgtgagtttctataataagctggatgccgaaaacgcgattgtccatatgggggggcagtggctgggcgggcgccagattcgaacaaattag

SEQ ID NO: 208710 - DNA, 1128 bp, synthetic construct
  misc_feature 1..1128: note = Description of Artificial Sequence: Synthetic coding sequence
  source 1..1128: mol_type = other DNA
atgatggaggacgacggccagccccggaccctgtacgtgggcaacctatctcgggacgtcactgaggtgctaatactgcagttattctcacagatcggaccatgcaagagttgcaagatgatcacagaacacacttctaatgacccttattgctttgtcgagttctacgaacacagagacgcggcagctgccctagccgctatgaacggccgcaaaattttaggcaaggaagtgaaagtaaactgggctactacaccttcttctcagaagaaagacactagcaaccacttccatgtgtttgtgggagatctgagccctgaaatcaccactgaggacatcaaatctgcctttgcccctttcggcaaaatttcagacgctagagtggtgaaagatatggccaccgggaaatctaagggatacggattcgtttctttttataacaaattagatgcggagaacgccatcgtacatatgggcggacagtggctcggcgggagacagatcagaaccaattgggcaactcgaaagcccccggcacccaaatcgactcaagaaaataacacgaaacagctgcggttcgaagacgtcgtgaaccagtctagcccaaaaaactgtacggtgtattgcggcgggatcgcctctgggctgactgaccagctaatgcgccaaaccttttctccttttgggcagataatggagattcgggttttccctgaaaaaggctattctttcgtgcgctttagcacccacgaatcagccgctcacgctattgtgtcagttaacgggacgactatagaggggcatgtagtcaaatgctattggggcaaagaaagcccagacatgaccaaaaatttccagcaggtggactattcccagtggggacagtggtcacaagtgtatggtaacccccagcagtacggacagtacatggcgaatggctggcaagtgccaccctatggtgtatacgggcagccatggaatcagcaaggatttggtgtcgaccagtcccccagtgccgcatggatgggagggtttggcgcacagcccccacaggggcaggcccctcctcccgtgattccccccccaaaccaggccggatacgggatggcctcgtatcagacacagtag

SEQ ID NO: 208711 - DNA, 1776 bp, synthetic construct
  misc_feature 1..1776: note = Description of Artificial Sequence: Synthetic coding sequence
  source 1..1776: mol_type = other DNA
atggccagcaagtgcagcagcgagcggaagagccggaccagcctgacactaaaccagaaactcgaaatgatcaagctgtcagaggaaggaatgtccaaggctgagatcggcaggcggttgggattgttgcgtcagaccgtgagtcaggtggtgaacgcgaaggaaaagttcttgaaagaagtgaagtccgccactcccatgaacacgcgcatgatcagaaagagaaattctctcatcgcagacatggagaaggtacttgtggtgtggattgaagatcagacttcccggaacattcccctttcgcagtctctgatccagaacaaagcactgacactgttcaactcaatgaaagccgagcggggggtcgaggcagctgaagaaaaattcgaagcatcacgcggctggtttatgagattcaaggagagatcacatttccataatattaaggcccaaggggaggctgcaagcgcagatgtggaggcggccgccagttatcccgaggctctcgctaaaattatagacgaaggcgggtacacgaagcaacagatcttcaatgtggatgagacagctttctactggaaaaaaatgccaagcagaaccttcatcgctcgcgaggaaaagtccgtacctggcttcaaggcttccaaggatagactcacccttctattgggtgccaatgccgctggggactttaaactaaaaccaatgctaatttatcactccgaaaatcctagggcattgaaaaactataccaaaagcactttaccagtgttgtataaatggaatagcaaagctcggatgaccgcccatctgttcactgcttggttcacagaatacttcaaacctacagtggaaacctactgttctgagaagaagatcccttttaagatcctgttgttaatcgacaatgcaccctcgcacccaagggctctgatggagatttacgaagagattaatgttatatttatgcccgctaatacaaccagtatcttacagcctatggaccagggcgtgatctccactttcaagagttactacctgaggaatacctttcataaagcactagcggccatggacagtgatgtgtcggacggaagcgggcagtccaaattaaaaacattctggaaaggcttcaccatcctggacgccatcaaaaacatccgcgactcctgggaggaggttaagctgtctacactgacaggcgtgtggaaaaagttgattcctacgttgatagacgattacgaagggtttaaaacctccgtggaggaggtcagcgcggacgtagtggaaatagcaaaagaactcgaattggaagtggaaccagaggacgtcacagagctgctgcagagccacgataaaacactgactgacgaggagcttttcctcatggacgcacaacgcaaatggttccttgaaatggagagcactcccggcgaggacgcggtgaatatagttgaaatgacaaccaaagacctggaatactacatcaatctcgtcgataaagccgccgcaggcttcgaacgtatagatagtaactttgaacgcagctccactgtggggaagatgctgagcaacagtatcgcttgctaccgagaaatcttccatgagagaaagtcccagctcatgaggaaagcctcaccaatgtcttatttcaggaaactgccacagccaccccagcctagcgctgctactaccctcacaagtcagcagccatccactagcagacaggacccaccccccgccaagcgggtgcgtctcaccgaggggtctgattag

SEQ ID NO: 208712 - DNA, 1578 bp, synthetic construct
  misc_feature 1..1578: note = Description of Artificial Sequence: Synthetic coding sequence
  source 1..1578: mol_type = other DNA
atgctgggcaagcggaagcgggtggtgctgaccatcaaggacaagctcgatatcatcaagaaattggaagaggggatctccttcaagaaactcagcgtggtgtacggcatcggggagtccacggttcgggatatcaaaaagaataaagaacgcatcatcaattacgccaactcttccgacccaacatctggcgtctcaaaacgaaaaagcatgaaatcatcgacttacgaggagctcgaccgcgtcatgatagaatggttcaatcagcaaaagactgatggcatccctgtatccggaactatctgcgcgaagcaggccaagtttttctttgacgccctgggaatggagggagacttcaacgcgagctctggctggctgacgcgcttcaaacagaggcacggcattcccaaggcagcgggaaaaggcaccaaactgaagggagacgaaacggccgcacgggagttttgtggcagctttcaggaatttgtagagaaagaaaatctacagcccgaacagatatatggagccgaccagacaggactgttctggaagtgcctgcccagccgcacccttacattagagaccgaccagtccacgtctgggtgccggagtagccgagagaggatcatcatcatgtgctgcgccaacgccacaggactccacaagctcaacctgtgtgtcgtggggaaggcaaaaaaacctcgggcctttaagggtaccgacctgtccaatctcccggttacatactattcgcagaaaggtgcctggatagaacagtcagtgtttcgccagtggttcgaaaaatatttcgtcccccaagtgcagaagcatctcaagtccaagggccttctcgaaaaggctgttttgctcctcgattttccacctgctcgacctaatgaggaaatgttaagcagcgatgatggcagaattattgtaaagtatctgccaccaaacgtgacctctcttatccagcccatgagccagggcgttcttgccaccgtcaagagatattatcgagccggcctcttgcagaaatacatggacgagggcaatgacccaaaaatcttctggaagaacttaacggtcctagatgccatctatgaagtatcacgggcatggaatatggtcaagagcagtactattactaaagcctggaaaaaattattccccggaaatgaagagaattctggaatgaacatagatgagggagcaattctcgcagctaatctggcaaccgtattacagaataccgaggagtgcgagcatgtcgacattgagaatatcgatcagtggttcgattcccggtcttctgacagcagctgccaggtgctgacagattcagaaagcgctgaggatcagaccaaggccgccgagcagaagccgagctccaagagtcgcaaaaccgagctcaatccggagaagcacatttcacacaaagccgccctcgagtggactgagaacttactagactacctggaacagcaggatgacatgctgctctctgacaaactagttctgagaagactgagaaccataattaggaagaagcagaaaattcagaataataagaaccattag

SEQ ID NO: 208713 - DNA, 1650 bp, synthetic construct
  misc_feature 1..1650: note = Description of Artificial Sequence: Synthetic coding sequence
  source 1..1650: mol_type = other DNA
atgaacaagcggggcaagtacaccaccctgaacctggaggagaagatgaaagtcctgagtagaattgaggccggccgttcactgaagagcgtcatggacgagtttggtatctctaagagtaccttctacgacattaaaaagaacaaaaaattaatcctggatttcgtgcttaagcaggatatgccactggtcggagccgagaagagaaaacgcacgaccggcgccaagtatggcgatgtggatgatgccgtttacatgtggtatcagcagaaacggagcgccggggtgcctgtgaggggcgtggagctccaggcggctgcagaaaggtttgcacgctgcttcggaagaacggactttaaggcctctactggctggctcttcaggttcaggaatcgtcacgcaatcggaaacagaaaaggatgtggggagcaggtactttcatccgtctccgagaacgtggagcctttccggcagaagttgtccatgattatcaaagaggagaagctttgtctggcacagttgtattccggggacgaaaccgacctgttttggaaatccatgccagagaattcgcaagccagcaggaaggatatctgcttaccaggaaagaaaattaataaggagagactatcggctttcctgtgcgcaaatgctgatggcactcataagttaaagagtatcatcatcgggaagtcaaagttgccaaaaagtgtaaaggaggatacttctactttgcccgttatatataaaccctctaaagatgtgtggttcacgagagaattatttagcgaatggtttttccaaaattttgtaccagaggttcgacactttcaactcaatgtactgcgttttcacgatgaggatgtgcgggcgctgcttctcttggacagttgtcccgcccatcccagctcagagtccctgacatctgaggacggcaggattaaatgcatgtttttcccccacaacacgtcaacgctcatacaacctatgaaccaaggggtgattttgagctgtaagcggttgtatcggtggaaacaactcgaggagagcctagtcatcttcgaagaaagcgacgatgagcaggaaaaaggcgacaaaggtgtctctaaaataaagatttataatatcaagtccgctatcttcaactgggccaaatcctgggaggaggtgaaacagatcaccattgctaatgcctgggaaaacctactgtataagaaagagcccgaatatgatttccagggcctggagcatggcgattatagagagatcttagagaaatgcggcgaactggagacaaagttggacgacgaccgagtgtggttaaatggcgatgaagagaaaggctgcctccttaaaaccaagggcgggattaccaaagaagtcgtccagaaggggggcgaggctgagaaacagaccgcggagttcaaactgagtgcagttcgtgagagtcttgactatttgctggactttgtggatgccactcccgagtttcaaagatttcactttaccctgaaagaaatgcaacaggaaatagtcaaaaagcagtttcaatccaaaattcacagtcgcatcggaagcttcctaaaaccgcgcccgcacaacatcaaggatagctttagcggaccaagcacctctggtagtaatcactag

SEQ ID NO: 208714 - DNA, 1650 bp, synthetic construct
  misc_feature 1..1650: note = Description of Artificial Sequence: Synthetic coding sequence
  source 1..1650: mol_type = other DNA
atgaacaagcggggcaagtacaccaccctgaacctggaggagaagatgaaggtcttgtcccgtatcgaagcaggtcgttccctcaagtcagtcatggatgagtttggcatcagtaagtccactttttacgacatcaagaaaaataaaaagctaatcctagattttgtattaaagcaggacatgccgctggtgggggcagaaaagaggaagagaacaacaggagctaaatatggcgacgtggatgatgccgtatacatgtggtaccagcagaagcgaagtgcgggcgtacctgttaggggcgtcgagttgcaggccgccgcggagaggttcgcccggtgcttcggccgtactgatttcaaagctagtaccggctggctgttcagattccgaaacaggcatgccattggcaaccggaagggctgtggtgaacaggtgctgtcgtccgttagcgaaaacgtggagccttttcggcaaaaattatcaatgatcatcaaagaagagaaattgtgtttggcccaactttattctggagatgagacagacttattctggaagagtatgccagagaatagtcaagcctcgagaaaagacatctgcctgcccggcaagaagattaacaaggaacgcttatctgcatttctgtgtgccaacgccgatgggacccacaagctcaagagcataatcataggcaagagcaaactgcctaagtctgtgaaagaggatacgtctacacttccagtgatttataagccatcaaaggatgtgtggttcacgcgtgaactcttctcggaatggtttttccagaacttcgtgcctgaagtacggcactttcagctaaatgtgctccgattccacgacgaggatgtacgagcgctgctcctgttggactcctgccctgctcacccctcaagcgagtcactgaccagcgaagatgggcgaattaagtgcatgttctttccccataatacatcaacgctgattcagcccatgaatcagggagtaattctctcctgcaagcggctgtaccggtggaagcaactggaagagagcctggtgatcttcgaagaatccgacgacgagcaagagaagggtgacaagggggtcagcaaaattaagatatacaatatcaaaagtgcaatctttaattgggccaaatcctgggaggaagtaaagcaaatcactatagccaacgcctgggagaaccttctgtacaagaaagagccagagtacgatttccagggactcgaacacggtgattatagggagattttggaaaagtgcggtgagctggaaactaagttagatgacgaccgagtctggctgaatggagacgaggagaaaggttgcttgcttaaaaccaagggaggtatcacgaaggaggtggtgcagaaaggaggtgaagctgaaaaacagacagcagagtttaaactgtctgctgttagggagtcgctggattacctcctagacttcgtggacgcaacgcccgagttccagcgattccacttcactttgaaagagatgcagcaggagattgtgaagaagcaatttcagtctaagattcattctcggattggttcatttttaaaaccccgtccacacaatatcaaggattcattttccggcccctcaacttctggatctaaccattag

SEQ ID NO: 208715 - DNA, 1536 bp, synthetic construct
  misc_feature 1..1536: note = Description of Artificial Sequence: Synthetic coding sequence
  source 1..1536: mol_type = other DNA
atgaacaagcggggcaagtacaccaccctgaacctggaggagaagatgaaggtactgtcaaggattgaagccggccggagtctcaagagcgtgatggacgagttcggtatctccaagagtaccttctacgacatcaagaagaacaagaagctaattttggactttgtcctgaaacaggacatgcccctcgtcggggccgagaaaaggaagcggacaactggcgcgaagtacggagatgtggacgacgctgtttacatgtggtaccagcagaaacgatctgcaggtgtgcccgtgaggggagtcgaacttcaagcagctgcagaacggttcgcaagatgctttgggaggactgacttcaaagcttctactggctggctcttccgattccggaatcgtcacgcgatcggcaataggaaaggctgcggtgagcaagtgctttccagcgtctccgaaaacgtggaaccatttcgccaaaaactgtcgatgatcataaaagaagaaaagctgtgcctggcccagttatactctggcgatgaaaccgatctgttttggaagagtatgcccgaaaactcccaggcttcacgaaaagatatatgcctgcctgggaagaagatcaacaaggaaagattatctgcatttctgtgtgccaatgccgacggaacacacaagctgaagtctatcatcattggtaagagcaagctgcctaaaagcgttaaggaggatacatctaccctccccgttatttataaaccctccaaagatgtctggtttactcgagaactgttttcagagtggttcttccaaaatttcgtccccgaggtgagacactttcagctgaatgtactgcgcttccatgacgaggacgtcagagccctgctcttgctcgatagttgtcccgcacacccatcttctgagtcactgacaagcgaagacggcaggatcaagtgcatgttcttcccacacaacacctcaaccctgatccagcccatgaatcaaggcgtgattcttagctgcaaacgtctgtaccgttggaagcagctggaagagtcactggttatttttgaggaaagcgacgatgagcaggaaaagggggataagggcgtctcaaagatcaagatctacaacataaaatcagccatttttaattgggcaaaatcttgggaggaagtgaagcaaattactatcgccaacgcctgggagaatcttttatataaaaaggagcctgagtacgattttcagggcttggaacacggtgattatagggagattctggagaagtgtggcgaactggaaaccaagctggatgatgacagggtatggctcaacggagatgaagagaaaggctgcctgctgaagaccaagggagggatcactaaagaggtcgttcagaagggcggggaggccgagaagcagaccgccgaatttaaactgtccgcagtgagagagtctctcgactacctactcgactttgtcgacgctacaccagaattccagagattccattttaccctgtgtgagttttctgacgatagctag

SEQ ID NO: 208716 - DNA, 1644 bp, synthetic construct
  misc_feature 1..1644: note = Description of Artificial Sequence: Synthetic coding sequence
  source 1..1644: mol_type = other DNA
atgaccagcgccgcccccgccaagaagccctaccggaaggccccccccgaacatcgcgagttgagactggagatcccgggaagtcgtttggagcaggaagaacccctgaccgacgcggaacgtatgaaactcctacaggaagaaaacgaagagctgcgccgccgtttggcctccgctacaagaaggacagaggctctggagagggaactggaaattggccaggattgcttggaattagagctgggtcagtcacgcgaggaactggataaatttaaggataaattccgccgtttgcagaattcttacaccgcgagccaacgcacaaaccaggagctggaagataagctgcataccctcatcaaaaaggcagagatggatcgaaaaaccttagactgggagatagtagagttgactaataaattactagatgcaaagaacaccatcaacaagttagaggagctgaatgagcgctaccgtctcgactgtaacctcgccgtccagttgctgaaatgcaataaatcgcactttagaaatcacaaattcgcagacttgccttgcgaacttcaagatatggtccgaaaacatctgcactccggccaagaagccgcctctcccggtccagccccctccttagctccaggtgctgtagtgcctacgtctgttatcgccagggtgctggaaaagcctgagtccctactcctgaacagcgcccagtccggctctgctggcagaccattagccgaggatgtgtttgtgcacgtggatatgagcgagggagtacccggggatcccgcgtccccaccggctccgggctcgccgactccacagcctaatggagagtgccattctctggggacagctaggggttcacctgaggaggaactcccgctgccagccttcgaaaaactcaatccatatcccacacccagcccacctcatcccctatatccagggagaagggtgatcgagttcagcgaagataaggtccggattcctagaaacagtcctcttccaaattgtacgtacgccactcgccaagcgatcagcctgtctcttgtcgaagagggctctgaaagggcaaggccatctccagtccccagtacccccgccagtgctcaggcctccccacatcatcagcctagccctgcacccctgacgctttccgcaccagcctcctctgctagcagtgaagaagatcttctggtgtcctggcaacgagcgtttgtggacaggacacctccgccggccgcagtagcgcagcgaacagctttcgggcgggatgctctgcccgagctgcaacgacacttcgcgcattcgcctgccgatcgcgacgaagtggtccaggccccaagcgctaggcccgaggaaagcgaactgctgctgcctacggagccggactctgggttcccgcgcgaggaggaggagctgaatcttccaatctctccagaggaagagcgccagtctctcctacctattaatcgaggcacagaagagggcccaggaaccagtcatacagagggccgggcgtggcctctgccttcttcgagccgcccgcagagatcccccaagcgcatgggagtgcatcatctgcaccggaaagacagtctaactcaggcacaagaacagggcaacctgcttaactag

SEQ ID NO: 208717 - DNA, 1644 bp, synthetic construct
  misc_feature 1..1644: note = Description of Artificial Sequence: Synthetic coding sequence
  source 1..1644: mol_type = other DNA
atgaccagcgccgcccccgccaagaagccctaccggaaggcccccccagagcaccgcgagctccggctggagataccaggtagtcgcctggagcaagaggaaccactaactgatgccgagcgcatgaagttactgcaggaggagaatgaggagctcagaagacgcttagcgagcgctactaggagaacagaagctttagagagagagctggaaataggacaagactgccttgaattggagctgggtcagtctcgggaggaactagataaatttaaagacaagttcaggcgcctgcaaaactcttatacagccagtcagaggaccaatcaggagttagaggataaacttcacacattaatcaaaaaagccgagatggatcggaagacgcttgattgggagatcgtagaactgacaaacaaactgctggacgctaagaacaccatcaacaagctggaggaactgaacgagagatataggcttgactgcaatctcgccgtgcagttacttaagtgcaacaaatctcacttccggaaccataagttcgccgatctgccatgcgagctgcaggacatggtgaggaaacatctgcattcagggcaggaagccgccagtcctggtcccgctccctctttggccccaggggctgtggtgccaactagtgtcattgctcgcgtactggagaagcctgagagcctgctgttaaactctgctcaatcaggctctgccggaaggcctctggctgaagatgtgtttgtgcatgtggatatgagtgagggcgtgcctggcgatcctgcatcccctccggcgccaggctcacccacacctcaaccaaacggggagtgccattctctcggcacagcccgagggagtcctgaagaagaattaccactacctgcattcgagaagttaaatccctatccaactccaagcccgccccatcccctctatcccggccggagggtcatagagtttagtgaggacaaagtgcggattccccggaattctccactgcctaactgcacatatgcgacaagacaagcaatctctctgagcctggtggaagaagggagcgaacgggccagaccatcacctgtgccatccacgccggcctccgcacaagcttcacctcaccatcagccatcacctgcccccctgacattgagcgcacccgcctcttctgcctcgagcgaggaagaccttctggtcagctggcagagggccttcgtggatcgaaccccaccccctgccgctgtcgcgcaacggacagccttcggaagggacgccctgcccgaactgcagcgccacttcgctcactccccagccgaccgcgacgaagtcgtgcaggctccttcagcacgccctgaggagagtgagctcctgcttcccacggagccagattcggggtttcctcgggaagaggaagaattaaatctaccaatctctcctgaggaagaacgacagtccctgcttccgattaacagaggaacagaggaggggcctgggacttcacatacagaaggccgggcctggcccctgccgagctccagtaggccccagaggtccccaaagcgtatgggtgtgcaccatctgcaccggaaagatagtctgacccaggcccaggaacaagggaatctcctgaactag

SEQ ID NO: 208718 - DNA, 1674 bp, synthetic construct
  misc_feature 1..1674: note = Description of Artificial Sequence: Synthetic coding sequence
  source 1..1674: mol_type = other DNA
atgaccagcgccgcccccgccaagaagccctaccggaaggccccccctgagcaccgcgaacttcggctggaaatcccagggtcgcggctcgagcaagaagaacctcttaccgatgccgagcgtatgaagttgttacaagaggagaatgaggagctgcgccgccgacttgcgtcggcaacgcgcagaactgaagccctggagagagagctcgaaatcgggcaagattgcctggagctggagctgggccagtcacgagaggagctggataaattcaaagacaagttcaggcgcctgcagaacagctatacggcgtcgcagcggaccaatcaggaactagaggacaagttgcatactctggccagcctcagtcactcttggatcttcgccataaagaaagcagagatggacaggaaaacgctggactgggagattgtcgagctgacaaacaagcttctagatgctaaaaacaccataaacaaattagaagaactgaacgagcgctatagactggattgcaatttggcggttcagcttctgaaatgtaataagtcacatttccgaaaccataaatttgcagacttaccttgcgaactgcaggatatggtgcgcaagcacttgcatagcggacaggaagccgcctcacctggcccagcaccttctcttgcccctggcgcagtggtgcctacatcagttattgcgcgggtgctcgaaaagccagaaagcctgctgctcaactctgcccagtcaggaagcgccggcagaccattagcagaggacgtgttcgttcatgttgatatgtccgaaggggtgcccggagatcctgcctcgcctcccgcccccggctcaccaactcctcagcctaatggagaatgccactccctcggcacagcaaggggcagccctgaggaagagctccctctgcccgcttttgagaagctcaatccttacccaacaccttccccaccacaccccctctatcccggtaggcgagtaatcgagttttctgaggacaaggttcggatcccacgcaatagtcctctgcccaactgtacctatgctacccgccaggctatttctctgtcgctcgtggaagagggaagcgagcgggcccgtcccagccctgttccttcaacccccgcctccgcccaggcttcaccccaccaccagccatcaccggcccccctgactctgagcgccccggccagctcagcttcaagtgaggaagacttactagtgtcctggcaaagggcttttgttgatcggactcccccaccggccgctgttgcgcagagaacagcattcggtcgggatgcacttcctgagctccagcgacacttcgcgcattctccagccgacagagacgaggtggttcaggccccaagcgcacggcccgaggagtcagagctccttctgcctactgagccggattccggattccccagggaagaagaagaactgaacctgcctatttctcccgaagaggagcgacaatccttactgcctatcaaccgggggaccgaagagggacccggcactagtcacacagagggcagggcatggcctctcccaagcagctcacgcccacaacgatcccccaagcggatgggagttcatcaccttcacagaaaagactccctcactcaggctcaggagcaaggaaatctgctcaattag

SEQ ID NO: 208719 - DNA, 1674 bp, synthetic construct
  misc_feature 1..1674: note = Description of Artificial Sequence: Synthetic coding sequence
  source 1..1674: mol_type = other DNA
atgaccagcgccgcccccgccaagaagccctaccggaaggcccccccggagcatagggagcttcgcctcgagatcccaggaagtaggctggagcaagaggaacccttaaccgatgcagaacggatgaaactgctgcaagaagagaacgaggaattacggcgacgcctggcctctgccaccaggcgcactgaggcgttagaaagggaactcgaaattgggcaagattgcctggagctagagctgggtcagtcacgagaagaactggataagtttaaagacaagtttagaagactccagaatagctacacagccagccagaggaccaaccaagagttggaggataaattgcacacacttgcttctctgtcacattcttggatttttgcaattaagaaagcagaaatggaccgtaaaaccctcgattgggaaatagtcgagttaacaaacaaactgcttgacgcgaagaataccatcaataagctcgaggaactaaatgaacgctaccgcctcgactgtaacttagccgttcaactgttaaaatgcaacaaatcccacttccgcaatcataagtttgcagatctaccctgtgagctgcaggacatggttagaaaacacttgcatagcggccaggaagccgcaagccccggccccgccccctctttggcgcccggagctgtggtccccacttccgttatagcacgcgtgttagaaaaaccagagtccctcctgctcaactctgcccaatctggcagtgccggacgccccttagctgaagatgtctttgttcacgtggatatgtccgagggcgttccaggtgacccagcctctccacctgcacctgggtcacccacaccccaaccaaatggggaatgtcattccctgggcacggcccggggcagccctgaggaagaactgccgctacccgcattcgagaagctgaacccttaccccactccctcccctccccatcccttatacccagggaggcgtgtgatcgagttttcagaagataaagttcgtatccccaggaattctcctcttcccaattgtacatacgctactcggcaggcgatttcgttgtctctggtcgaggaagggagcgaaagagccaggccttcaccagtgccatcaactcctgccagcgcccaggcttccccacatcaccagccgagccccgcaccactgaccctttctgctcctgccagctccgcatcctctgaggaagaccttttggtgtcgtggcaacgagcctttgtggaccgcacccctccccctgccgccgtagctcagagaactgctttcggcagggatgcattgcccgagctgcagcgccactttgcacactccccagcagatcgggatgaggtcgtgcaggccccgtcagctaggcccgaagagtcagagcttttgttaccgacagagcctgactcaggatttccacgcgaggaagaggagttgaatctgcctatttcaccggaagaagaaaggcagtctctgcttcctattaatcgcgggacagaagagggccccggaacaagtcatactgaaggcagagcctggcctctgccttcaagtagccggccacagaggagccctaagcgcatgggcgtccatcacctacatagaaaagattcactgactcaggctcaggaacagggaaatttactgaactag

SEQ ID NO: 208720 - DNA, 1644 bp, synthetic construct
  misc_feature 1..1644: note = Description of Artificial Sequence: Synthetic coding sequence
  source 1..1644: mol_type = other DNA
atgaccagcgccgcccccgccaagaagccctaccggaaggccccccctgagcacagggaacttaggctggagattccaggttcaagactcgagcaggaggaacccttgacagacgctgaacggatgaaactgcttcaggaggagaacgaggaacttcgccgcagactcgcctcggccacccgacgcacagaggcactcgagagagagctcgagattggacaagactgtctcgagctggagctgggtcagtcgagagaggaactggacaagttcaaagacaaatttcgtagactccagaatagctatacagctagtcagaggacaaatcaggagttggaggacaagctgcacacccttattaagaaggctgaaatggatcgtaagaccttagattgggagattgtggaacttacgaataaactcctggacgcaaagaataccatcaacaagctagaagagttaaatgagaggtatagattggattgcaatttagccgtgcagctacttaagtgcaataaaagccactttcgaaatcataagttcgccgatctcccatgtgagcttcaagacatggttcgtaaacatttgcatagtgggcaggaagcggcctcacccgggcccgctcccagcctagccccaggagctgttgtgcccacttctgtgattgcgcgagtcttagaaaagcccgagtcgctcctgctcaactctgctcagtccgggagcgctggccgccccctggccgaagatgtgttcgtacatgtggacatgtctgaaggagtgcccggagacccggccagtcctcctgctccaggatcaccaacacctcagcccaacggagaatgccactccttagggactgcccgcgggtccccggaggaagaattacccttgcccgcttttgaaaagctaaacccgtaccccacaccttcaccacctcacccgctctatcccgggagaagggtgatcgagttctccgaagataaagtgagaatcccaagaaactcaccgcttccaaactgtacctatgccacgcggcaggccataagtctatccttagtcgaagaggggagtgaaagggcgagaccatctcccgtaccaagcacacccgcttcagcgcaagccagcccacaccaccagccctctcccgcccccctgacactcagcgcccccgcaagtagtgcttcctccgaagaggacctccttgtgtcgtggcagcgcgcatttgtggaccgcaccccccctcccgcagctgttgctcaaaggaccgcatttggcagagacgctctgcccgagctgcaaaggcacttcgcacatagtccagcagaccgagacgaagtcgtgcaagctccaagcgccagaccggaggaatccgagctgctcctgcccacagaacccgattcgggatttccaagagaagaagaagagctgaatctgcccattagccccgaggaagaaagacaatctctgcttccaattaataggggaacggaagagggccccgggacatctcacacagaggggcgggcttggccactgccgagctcctcacggcctcagaggtctccgaaacgcatgggagttcaccacctacatagaaaggatagtctcactcaggcgcaggagcagggcaacctgctgaactag

SEQ ID NO: 208721 - DNA, 1644 bp, synthetic construct
  misc_feature 1..1644: note = Description of Artificial Sequence: Synthetic coding sequence
  source 1..1644: mol_type = other DNA
atgaccagcgccgcccccgccaagaagccctaccggaaggccccccccgaacacagggagctgaggttggaaattccggggagtcggctggaacaggaggaaccattaacagacgctgagaggatgaaacttctccaggaagagaatgaggaattacgccggagactggcatcagctacgcgtcgcacagaagccctcgagcgcgagctggagataggccaagattgtctcgaactcgaacttggtcagtcacgggaggagctcgacaaattcaaggacaaattcagaaggctccagaactcttataccgccagccagaggaccaatcaggaattagaggacaaactacacacccttataaagaaagccgaaatggaccgaaagacgctggattgggagatcgtcgaacttactaacaaactgctcgacgcaaaaaacactataaacaaattagaggaactaaatgaacgttacagactagactgcaacctcgccgtgcagcttctgaagtgtaataagagccattttcgcaaccataagttcgctgatttgccctgtgaattacaggatatggtgagaaaacatttgcactctgggcaagaggcggcctccccaggaccggcacccagtctggctcctggggcagtagtgcccactagcgtcatcgcccgcgtccttgagaaacccgagagcctgctgttaaattccgcacaaagtggcagcgccggccgacccttggctgaagatgtgttcgtgcacgtcgatatgtctgagggagttcccggggatcctgccagcccaccagcccccgggagccctacacctcagcccaacggggagtgccacagccttgggacagccagaggctctcccgaagaagagctccctctgcctgctttcgagaaactcaatccctatcctacaccatcccccccccaccccctctatcctggacggagagtcatcgagttttccgaggacaaagtgcgcataccgagaaattctcctcttccaaactgcacctatgcaactaggcaggcaatatctttaagtttggtggaagaggggagtgagcgagccaggccatcgccagtgccttcaactcccgcaagtgcccaggccagtccccatcatcagccatccccagcacccctcaccctctcggcacccgcgagcagcgcaagtagcgaagaagacctgctcgttagctggcaaagagcctttgttgaccggaccccaccgcctgcagctgtggcccagagaacagccttcgggcgagacgccctgcccgaactgcagagacattttgcgcattcacctgccgaccgggatgaggttgtgcaggctccgtccgcccgacccgaagaatccgaactgctgctcccaacagaacctgacagcggatttcctcgggaggaagaagagctgaacctgcctatcagcccagaagaagaacggcagagtttgttgccgattaaccgggggacggaagaggggcccggaacttcccacaccgagggcagggcctggccgttgccatcctcctcacggcctcagcgaagcccaaagcggatgggcgtgcatcatctgcaccggaaggacagtttgactcaggcccaggagcagggaaatctgctgaattag

SEQ ID NO: 208722 - DNA, 1644 bp, synthetic construct
  misc_feature 1..1644: note = Description of Artificial Sequence: Synthetic coding sequence
  source 1..1644: mol_type = other DNA
atgaccagcgccgcccccgccaagaagccctaccggaaggccccccctgagcacagagaactccgactggaaattcctgggagcagactcgaacaggaggagccgctgacggatgctgaaaggatgaaactcttgcaagaggagaatgaagaactgaggcggagactggcaagcgcaactaggaggacagaagccctggagagggaactcgaaatcgggcaggactgtctagaactggagctggggcaaagtagagaagaacttgacaagttcaaggataagtttagaagactccagaattcttataccgcctctcagcggactaatcaggaactagaagacaaactccataccctcatcaaaaaggcggagatggatcgaaagactttggattgggaaatagttgaactgacaaacaagttgctggacgcgaagaacactatcaacaagctggaggaactgaacgagaggtaccggctggattgtaatctcgccgtgcagctgctgaaatgtaacaaaagtcatttcaggaatcataagttcgccgatctgccctgcgagctccaggacatggtccgcaagcatctgcacagcggccaggaagccgctagccccggcccagctccgtcactcgcgcccggggcagtcgtcccaacctctgttatcgcgagggtgctggaaaagccagagagcctgctgcttaattctgcccagtctgggagtgccggaagacctctggccgaggatgtcttcgtgcacgttgacatgtcagaaggagtgccgggtgatccggcttcacctcccgccccggggtctcccactcctcagcccaatggggagtgtcactccctgggaacagcccggggctccccagaagaggagctgcctctccctgctttcgagaagcttaacccataccctactccgagtccaccccatcccctgtaccccggaagacgagtgatcgaattctcagaagacaaagtgcggatccccagaaattccccacttcccaactgtacatatgctacacgacaagcaatcagcctgtccttagtagaagaggggagcgagcgggcccgcccgagtcctgtcccctccacccccgcatcggctcaagcctcgccacaccaccagccgtcacctgccccattaaccctgagcgccccagcctcttccgcttcctccgaagaggatcttctggtgtcttggcagagggcctttgttgaccgcacacctccccccgccgcagtagcccagagaacagctttcggtcgcgatgcactgcctgagctccagaggcactttgcgcactcccccgccgacagagacgaggtggtccaggccccctctgcaagacctgaggaaagcgagctcctcctcccgactgagcccgatagcggcttcccgcgagaagaagaggagctgaacctgcccatcagtcctgaagaggagaggcagtctctgcttccaatcaataggggaaccgaagagggcccaggaacctcccacacagaaggacgagcgtggccactaccgagctctagccggccccaaagatctcctaagcgcatgggtgtgcatcatctgcaccgaaaagactctcttacacaagctcaggaacagggcaacctgctgaattag

SEQ ID NO: 208723 - DNA, 1674 bp, synthetic construct
  misc_feature 1..1674: note = Description of Artificial Sequence: Synthetic coding sequence
  source 1..1674: mol_type = other DNA
atgaccagcgccgcccccgccaagaagccctaccggaaggccccccccgaacacagggaactccggctagagatacccgggtctcgcttggagcaagaagaacccctgaccgatgctgagaggatgaagctcctacaggaagagaacgaggaacttcggcgccggctggcctcagccacacgacgcaccgaggctctggagcgtgagctggagatcggccaggactgcctagagctcgagctcggccagagccgggaagagcttgataaatttaaagacaagttccgccggctgcaaaactcttacacggcatcacagcgaactaatcaggaattggaggataagctccatacgcttgcatcactctctcatagctggatcttcgccattaaaaaagccgaaatggataggaaaacactggactgggagatcgtggagttaactaataagctgctggacgctaaaaacacaatcaataagctggaggaacttaatgagcgataccgactggattgcaacctcgcggttcagctgctgaaatgcaacaaatcacactttcgcaatcataaatttgccgacctgccgtgcgagcttcaggacatggtgcggaagcatctgcactctgggcaggaggccgcctcccccggccccgccccaagtttggctccaggcgctgtcgtccccacatccgtaattgcaagagttctggaaaaacctgagtcattgctgctaaactccgctcagtcgggcagtgctgggaggcctctggcagaggatgtattcgttcatgtggacatgtcggagggggtgccgggagatcccgcttctccacctgcccccggtagtcccaccccgcaacccaacggggaatgtcactcattgggaacggcccgcggaagtccagaggaagaactgccgctgcccgccttcgagaagctgaacccatacccaacgcccagtccacctcacccactgtaccctggcagaagggtgatagagttttctgaagacaaggtgagaataccaaggaactcacctcttcccaattgtacttacgccacgcgccaggcaatctcgttgagcctggtagaagaaggtagcgagcgagcccgcccttctcctgtcccctcaacacctgctagcgcccaagctagccctcaccaccaacccagcccagccccccttaccctgtcggcacctgcctcttctgcctctagcgaggaagatctcctagtgtcctggcaacgtgccttcgtagatagaacaccaccccccgcagcagtcgcacagcgcacggccttcggacgggacgccttacccgaactgcagcggcatttcgctcatagccctgcagatcgggacgaggttgtccaagcgccttccgcgaggcccgaagaatccgagcttcttctccccactgagcccgacagcgggtttccaagagaggaagaggagctgaatttacctatctcccctgaggaggagaggcagagccttctgcccatcaatcgaggcactgaagaggggcccggaacctcccataccgaaggaagagcctggccgctaccttccagttctcgcccccaaaggtccccaaagagaatgggtgtgcatcacctacaccggaaggatagtctaacacaggctcaggaacaaggtaacctgcttaactag

SEQ ID NO: 208724 - DNA, 582 bp, synthetic construct
  misc_feature 1..582: note = Description of Artificial Sequence: Synthetic coding sequence
  source 1..582: mol_type = other DNA
atgaccagcgccgcccccgccaagaagccctaccggaaggccccccctgaacatagggagttgagactcgagattccagggtcccgccttgagcaggaggaacctctcacagatgccgaacgaatgaagctgcttcaggaggagaacgaggaattgcgccggagactggccagcgctaccagaagaacagaagcactggagcgcgaactggaaattggccaggactgtctggagctggagctgggccagtccagagaggagctagataagtttaaggataagtttaggcggcttcagaatagctatacagcaagtcagcggacaaatcaggagctagaagacaagctacacaccctagcctcactgagtcactcctggatcttcgcaattaaaaaggctgaaatggatcgcaaaaccctcgactgggagatcgtcgaactaactaataaactgctggacgccaaaaataccataaataaactggaagagttgaacgaaagataccggttagactgcaacttagccgttcagctgttgaagtgcaataagtctcacttccggaaccacaaatttgcagactag

SEQ ID NO: 208725 - DNA, 720 bp, synthetic construct
  misc_feature 1..720: note = Description of Artificial Sequence: Synthetic coding sequence
  source 1..720: mol_type = other DNA
tgactgctgcaggaggagaacgaggagctgcggcggcggctggcctccgccacgcgacgcactgaagccttggagcgggaactggagattggccaagattgtttagaactggaactgggccagagccgtgaagaactggacaaatttaaggacaagtttagacgcttacaaaactcctataccgccagtcagcggactaatcaggaacttgaggataagttgcataccttaatcaaaaaggctgagatggacagaaagacactggattgggagatcgtggagctgaccaataagctgctggacgccaaaaataccatcaacaaacttgaggagttgaatgaaaggtatcgcctcgattgcaatctggccgtgcaattattaaagtgcaacaagtcccattttcgaaatcataaatttgcggacgtgtcccggacccaccccctcccggcccacatcgaccactccggtcattgcagaactcctcttacccccgtaagtgccccactgagcgtcctgctgtttcccctgtgtccacctttggccagcatgtctcctctaaagccagttaattcggctaccggctggtgccctgtgtattgccccggcccaatcacttcgtccggtggccctgctttattggtcagtgtgactgagaccgaacgggaggatcccgggcaagagggagaggggtcccagagctacctgccaaaagaatattag

SEQ ID NO: 208726 - DNA, 5247 bp, synthetic construct
  misc_feature 1..5247: note = Description of Artificial Sequence: Synthetic coding sequence
  source 1..5247: mol_type = other DNA
atgagcgcccgggccgccgccgccaagagcaccgccatggaggagaccgccatctgggagcaacacacagtcactctccaccgggcccctggcttcggtttcgggattgcgatcagcgggggcagggacaatcctcacttccagtctggggagacctccattgttatcagcgatgtgctaaaagggggcccagccgaggggcaactacaggagaacgaccgagtagccatggtgaacggcgtttctatggataacgtggaacacgctttcgcagtacaacaactgaggaaatcaggcaagaacgccaagattaccatccgaaggaaaaaaaaggtccagattccagtctccagacctgaccccgaacctgtcagtgataatgaggaggactcatatgatgaggagatccatgacccaagaagcggccggtctggggtggtgaatcggaggtcagaaaagatctggcctcgcgacaggagtgccagcagagagcggagcctaagccccagatccgatagacgcagcgtggcatcatctcagcctgccaaacccacaaaggtcaccctggtcaaaagccgcaaaaatgaagaatacggcctcaggctggcgagtcatatatttgttaaagaaattagccaggacagccttgccgcacgggacggaaacatacaggaaggcgacgtggtgctgaagattaatgggacagtgacggagaacatgtccctcactgatgccaagaccctgattgagcgctccaaaggtaagctgaagatggtagtccagagggacgagcgagctactctgctgaatgtccctgacctctcagactccattcactccgccaatgcatctgagcgtgatgacatatccgagattcaaagcctcgcgagtgatcacagtggccggtcacacgaccgaccaccccggaggagcaggtctcgtagccccgaccagcggtctgaaccaagcgatcatagcaggcactcaccccagcagccaagtaacgggtctctgcggagtcgtgacgaagagcgcatatctaaaccaggggccgtgtccacccccgtgaagcacgccgatgatcatacacccaagacggtggaagaggtgacagtagagcgcaacgaaaagcagacccccagtctaccggagcccaaacctgtctacgcacaggtagggcagccagatgtggacttacctgtttcaccctcagacggcgtattacccaactcaacccacgaggatggcatcctgagacctagtatgaaattggtgaagttccggaaaggtgattctgtgggcttgagattggccgggggaaacgatgtgggaatttttgtggctggcgtccttgaggactcaccagcagcgaaagaaggcctggaagaaggggaccagattctccgtgtcaacaatgtggattttactaacataattagggaagaggctgttctgtttctgctcgatctgccaaagggcgaggaagtcacgattttggcccagaaaaaaaaagacgtgtaccggaggatagtggaaagtgatgtgggggactcattctacatccgaacacattttgagtatgagaaggagagtccttacgggttgtcctttaataaaggagaggtgtttcgcgtggtggatactttatacaatggaaaactgggatcatggctagctatacggattggcaaaaatcataaggaagtggagagaggaatcattccaaacaaaaaccgcgcggagcagcttgccagcgtccaatacaccctccctaaaacggcaggcggggaccgcgcagatttctggcggtttcgaggactccgatcaagtaaacgcaatttacgcaaaagccgggaagatttgtccgcccagcctgtacagacaaagttccccgcctacgagcgggtggtcctgcgcgaggccggttttctgcgccccgtcactatttttgggccaatagccgatgtggccagagaaaagctcgccagggaggaaccagatatctaccagatcgccaaatcagaacctcgggatgcagggacagaccaacgtagcagcggaattatcaggctgcatacaatcaagcagataatcgaccaggacaagcacgcattgctagatgtgaccccgaatgctgtggaccgactgaactatgctcagtggtatccaatcgtcgtgttccttaacccagacagcaagcagggggtcaagaccatgcgcatgcggctgtgtccggaaagtcgaaagagtgctagaaagctttacgaaagatctcacaaactccgcaagaacaaccaccatctttttaccactacaataaacctaaattccatgaacgatggatggtatggagcattgaaggaggctatccagcagcaacagaaccagctggtatgggtgagcgagggtaaggcagatggtgcaacaagcgacgaccttgatctgcacgacgaccgtctaagctacctgtccgcacccggtagtgagtactccatgtattcaactgattcgcgtcacaccagtgactacgaggataccgatactgaggggggcgcctacactgatcaggaactggacgagactctcaacgacgaagtggggacacctcccgaaagtgcgatcaccagatcctccgaaccagtgcgagaggattcgtcaggaatgcaccacgagaatcagacgtatccgccctacagtccgcaggcccagccccaacctatccaccggattgacagcccaggatttaagcctgcctcccagcaaaaggcagaagcctcctcacccgttccatacctctctccggaaactaatccagcatcttcaacttcggccgtgaaccataatgtcaacttgaccaacgtgagactggaggaaccaactccagcaccttcaacctcctattctcctcaggccgattccttgcggactccttcaacagaagctgcacacatcatgctgcgtgatcaggaaccaagcctctcttcacacgtggaccccaccaaagtgtatcgtaaggacccataccccgaggagatgatgcgccagaaccacgtgcttaagcaacctgccgtgtctcaccccgggcatcgtcctgacaaggaaccaaatctgacctatgaaccgcaactcccttacgtcgaaaaacaggccagtcgcgacctggagcaacccacttaccgctatgaaagctcttcttacacagatcaatttagcagaaattatgagcaccgtctgagatatgaagacagagtgccaatgtatgaggaacagtggagctattacgacgacaaacagccctatccctcaagaccaccttttgacaaccaacactcccaggatctagattctcgacagcaccctgaggagtcctctgaaagagggtacttcccccgtttcgaggaacctgcacccctgagctacgatagccggccgcggtatgaacaggctccccgggcctcagccctccggcatgaagaacagcccgctcctggctacgatacccacggcagactccgccccgaagcccaacctcacccctcagcggggcctaaacccgccgaatctaagcagtactttgaacagtattctcgcagctatgaacaggtgccacctcaggggttcacatccagggcagggcatttcgagccgttgcacggtgctgccgccgttcctccactgataccaagtagtcaacataaaccagaagcactaccaagcaataccaaacctctgccccctcctcctactcagactgaggaagaggaggaccccgctatgaagccccaatcagtgctaactagggtgaaaatgttcgagaacaagagatcggccagcctagaaacaaaaaaagacgtaaatgataccgggagtttcaaaccacccgaagtggccagcaagcccagtggagcaccgattatcggacccaaacccacttcacagaaccagtttagcgaacacgacaagaccttataccgtatccccgaaccacagaagccacagctgaagccaccggaagatatagttagaagcaatcattacgacccagaggaagacgaggagtactaccgaaaacagctgtcctactttgaccggagatcatttgaaaacaagccgcccgcgcatatagccgcatctcatctctctgagcccgccaagccagcccactctcagaatcagagtaacttcagtagctattccagcaagggaaaacctcctgaggccgacggagtagaccgctcattcggagagaaacgatatgaacccatccaggctactcctccaccacccccactgccatctcagtacgcccagccaagccagccagtcaccagcgcttctctacatatccatagcaaaggcgctcacggagaaggcaactccgtcagcctcgatttccagaactcactggttagcaaacccgatccgcctccaagccaaaataaacccgctactttcagaccaccaaatcgtgaagacacagcacaggctgcattttacccccagaagtcttttccagataaagccccagtcaatggtaccgagcaaacacagaaaacagtgactcccgcttacaacaggttcacacccaaaccctatacttcttctgctcgccccttcgagcggaaatttgaatcccctaagttcaatcacaacctgctgcccagtgaaacagcccacaaacctgatctgtcatctaaaactcccaccagcccgaagacattagtgaaatctcactccctggcccagccccctgaatttgatagcggggttgagaccttctcaatccacgctgaaaagcctaagtatcagattaataacatctcaaccgtacccaaagcaatccccgtgtctccaagcgccgtggaggaagacgaggatgaggatggccataccgttgtcgccaccgcacgcgggatttttaattctaacggcggcgtgttatcctccatcgagacaggggtgtccattatcatcccgcagggagcaatccctgaaggtgtagagcaggagatttattttaaggtgtgcagagacaactctatattaccccctttggacaaagaaaagggggagacactgctgtcacccctcgtcatgtgcggccctcatggactaaagttcctcaagcctgtggagctccggcttcctcactgtgaccccaaaacatggcagaacaaatgtctgccaggagatccgaattatcttgttggggcgaattgtgtatccgtgcttatcgaccatttctag

SEQ ID NO: 208727 - DNA, 5007 bp, synthetic construct
  misc_feature 1..5007: note = Description of Artificial Sequence: Synthetic coding sequence
  source 1..5007: mol_type = other DNA
atgagcgcccgggccgccgccgccaagagcaccgccatggaggagaccgcaatttgggagcagcataccgtgaccctgcaccgggcacccggctttggattcggaatcgccattagcggggggcgcgacaatcctcatttccagtctggtgagacatccatcgtcatcagcgacgtcctgaaaggagggccagccgaggggcagctgcaggagaacgacagggttgccatggtcaatggagtgagtatggacaatgttgaacatgcgttcgcggtgcagcagctgcgtaagtccggaaagaatgctaagataactatcagacggaaaaaaaaggttcagatcccggtgtcccgaccggatccagagccagtgtctgataatgaagaggactcctacgacgaggaaatccacgatcctcggtcaggccgatcgggcgtggttaatcggcggtctgagaagatatggccacgggatcgctctgcttctcgggagaggtctctgtcacctcgttccgacagaaggagcgttgcctcctcccagccagcgaaaccaacgaaagtgaccctcgtaaagagcagaaaaaacgaggagtatgggttaaggttggcgtcacacattttcgtgaaggaaattagccaggacagtctagccgcacgggacggcaacatccaagagggtgatgtggtgctcaagatcaatggtaccgtgacagaaaacatgagtttgaccgacgcaaaaacactcattgaacggtctaaaggaaaacttaagatggtggtgcaaagagatgagagggccaccctgttgaatgtgcctgacctcagtgattctatccacagtgccaacgcgtctgagcgagacgacatctcagaaatccagtccctggctagtgatcacagtgggcggagtcacgaccggcccccccgacgatcccgctctaggagcccagaccagcgctccgaaccctccgaccacagcaggcacagtccacaacagcccagcaatggcagtctccgaagccgcgatgaggagcggatctccaagcctggcgctgttagtacgcctgtcaagcacgcagacgaccacacccctaagaccgtcgaggaggtcacagtggagagaaatgagaaacagacaccctccctgccagagcccaagcccgtgtatgcccaggtcggccagccagacgttgacttaccggtgtcaccatccgacggcgtgcttcccaactcaacacacgaggatggcatccttcggccatccatgaagctggtgaagttccggaagggggattcagtgggtctgcggcttgccggcggcaacgacgtaggaatctttgtggccggcgtgttagaagatagccctgccgcaaaggaggggcttgaagagggagaccagatcctccgggttaataacgtggatttcactaatattattcgcgaggaagctgtgctgtttcttcttgatctcccaaagggcgaggaagtaactatcctcgcccagaagaagaaggatgtgtaccgccgcatcgttgagtctgacgtgggcgatagtttctacatcaggacccactttgagtacgagaaagaatcaccctatgggctctcctttaacaaaggcgaggtattcagagtggtcgacaccctctataacggtaagcttgggagctggctggctatccgcattggtaagaaccacaaggaggtggaacgtggaatcatccctaataaaaatcgtgcagaacaactcgccagtgtgcagtacacactgcctaagactgccggtggcgaccgggcagacttttggaggttcagaggtctgagaagctcgaagaggaacctgcggaagtcccgggaggacctgagcgcgcagccagtgcagaccaagttccctgcgtacgaaagggtcgtgctgcgcgaggccggattccttcgacccgtgaccatctttggacctatcgcggacgtcgcccgggagaaacttgctagggaggaaccagatatttaccagattgcaaagtccgaaccccgtgacgcagggacggaccagcgatcatcgggaatcatcaggctgcacacaatcaagcagatcatagaccaggacaagcacgcactgctggacgtaacccccaacgcagtagacagacttaactatgctcaatggtaccctatcgtggtgttcctcaaccccgattccaagcagggcgtgaagaccatgcggatgcgactgtgcccagaatcgaggaaatctgccagaaaactttacgagcgtagtcacaaactgagaaaaaacaatcaccatctttttacaaccaccattaacctgaactccatgaatgacggctggtacggggcccttaaggaggcgattcaacagcaacaaaatcagcttgtgtgggtcagcgaggggaaagccgacggcgcaacttcagacgatctggatctgcacgacgacagattgagctatttatccgctcctgggagtgaatattcaatgtactctaccgatagccgccacacttctgattacgaagatactgacaccgagggaggcgcttacaccgaccaggagctggacgaaacccttaatgacgaggtgggcacaccccctgagtcagcaatcacacgctcatccgagcccgtgcgggaagacagttccgggatgcaccatgagaatcaaacataccccccctactctccccaagcgcagccacagcccattcataggattgattcacctgggtttaagcctgcctcccagcaagtgtatcggaaagatccttacccagaggagatgatgagacagaaccacgttcttaagcagcccgccgtgtcccaccccgggcaccggccggacaaagagccaaatctgacctatgaacctcagctgccatatgtagagaaacaagctagccgagatttggaacagcctacctaccgatacgagtcaagcagttacactgaccaattttcacgtaattacgagcaccgcttacggtatgaggaccgggtgcctatgtacgaagaacaatggtcttattacgacgataaacaaccttacccttcacgaccaccgttcgataaccagcacagccaggatctggattccaggcagcatccagaggagtcatccgagaggggttattttccacggttcgaagaacccgccccactgagttacgattccaggcccaggtatgagcaggcacctagagcttccgctttgcggcacgaagagcagcctgcccccggatacgacacacatgggcgccttaggcccgaagcacaaccacacccgtcagctggacccaagcccgcagagtccaaacagtacttcgagcagtactccagatcgtacgagcaggttccacctcagggcttcacatctagggccgggcattttgagccactgcacggcgccgccgccgtgccccctctaattcctagtagccagcacaaacctgaggctctgccgagcaatacaaagcctttaccgccacctccaacccagactgaggaagaggaagatcctgcaatgaagccccaatctgtcctgactagggtcaagatgttcgaaaacaagcggagcgctagcctggagaccaagaaggacgtgaacgatacaggctcttttaagccgccagaggttgccagcaagcctagtggggcgcccattattggtccgaaacccacttcacagaatcaattctcagaacacgacaagacactgtacaggattccagaacctcagaaaccccaattgaagcctcccgaggacatcgtgcgctctaatcattacgacccagaggaagatgaagagtactatagaaaacagcttagctacttcgatagaaggtcattcgaaaacaagcctccagcacacattgctgcttcccatctgtctgagcccgcgaaacctgcccatagccagaatcagagcaacttttcaagctacagcagcaaggggaaacctcccgaggcagatggtgttgatcggagcttcggagaaaaaaggtacgaaccaatccaagcaacccctccgccaccccccctgcccagtcagtacgcccaaccatcccagcctgtcacttcagccagtctgcacatccatagcaaaggagcccatggcgaaggaaactccgtaagcctggatttccaaaactctctggtgagcaaacctgatcccccaccatcgcaaaacaagcctgccacttttcggccaccaaacagggaggatacagcccaggccgcgttttacccccagaagagttttcctgacaaggctccagttaatgggaccgagcagacacaaaagactgtgacgcccgcctacaaccgtttcactcccaagccatataccagctcagcaagacctttcgaacggaaattcgaaagtcccaagttcaaccataatctgctgccatccgagacagcgcataagcctgatctcagctctaaaactcccaccagccccaagacactcgtgaagagtcacagcctggcccagccgcctgagtttgacagcggcgtcgaaacgttttccatccacgccgaaaagcccaaatatcagattaataacatctccacagtgccgaaggcaattcctgtgagtccttcagctgtcgaggaagatgaggatgaggacggtcacaccgtcgtagcgacagcccgggggatcttcaactctaatggcggcgtgttaagctctatcgagaccggcgtgtccatcataatcccccaaggcgcaataccagaaggagtggaacaggagatttactttaaggtgtgtagggataattccatcttgcctccactcgataaggaaaaaggggagacactactctctcctttggtcatgtgcggcccccacggtctcaagtttttaaaaccggtggagctgcggctccctcattgtgaccctaagacatggcagaataagtgcttaccgggcgatcctaattatctcgtgggggccaactgcgtctctgtgctcatagaccatttctag

SEQ ID NO: 208728 - DNA, 2982 bp, synthetic construct
  misc_feature 1..2982: note = Description of Artificial Sequence: Synthetic coding sequence
  source 1..2982: mol_type = other DNA
atgcccgtgcggggcgaccggggcttccccccccggcgggagctgagcggatggctccgggcaccaggcatggaggagctgatctgggaacaatacactgttaccctgcagaaggactccaaacgggggttcggtatcgcagtctcaggtggccgagataaccctcactttgagaacggcgaaacttcaattgtcatctcagacgtccttccaggaggaccagctgatggcctcctgcaggagaatgatagagtggtgatggtgaacggtacccctatggaagacgtacttcattcgtttgctgtgcagcagctgaggaaatctggcaaagtcgccgcaatagtagtaaaaaggcctcggaaggtgcaagtcgctgcccttcaggccagtcctcctctggatcaggatgaccgagccttcgaggttatggacgaatttgatggccggtccttccgcagcggctacagcgagaggtcccgtttaaactctcatggagggaggtccagatcctgggaagactctcccgagcgaggcaggcctcatgaaagagccaggtctcgcgagcgcgatttatcccgcgatagatcccgcgggagaagcctcgagcgcggcttggaccaggaccatgcccgaacacgcgaccgtagtaggggaaggtccctcgaacggggactcgatcacgatttcggcccctcccgagatcgcgaccgtgacaggagtcgcggcagatctatcgaccaggattatgagcgtgcttaccaccgtgcctatgaccctgactacgagagagcatactccccagagtaccgccgtggtgcaaggcacgatgccagaagccggggacctagatcgcgcagccgtgaacatcctcattctcgcagccctagtcctgagccccgcggccgacctggcccgattggggtcttactcatgaaatcccgggccaatgaagaatacggcctgaggctggggagtcagatttttgtgaaggagatgactcgtaccggtctggcgacaaaagacggcaacctgcatgagggtgacataatcttgaaaattaatggcaccgttacagagaatatgagccttacggacgctaggaaactgattgagaaaagtcgcggaaaactacaactggtggtgcttagggacagtcagcaaacattgattaacattccatctctaaacgattccgactcagaaattgaagatatcagtgaaattgagagcaataggtctttctctcctgaggagaggcgccaccagtacagtgattacgactatcattccagcagtgagaaattgaaggaaaggccaagctcacgggaggataccccaagtagactgtctcgcatgggggctactcctactcctttcaaatccacaggggacatagcagggaccgtggttcccgaaacaaataaggagccccgctatcaggaagacccacccgcacctcaacccaaagccgcgccgcgcacatttctcagaccctcgcccgaggatgaggccatctatgggcctaacacgaagatggtgaggttcaagaagggggactccgtgggcctgcgcctggcggggggtaatgacgtgggtatattcgtcgctggcatccaggaaggcacctccgcggagcaggaagggcttcaggagggggatcaaatccttaaagttaatacacaggatttccggggtttagtcagagaggacgcagtcctgtacctgttggaaatacctaagggcgaaatggtaacaatcctggcgcaatcaagggccgacgtgtaccgcgacattttggcttgtggcagaggcgattcttttttcataagatcccattttgaatgtgagaaggaaaccccccaaagcctggcgtttactaggggtgaagtgtttagggtggtagacacactgtacgatggcaaactggggaattggttggccgtgcgcatcggaaacgaattggagaaggggctgatccccaacaagtcccgcgccgagcagatggcctccgtgcaaaatgcacagagggataacgctggggaccgggctgacttttggcgcatgcggggacagcgaagcggtgtgaagaaaaatctgagaaagagccgggaggacttgactgccgtggtgtcagtgtctaccaagttccctgcatatgaaagagtgttactcagggaagctggcttcaagagacccgtggtgctctttggccctatcgccgatattgctatggagaaacttgccaatgaactgcctgactggttccagaccgccaaaaccgaacctaaagacgctggaagcgagaagagcaccggagttgtacgccttaacacagttcgacagattatcgaacaggataaacatgctctgctggacgtaactccaaaagccgttgacttactgaactacacccaatggtttccaattgtcatattcttcaatccggactctaggcagggcgtcaaaaccatgcggcagcggctgaatccaacctctaacaaaagcagcaggaaactttttgatcaagccaacaaacttaagaagacctgcgctcatctgtttacagcgacaataaatctgaattccgctaatgacagctggttcggaagtcttaaagatactattcaacaccagcaaggggaagccgtgtgggtgtccgagggaaagatggaaggtatggatgatgaccccgaagatcgaatgtcgtatctgactgccatgggtgccgattatctgtcctgcgattcccgcctgatttccgactttgaggacacagatggggaagggggtgcttacacagataatgagcttgacgaaccggccgaggagcctctcgtgtcatcaattacccgatcatccgagccagtgcagcacgaagaggtcaggcgcggacggcctcgggcaggtacaggagaacctggcgtttttctggcactgagctggacagccgtgtgttcaggctgctgcggacgccacagctag

SEQ ID NO: 208729 - DNA, 3132 bp, synthetic construct
  misc_feature 1..3132: note = Description of Artificial Sequence: Synthetic coding sequence
  source 1..3132: mol_type = other DNA
atgcccgtgcggggcgaccggggcttccccccccggcgggagctgtcggggtggctccgcgctcccggaatggaggagctgatatgggagcagtatactgtcacacttcagaaagacagcaagagaggttttgggattgccgtgagcggaggtagggacaatcctcactttgaaaacggcgaaaccagtatcgtgatctctgatgtgctccccggtggacctgcggacgggctcctgcaggagaatgaccgcgtggtgatggtgaatgggacgcccatggaagatgtactacattcctttgccgtccagcagctcagaaaatccggcaaggtagcagctattgtcgttaagagacctcgcaaggtgcaggtggccgctctgcaggccagccccccactagaccaggatgatcgggcatttgaggtcatggatgagtttgacggacggtcttttagaagcgggtacagtgaaagaagtcgtctgaactcacatgggggtagatccaggtcctgggaggactcacctgagcgcggacggcctcatgagagagctcgctcccgcgagcgcgacctcagtagggatcgatctcggggtcgatctctggagcgtggccttgatcaggaccatgctcgcacgcgcgaccggagtcgagggagaagccttgaacgcggcctggaccacgacttcggcccatctcgcgaccgggaccgcgataggtcccgaggaagatccattgatcaggactacgaaagagcctatcatcgcgcatatgacccggattacgagcgagcgtatagccctgagtacaggaggggagctagacacgacgccagatctcggggaccgcgcagtaggtcaagggaacacccacacagtcgctcgccctctcctgagccgcggggaaggccaggcccgataggcgtgctcttgatgaaatcccgagccaatgaagaatatggtctgagactagggtcccagatcttcgtgaaggagatgacacggactggattagcaacaaaagatggcaacctgcatgaaggagatattatcctgaagataaatggcaccgttaccgagaatatgtccctcacggatgcaaggaagctcattgagaaaagccgcgggaaactgcagctagtggtgctgagagatagccagcagaccctgattaacatcccatccctgaacgactctgattctgaaatcgaggacattagcgaaatagaatcaaatagaagcttctcccccgaagagcggaggcatcaatattccgattacgactaccactcaagttccgaaaaacttaaggagcggccctccagccgcgaggacacaccttccagattgagtagaatgggagcgacacccacccccttcaagagtacgggggatatcgccggaaccgtggtcccagaaaccaataaagaaccacgctatcaagaggacccgcctgccccacagcctaaggctgcaccccgaacgttcttgcgccccagtcccgaagacgaagcgatttacgggcctaatactaaaatggtgaggttcaaaaagggcgactctgtagggctgaggctggcgggcgggaacgatgtcgggatcttcgtagccggcattcaagagggtacctctgcagagcaggaggggctgcaagagggagatcagattcttaaagtaaatacacaggacttccggggtctggtgcgagaggacgctgtcctgtacctgttggaaatcccaaaaggtgaaatggttaccatcttagcacagagtcgcgcggatgtgtaccgagatatactcgcgtgtggacgcggagatagtttttttattcggtcccactttgaatgtgaaaaagagaccccgcaatctttggcttttacccggggcgaggtttttagagtggtggatacattgtacgatgggaagctcggaaattggttagccgtgcggatcggtaatgaattagaaaaaggtctgatcccgaacaaaagcagggccgagcagatggccagtgtccaaaacgctcagagggacaacgcgggggatcgcgccgacttttggcgcatgcgcggccaacggtctggggtgaaaaaaaacttgaggaagtctagagaggaccttaccgccgtagttagcgtttcaacaaaattcccggcctatgagagggtcttgctgcgagaggcaggatttaagcggcccgtggttttatttggtcctatcgcggacatcgcgatggagaagctggcaaatgagctgccagattggttccagacagctaaaaccgagcccaaagacgcaggatccgaaaaatccacaggcgtcgtgagactcaacactgtcaggcagattatagagcaggataaacacgctctgctggacgtcacccccaaagcagtagatctcttgaactatacccaatggttccctatcgtcatattcttcaaccctgactccaggcagggagtcaagacgatgcgccaaaggttaaatcctacttcgaacaaatctagccgcaaactctttgatcaggcaaataaactaaagaaaacttgtgcccatctattcactgcaacgatcaatctaaatagtgccaatgactcctggttcgggagcctcaaagacacaattcagcaccagcaaggggaggctgtctgggtctccgagggaaaaatggaaggcatggatgacgacccagaggatcgtatgtcctacctcactgccatgggtgcagattacttgagttgcgactcaaggctcattagcgatttcgaagacactgacggcgagggtggtgcctacacggacaatgagctcgacgaacctgcggaagaacctttggtctccagcattactcggagcagtgagcctgtgcagcatgaggagattgaaattgcacagaagcaccctgatatatatgcagtgcctatcaagacccacaaacccgaccccgggaccccacagcatacatccagtagacctcccgaaccacagaaagccccatcacgaccgtatcaggatactcggggctcatatggatctgacgcagaggaggaggagtacagacaacagctttctgaacatagcaagcgcgggtactacgggcagtcagcccgctatcgagacacagagctctag

SEQ ID NO: 208730 - DNA, 3573 bp, synthetic construct
  misc_feature 1..3573: note = Description of Artificial Sequence: Synthetic coding sequence
  source 1..3573: mol_type = other DNA
atgcccgtgcggggcgaccggggcttccccccccggcgggagctgagcggatggctccgcgccccaggaatggaggagttgatctgggagcagtacactgtgactcttcagaaggactctaaaaggggcttcggaattgcggtttcgggaggtcgcgacaaccctcactttgaaaacggcgagacttccatcgtgataagcgacgtgttacctggcggccctgctgatgggctgttgcaagagaacgacagggtagtgatggtgaacgggacccccatggaggacgtcctccactccttcgcagtccagcagcttagaaaaagcgggaaggtcgccgctatcgtggtgaagcgacctaggaaagtgcaggtcgcagccctgcaggcatccccacctctggatcaggacgacagggcttttgaggtcatggatgagttcgacggacggtcctttaggagcggttactccgaaagatcacggctgaactcacacgggggacgaagcagatcttgggaagattcacctgaaagaggacgtccacacgagcgggcccgcagccgtgaacgggacctgtctcgcgatagatcaagagggcgctcattggagagagggcttgatcaggaccatgcaagaacaagggatcggtctcggggccgcagccttgagagaggactggatcatgatttcgggccctctagggatagagatcgggatcggagtcggggacggtccatcgaccaggattatgaacgggcataccaccgagcctatgaccccgactacgaacgggcttatagcccggagtacagacgtggggccaggcacgatgccaggtcacgaggtccccgatctcggagcagagaacacccccattctcggagcccctcacctgaacccaggggacggccggggcctattggcgtgctgctcatgaaatcccgggccaatgaggaatatggtctacgcttgggttcacaaatttttgtcaaggagatgacaagaactggcctcgctaccaaggacggcaatctgcatgaaggggatataatcctaaagattaacggaactgtgacagagaatatgtctttgactgacgcaagaaagttgattgagaagtcaaggggaaagctgcaactggtggtgttgcgggactcccagcagacgctgattaatatcccctcactgaacgattcagactcagaaattgaagacatctcagagattgagtcgaatcgttcttttagcccagaggaaaggagacaccagtatagtgattacgattatcacagctctagcgagaagctgaaagaacggccatcgagccgggaagacactcctagtcgcctgtcaaggatgggcgccacacctactcccttcaagagtactggggatattgccgggaccgtcgttcctgagacaaacaaagagcccaggtatcaggaggaccctcctgcccctcaaccaaaggccgcccccagaacttttttgaggccctctcccgaagatgaggccatctatggaccaaacactaaaatggtgcgattcaagaagggagacagtgtaggacttagactggccggcgggaatgacgtcggcatctttgtggccggaatccaggaaggcacaagcgcagagcaggagggtctccaggagggggatcagatattgaaagtcaacactcaggatttccgcggtcttgtgcgagaggatgcagtcttgtacctgttggagatccccaagggtgagatggtgaccatattggcccagagcagagcagacgtgtaccgggacatactagcctgcggcaggggggatagttttttcatccgctctcacttcgaatgtgagaaggaaacaccccagtcgctggctttcactaggggcgaggttttccgcgtggtggacacgctgtatgacgggaagctggggaactggctggccgtcaggattgggaacgagttagaaaaaggcctaatcccaaataaatccagggcagagcagatggcctcggtccagaacgcccagcgggataacgccggagatcgcgcagacttctggaggatgcgcggccaaagatcaggagttaaaaaaaatctcaggaagagcagagaggacctgactgccgtggtttccgtctccaccaaattccctgcttacgaacgagttctgcttagagaggcaggattcaagaggcccgtggttttattcgggcccattgctgatattgctatggaaaagctggccaatgagctccctgactggttccagacggccaagactgagccaaaagatgccggcagcgagaaaagcacaggggtcgtgcgattgaacaccgtccgtcagattatcgagcaggacaaacacgcactgctggacgtcacacctaaagccgtagatctgctgaattacactcagtggtttcccatcgtcatttttttcaatccagacagccgccagggggtgaagactatgaggcagcgcctgaatcccacaagcaacaaatctagtcgtaagctcttcgatcaggccaacaagctcaagaagacatgcgcacacttattcaccgccacaattaacctcaattccgcaaacgactcctggttcggaagcctcaaggataccatacagcatcaacagggggaggctgtttgggtctccgaaggcaagatggaaggtatggatgatgacccggaggatcggatgtcatatctaaccgctatgggggcggattatctctcctgcgactctcggctgattagcgatttcgaagataccgatggggagggtggggcatacacagacaatgagcttgatgagcctgccgaggaaccgctggtgtcctccattactaggagctccgaacccgtccagcatgaagagagcattagaaagccaagtccagagccaagggcacagatgaggcgggcagctagttctgaccagcttcgggacaacagcccccctccagcattcaagcctgaaccaccaaaggccaaaacccagaacaaagaggaaagctatgatttctccaagagctacgagtataaatccaacccctccgccgtggcaggcaatgaaacacccggggcttccacaaagggttatcccccaccagtggctgcaaagcctacttttggtcgcagcatcctgaaacctagcaccccaattcctccacaggagggggaggaagtgggagaaagttcagaggaacaggacaacgcacctaagagcgtgctcggaaaagtgaagattttcgaaaaaatggaccataaagcgcgtctgcagaggatgcaggaacttcaggaagcacagaacgcccgcatcgagattgcccagaaacatccagacatctacgctgttcccattaagactcacaagcctgacccaggaacaccccagcacaccagtagccgccccccagagcctcaaaaggcaccatcaagaccctatcaagacactcgcgggtcctatggcagcgatgccgaggaagaggaatatcgtcaacagctctctgaacatagtaaacgaggatattatggccagagtgccagataccgtgacactgaactttag

SEQ ID NO: 208731 - DNA, 306 bp, synthetic construct
  misc_feature 1..306: note = Description of Artificial Sequence: Synthetic coding sequence
  source 1..306: mol_type = other DNA
atggaggagctgatctgggagcagtacaccgtgaccctgcagaaggattcaaagcgcggctttggaattgccgtctccggaggccgagataaccctcattttgaaaatggcgagacatccatcgtcattagcgacgtcctgccaggaggtcccgcagatgggctgcttcaggaaaacgacagagtggtgatggtgaatgggacacctatggaggacgttttgcacagcttcgctgtccagcagctcagaaagagtgggaaggtcgcagccatagtctccaccggtttcgctttttctctaccttag

SEQ ID NO: 208732 - DNA, 486 bp, synthetic construct
  misc_feature 1..486: note = Description of Artificial Sequence: Synthetic coding sequence
  source 1..486: mol_type = other DNA
atggaggagctgatctgggagcagtacaccgtgaccctgcagaaggattccaaacgcggcttcggtattgccgtcagcggcggccgcgacaaccctcacttcgaaaatggagagacctccatcgtgatttcggacgtgctgccaggcggacctgctgatgggcttttacaggagaatgatcgggtggtgatggttaatggaacacctatggaagacgtgctacactcattcgccgtacagcaactgcgaaagtctggaaaggtggccgccatcgtggtcaaaagaccccgtaaagttcaagtggctgccttgcaagcgtccccacctttggaccaggacgatagagctttcgaggtgatggacgaattcgacggccgctcttttcggtccggatattccgaaagaagccgcctgaattcccacgggggcagatcacgcagctgggaggattcaccggagcggggcaggccacatgagagggcctag

SEQ ID NO: 208733 - DNA, 3063 bp, synthetic construct
  misc_feature 1..3063: note = Description of Artificial Sequence: Synthetic coding sequence
  source 1..3063: mol_type = other DNA
atggaggagctgatctgggagcagtacaccgtgaccctgcagaaggacagcaagcggggtttcggcattgccgtatctggagggcgggacaacccacacttcgaaaacggcgaaaccagcatcgtaatatctgacgtcctgccgggcggacctgctgatggcctactccaggagaatgacagagttgtcatggtgaacggtactcccatggaggatgtattgcactcctttgccgtgcagcagctcaggaagagcggcaaagtcgccgcaatcgtggtgaaacggcctcggaaagtgcaggtggccgccctgcaggcgtcccctcccttggaccaggacgatagggcatttgaagtgatggacgagttcgatgggagatcattcagaagtgggtatagtgagcgatcaaggctaaattcccacggcggccgctccagatcgtgggaagactctcccgagagaggccgaccacatgaaagggccagaagccgcgagagagatcttagtagagatcgctcccgcgggcgtagtctggagcgtggtctagaccaagaccacgctcgcactcgcgatcggtcccgcggtagatccttggagcgcgggcttgaccatgacttcgggccttcccgagacagagatagagaccgctcacgcggccgtagtatagaccaggattacgagagggcttatcatcgggcctacgaccctgattacgaacgcgcctactctcctgaataccgacggggagctagacacgatgccaggtccagaggcccgcggtcccgctccagggaacacccccactcacgtagcccttcaccagagcctagaggacggcctggccctatcggggtgttgctgatgaagagtagggcaaatgaagaatacggtttgcgcttaggctcccagatcttcgtgaaggaaatgacccgcactggtcttgcaacgaaagatggaaatctgcacgagggggacattattctgaaaatcaacgggactgtcaccgaaaatatgagtcttacggacgctcgtaagctcatcgagaaatcaagggggaaactgcagctcgtcgtgctcagagactctcagcagactttgatcaacatcccaagccttaatgacagtgactcagagatcgaagatatttccgaaatcgagagcaaccgtagcttctcccctgaagaaagacgtcaccagtattctgactatgattaccattctagttccgaaaaattgaaggaaaggccatcctcaagagaggacacgccttccagactgagcaggatgggcgctacccccaccccatttaaatctacaggcgatatagctggaacagtggttcctgagacaaataaggaaccccggtaccaagaagatccaccagccccacagcctaaggccgccccccgcacttttttgcgcccctctccagaggacgaagccatttacggcccaaacaccaagatggtcagatttaagaagggggacagtgttggactgcgactcgccggtggtaacgatgtggggatttttgttgcaggcatccaagagggaacatcagccgagcaagagggcctgcaagaaggcgaccagatactgaaggtcaacacacaggatttcagaggcttggtgcgggaggacgccgttctatatctgctcgaaatcccgaagggggagatggtcactattctggctcagagccgtgctgatgtataccgagacatccttgcttgtggccggggggattcctttttcattagatctcactttgagtgcgagaaggaaacacctcaatcactggcgttcacaaggggtgaggtgttcagggtggtggacactctctacgatggaaagctgggcaactggcttgccgtccggatcgggaatgagctggaaaaaggattgatacccaataaatctcgggccgagcaaatggcaagtgttcaaaatgcccagcgagacaatgcaggcgaccgcgcagacttctggaggatgcgcggccagcgtagtggggtaaaaaagaacctgcgtaagtctcgtgaagatctgacagccgtcgtgagcgtctctactaaattccccgcatatgagagagtgctcctacgggaagctggtttcaagcggcctgttgtactgtttgggccaatcgcggacatcgccatggagaaattggccaatgagctgcccgactggtttcagaccgcgaaaactgaacccaaggacgctgggtccgaaaagtccaccggagtggtgcggctcaacacagtgcggcagattattgagcaggacaaacatgctctgctggacgtaacacctaaggccgtcgatctacttaattacactcagtggttccccattgtcatcttctttaacccagactcccggcaaggggtgaagacaatgcggcagagattgaatccaacaagcaataagtcctcccggaagctcttcgaccaggccaataagcttaagaagacttgcgctcatctgtttactgcaacaataaatctgaatagtgccaacgacagctggttcgggagtttgaaagatactattcagcatcagcagggcgaagcagtttgggtttcagaggggaagatggagggcatggatgacgacccagaggataggatgagctacctgaccgctatgggtgccgactacttgtcctgtgattcgcgtcttattagcgacttcgaagacaccgatggggagggaggcgcctataccgacaatgaacttgacgagcctgcggaagagccgttagtttcgtccatcacgcggtcctccgaacctgttcaacatgaagaaatcgagattgcccagaagcatcctgatatctacgccgtgccaattaagactcataagcctgatcctggcaccccccaacatacttcttcgaggccacccgagccacagaaagcaccctcacgaccctaccaggatactaggggctcctacggttctgatgctgaggaggaggagtaccgacaacagctgagtgaacactcaaaaaggggttactatggccaaagcgctagatatagggataccgagctgtag

SEQ ID NO: 208734 - DNA, 3474 bp, synthetic construct
  misc_feature 1..3474: note = Description of Artificial Sequence: Synthetic coding sequence
  source 1..3474: mol_type = other DNA
atgaagaccgcccaggccctgcaccggatgtggatccaggccgtgaaaaaactgcgaagatggaaggggcgcgcaccaggaatggaggagctgatctgggagcagtacactgtaacactccagaaggattctaaacgtggctttggtatcgcagtgtcaggcggccgagataacccacatttcgagaacggtgagacgtctatcgtcatcagcgatgttctgcccgggggacccgcggatggcctattgcaggaaaatgaccgagtcgtcatggtcaatggtactcctatggaagacgtcctccactcctttgctgtacaacagcttcgcaaaagcgggaaggtggccgccattgtggtgaaaagaccgcgaaaggtgcaagtggccgcactgcaggcttcacccccacttgaccaggatgacagggcttttgaagtgatggatgaattcgatggcagatcttttcgctctggttactccgaaagaagcagacttaattcccacgggggtagaagccggtcgtgggaggactcgcctgaaagaggcaggccccacgagagggctagaagccgggaaagggatctcagtcgtgacaggtctcgaggtcggtccttggaaagggggttagaccaggatcacgcccgcacccgcgatcggtctagaggacgcagtctggagcgaggtctggatcacgactttggacccagcagggacagggacagagataggtcccggggccgatccatcgaccaggactacgagagagcctatcatagagcttacgaccctgattatgaaagggcctactcgcccgagtatagaaggggagcacgccacgatgctaggtctcggggccccagatctagaagcagagagcacccccattcccgctcccctagcccagagccccgaggccgcccaggacccatcggcgtacttctaatgaaatcccgcgctaacgaggagtatggactgagactgggcagccagatcttcgtgaaggagatgacgaggactgggctggcgactaaggatggtaacttacatgaaggggatatcatcctcaaaatcaacggaacagtcaccgagaatatgtccctgacagacgcacgcaagttgatcgagaagagtagagggaagcttcagttggtagtcctgcgggattcacagcagacattaattaacattccatccctcaacgattctgactccgagatcgaagatattagcgagatcgagagcaaccgatcctttagcccagaagagcgacgccatcagtattctgattacgattaccatagttcatccgaaaagctgaaggagaggccttcctcccgggaagatacccccagcagactatcacgaatgggcgcaacacccaccccctttaagtcaactggagatatagccggtacggtcgtgcccgagaccaacaaagagccacggtaccaagaggaccctccagctcctcagcccaaagcagccccgcgaactttcctgcgcccgtcacccgaagacgaggctatctacggacctaacacaaaaatggtaagatttaagaaaggggattccgtgggtctcagacttgccggcggaaacgacgttggcatctttgttgccggcattcaggagggaacatctgcagagcaagaggggctgcaggaaggggaccagatactcaaggttaatacccaggactttcgtggcctggtcagagaagacgccgtgttgtatcttctcgaaataccaaaaggggagatggtgactatcctggcacagtcccgcgctgacgtttacagggacattctcgcctgtgggaggggcgactcttttttcatccgtagtcacttcgaatgcgagaaagagacgccacaaagtctggcttttactaggggagaagttttccgggttgtagacactctttacgatggcaaactgggtaactggctggctgtacggattggcaacgagctcgagaaagggctgataccaaacaagagcagggcagagcagatggccagtgttcagaacgcacagcgcgataatgccggcgatcgggccgacttttggcgcatgaggggacagcggtctggcgtgaagaagaatcttcgcaaaagtcgagaagatctgactgccgtggtctccgtaagcacgaagtttccggcttatgagcgcgtgctccttagggaagcaggctttaaacggcctgtggtgctgttcggcccgattgcagacattgccatggagaagttggctaacgagctacccgattggttccagactgccaagactgagccaaaagacgctgggagcgaaaagtctactggagtcgtgagactcaacactgtcaggcagattatcgagcaggataaacacgctttgctggatgtcacaccaaaggccgtcgatcttctgaactacacacagtggtttcccatcgtcatttttttcaacccagattcacgccagggagtgaagaccatgcggcaaagactcaaccctacttcgaataagagctccagaaagctgtttgatcaagccaataaactgaagaaaacatgtgcccatctgtttaccgcgactataaacctcaacagcgcgaacgactcgtggtttgggagcctaaaggacaccatccaacatcagcagggcgaagccgtatgggtgagcgaaggaaaaatggaaggtatggacgacgatccagaagaccgtatgtcatacctaacagcaatgggcgctgactacctcagttgcgattctagactgatatcggactttgaagacactgacggcgagggaggcgcttacaccgataacgagctggatgagcccgccgaagaacctctggttagttcgataactcggagctccgaacctgtccaacacgaggaggcaaaaactcagaacaaagaggaaagttatgatttttctaagagctatgaatacaagtctaatccgtcagcagtggccggaaacgagacccccggagccagtaccaagggctaccctcctcctgtcgccgccaaacccaccttcgggcgctcaatcctgaagccgtctactcctatccctccccaggaaggcgaggaggttggcgagtcttctgaggagcaggataatgcaccaaaaagcgtgctggggaaggtgaagatcttcgaaaaaatggatcataaggcccgcctgcaaaggatgcaggagcttcaggaggctcagaatgcccgcatagaaatcgcacagaagcaccccgatatttatgccgtcccaattaagacccacaagcctgatccaggcacaccccagcatacatcaagtagaccacccgaaccccaaaaagcgcccagcagaccttaccaagatacccggggaagctatggatcagatgccgaggaagaggaataccgccagcagttgagcgagcatagcaagcgagggtattatggccagtccgctcggtaccgagatactgagttgtag

SEQ ID NO: 208735 - DNA, 3666 bp, synthetic construct
  misc_feature 1..3666: note = Description of Artificial Sequence: Synthetic coding sequence
  source 1..3666: mol_type = other DNA
atgaagaccgcccaggccctgcaccggatgtggatccaggccgtgaagaaactgaggagatggaaaggtagggtgtcgcctagtgcatcctcccccctggtgttcccaaacctgtcaagctgggagggagaggggagcaaaactatcttgacagcccctggcatggaagagctcatttgggaacagtacactgttaccttgcagaaggacagtaagcggggatttggtattgctgtgtctggcggaagagacaatccacatttcgaaaatggagagacctctatcgttataagtgacgtgctgcccggggggcccgccgatggcctgcttcaggagaatgatagggtggtgatggttaatggcacccctatggaggatgtcctgcactcgtttgcagtgcagcagttgcgcaagtcaggaaaggtggccgcaatagtggtgaagcggccaaggaaagtgcaagtggccgcacttcaggcttcgcctcccctggaccaggatgacagagcattcgaggttatggatgaatttgacggcaggagtttccggagtggttattcagaacgctcccgtctaaacagccacggcggcaggagccggtcctgggaggattccccagagcgaggcaggcctcatgaacgagccaggtccagggaacgggacctgagccgagaccggtctcgcgggcgcagtctggagcgcggcctggaccaagatcatgccaggactcgtgatcgctcaagaggtcgcagtctggaacgcgggctggaccacgattttggacccagcagagaccgcgaccgggaccgtagtaggggccgcagcatcgatcaagattacgaacgggcctaccatcgggcttatgacccagactacgagagggcatactctccggaataccgtcggggcgctcgacatgacgccaggtctcgcggaccaagaagcagatccagggagcacccacactctcgaagcccgagccctgagcccaggggccgtcctggacccattggggtgctcttgatgaaatctcgcgccaacgaggaatacggcctacggctgggttcacaaatctttgtcaaagagatgacacgcacgggcctggccactaaggatggtaaccttcatgagggcgacatcatccttaagattaatggcaccgtgaccgaaaacatgtccctgaccgacgcccgtaagctcattgagaaaagtcggggtaagttgcagctagtcgtccttagggattcgcagcagacactgattaacatcccttctctcaacgactctgatagtgagatagaggatatctcagaaatcgagtcaaaccgcagctttagccctgaggaaaggaggcatcagtactctgactatgattatcacagttctagtgaaaagttgaaggagcggccttcctcacgggaagataccccatcacgactgtctcgcatgggggccactccaacccctttcaaatcaaccggggatatcgctgggacagttgtccctgaaaccaataaagagccgcgttatcaggaagatccacccgcaccccagcccaaggctgcaccacggactttcttgcgaccttcccctgaggacgaagccatatatggccccaataccaagatggtgagatttaaaaaaggcgattctgtgggactcaggcttgccggcgggaatgatgtgggcatcttcgtggcgggaatacaagaaggaacttccgcggagcaggagggactgcaagagggagatcagatactgaaggtcaatactcaggatttccgcgggttggtgagagaggatgccgtcctttatttgcttgagatacctaagggagagatggttacaatcctcgcccagtctagagcagacgtctaccgcgacatcctggcttgcggccgaggagactcttttttcatcaggtctcattttgaatgcgaaaaggaaactccccaatccctagctttcacccgaggtgaggtattcagagtagtcgataccctgtacgatggaaagctgggtaactggcttgccgtacgaattggtaacgaattagagaagggactgataccaaataaaagccgagcggagcaaatggcttctgttcagaacgcgcagagagacaacgctggagatagagcagatttctggaggatgcggggccagagatcgggcgtaaaaaaaaatctgagaaagtcccgagaagaccttacggctgtggtctcagtatcaacaaagttccctgcctatgagcgcgtcctcttacgcgaagccggcttcaagaggcccgtggtgctgttcggccctatcgcggacatagccatggagaaacttgcaaacgaactgccagactggtttcagacggcgaagaccgagcctaaggacgccggatcagagaaatccactggggtcgttcgtttgaatactgtcagacaaataatcgagcaagataaacatgccctgctggacgtgaccccaaaagccgtagacctgctcaactacacacagtggtttcccatcgtgattttcttcaatcctgattccaggcagggagtgaaaactatgcggcagcgattaaatcccactagcaacaagtcatccagaaagctgtttgaccaagcaaacaaactcaagaagacatgtgcgcatctgtttacagcgacaatcaatcttaacagcgctaatgactcctggtttggatcccttaaagacacaattcaacaccagcagggcgaagccgtttgggtatccgagggcaaaatggaggggatggatgacgaccctgaggaccgcatgtcatatcttaccgccatgggggctgactatctgtcatgcgacagtcgcctgattagcgactttgaagacacagacggggaaggaggcgcctacacggacaacgaactggacgaaccggccgaggaacccctcgtatcttccatcacccggtctagcgaacccgtacagcatgaggagtccatccggaagcctagtcccgagccccgggcccaaatgcgaagggccgcaagctctgatcagcttcgcgataacagtcccccccccgcatttaagcctgaacctccaaaggcaaagactcagaataaagaagagtcttacgacttcagtaaatcttacgagtataaatctaacccttcggcagtggctggaaacgaaacaccaggagcgagcacgaaaggatatcctcctcctgtcgcagccaagcctacctttggacgctctatccttaaacctagcactccaatcccaccacaggagggtgaagaagtcggagaaagctctgaggagcaggacaatgcacctaagtcggtgctagggaaagtaaaaattttcgagaagatggatcacaaggctagactgcagcggatgcaagaactgcaagaagcacagaacgcccgcatcgagatcgctcaaaaacatcctgatatttatgctgtgccaatcaagacgcacaagccggatccaggtactcctcagcacacaagtagcagacccccagaaccccagaaagcaccatccaggccctaccaagacaccagaggatcttatgggtccgacgcagaggaagaggaatacaggcagcaattgagcgaacatagcaaaagggggtactacggtcagagcgcgcgataccgcgacaccgagctttag

SEQ ID NO: 208736 - DNA, 2787 bp, synthetic construct
  misc_feature 1..2787: note = Description of Artificial Sequence: Synthetic coding sequence
  source 1..2787: mol_type = other DNA
atggccgtgcggttccaggtggccgacatggaggagctgaccatctgggagcaacacacagctactctttccaaagatcctaggaggggtttcgggattgccatttcgggaggtcgcgatcgccccgggggctctatggtcgtcagcgacgtcgtgccaggggggccagcagagggtcgactgcagacaggcgaccacatcgttatggtgaatggggttagcatggaaaacgctacatccgcctttgccatccaaatcctgaagacatgtaccaagatggcaaatattactgtcaagaggcccaggcgaattcacctccccgccacaaaagcttccccatccagcccggggcggcaagactctgacgaggacgacggcccgcagagagtggaggaggttgaccaaggccggggctacgacggcgattcttcaagtggtagcgggaggtcctgggacgaaaggtcccgacggccacgccctggacggcggggtagagctggaagtcacgggagaagaagccccggaggagggtctgaagccaatggtctggcgctggttagtgggttcaaacgactgcctcgtcaggatgtgcagatgaaacctgtgaagagcgtacttgtgaagaggagagattcagaagagtttggcgtgaagcttggttcccagatctttataaagcatattactgattcagggctagcagcacgacacagagggctgcaggagggcgacctgattcttcagattaacggcgtgagctcacaaaacttgtctctaaacgatactcgccggctgattgagaaaagcgagggcaaactttcgcttctggttctgcgcgacagagggcaattcctcgtcaacatccctcccgctgtgtcagacagtgactcttcacccctcgaggatatttcggatctcgccagcgagctgtcacaagccccacccagccatatacctccacctccacggcacgcacaaaggtcacctgaagcaagccaaaccgacagtcccgtggagtcaccccggctcagaagggaatcatcagtcgactcaaggaccatctctgaacccgacgaacagcgctccgagttgcctagagagtctagctacgatatctacagagttccatccagccagagtatggaggaccgtggttacagcccggataccagggtagttcggttcctgaaagggaagtccattggattacgcctggcagggggcaacgatgtcggaatattcgtgagtggagtgcaggcaggtagtcccgctgatggtcaggggattcaggaaggcgaccagatcctgcaggtcaatgatgtgccttttcaaaacttgacccgcgaagaagccgtgcaatttttgctggggttgccccccggagaagaaatggagttggtgacccagcgcaaacaggatattttctggaaaatggtgcagagtcgggtgggggattccttctacattaggacccacttcgagttagaaccgtcaccaccgtccggtctgggattcactcggggtgacgtttttcacgtactggacacgctccaccctggccccggccagtcacacgccagaggcggacattggttggcggtgaggatggggagagaccttcgagaacaggagcgcggaatcattcctaatcagtcacgcgctgagcaactggcctccctggaagctgcccaacgcgccgtcggggtcgggccagggagtagcgccggctcaaacgcgagagccgaattctggagactccgcggtctgcgaaggggcgccaagaaaacaacccaaaggagccgggaggacctaagtgctctcacaaggcaaggcagatatccgccttatgaaagagttgtgctacgagaagcttcattcaaaagacccgtggtgatcctgggcccggtggctgacatagcaatgcaaaagctgaccgcagagatgcccgatcaatttgagatagctgaaactgtgtctcgaacagactccccctcaaagattattaaattggacacagtacgggtcattgcggagaaggacaagcatgcccttctggatgtgaccccttccgctatcgagcggctgaactatgtgcagtattatccaatcgtggtcttcttcatcccagaaagtcgccctgccctgaaagcgttgcggcaatggcttgcccccgctagtcggcggtccactagacgtctctacgcacaggcacagaaactgcgcaaacattcatcacatctgtttaccgccactattcccctgaacggtacttctgatacctggtaccaggagctgaaggccattattagagagcagcagacacgtccaatctggacagccgaagaccagttggacgggtcgctggaagacaacctggatctgcctcaccacgggctagctgatagcagcgccgacctctcctgcgatagccgggttaactccgactatgaaactgacggtgagggtggtgcctacactgacggggagggatacacggacggggaaggcggtccttatacggacgtggacgatgagcctcctgctccagctctggctcggtcatccgagcctgtccaggcagacgagagccagagcccccgcgaccggggtaggattagtgcccaccaaggggcacaggtagactcgcgacatccccaggggcagtggagacaggattccatgagaacatatgaacgggaagcattgaagaagaagttcatgagagtgcacgatgccgaatcttctgacgaggacggatacgattgggggccagccacagatttatag

SEQ ID NO: 208737 - DNA, 2859 bp, synthetic construct
  misc_feature 1..2859: note = Description of Artificial Sequence: Synthetic coding sequence
  source 1..2859: mol_type = other DNA
atgaacctgtgcggcctgatgcccatcttccccgcccccctggaccaggtcgccgacatggaagagttgacaatatgggaacagcacaccgcaaccctctccaaggacccccgccgagggtttggtatcgcgatatctggtggccgcgacaggccaggaggctctatggtcgtgtcagacgttgtgcccggaggccccgcggaaggtagactgcagactggggatcacattgtgatggttaacggagtgtcgatggagaacgcgacaagtgcatttgccattcagatcttgaagacttgcaccaagatggccaatatcacagtgaaaaggccccgccggatacatctccccgccactaaggcttcgccatcaagtccagggaggcaggactctgatgaggatgacggtccgcagagggttgaggaagtagaccagggccgcggatacgatggagattccagctctggaagcggtaggagctgggacgaaagaagccggcgcccaagacctggccgcagaggaagggccggatcacatgggaggcgatctcctggaggcgggtccgaggctaatggactggctttagtcagcggctttaagcgcctgcctcgccaggatgtgcagatgaagcccgtgaagtccgtgctggtgaagcggcgagactcagaggaatttggtgtgaagctgggatcccaaatttttattaaacatatcactgacagcggcctggctgcgcggcatcgggggttgcaggagggagatctgattctgcaaattaatggagtatctagccagaacttatcacttaatgatactaggagactcatagagaagtctgaaggcaaactgtctttgctggttctgcgagaccgaggacagtttcttgtgaacatccctcctgcagtgtctgattccgactcctccccactagaggaaggtgtcaccatggcagacgaaatgtccagccctccagccgatattagtgatctcgcttctgaactgtctcaggctccccccagccatataccacctccacctagacacgcacaacgcagcccagaagcctcccagaccgattctcctgtcgagtcacccaggctgcgaagagaatcttcagtggatagcaggaccatttcagagccggatgagcagcggtccgagttacccagagaatcatcgtatgatatttatagagtgccctcttcacagtcaatggaggatcggggatattcccccgacacaagggtcgttaggttcctaaaggggaagtcaatcggcctccgacttgccggaggaaatgacgtgggaattttcgttagtggtgttcaggctgggagccccgctgatggccaggggatccaggaaggcgatcagattctgcaagttaatgacgtgccgtttcagaacttaacacgtgaggaagcggtacaattcttgctggggctgcctccgggagaggagatggaactcgtaacacagagaaagcaggatattttttggaagatggtgcagtccagagtgggcgatagtttctacatccggacccactttgagctggagcccagtccgccatcaggcttgggctttacacgtggagacgttttccacgtgcttgatactttgcatccaggcccaggccaatcacacgcgcgtggaggacactggctggccgtgcgcatgggccgcgacctgcgcgaacaggaaagggggataatcccaaatcagtcaagggcagaacagttagcaagcctggaggcggctcagcgagcagtgggagtgggacccggctcatctgccgggtccaacgcacgagcagagttttggaggctgcgaggacttcgtcgcggggccaagaagaccactcagagatccagagaagacctaagcgccctgacacgacagggccgctatccaccttacgagcgggttgtgctcagggaggcatccttcaagcgacccgtggtaatcctgggcccagtggccgatattgccatgcaaaaactgaccgccgagatgccagaccagtttgagattgcagaaactgtatctcgcaccgactcgcctagtaaaattataaagttggatacggttagagtcatcgccgagaaggataaacatgcgttgctcgacgtgaccccgtcagcgatagagcggctaaactacgtgcagtactaccctatagtggtgttttttatccctgagtctcgcccggctctcaaagcactccgtcagtggttggctcccgccagccgccggtccacgcgccgactttatgctcaggctcagaaactgcgcaaacacagtagccacttatttacagctactataccactgaacggtacgtctgacacgtggtaccaggaacttaaggcaattattagggagcaacaaacccgtcctatctggacagccgaggatcagctcgacggaagcctcgaggacaacctggacctgcctcatcatgggctggccgacagctctgctgacctttcctgtgacagccgcgtgaattctgattacgagactgacggggagggcggcgcctacacggacggcgagggctacacggatggcgagggtgggccctacacagatgtagatgatgaaccgcctgcccctgccctagccagaagcagcgagccagtgcaggcggacgaatcccaatcaccacgagaccggggcagaattagcgcgcatcagggtgcccaagtggactctcgccaccctcaggggcagtggagacaggattctatgagaacttatgaacgcgaagcgctgaagaaaaaatttatgcgggtgcacgacgccgagagctcagatgaagacggatacgactgggggccagcgactgatctgtag

SEQ ID NO: 208738 - DNA, 2802 bp, synthetic construct
  misc_feature 1..2802: note = Description of Artificial Sequence: Synthetic coding sequence
  source 1..2802: mol_type = other DNA
atggaggagctgaccatctgggagcagcacaccgccaccctgagcaaagatccccgtcggggattcggtattgcgatttccgggggccgggatcggcccggggggagcatggtcgttagcgacgtggtgcccggtggtcccgctgagggcaggctgcagactggggatcatatagtgatggtgaatggggtgtcaatggaaaatgcaacatcagccttcgctattcaaatcctgaagacctgcacaaaaatggccaacattaccgtaaaaaggccgcgccgcatccaccttcctgctaccaaagcctcgccttcatctccagggcggcaggattctgacgaagatgacggcccccaacgggtggaggaggtggaccaaggccgcggttatgacggggactcctctagcggcagcggtcggtcctgggatgaaagaagtagaagacctaggccgggacgtagaggcagagccggcagtcacggtcggagatccccaggtggaggtagtgaggcgaatgggctggctctggtaagcggattcaagaggttgcccagacaggatgtgcagatgaagcccgtgaagagcgtgctcgtgaagcggcgggactccgaggaattcggggtcaagctgggctcccagatcttcataaagcatatcaccgacagcggtctcgccgctcgacacagaggactccaggaaggcgatctgatactgcagataaatggcgtcagcagccagaacctcagtcttaacgacacacgaaggttaattgaaaagtcggaaggaaagttgagcctactggtcctaagggacaggggacagttcctggtcaatataccaccagccgtgtccgatagtgattcctcccctctcgaagaaggcgtcaccatggccgatgaaatgtcgtcgcccccagctgacatatccgacttggcttccgagttaagtcaggcgcccccctctcatatccccccccctccgcggcatgcccagcgtagcccagaggcatcccagaccgattcccccgtggagagcccgcgtctgcgccgcgaaagcagcgtggattcccggacgattagcgagcctgacgaacagaggagcgagctgcctcgcgagagctcttacgatatctatagggtgccatcctctcagtctatggaggaccgtggatatagtcccgacactagagttgtgcgtttcctaaagggaaagtcaattggccttcgactggctgggggaaatgacgtcgggatttttgtgtctggagtgcaagctggctcgccagctgacggccagggaatacaagaaggcgaccagatcctccaggttaatgatgtgcccttccaaaacctcacgagagaagaggcggtgcagttcctgctgggtcttccgcctggcgaagagatggagctggtgacccagaggaagcaggatatcttttggaaaatggtgcagtcccgcgtcggagactctttctacataagaactcatttcgagctggaaccttcccctcctagtggcctcgggtttaccaggggagatgtgttccacgtccttgacactctgcatcctggaccaggccagagtcatgccagaggtgggcattggctggcagtcagaatgggacgggacctgcgcgagcaggagcgtggtatcattccaaaccagtcccgggccgagcaacttgcatcactggaggccgctcagcgtgcagtcggagtagggcctggttcttcagccggtagcaacgcaagagcagaattctggaggctgagaggtctgagaagaggcgccaaaaagaccactcagcgcagcagggaagacctcagcgcactgaccaggcagggacgatatccgccatatgagcgagtagtgctcagagaggccagtttcaaacgcccagtggtgattctcggccccgtggccgacattgccatgcaaaagctcactgcggaaatgccagatcagttcgagatcgccgaaacagtctccaggacagactcaccctcaaaaattattaaattggatactgtcagggttatcgctgaaaaagacaaacatgcactcctcgacgtaacaccctccgccatcgagaggttgaactatgtgcagtattacccaattgtcgtgttctttatcccggagtcacgtcctgctctaaaagccttgagacagtggttggctccagcgtcgcgcagatccacccgacgattgtatgctcaggctcagaaactacgtaagcatagcagtcatctttttaccgctacgatcccactgaatggcacctctgatacgtggtaccaggaattgaaagcaattattcgcgaacaacagaccagaccaatttggactgctgaagaccagctcgatgggagcctggaagacaacctggatttgccacatcacggtctggcagattcttcagcagacctctcttgtgatagcagagttaatagtgattatgagacagatggcgaagggggcgcctatacagacggagaaggttatacagacggggagggcgggccctataccgatgtcgacgacgagccacccgctcccgcattggccagatcatccgaacctgtgcaagccgatgagagccaaagcccaagggataggggccgaatctccgctcatcagggagcccaggttgacagcagacatccacaggggcagtggagacaggatagcatgaggacgtatgaacgcgaggcgctgaagaaaaaatttatgagggtacatgacgccgagtcatctgatgaggatgggtatgactggggccccgccaccgacctgtag

SEQ ID NO: 208739 - DNA, 2652 bp, synthetic construct
  misc_feature 1..2652: note = Description of Artificial Sequence: Synthetic coding sequence
  source 1..2652: mol_type = other DNA
atggtggtgagcgacgtggtgcccggcggccccgccgagggccggctgcagactggtgaccatattgtcatggttaatggggtttcaatggagaacgccacaagtgcttttgcaatccagatcctaaagacctgtacaaagatggccaacataacagtcaaacggccgcggcgcatccatctacctgcaaccaaagcaagcccaagctcccccggccgacaagatagtgacgaagatgacggtccacagcgcgtcgaagaagtcgaccagggtcgtggctatgatggcgatagttcttcaggtagcggaagaagctgggacgaaaggagtcgccgaccacggcccggcagaaggggtagggcaggaagccacggcaggcggagtccaggcgggggaagtgaggccaacgggctggcactagttagcggctttaagcgtttacctagacaagacgtgcagatgaagccagtgaagtccgtgctcgttaagagacgggactcagaagagtttggagtgaaacttgggagccaaatatttattaagcatatcactgattccggtttagccgccaggcataggggcctccaggagggggacctcattcttcagatcaacggggtgtcttctcagaacttatccctgaatgacaccagacgcttgatcgagaaatcagagggcaaactcagcctcctcgtgctaagggaccgcgggcagttcctcgtgaacatacctccagccgtttctgacagtgactcaagcccgctggaggacattagcgacctggctagtgagctttctcaggcccctcccagtcatattcccccaccccctcggcatgctcagcgctcacctgaggccagccagacagattcccctgttgaatctccccggctgcgaagggagtccagcgttgatagtaggacgatcagcgaaccagatgagcagcgctccgaactgccaagagagtcctcatacgacatctaccgcgttccctcctctcagtcaatggaagaccgcggttatagtcccgacacccgcgtagtccgatttcttaaggggaaatcaattggtctcagattggctgggggtaatgacgtcggaattttcgtgtccggcgtgcaggccgggtcacccgcggacggacaggggatccaggagggcgaccaaatcctccaggttaatgacgtcccttttcagaacttgaccagagaggaggcggtgcaatttctgctgggtctcccaccaggcgaagagatggagcttgtcacacagcgcaagcaagacatcttctggaagatggttcaatccagagttggagactctttttacattaggacccactttgagcttgaaccttcccctccgagtggcctgggctttacccgcggcgacgtctttcacgtactggacacgctgcaccccggccccggacaaagccacgcacgtggaggccactggttggcggtccgtatgggacgcgatctgagggagcaagaacgggggataatccctaaccagtctagggcagaacagctggcttccctcgaagcagcgcagagggctgttggtgtagggcctggtagttccgctgggtcgaacgcacgcgctgagttctggagacttcggggcttgcggcggggcgccaagaagacaacacaaaggtcaagagaagatctgtcagcattaactaggcagggacgatatcccccctatgagagagttgtcctgagggaagcttccttcaaacggcccgtggtaattcttggcccagttgcagatattgcaatgcagaagctgacagctgagatgcctgatcagttcgagatcgcagagaccgtcagccggaccgattccccttccaaaatcattaagctggacactgtgcgcgtgattgcggaaaaagacaagcatgccctgctagatgtgaccccctcagcgatagaaagactgaactacgtacaatattatcccattgtagtattcttcattccagaaagccgtcccgccctgaaggccctgcggcagtggttggctccagcaagcaggcggagtacaaggcgcctgtacgcccaggcccaaaaactccgcaagcattcatcccacctgtttaccgctacgatccccctgaacggaactagtgatacgtggtaccaggagctcaaagcaatcatccgcgagcagcaaacccgtccgatttggacagccgaggaccagctggacggttctctagaagacaatttagacctaccgcatcacgggctggccgacagctcggctgacctttcctgcgacagcagggtgaattctgactacgaaactgacggggagggcggcgcatacaccgacggcgaagggtataccgatggggagggaggtccctatacagatgtggacgacgagcccccggcaccggcactggcaagatcttccgagccggtgcaggcagacgaaagccagtcacctcgcgaccgcggcaggatctccgcccaccagggcgcccaggttgattcccggcacccgcaggggcaatggcgacaggattccatgaggacctacgaaagggaggctctaaagaagaagtttatgagagtgcacgacgccgagtcttccgatgaggatggctacgattggggccctgccaccgacctgtag

SEQ ID NO: 208740 - DNA, 2760 bp, synthetic construct
  misc_feature 1..2760: note = Description of Artificial Sequence: Synthetic coding sequence
  source 1..2760: mol_type = other DNA
atggaggagctgaccatctgggagcagcacaccgccaccctgagcaaggatccaagacgaggttttggcatcgccatcagtggaggacgggatcggccagggggatccatggtggtgagcgatgtagttcccggcgggcctgctgaagggagacttcaaaccggcgaccatatcgtcatggtaaacggagtgagcatggagaacgctacgagcgcctttgctatccagatcctgaagacatgcaccaagatggccaacatcacagtgaagagacccaggaggatccatttaccagcgacaaaggcaagtccttctagtccaggtagacaggacagcgatgaggatgacgggccacagagggtggaagaagtggaccaggggagaggctacgatggggacagttccagtggctctgggcgaagttgggatgaaagatccagaaggcctcgaccaggacgtcggggccgcgctgggagtcacgggaggcggagccccggggggggcagtgaggctaacgggctagccctggtgtcgggctttaaaaggctaccccggcaggatgtccaaatgaaaccagtcaagagcgtccttgttaagagaagagactctgaagagtttggcgtaaagctgggttcccagattttcataaagcacatcacggactccgggttggccgcccgtcatagaggactgcaagagggagatctgatcttacaaatcaacggcgtgtctagccagaatttgtcactgaatgatacacggcggctgattgagaagtccgagggcaagttgtctctgctggttctaagagaccggggtcagtttctggtgaatattccaccagcggtttctgattccgactccagccccctggaggatatcagtgacttggcctcggagttatcccaagctccaccttcgcacatacctcctcctccacggcacgctcagcgctcccccgaggctagccagaccgacagcccagtggaaagccctcggctgcggagagaatcttccgtggactcccgcactattagcgaacctgacgagcagcgctccgagctacctcgggagtccagttatgatatctatcgggttcctagcagtcaaagtatggaagacagaggatactcgcctgacacaagagtggtgcgctttctgaagggcaaatccatcggacttaggctggccggtgggaacgacgtgggcatattcgtgtcaggcgtacaagcgggaagtcccgctgacggccaaggcattcaggagggagatcagattcttcaagtcaacgacgtgccttttcaaaatctcacacgggaggaggcagtccagtttctactgggactgcctcctggcgaagagatggagctggtgacccagagaaaacaggatatattctggaagatggtgcagagccgggtcggagactcgttctacattagaacccacttcgagttagagccatcccctccttccggtttaggtttcaccagaggggacgtctttcatgtattagatacgctccaccctggaccaggccaatcgcatgcccgaggcgggcactggctggccgtaaggatgggccgggacttacgagaacaagaacggggaatcattccgaaccagtcccgagctgaacagcttgctagccttgaggcagcccagagggccgtaggtgtgggccctggcagtagtgcgggatcgaatgcccgggctgagttctggagactgcgcggtctccgaaggggcgctaaaaaaaccacacagagaagccgggaggacctcagtgcactcaccagacagggtcgttaccccccttatgagagggttgtgctgagagaggcgtctttcaagagaccggtcgtcatactcgggcctgtcgccgacatcgcaatgcagaagttaaccgcggagatgcctgatcagtttgaaattgccgagaccgtaagcagaacagacagcccatctaaaattataaagctggacaccgtgcgcgtgattgccgagaaagataaacacgctttgctggacgtcaccccatccgccattgagcggctgaactacgtacagtattaccccattgttgtgtttttcattcctgagtcgcgcccagcactgaaagcactccggcagtggctggctcctgcatccagaagaagcactcgacgactgtacgcccaagctcagaagcttcgcaagcacagttctcatctctttaccgctacaatccctcttaatggtacatctgatacttggtaccaggaactcaaagccatcatcagagagcagcagactagacccatctggactgcagaggaccaactggatggcagcctggaagataacttggacctgccacaccacggtctggcggatagtagtgccgatcttagttgtgattctcgggtgaatagcgattacgaaaccgacggcgaaggaggagcatataccgacggagagggatacaccgatggcgaaggcggaccttacaccgacgtggatgacgagccccctgcacccgctcttgcgcgcagcagtgagcctgtgcaggctgacgaaagtcaatcgccccgtgatcggggccgtatatctgcccatcagggggctcaggttgactcacgacacccacaaggccaatggcggcaggacagcatgcgaacgtacgaaagggaggccttgaaaaagaagttcatgcgcgtccacgacgccgagagttccgatgaggacggttatgactggggacctgccacagacttgtag

SEQ ID NO: 208741 - DNA, 1623 bp, synthetic construct
  misc_feature 1..1623: note = Description of Artificial Sequence: Synthetic coding sequence
  source 1..1623: mol_type = other DNA
atggtgcggaccgacggccacaccctgagcgagaagcggaactaccaggtgaccaattctatgtttggggcctcaaggaaaaaattcgtggagggtgtagactctgactatcacgatgagaacatgtactactcccaaagcagcatgtttccacaccggtctgaaaaagacatgctcgccagtccgtcaacctccggacaactctctcagttcggggcttccctctacggacaacaatccgcactcggacttcctatgcgaggcatgtctaacaacactccccagctgaatcgcagcctgtctcagggcactcagctaccatcacatgtaacccccactacaggggtgccaactatgagtttgcatacccctccttcaccaagccgtggcattctgcccatgaaccctcggaatatgatgaatcactcacaggtgggtcagggcatcgggatcccttcacggacgaacagtatgtctagctccggactgggctcacccaacagatcctctccttccattatttgtatgcccaaacaacagcccagccggcagccctttacagtaaacagtatgtctggctttgggatgaaccgcaaccaggccttcggtatgaacaattccttgtccagcaatatcttcaacggaactgacggctctgagaatgtcaccggactggacttgagcgattttccagccctggcagaccgcaaccgcagggaaggttccggcaatccaactccactcatcaatcccttggcgggacgggccccctacgtcggaatggttacgaaaccagctaatgagcagtctcaggacttctccatccacaacgaggacttcccagctctccccgggagtagctataaggatcccactagttctaacgacgattcgaaatctaatcttaatactagtggtaagaccactagctcaacagacggaccaaaatttcccggggataagtccagcaccacccagaacaacaaccagcagaagaaaggcatccaggtcttgcccgacgggagagtgactaacatcccgcagggtatggttaccgaccagttcggaatgatcggactgcttactttcatcagggccgccgaaacggatccaggcatggtgcatttggctcttggcagtgacctgaccacactcggtctgaatctcaattctcccgagaacctttaccctaaattcgccagtccttgggcatccagtccttgcaggccccaggacattgactttcatgtgccgagtgaatatctgaccaacatccatatccgcgacaagttggctgccattaagcttggtagatacggggaggacttgttgttctatctctattacatgaacggaggtgacgttttacagctgttggctgcggtcgagctcttcaaccgggattggcgataccacaaagaggaacgggtgtggatcactagagcaccaggtatggaacctaccatgaaaacgaacacttacgaacgcgggacatactattttttcgattgcctaaattggagaaaggtggccaaagaattccacttggagtatgataaattggaagaaagaccacaccttcctagcacatttaattacaacccagcacagcaggccttttag

SEQ ID NO: 208742 - DNA, 3627 bp, synthetic construct
  misc_feature 1..3627: note = Description of Artificial Sequence: Synthetic coding sequence
  source 1..3627: mol_type = other DNA
atggacctgcacatgatgaactgcgagctgctggccacctgcagcgcactcggttacctggaaggagatacttatcacaaagaacctgactgcctggaatctgtaaaggatctgattcgttacctgcggcatgaggatgaaaccagggacgtgcgacagcaattgggagccgcacagattctgcagtccgacctcctgcctattctgactcagcaccaccaggacaagcccctgttcgatgccgtgattcgcctgatggtgaatctgactcagccagcgctcctgtgctttggtaacctccctaaggaacccagctttcgacaccattttttgcaggtgctaacttacctgcaggcctataaagaggcattcgcgtccgaaaaagcgtttggtgtactttctgagacgctgtacgaactgctgcaactgggatgggaagagagacaggaggaggataatctgctcatcgagcgaatactgcttctcgtgcggaacatcctccatgtgcccgccgatctggaccaggagaaaaagatcgacgacgatgcaagtgctcacgaccagttactctgggccatacatctgtctggactggacgacctgcttctatttctagcatccagttccgcggaggaacagtggtccctccatgtgctggagattgtgagcctcatgtttcgagatcaaaaccctgagcagttggccggcgtcggacaggggcgactggcacaggaacgctcggccgattttgcagaactcgaggtgttacgccagagagagatggccgaaaaaaaaactcgcgccctgcagcgcggaaacaggcattcaaggtttggaggcagttacatcgtgcagggactgaaatcaattggggaacgcgatctcatcttccacaagggcctgcacaacctgcggaattacagctccgacttgggaaagcagcccaaaaaggttcccaagcggcgtcaggccgcccgcgaactgagcatacaacgcagatctgcccttaacgttcgtctctttttgcgcgacttctgttcagagttcctcgaaaactgctacaaccggttaatgggttcagtgaaagaccacctgctgcgcgaaaaggcccagcagcatgatgaaacctattacatgtgggcactagctttctttatggccttcaatcgggccgcttcatttcggccgggcctggtgtctgaaacactgtcagttcgcacctttcatttcattgaacagaacctcacgaattactatgagatgatgctgacagaccgcaaggaggcggcatcttgggcacgccggatgcacctggctctcaaagcataccaggagctgctggctacagtgaatgaaatggacatcagcccggatgaggccgtccgtgagtccagccgcatcatcaaaaataacatcttttacgtgatggaatatcgggagctcttccttgcactatttagaaagttcgacgaaaggtgccagccaaggtcattcctgcgggatctggtggagaccacgcacttatttttgaaaatgctggaacgattttgccggtcccgaggcaatctcgtcgtacagaacaaacaaaaaaaaagacggaaaaagaaaaaaaaggtgctggatcaggcaatagtgtcaggaaacgtcccatcttccccagaagaagtggaagccgtctggcccgctctcgctgaacagcttcagtgctgcgcgcagaatagtgaattatctatggattccgtcgtaccctttgacgcagcctcagaagtgcccgtcgaagagcagcgggccgaagccatggtacgcattcaagattgcttgctggcaggtcaagcgccccaagcactgaccctcctgaggtctgcgagggaagtctggcccgaaggcgatgttttcggtagtcaagacatctcacccgaagaagagatccagctgctgaaacaaatcctgtccgctccactgcccaggcagcaaggacctgaggaaagaggggctgaagaggaagaggaggaggaagaggaagaggaagaagagcttcaggtagttcaagtgtcggaaaaggagttcaatttcttggattatctgaaacgattcgcctgttctacagtagtgcgcgcctacgtgctcctccttcgatcctaccagcagaactccgctcacacaaatcactgcattgttaagatgttgcatcggttagctcacgacctgaagatggaggcactgctatttcagctgagtgtgttttgtctgttcaaccgcctcctctccgaccctgccgccggggcctacaaggagcttgtgaccttcgctaagtacattctgggcaaattctttgctttggccgcggtgaatcaaaaagctttcgtcgaactactcttttggaaaaacacagccgttgtacgggaaatgaccgaaggatatggtagcttagatgacaggtccagttcccgccgggcccctacctggagccccgaagaggaagcacatttaagagaactttacctagccaataaggatgtcgagggccaggacgtggtggaggcaatcctggcgcacctgaacacagtgcctaggaccaggaagcagataattcaccacctagtgcaaatgggtcttgccgattctgttaaagattttcagcgcaaaggtacccacatcgtgttatggacgggggatcaggaactcgaactgcagagactgtttgaagagttccgagacagtgacgatgttctcggccacattatgaaaaatataacagctaaacgaagccgcgcccggattgtcgataaattacttgcactaggtctggtggccgaaaggcgagagttgtacaagaagaggcagaaaaagttggcatcatccatactgcctaatggtgcagaatctttaaaagatttctgccaggaggatttggaagaggaagagaatttacctgaagaagactcggaagaagaagaagaaggcggctccgaggcggagcaggtacagggctcactcgtgctgtccaatgagaatctggggcaatcactccaccaagaaggattctcgattccactactctggctgcagaactgcctcattcgcgctgccgacgaccgtgaggaggacgggtgcagtcaggctgtccctcttgtgcccctgacggaagagaacgaagaagccatggaaaacgagcagtttcagcaacttctgcgcaaactcggggtcaggccacctgctagtggacaggaaactttctggcggatcccagccaagctgtcaccgacccaactgagaagggcagctgcctcactttcacagcctgaggaagagcaaaagttacagcctgaactacaacccaaggtcccaggagaacagggctcagacgaagagcactgcaaagagcaccgggctcaggctctccgggccctcctattggctcacaaaaaaaaagctgggctggccagcccagaagaggaggatgcggtgggcaaagagcctctcaaggccgcaccaaagaaaaggcagctcctcgatagcgatgaagaacaggaagaggacgagggtcgcaatcgagccccagagctcggcgcccctgggatacagaagaaaaaacgataccaaattgaagacgacgaggatgactag

SEQ ID NO: 208743 - DNA, 906 bp, synthetic construct
  misc_feature 1..906: note = Description of Artificial Sequence: Synthetic coding sequence
  source 1..906: mol_type = other DNA
atgctggagccccaggagaacggcgtgatcgacctgcccgactacgaacatgtagaggacgaaacgttcccacctttccctcctccggcttccccagaaagacaggacggcgagggaacagagcccgacgaggaatctggaaacggcgctcctgtccgtgtcccacctaaacgcacggtgaagcggaacatacccaaactggatgcccagaggctcatctctgaacgtggcctgcctgctctgcggcacgtgttcgacaaagccaaattcaaggggaaaggacatgaagctgaagatcttaagatgctgatacgacacatggagcactgggctcatagattgttcccgaaattacagttcgaagacttcattgacagagtggaatacttggggagtaaaaaagaggttcagacgtgtctgaaacggataaggctggatttgcctattctgcatgaggactttgtcagtaataatgacgaggttgccgagaataacgaacatgacgtgacttctaccgaacttgacccattcctcacaaaccttagcgaaagtgagatgttcgcgtcagaactctcccgcagcctcacagaggagcagcagcagcgaatcgaacgtaacaagcagctcgcattggaaagaagacaggcaaaactcctctctaactcccaaacccttgggaatgatatgttaatgaatactccccgtgctcacaccgtggaggaagtcaatactgatgaggatcagaaggaggagtctaatggcctcaatgaggatatccttgacaatccatgcaacgatgccatcgcaaacactctgaatgaggaggagaccctcctcgatcagtccttcaagaacgtgcagcagcagctggatgccaccagtaggaatatcactgaagcccgttag

SEQ ID NO: 208744 - DNA, 603 bp, synthetic construct
  misc_feature 1..603: note = Description of Artificial Sequence: Synthetic coding sequence
  source 1..603: mol_type = other DNA
atgctgatccggcacatggagcactgggcccaccggctgttccccaagctccagtttgaggatttcatcgatcgagtggaatacctggggagtaagaaagaggtccaaacctgtctgaaacgtatccggttggatctaccaattctgcacgaggacttcgtgtcaaataatgatgaagtcgccgagaacaatgagcatgatgtcacgtccacagaattagaccccttcctcacaaatttaagcgagtcagagatgtttgctagcgaactgtcccggtccctgaccgaggagcagcagcaacgcattgagcgtaacaagcagttagcactagagaggagacaggctaagttactatccaatagccagactctcggaaatgatatgctgatgaatacgcctcgggcccacaccgtggaggaagtcaacacggacgaggaccaaaaggaagagtccaatggactgaacgaggacatcctggataatccgtgtaacgatgctatcgccaacacgcttaatgaggaggagacactgcttgaccagtcttttaagaatgtacagcagcaacttgatgccacatcccggaacattacggaggcgagatag

SEQ ID NO: 208745 - DNA, 537 bp, synthetic construct
  misc_feature 1..537: note = Description of Artificial Sequence: Synthetic coding sequence
  source 1..537: mol_type = other DNA
atgatgatccacggcttccagagcagccaccgggacttctgcttcggaccctggaaactgaccgcctccaagacacacattatgaagtctgcagatgtggagaaactcgcggatgaactacacatgccctccctgcctgaaatgatgtttggtgataatgtgctgcggatccaacacggctccggctttgggatagagttcaacgccactgacgctttacggtgcgtgaacaattatcagggaatgctcaaggtggcctgcgccgaggaatggcaggagagcaggaccgagggcgagcattccaaggaggtgatcaagccctacgattggacttacactacagactacaagggcaccttactgggtgaatcactaaaactcaaagtggttcctaccaccgatcacatcgacaccgaaaagctaaaagccagagagcagatcaagttttttgaggaggtcctgctgttcgaggacgaattacacgatcacggcgtaagctcactgtccgttaaaatccctggagggggccacttgtag

SEQ ID NO: 208746 - DNA, 819 bp, synthetic construct
  misc_feature 1..819: note = Description of Artificial Sequence: Synthetic coding sequence
  source 1..819: mol_type = other DNA
atgatgatccacggcttccagagcagccaccgggacttctgcttcggaccttggaagctgaccgcgagcaaaactcatataatgaaatctgcagacgtggagaagctggcagatgagctgcacatgccatcccttccggagatgatgttcggagataatgtactgcggattcagcacgggtctggctttggaatcgaattcaatgctactgatgccttgcgatgcgtcaataattaccagggaatgctgaaggttgcttgcgctgaggagtggcaggagagccggacagaaggagaacacagcaaagaggtgatcaaaccatacgattggacatacacgaccgattataaggggacgctgttgggggaaagccttaaactaaaagtcgttcccacaaccgatcatatcgacactgaaaaacttaaggctagggagcagatcaaatttttcgaggaggttcttttgtttgaggacgagctgcacgaccacggtgtctcctctctctctgtcaaaattcgagtgatgccttcgtctttctttctgttgctccggttttttttaaggattgatggggttctgattcgaatgaacgatacgcgcttgtatcacgaagctgacaaaacatacatgttgagagaatacacctccagggagtctaagatttcatccctcatgcatgttccacctagcctgtttactgagccaaatgagatctcccagtatctgcccataaaggaagcggtgtgcgagaagctgatcttcccggaacgaatcgatcccaatccggcggatagccagaaatcaacccaagttgaatag

SEQ ID NO: 208747 - DNA, 1143 bp, synthetic construct
  misc_feature 1..1143: note = Description of Artificial Sequence: Synthetic coding sequence
  source 1..1143: mol_type = other DNA
atgaccgaggaggtgatcgtgatcgccaagtgggactacaccgcccagcaggaccaagaactagatattaaaaagaacgaacgactctggctcttggatgactctaaaacatggtggagagtccggaacgccgccaaccggaccggctacgtaccctccaactacgttgaaaggaaaaatagtttgaagaagggttctttagtcaaaaacctgaaggacactctcggacttggcaaaactcgacgaaaaactagtgcaagagacgcgtcgcccacacccagtacggatgccgagtaccctgcaaacggcagtggcgcagatcgaatttacgatcttaatatccctgccttcgtaaagttcgcttacgtggcagagcgggaggatgaattatcattggtgaagggctcaagagttaccgtcatggagaagtgcagcgatggatggtggcgtggctcctacaatggccagattggttggtttccaagtaactacgtgctcgaagaagtagacgaggcagccgcggaaagccccagttttctgagcctcagaaagggagcctcactgtccaacggacaaggcagtagagtgctccacgtcgtccaaaccctgtaccccttttcttcagtgacagaggaagagctgaattttgagaagggagagactatggaagtgatagaaaaaccagaaaacgaccctgagtggtggaagtgtaagaacgccaggggtcaagttggcctcgtgccaaagaactatgttgtcgtgctgtccgacggacctgctcttcaccccgcccatgcacctcaaattagctatactggccccagcagttcaggccggttcgcgggacgtgaatggtattatggaaatgtcaccagacatcaggccgaatgtgcgctcaacgaaaggggggttgaaggtgacttcctgatcagggatagtgaatcctcccctagcgacttttctgtcagcctgaaggcttcaggaaaaaacaagcattttaaggtgcagctagttgataatgtgtactgtatcggccagagacgcttccacaccatggacgagcttgtggagcattataagaaggcccccatctttacctctgaacacggcgagaagctgtatttggtgagggcgctccagtag

SEQ ID NO: 208748 - DNA, 756 bp, synthetic construct
  misc_feature 1..756: note = Description of Artificial Sequence: Synthetic coding sequence
  source 1..756: mol_type = other DNA
atgatctacaccatgaagaaggtgcacgccctgtgggccagcgtgtgcctcctgctaaacctcgcaccagcccccctcaatgcagattcagaagaagacgaagagcacaccatcattaccgacaccgagttgccaccactgaagctcatgcattcattctgcgcattcaaagctgatgacgggccatgtaaggccattatgaagcgcttcttcttcaatatatttacacgacaatgtgaggaattcatctatggcggctgcgaagggaatcaaaaccgctttgagtctttagaggaatgcaagaagatgtgcacaagagacaacgccaaccggattattaagaccacccttcagcaagagaaaccggacttctgttttttggaggaggatccaggaatttgtagagggtacattacaagatacttctacaataaccaaacaaaacagtgcgagaggttcaaatacgggggttgtctgggtaatatgaacaatttcgagaccctggaggagtgcaaaaacatttgcgaggatggacccaatgggttccaggtggacaactacggtacacagctcaatgccgtcaataacagccttacccctcaaagcaccaaggtcccctcgctgttcgttacaaaggaaggcaccaacgatggatggaagaatgcggcgcacatataccaggtctttttgaatgcattttgcattcacgcctccatgttctttcttggtcttgacagtatctcctgtctttgttag

SEQ ID NO: 208749 - DNA, 915 bp, synthetic construct
  misc_feature 1..915: note = Description of Artificial Sequence: Synthetic coding sequence
  source 1..915: mol_type = other DNA
atgatctacaccatgaagaaggtgcacgccctgtgggccagcgtgtgcctcttactgaatctggccccagctcctttgaatgcagattccgaagaggacgaggagcacaccatcattacagacacagagttaccccctctgaagctgatgcactctttctgtgctttcaaggccgatgacggaccttgcaaggcgatcatgaaaaggtttttttttaatatatttacaagacagtgcgaggagttcatctatggtgggtgcgaaggaaaccaaaatcggtttgagtctttagaggagtgtaagaagatgtgtacccgcgacaatgccaatcggattattaagactaccttgcagcaggagaaacctgatttctgtttccttgaagaggaccccggaatctgcaggggctacattacacggtacttctacaataatcagacaaaacagtgtgagaggttcaagtatgggggatgtctcggtaatatgaataactttgagactctcgaggaatgtaaaaacatttgcgaggatgggcctaatggctttcaggtagataactacggcacacagcttaatgcggtgaataattccttgaccccgcagtcaacaaaagtgccgagcctgttcgaatttcatggtccctcctggtgcctaacacccgctgatcgggggctctgccgggccaatgaaaatcgtttttactacaatagtgtaatcggcaagtgccggcctttcaaatattccgggtgtggagggaatgagaataattttacgagcaagcaggaatgcttacgagcatgcaagaaggggttcattcagaggataagcaaggggggacttatcaaaaccaagcgcaagcgtaagaagcagcgagtgaaaattgcctatgaggagattttcgtgaagaacatgtag

SEQ ID NO: 208750 - DNA, 756 bp, synthetic construct
  misc_feature 1..756: note = Description of Artificial Sequence: Synthetic coding sequence
  source 1..756: mol_type = other DNA
atgatctacaccatgaagaaggtgcacgccctgtgggccagcgtgtgcttattgctgaacctcgccccagcgccattgaacgctgactcggaggaggatgaagaacacaccattataactgacaccgagcttccaccgttgaaactgatgcattctttctgcgcctttaaagctgatgatggcccatgcaaggcgatcatgaaaagattcttcttcaacatcttcacgagacaatgcgaggagtttatttatggaggctgcgaggggaatcagaatcggtttgagtccctggaggaatgcaaaaaaatgtgcacacgggacaatgctaaccggatcatcaagactactctccagcaggaaaagcccgatttctgtttcctcgaagaggaccccggcatatgtcgtggatatataacccggtacttctacaacaaccagaccaagcagtgcgagagattcaagtatggtggctgtttgggcaatatgaataacttcgaaaccctggaagaatgtaaaaacatctgtgaggatggcccgaatggctttcaagtagataattacggcacccaacttaacgcagttaacaacagtctcactcctcagtccacgaaggtcccctcactcttcgtgactaaagaaggaacgaacgacgggtggaaaaatgctgcccatatttatcaggtctttcttaatgccttctgcattcacgcctcaatgttctttttgggcctcgattcaattagctgcctgtgctag

SEQ ID NO: 208751 - DNA, 231 bp, synthetic construct
  misc_feature 1..231: note = Description of Artificial Sequence: Synthetic coding sequence
  source 1..231: mol_type = other DNA
atgatctacaccatgaagaaggtgcacgccctgtgggccagcgtgtgcctcctgcttaatttggccccagcacctctgaatgctgacagcgaagaagacgaggagcacaccatcatcacagacacagaattacctccgctaaagctgatgcactctttttgcgccttcaaggcggatgacggcccgtgcaaggctatcatgaaaagattctttttcaacatcttcacctag

SEQ ID NO: 208752 - DNA, 186 bp, synthetic construct
  misc_feature 1..186: note = Description of Artificial Sequence: Synthetic coding sequence
  source 1..186: mol_type = other DNA
atgatctacaccatgaagaaggtgcacgccctgtgggccagcgtgtgcttactcctgaacctggctcctgcccccctcaatgccgatagcgaagaggatgaagagcataccattattactgacactgaattgccaccgctaaagctgatgcactcattctgtgcgtttaaagccgacgacgggtag

SEQ ID NO: 208753 - DNA, 321 bp, synthetic construct
  misc_feature 1..321: note = Description of Artificial Sequence: Synthetic coding sequence
  source 1..321: mol_type = other DNA
atgatctacaccatgaagaaggtgcacgccctgtgggccagcgtgtgtctcttgctgaacctagccccagcccctctgaacgctgacagcgaagaggacgaagaacataccatcatcaccgacacggagctccctccacttaagttgatgcacagcttctgcgctttcaaggctgacgatgggccatgcaaagccattatgaaacgattcttctttaacatcttcacccgccagtgcgaagagttcatttatggcggttgcgagggaaaccagaatagattcgagtcccttgaggagtgcaagaagatgtgtactagatag

SEQ ID NO: 208754 - DNA, 867 bp, synthetic construct
  misc_feature 1..867: note = Description of Artificial Sequence: Synthetic coding sequence
  source 1..867: mol_type = other DNA
atgatctacaccatgaagaaggtgcacgccctgtgggccagcgtgtgtctcctactcaatctagcccctgccccccttaacgctgacagcgaggaggatgaggaacatacaattatcactgacactgagcttccacccctgaaactaatgcatagtttctgcgcttttaaggctgacgatggcccctgcaaggcgattatgaagagatttttcttcaacatcttcacccggcagtgcgaggaattcatttacggcgggtgcgagggtaatcaaaatcgatttgagagtttggaggaatgcaagaagatgtgcacacgcgacaacgctaataggattattaaaaccacccttcagcaggagaaaccggacttttgtttcctggaggaggatccgggaatctgcaggggctatatcacaaggtatttttacaataaccagactaaacagtgcgagcggttcaagtacggaggttgtctgggcaatatgaacaatttcgaaactttggaggaatgcaagaacatttgcgaagatggccccaatggctttcaagttgataattacgggacacagctcaacgcagtgaacaactctctgacaccacagtccaccaaggttccgtctctattcgagtttcatgggccatcttggtgtctgacacccgcagatcgaggtctgtgtagggctaacgagaaccgtttttattacaattcagtgattggcaagtgtcggcccttcaaatacagtggatgtggaggtaatgaaaataactttacatccaaacaggaatgcttaagggcatgcaaaaagggattcattcagcgaatatcaaaaggagggctgattaagaccaagcggaaacgtaagtag

SEQ ID NO: 208755 - DNA, 321 bp, synthetic construct
  misc_feature 1..321: note = Description of Artificial Sequence: Synthetic coding sequence
  source 1..321: mol_type = other DNA
atgatctacaccatgaagaaggtgcacgccctgtgggccagcgtgtgcctgctgctgaatctggctcccgccccactgaatgccgactccgaggaagatgaggaacataccatcatcacagatactgaactgccaccactgaagctcatgcattcattctgtgccttcaaggccgatgacggcccttgtaaagccattatgaagagatttttcttcaacatcttcacccgacagtgcgaggagtttatttatggagggtgcgagggaaatcagaaccggtttgaaagcctggaggaatgtaagaagatgtgcactcggtag

SEQ ID NO: 208756 - DNA, 318 bp, synthetic construct
  misc_feature 1..318: note = Description of Artificial Sequence: Synthetic coding sequence
  source 1..318: mol_type = other DNA
atgatctacaccatgaagaaggtgcacgccctgtgggccagcgtgtgtctgctgttaaaccttgccccggccccactcaacgccgatagtgaggaagacgaggagcataccattatcaccgatactgaactacctccactgaagctaatgcactccttttgcgcttttaaggctgacgatggtccttgcaaagctattatgaaacgcttctttttcaacattttcacacggcagtgcgaagaattcatctacgggggatgtgagggtaatcagaaccgctttgagagtctagaagagtgcaaaaagatgtgtacctag

SEQ ID NO: 208757 - DNA, 966 bp, synthetic construct
  misc_feature 1..966: note = Description of Artificial Sequence: Synthetic coding sequence
  source 1..966: mol_type = other DNA
atgggcgagccccagggcagcatgcggatcctggtgaccggcggctccgggctggtggggaaggcgattcagaaggtggtggccgacggcgcgggcctcccaggagaggactgggtgttcgtcagttccaaggacgctgatctgaccgatacagctcagacacgtgcgctgtttgagaaggtgcagcccactcacgtcattcacctcgccgccatggtgggcggactctttaggaacattaaatataatctggatttctggcgaaagaatgtgcatatgaacgataacgtcctccattctgcttttgaggtaggcgcccgtaaagttgtgagctgtttgagcacctgcatattccctgataaaaccacttacccaattgacgagactatgattcacaacgggcctccacataatagcaattttggttattcgtacgctaagcgcatgattgacgtgcagaatcgagcctacttccagcaatacgggtgtacatttacagcagtgatccccacgaacgtatttggaccacatgacaatttcaatatagaggatggacacgtgctgccggggctcattcacaaggtccaccttgcaaagagctctggcagcgcactaaccgtgtgggggaccggtaatcctcggcggcaattcatttacagcctcgacctggcccagctgtttatctgggttctgagagaatataacgaagtggaacctataattctgtcggttggcgaggaggatgaggtgtccattaaggaagccgcagaagctgttgtggaggctatggacttccatggagaagtgacctttgacaccaccaagtccgatggacagtttaaaaaaactgcctcaaacagtaagttacggacctatctgcctgattttagattcacacccttcaaacaagcggtcaaagaaacttgcgcatggttcaccgacaattacgaacaggccagaaagtag

SEQ ID NO: 208758 - DNA, 360 bp, synthetic construct
  misc_feature 1..360: note = Description of Artificial Sequence: Synthetic coding sequence
  source 1..360: mol_type = other DNA
atgggcgagccccagggcagcatgcggatcctggtgaccggcggctccgggttggtgggaaaggcgattcaaaaggtcgtagcggacggggcaggcctgcccggggaggattgggtttttgtctcttctaaggatgcagatctgaccgatacagctcagactcgcgccctgttcgagaaagtacagcctacccacgtgatccatctagccgctatggtgggaggactgttcagaaacatcaaatacaaccttgatttttggaggaaaaacgtccacatgaatgacaatgtcttacactccgcctttgaggtgggggcacgaaaggtggtttcatgcttgtcaacatgtattttcccttag

SEQ ID NO: 208759 - DNA, 807 bp, synthetic construct
  misc_feature 1..807: note = Description of Artificial Sequence: Synthetic coding sequence
  source 1..807: mol_type = other DNA
atgggcgagccccagggcagcatgcggatcctggtgaccggcggctctggactcgtgggcaaggccattcaaaaggtagtggccgatggcgcagggctgccgggagaagactgggttttcgtgagtagtaaagatgctgatctgaccgatactgcccaaactcgggctctctttgaaaaggtgcagcccacgcatgtcattcaccttgccgctatggtggggggcctgtttagaaacatcaaatacaatctggatttttggaggaagaacgttcacatgaatgataacgtactgcattccgcttttgaggtgggggccagaaaggtcgtttcctgcctttctacctgtatcttcccggataaaactacttatcctatcgatgagacaatgattcacaatggccctccacacaattctaattttggatactcttacgctaaacggatgatagacgtgcagaaccgggcctactttcagcagtatggttgcaccttcaccgccgtcattcccacaaatgtatttgggcctcatgataacttcaacatcgaagatggacacgtattacctggactgatacataaggttcacctggccaagagctccgggagtgccctcactgtgtggggtaccggcaatccaagaaggcaattcatttacagtctcgacctcgcccagctcttcatttgggttctgcgcgagtataatgaagtcgagccgattatcctttccgtgggcgaggaagacgaggtgtctatcaaagaggcagctgaagccgtggtggaggcaatggatttccacggcgaatag

SEQ ID NO: 208760 - DNA, 966 bp, synthetic construct
  misc_feature 1..966: note = Description of Artificial Sequence: Synthetic coding sequence
  source 1..966: mol_type = other DNA
atgggcgagccccagggcagcatgcggatcctggtgaccggcggcagcgggttagtcggcaaggccattcagaaggtcgtggctgatggcgctgggctgccaggagaggactgggtttttgtgagctcaaaggatgctgacctgaccgatacggctcagacacgggctctgtttgaaaaggttcaacctactcacgtgatccaccttgccgctatggtgggaggcctgtttcggaacattaagtataatttagatttttggcgcaagaatgtacatatgaacgataatgtcctgcatagcgcgtttgaagtgggcgctcggaaggtcgtgtcctgccttagtacctgtatttttccagataagaccacatatcccatcgatgagacaatgattcacaacggccctccacacaactccaacttcggctactcatatgccaagcggatgatcgatgttcagaatcgcgcctacttccaacaatacggttgcaccttcactgcggtgattccaaccaacgtcttcggccctcacgacaatttcaacatcgaagatgggcacgtcctgccaggcctcatccacaaagtgcatctggcaaaaagctccggatctgcactgacagtgtggggcactgggaatccaaggagacaatttatttatagcctggacctggcccagctcttcatttgggtccttcgggaatataatgaggtcgagcccatcatcctgagcgtgggcgaggaggacgaagtctcaataaaagaagcggcagaggccgtggtggaggctatggacttccacggcgaagtcacgtttgatactaccaaatcggatgggcagttcaagaaaaccgcctcaaactcaaagctcagaacctatctgcccgatttccggtttactccatttaagcaagcagtgaaagaaacctgtgcctggttcactgacaattacgagcaggccaggaagtag

SEQ ID NO: 208761 - DNA, 597 bp, synthetic construct
  misc_feature 1..597: note = Description of Artificial Sequence: Synthetic coding sequence
  source 1..597: mol_type = other DNA
atgggcgagccccagggcagcatgcggatcctggtgaccggcggcagtgggctggttggaaaagccatccagaaggttgtggccgatggggcaggtctgcctggcgaagactgggtctttgtgtcatccaaggatgccgacctgacagacaccgcccagacgcgcgccctgtttgaaaaagtgcagccaactcacgtcatccatctggctgccatggtcgggggtctcttccggaatattaaatataatctggatttttggaggaagaacgtccacatgaacgacaacgttctgcacagcgctttcgaagtgggagcccgcaaggttgtctcctgcctgagcacttgtatcttccccgataaaacaacatacccaatcgatgagactatgatacacaatggtccaccgcataattccaacttcggttactcttatgcaaagagaatgattgacgttcaaaatagggcctacttccaacaatacgggtgcacctttaccgcggttatcccgacaaatgtttttgggcctcacgataacttcaacatcgaagacggccatgtgctgccaggtcttattcacaaggtacacctggcttag

SEQ ID NO: 208762 - DNA, 2658 bp, synthetic construct
  misc_feature 1..2658: note = Description of Artificial Sequence: Synthetic coding sequence
  source 1..2658: mol_type = other DNA
atggtggagaagagcagcatcgacgagaacagcatcagcctggagaaggaggtcaggcacgtgcaggaacagaatctggacatattgaagaccgacctttccctgaagtctttcagcgaagaaatttatagtgagtcctgcgcactgttaccaacatcttctgccgacattgaggaaaccgatctgtctgaaaagtcatgtccgcttgaaaacggtggtagatctagcatctcacacctgaaaaaagctgccagtgaggaaaaacctctgggggtcggggagatggaagaggagtgtacattggagccggaactggccgccttccctaaacaggacgggggtacccaagaatataccgatgctacactcgaggatcatcgtggagatgtgcaagaagccgacacgctccacaggcagttgagcctgtctcagtgctttccactactgatgactgaggaacagcagaatcctggggagcaaatctccactaatattcatgcaagtggtgaagagaagtgttatgaagaagtgcaagtccaaaacgaagcctctttcagcactctggaaggagaaatgatagaaacttcattctctcaaaacattcccaaactcgatgaggcacataccacagaagccgcggagtctgagacttcgctcacacaatatcttcttgccgcaggaaaaagagaggtgccagaaacaaaagatacgcgggatcaggccaagctggtccagtctgagagcattacctcaatggaggtagaggaggttacttttaacacagtgtatgaatactataatcagaaacaggaatctctgggccggcccctgtcgcccgagagtgatatcagcatcggggtgggaagcacgacaagcgaagaaatttccgaactagaccagttctacactcctccatcgtccgtggagtactttgagtcccctaagtctcctgatctgtactttaatccaagtgatattacaaaacagtcatcaatccacagcggcggagagacagttgaacgatactcaaccccactgggtgaggtagctgaaaggtattccacccccagtgaaggtgaagtgggagagcggtactccactccccccggagaaacgttggagcgatacagcacaccaccaggggaaactcttgagcggtacagtaccccccctggtgaggctctcgaacgctactctattccaactggcgggcctaatcctacaggaacattcaaaacttatccttctaaaattgaacgcgaggacggaacaccaaacgagcacttttacacgccaacagaggagaggggctcggcctacgagatctggaggagtgactctttcggcactcccaacgaggcaatcgagccaaaagataacgagatgccacctagtttcattgaaccactgacaaaacgaaaagtgtacgaaaatacaactcttggctttatagttgaagtggaagggctacctgtgcccggtgtgaagtggtaccggaataagtctctgcttgaacccgacgagcgtatcaaaatggaacgggtgggcaatgtttgcagcttagagataagtaatattcaaaaaggtgaggggggggagtacatgtgtcatgcagttaatattatcggcgaagctaaaagtttcgcgaatgttgacatcatgccacaggaggagagggtggtggcccttccgccgcctgtcacgcatcaacacgtcatggagtttgatctggagcacacaaccagttcccgcactccaagcccacaggagattgttctggaggttgagctgtccgaaaaggacgtaaaggagtttgaaaaacaggttaagatcgtcactgtcccagaattcactcccgaccacaagagcatgattgtgagtcttgatgttctgccatttaatttcgtggatcccaacatggattcccgggagggcgaagataaagagctgaagatcgatctggaggtctttgaaatgccaccccgctttataatgccaatttgcgatttcaagatccccgaaaactcagacgccgtgttcaagtgcagtgtgattgggatccccacccctgaagtgaaatggtacaaggaatatatgtgcatcgagccagacaacattaaatatgtgatttcagaggagaagggttcacataccctcaagattcgaaacgtttgcttgtccgattccgccacctatcgatgtcgcgccgttaactgtgttggcgaagctatttgcaggggctttcttactatgggagactcggagatcttcgctgtaattgccaagaagagtaaagtgaccctgtccagcctcatggaagagctggtgctgaaatcaaactataccgattctttttttgagtttcaggtggttgagggaccaccgagattcatcaaaggcataagtgactgttacgctcctattgggaccgcagcctacttccagtgcttagttagagggagtcccaggcctactgtgtactggtacaaagacgggaaactcgtgcagggccgacggttcaccgtcgaagagtctggaaccggcttccataacctcttcattacttccttggtgaagagcgacgaaggagagtacagatgtgtcgccacgaacaaatccggcatggcagaaagttttgccgcactgacgctgacatag

SEQ ID NO: 208763 - DNA, 16815 bp, synthetic construct
  misc_feature 1..16815: note = Description of Artificial Sequence: Synthetic coding sequence
  source 1..16815: mol_type = other DNA
atgaccacccaggcccccaccttcacccagcccctgcagagcgtggtggtgctcgagggcagcacagcgacattcgaggcccacatcagcggcttccccgtccccgaagtctcatggtttcgggatgggcaagtgattagcacctctacattaccgggagttcaaatcagctttagcgacggccgcgcaaaactcaccattccagctgtgacaaaagccaatagcgggcgttattcgttgaaggccacaaacggcagcggtcaggcaaccagcacggccgaattgctggttaaagccgagactgccccaccaaactttgttcagcgtttacagtctatgaccgtgcgacagggaagccaggttagactccaggttcgagttactgggatccctactcctgtcgttaaattctatcgggatggagcagagattcagtcctcactggactttcagatctctcaggaaggagacctgtactcccttctgatcgcagaagcctaccctgaagactcgggcacatatagtgtgaacgctacaaacagcgtcggccgcgccacttctactgcggagcttttggtgcagggggaggaggaggtacctgctaagaagaccaagacaattgtgagcactgctcagatatccgagagccgccagacgcgtattgagaaaaaaatagaagcccatttcgacgccagatctattgcgacggtggagatggtgattgacggtgctgccggtcaacaactcccacataaaacaccaccacggatcccgccaaagcctaaatccaggtccccgacaccacctagcatcgctgccaaggcccagttggctcgccagcagtctccatcccctatccgccattcgccaagcccggtcagacatgtccgggcccccacccctagcccggttagatccgtgtcaccggctgctagaattagtacatctcccattagaagcgtgcgatcacctctgctcatgaggaagacccaggccagtaccgttgccaccggtcccgaggttcctcccccctggaaacaagaaggctacgttgccagctcttctgaagctgagatgcgagaaaccaccctcacaaccagcacacaaatcaggacagaagagcggtgggaggggcggtatggagtgcaagagcaggttactatttcaggggctgcaggggccgccgcttccgtcagtgcgtccgcttcctacgctgctgaggccgtagctaccggggccaaggaggtcaaacaggatgcggacaagagtgcagctgtggccaccgtggttgctgcagtggacatggctcgagtgcgagagcctgttatctccgccgtggagcagaccgctcagcgcacgactaccactgctgtgcacatacagcccgcccaggagcaggtgagaaaggaggccgaaaagactgcggttactaaggttgtggtcgcagctgacaaggctaaggagcaggagcttaagtctcgcactaaagaagtgattactacgaagcaggagcagatgcatgtgacgcacgaacagattagaaaggaaaccgaaaagacgtttgttcctaaggtcgtgattagcgccgccaaggcgaaagagcaggagacaaggatctccgaagagataactaagaaacagaaacaggtgacccaagaggctatacgtcaagaaaccgagatcaccgccgctagcatggtcgtcgtcgccaccgccaaaagcaccaagctggaaacagtgcccggggctcaggaggagactactacacagcaggatcagatgcatttatcatacgagaagattatgaaggagacacgaaaaactgtggtacccaaagtcatcgtggccacaccaaaagtgaaggaacaagacctggtttctcgaggccgtgaggggataacaacaaaacgtgagcaagttcagatcacacaggagaagatgcgaaaagaggcggaaaagaccgctctgtccaccatagcagtggcaactgctaaggccaaggagcaagaaaccattctgcgaacacgggaaaccatggccacacggcaggagcaaatccaagtgacccacggaaaggtggatgtcgggaagaaagcagaggctgtggccaccgttgttgctgccgtggatcaagcacgagttcgggagcctagagagccgggtcacctggaagaatcttacgcccagcagactaccctcgaatacggatacaaagaaagaatatctgctgctaaagtggctgagccgccacaaagaccagcttccgagccacacgtcgttcctaaggctgttaaacctcgcgtcatacaggcgccctcagagactcatatcaagactactgaccagaaaggtatgcacattagctcccagattaagaaaaccaccgatttaacaacagagcgtctggtgcatgtagacaagagacctcggactgccagcccccacttcactgtgagtaagatctccgttcctaagaccgaacacggctacgaggcctctattgctggctctgctattgccaccctgcaaaaggagctatcagctaccagcagtgcacagaaaataacaaaaagcgtaaaggccccgacagttaaaccgtccgagactagggtgagagcggaaccgaccccactgccgcagttccctttcgccgataccccagatacctacaaatccgaggctggagtagaagtcaagaaggaagttggagtgagtataaccggaacaactgtgagagaggaacgatttgaggttctacatggtcgggaggctaaggtgaccgaaacagccagggtgccagctccagtggaaataccagtgacacccccgacattagttagtggtctgaagaacgtcaccgtcatcgagggcgaatccgtaacactcgaatgtcatataagtgggtacccatctcctactgtgacatggtacagagaggactatcagattgaatcaagcatagacttccagataacttttcagtcgggaatcgcccgcctgatgatacgagaggcttttgccgaagactctgggaggtttacctgttctgcggtcaatgaagccggtacagtgtccacatcttgttacctcgcagtccaagtatccgaggaattcgagaaggaaaccaccgccgtcacggaaaagtttacgacagaagaaaaacgtttcgtggagtctagagatgttgtgatgaccgatacctccctgacggaagaacaggcaggcccgggtgaacctgcagccccatacttcatcactaaacccgtagtacagaaacttgtagagggtggcagcgtggtatttggctgtcaggttggaggaaatccgaaacctcacgtgtattggaaaaagagtggcgtgccccttacaactggctaccgctataaggtgtcctataataagcagacgggcgagtgcaagctggtgatctccatgacctttgcagacgatgctggagaatacacgattgtggttagaaacaagcacggcgagaccagcgcctccgcgtccctgctggaggaagctgactacgagctgctgatgaaaagccagcaggagatgctgtatcagactcaagtaaccgccttcgtgcaagagccaaaggtgggagagacagctcctggattcgtatacagtgaatatgaaaaggagtatgaaaaggagcaggcattgatacgtaaaaagatggccaaggacacggtggtcgtgaggacatacgttgaggatcaggaattccacatatcttcctttgaggagagactcataaaggagatcgagtaccgcataatcaaaacaacactcgaagagctgctagaggaagatggcgaggagaaaatggcagtagatatctctgagtccgaggccgtcgagagcgggtttgactctagaataaagaattacaggatactcgagggcatgggtgtcacttttcattgtaaaatgagtgggtaccccttgcctaagattgcttggtacaaggatgggaaaagaatcaaacacggcgaaagataccagatggattttttgcaggatggcagagcatccctgcgtatccctgtcgtcctgccggaagacgaggggatttacacagcctttgctagtaatatcaagggcaatgcaatctgctcaggtaagttgtatgtcgagccagcggctcctctgggtgctcccacatacattccaacactggagcccgtctcacgcatccgctctctcagccccagatccgtgtcaagaagcccgatcaggatgtccccagctaggatgtctccagccagaatgtccccagcaaggatgtccccagcccgaatgtctcccgggaggcgtcttgaagagaccgatgagtcccagctcgagaggttgtacaagcccgtattcgtactcaagccagtgtcattcaaatgccttgaagggcagaccgcaaggttcgacttgaaagtcgttggccgcccaatgccagagactttctggtttcatgatggccagcagatcgttaatgactacacccacaaagtcgtaattaaggaagacggtactcagagccttatcatcgtgccagcaacacctagtgacagcggcgaatggactgttgtggcccagaaccgcgcggggaggagttcgattagtgtcatccttacagtggaggcagttgaacatcaggtgaaacccatgtttgtggaaaaactgaagaatgtgaatattaaggaagggtcgcggctcgaaatgaaggttcgggctaccgggaatcccaatcctgacatcgtgtggttgaaaaattctgacatcatcgtcccacataaatatcccaagattcggatcgaagggacgaaaggcgaggctgccctgaagatagactcgactgtgagtcaggattcggcttggtataccgccaccgcaatcaacaaagcaggaagggacactactcgttgtaaggtcaatgttgaagtggaatttgccgagcccgaaccagagagaaaattgattatccctagaggtacttatcgcgccaaggagattgcggccccggagcttgagcctctccatcttcgctacggtcaggaacagtgggaggagggtgacctttatgataaggagaaacagcagaaacccttcttcaagaagaagctgacgagcctccgactcaagcgcttcggccctgcccatttcgagtgtaggcttacccctatcggagacccaactatggtggtcgaatggctccacgatgggaagcctttagaggctgctaaccggcttcgcatgattaacgagtttggctactgttccctcgactatggggtggcatacagccgagattccgggattataacatgtcgagcgacgaataagtacggaacggatcacacgtccgcgacactgatcgtgaaggacgagaaaagtctcgtagaggaaagtcagctaccagaaggcagaaagggtctccagcgaatcgaggaactcgagcgaatggcacacgagggagctctcaccggcgtcaccacagatcagaaggaaaagcagaaacctgatattgttctttaccctgaaccggtccgggttttagagggagaaacagctcggttccggtgccgcgtgaccggctatcctcagcctaaagtgaactggtatcttaatggacaactgattagaaagagcaagcgattccgcgtgaggtatgatggaattcactatctggatatcgttgattgcaaaagctacgacaccggggaggtgaaagtgaccgcagagaatcccgagggtgtcatagagcataaagttaaactcgagatccagcagcgcgaggacttccggtctgtgctgaggagggcaccggagccccgtcccgagttccatgtgcacgagccaggaaaacttcagtttgaggtgcagaaagtcgataggccggtcgacactacagagaccaaggaggtcgtgaagttgaaacgggctgagcggattacccacgagaaagttcctgaagagtccgaagaattacggtccaagttcaagaggaggactgaagagggatactacgaagctatcacggccgtggagctgaagtctcgtaaaaaggatgaatcttacgaggagctcctgcgaaagaccaaagacgagctgctacactggactaaagagctcaccgaggaagaaaagaaggccctggccgaggaaggcaagataactatcccgacctttaaacccgacaaaattgagctgtctccgtcaatggaggccccgaagatctttgagcgaatacaatctcagaccgtgggccagggatcagacgcccattttagagttagggtcgtgggtaaacccgacccagaatgcgaatggtacaagaacggagttaagattgaacggtccgaccgcatctactggtattggccagaagacaacgtctgcgagctggtgattagagacgtgaccgctgaagactctgcttcaatcatggtgaaggcaattaacatcgctggagagaccagcagtcatgcctttctcctcgtgcaagccaaacagctcatcacttttacgcaagagctccaggatgtagtcgcaaaggagaaggacacaatggccacctttgagtgcgaaaccagcgaaccattcgttaaggtgaaatggtacaaagatggaatggaggtgcacgaaggagacaagtatcgaatgcattctgatagaaaagttcacttcctcagtatcttgaccattgacacctctgacgctgaggactacagctgcgtgctcgtggaggacgagaacgtgaagacaaccgccaaattgattgtggagggagctgttgtggagttcgttaaagagctccaggacattgaggtgccagagtcgtactcaggggagctggagtgtatagtttctcccgagaacattgagggcaaatggtaccacaatgacgtggaactcaaaagcaatggtaagtacacaatcacatctcggcggggccgacaaaacctgacggtgaaggatgtaactaaggaagaccaaggcgaatactccttcgtcatagacggaaagaagacaacatgcaaattgaagatgaagcctcgcccaatcgcaatcctccaggggctgtccgaccagaaggtgtgcgaaggcgacatcgtccagctggaggtgaaggtgagcctggagtctgtcgaaggtgtatggatgaaggatgggcaagaggtccagccttccgaccgcgtccacatcgtgatcgataagcagtctcacatgctactcattgaggacatgaccaaagaagatgcggggaattattcctttacaattcccgcacttggactcagtactagcggtcgggtgagcgtgtacagtgtggacgtcattacccctctgaaggatgtcaatgtgattgaaggcacaaaagcagttttggagtgcaaagtgtccgtgcccgatgtcacatctgttaagtggtatctaaatgatgagcagatcaagcctgacgacagggtccaggccatagtcaaggggacaaagcagagattggtgatcaaccgtacgcacgcatcggacgagggaccctacaaactgatcgtaggtcgtgtcgagaccaattgcaatctgtctgtagaaaaaatcaagatcatcagaggcctccgagacctcacctgcacagagacccaaaatgtggtgttcgaggttgagctcagccatagcggcattgatgttctgtggaactttaaggacaaggagatcaagcctagcagcaagtacaagatcgaggcccatgggaaaatttataagttaacagtgttgaatatgatgaaggacgatgaggggaagtataccttctatgctggcgagaatatgacgtcaggaaagcttacagtggcgggtggggcgattagcaagcctttgacagaccagaccgtcgccgagtcacaggaggcagtattcgagtgcgaggtagccaatccggactccaaaggagaatggcttcgggatggcaagcatcttccactgaccaataacataaggagtgagtccgatggccataaacggcgccttatcatcgcagccacgaaactggatgacataggagagtatacctataaggtggccacctcaaagacctcagccaagctgaaagttgaagctgtgaaaatcaagaaaaccctgaagaacctgacggtcactgagacccaggacgccgtgtttactgtcgaactgacacatccaaacgttaaaggcgtgcagtggatcaagaacggagtcgtcctcgaaagcaacgagaaatacgctatctccgttaaagggaccatatacagcctgcgcataaagaactgtgccatagtggacgaatcagtgtatggattcaggctggggcggctgggggcctccgctcggcttcatgtcgagaccgttaagatcatcaaaaaacctaaggacgtcacggcccttgaaaatgctactgtcgcttttgaggtctccgtctctcacgacacggtaccagtgaaatggtttcacaagagtgtcgagatcaagcctagtgataagcaccggctggtgtccgagcggaaggtgcacaagctgatgttacagaatatctcacctagcgacgctggcgaatacacagcagtggtcgggcagctcgaatgcaaggcaaagctctttgtagagacgttgcacattacgaaaacgatgaaaaatatcgaagttccagagacaaaaaccgcatctttcgagtgtgaagtgtctcacttcaacgtcccaagcatgtggctgaagaacggcgttgagatcgaaatgtctgagaagtttaagattgtagtccagggcaaactccatcaactgatcattatgaatacttccactgaggactctgcggagtatacgtttgtgtgcggaaatgaccaggtgagtgctacacttactgtgacccccatcatgattacatcgatgctgaaagatatcaacgctgaagagaaagatacaattaccttcgaggtgaccgtaaattacgaaggcatctcatacaaatggctgaagaacggcgtggaaataaaaagtacagacaagtgtcagatgcgaacgaagaagcttactcactcactgaatatacggaacgtgcactttggggatgcggcagactataccttcgtggcaggaaaagcgacctctaccgccacgctttatgtagaggcgcgccacattgagttcaggaagcatatcaaagacataaaagtgctagagaagaagagggccatgttcgaatgtgaagtgtctgagccggacataaccgttcagtggatgaaagatgaccaggagctacagattacagatcgtataaagatccagaaggaaaaatatgtgcatcgactgttgattccctccacacggatgtccgatgctggcaagtacacagtcgtggccggcggaaatgtttctacagctaagctgtttgtcgagggaagagatgtgagaattcgatctatcaagaaggaggtccaggttattgaaaaacagcgtgcggtagtcgagtttgaggttaacgaagacgacgtagacgcacactggtacaaggatggcattgagataaacttccaagtgcaggagagacataaatatgttgtggagcggaggattcaccgcatgtttatttccgagactcggcagtctgatgcgggggagtatactttcgtggccgggaggaaccggtctagcgttactctgtacgtaaacgcccccgaacccccccaggtcttacaggagctccaacccgtgaccgttcagtctggcaagcctgcgcggttctgcgcagtgatctctggtcgcccgcagcctaaaatttcctggtacaaagaggaacagctcttaagcactggcttcaagtgcaagttcctgcacgacggtcaggagtatacactgctgctgattgaggctttccctgaggatgcagctgtgtatacgtgtgaagccaaaaacgattacggggttgctactacgagtgcatcattgtccgtggaagtgcccgaagtcgttagccccgatcaggaaatgcccgtgtaccctcctgcgatcataacccctctgcaggatacagttacctccgagggacagcccgctcgctttcagtgccgggtgagtggaacggatctgaaggtgagctggtactccaaggacaaaaaaattaaaccatcacgtttctttcggatgacccagtttgaggacacctatcaactggaaatcgccgaggcttaccccgaggacgagggcacgtatacattcgtggcttctaacgctgttggtcaggtctcgtccacagcaaatctgtctcttgaggctcccgaatccattctgcacgaaagaatcgagcaggaaatcgagatggaaatgaaagagctgttcagcgagggagagagcgagcattctgagcgggacacccgtgacgcattttctgatagtgaggacatcgatcataagagcatggccgccaagaggtacgcttcaagaatctcaagcacatcctcttggcccgagtattttaaaccctcattcactcaaaaattgacatttaagtatgtgctcgagggtgaacccgttgtgttcacttgtagattgattgcatgtccaacaccggagatgacctggttccataacaacagacctatcccgaccggactccgaaggatcattaaagctgagtccgatctgcatcatcactcgtcctcccttgaaattaagcgcgtccaggatagggattccggctcttatcggctactggccattaactcagagggaagtgcagaatccaccgctagtcttcttgtgatccagaagggacaagatgaaaagtacctggaattccttaaacgcgcagagcgcacacatgagaatgtggaagctctggttgagaggggtgaggaccgaatcaaagtggacctaagattcacgggtagtcccttcaataaaaaacaggatgtggaacagaagggcatgatgcgtacaatccacttcaaaaccatgagtagcgcgaagaaaacggattacatgtatgacgaagagtacctcgagtctaagtccgatataagaggctggctgaacgtgggagagtcctttctggacaaagagaccaaagtgaagctgcagcgtcttcgcgaagcacgcaagaccctcatggagaagaagaagctaagcctgctggatacatccagcgagatttccagcaggaccctaagaagcgaggcaagcgataaagatatcctcttcagccgcgaggatatgaagattcggtctatgtctgacctggctgagtcttataaggtggaccattcagcagagagcatcgttcaaaatcctcacgctctgtctaaccagatggaccagaatatcgagtccgaagagctccccactagctttcagaccattgtcgatgaggagatcttccagactgagattagaatgagccaggaagccctcgtgaaggagtcacttcccaaagatcacctctacggggagattttggttaatgagaatacccaggcacgcgggcagttggaagaaatcatggctaataccacaatcggcgaatccagcacctacataaccaacgtgtgtgagaaagaggaggtgtacgagaccccagaaaatgtctcacaggctatcacaccacatgcttcagagtccttcggcacccttgtcaatgtagaggaatcagaagagatcgcctctgaacggattaaaaaggatgaccttcgtgaacttcagctcagtgcatcgactcgtattgacgagttcaagacggagcagaaggaagagaatatgagatttttcgagaatagcttccggaagaggcctcagcgctgcccaccaagctttctgcaggagattgaatctcaggaggtgtacgaaggagattcatgtaatttcgtgtgtcattttcaggggtaccctcagcccattgtgacctggtataacaacgacatgcctataccacggaaccagaatttcataattcatagtctcgagaattacagcattctcaccctgtcttcagtccatcatcagaatgagggctctattacctgcgtcctatttaaccagtacgggacagtcaagacaaccagtatgctgaaggttaaggccaaacagaagcatgacgtgaaagcccataaagtgccggttttccatgactacttggacgaggaggaggagctggctctcgtgtttgaccaggcgaaaggagcccacccctctatgtcacaggagggacaaaccaacctgcatctgctaaagacgaacccgcccgtccctccaagcggagacaccgaactgctgtccttcccagttgaaatacaggtcacagccgccaccccaataccagaacaggacaaggagagtaaggaagtctttcagaccgaggagctggaaccaaaagctatgccgcaggatcaggtgacccaatctcctaagcatcgcttcgtattcctgagtgacattactaacgagcctccgaaaatgctgcaagagatgccaaaacacgccagatgccgtgaaggagatagcattatcctggagtgccttatctctggcgagcctcaacccgtcgtaacctggtttcaaaacggtgtgctgctgaagcaaaatcagaagtttcagtttgaagaggtcaattgcagccaccagctgtacatcaaggatgtcaattcacaggactccggcaagtacaagtgtgttgccgaaaacaattccggggccgtagaatcagtcagcgacctgaccgtcgaacccgtcacatacagagaaaacagccaattcgagaatatcggcgaaatctatggcaagtactcccgggatcagcagctgcaggaccagggcgagtctgtaagggcccacttttacgactaccccgcaggaccgtttacaccctggaccaacgtaaaggagtactccgtgagggattacttccagtcactggagacgattgagcaaattgaccagaaggagcaggtgcgatgtattccttcccgcgagaagataccgcgcttcgtgcacggggcatcaaggaccatcaaaatctccaagcctattcgggccgaattcatccaatgccaggctgaaggtaaggagcggcacgtctcagaaaagtccaagcttcatcaggctgagggaaccgtttacccatttgttgatgacttctccgacgtcacaatcaagaaagaaatcaggaataacttcggcaaactggggaggtctgaaaaagaaaatgtgcaggaatgcgcacagtcggattacctcccaaacatccactctgagcggatctctgacagctacaataccaaggacagctccgcaattgtgtatgaggagtctctgggagaggagatacactatccgggcaaaaaggtgaagcaccgaattatagaatttgagaaactgcacgtggaaaagggggttcttgagaaaaggcctaccaggacgagcattgtaaatcctccccagaagaaaattgatgataaagcattctcccttaagcagagagagtccagaagtagtaacctgaatgccaacatgtaccaggccgagaagatgtcacccaacacagaatctgactcctcaaacatcgcaattaacttaaagttactgtcgagccagacccacaaggagttcgatgcccaggagagagagcagcaggagaagatttctctgatcgataaacctgcgatcagcaagcgagccgagcacgaaagtcccattacctttgacttaaagcagttccatacccaaatcaaacatacagatgttaaattccaggagttagacagcggccagccagaggaagcttactttaaaatccaacacccggcagacaccgaaaacattgttttcgaccttaaacagatgtattcgcacataggtgaccccgccctcgaatttcaagggcaagaaaccagagagcaacaggagatacactataaggaaaagattcccagtccagagactcttcagccagatacccataacattagtaagagtgtgcagaacaatgtgtttgcttcccaagaaatctcgtcgagccaggagctgagtaatagaacaatggtggagaagtccagtattgacgaaaacagcatatctctggagaaggaggtccggcacgtgcaggagcagaatctcgatatacttaaaacagacctatcattgaagtcattcagtgaggagatctacagcgaaagctgtgctctgctgcctacgtcttcagcagacatagaggaaacagaccttagtgagaaatcttgccctctggaaaacgggggacgctcaagcatttctcacctcaaaaaggccgctagcgaagagaaaccactgggtgtcggtgagatggaggaggaatgcaccctcgaaccagaattagccgcttttccaaagcaggacggcgggacacaggaatacacagacgccacactcgaagatcaccgcggcgacgtccaggaagctgacacgcttcatagacaactgagtctatctcaatgcttcccactcttgatgaccgaggagcagcagaacccaggtgagcagatctcaaccaatatccatgctagtggcgaggagaaatgctacgaagaggtccaggtccagaacgaggcttcgtttagcacacttgaaggggagatgatcgaaacatcattctctcagaacattccaaaactggacgaagcccacactactgaagcggccgaatccgagacctccctgacacagtacctccttgctgcaggaaaacgcgaggtgccagaaacaaaggataccagagatcaggcaaaattggtccaatccgaatctatcaccagtatggaagtggaggaggtgacctttaacacagtgtacgagtactacaatcagaaacaagaatcgctgggcaggcctctcagcccagaaagtgatataagtataggtgtgggctccacgacctcggaggagatctcagaactggaccagttttacacaccaccctcttctgtggagtactttgagagtcctaagagccccgatctctactttaatccttcagatatcactaaacagtcttcaatccacagtggaggtgagaccgttgagcggtattctactcctcttggtgaagtcgcagaacgctactctactcccagtgagggtgaagtgggggaacgctattccacacccccaggtgagacattggaaaggtattccacgcccccaggcgaaactctcgagcggtatagcaccccccccggcgaaacgctggagcgctacagcacaccacctggcgagaccctagagcgctattcgactccccctggcgagacgctggaacgctactcaacgccccccggcgaggccctggagcgatactccattcccaccggtggcccaaaccccacgggaacattcaaaacctacccctctaaaattgagcgcgaggacggtacgccgaatgaacacttttacacccctaccgaggagagaggctcggcttacgagatctggaggagtgactcatttggcacgcccaacgaagccatcgagcccaaagataatgagatgccacctagcttcatcgagccactaaccaaacgcaaagtctacgaaaacaccaccctgggctttattgtggaagtcgagggcttgcctgtaccaggagtgaagtggtatagaaataaatccttactggagccagacgagcggataaaaatggagagggtgggaaatgtgtgttccttggagatttctaacatccagaaaggtgagggcggcgagtatatgtgtcacgccgtgaatattattggcgaggctaaatcctttgcgaatgtagatatcatgccacaagaggagcgcgtggtggcgctgccccctcctgtgacacaccaacacgtgatggagttcgatcttgagcacactacttcttcccgcactccatccccccaagagatcgtcttggaagtcgagctctccgagaaggacgtgaaggagttcgagaagcaagtgaagatcgtgacggtacctgaatttactccagaccataagtctatgatcgtgtccttggatgtgcttccgttcaactttgtagaccccaacatggactctcgtgagggtgaggacaaggagttgaaaattgacctggaggtatttgagatgccgcccagattcatcatgcccatttgtgacttcaagatccccgagaattctgacgctgtctttaagtgttcagtgattgggattcccactccggaggttaaatggtataaagagtatatgtgtattgagcctgacaacatcaaatatgttatttccgaagagaaaggcagccatactcttaagattagaaatgtgtgcctcagcgattccgccacgtaccggtgtcgtgctgttaactgtgttggtgaagcaatttgccgaggtttcctgacaatgggagacagtgagatctttgccgttattgccaagaagtcgaaggtgaccctgtcatccctgatggaggagctggtgttgaaatcaaattacacggactctttcttcgaatttcaggtagtcgaggggccgccccggttcatcaaggggatctccgactgctacgcccccatcggtaccgcagcctactttcagtgcctagttcggggctcacctcgtccaaccgtgtactggtacaaggatggcaaactggttcagggtcgtcggttcactgttgaagaatcgggaactggcttccataatctctttattacaagtctggtgaagtccgatgagggcgagtaccgttgtgtggccactaacaaaagcgggatggccgagagctttgccgcactgactctaacatag

SEQ ID NO: 208764 - DNA, 1419 bp, synthetic construct
  misc_feature 1..1419: note = Description of Artificial Sequence: Synthetic coding sequence
  source 1..1419: mol_type = other DNA
atgtacatctacgaggccagcgaggaggccgtgctggaggagaaggtgctggtgacccagcctcagaagactaaaccaaaactggcgaaggttcccgagcccccgaaaaaggtggtgcccgaggataagatttacgtgacaatacctaagaagcgcgagacacctgccacaaaggaacccgacactacaagaggcatcttccccgaggtggagccacctgaagctatacccgaaatccctgagcacccaccaacggaagagtttgaagttttcaaggaggtcattcccgaaggagagacacccattgtcaaacgcaggaagacgcccagtcctaccgcccctgaagcaatgaaggaagtcgtgcccgaaatgaagatattcgaagacgtgccggaagagccggagaccccccgcatgaagacacctgaggccccacaggaaatcatacctgcgaaaaccgtgcccagcaaaaagagggagccgcccagcgtcaaggtgcccgaggccctccaagagattgtgcctgaaaaaaagactctcgtggttcctctgagaaaacctgaggttcttcctgatgaagttccagaagcactccgtgaggtggtcccagagaaaaaggtccacccaccacagagggctgaggtggtcccagtgaaagtccacgaggctcctaaagaaatcattcctgaaaaaaaagtttcggtggtgccccccaaaaaacctgaggttccacctgtcaaggtcccggaagcttcaaaagaagtcatcagggaagaaaaagtcccactggccccacccaaggaacccgaggttcctcccgtgaaggtgcccgaacctccaaaagaagtggtgcccgaaaaaaaagcccccgtggctccacctaaggagccagaggtgccccccgttaaggttcccgaggcccctaaagaagtggtacccgaaaaaaaggtgcccgtgcccccgccaaagaagcccgaggtcccgcccacaaaggtgccagaggttcccaaggcggctgtccctgagaagaagctgccggaagcgattccaccaaaaccagaaagcccaccaccagaggtacctgaagtgctcccacccaaagaggtcgttcccgagaaaaaggtgccagtgcctccagccaagaagcctgaggcccctccccctaaagtgcctgaggccccaaaagaggtggttctggaaaagaaagcatctgtcgccgtgcccaagaagcctgaagctcccagagctaaggttcctgaagctgcacaggaagtggtgcctgagaagaagatccccaaggctcctataaaaaaaccagaagcacccgcagtcaccgttccggaggtgccgcaggagatagtgcccgagaagaagacacttgtcttgcccaagaaacccgaggtgccgcctgttacatag

SEQ ID NO: 208765 - DNA, 1122 bp, synthetic construct
  misc_feature 1..1122: note = Description of Artificial Sequence: Synthetic coding sequence
  source 1..1122: mol_type = other DNA
gtggtgcccgagaagaaggtgcccctggtggtgcccaagaagcccgaagcaccaccagccaaagttcccgaggtcccgaaagaggttgtgccggagaaaaaggtcgcagtcccaaagaagcctgaggtgccgccggccaaggtacctgaggtaccaaagaaacctgtcctcgaggaaaaacctgccgtccccgtgcctgagcgagccgagagtcccccccccgaggtctacgaggagcccgaagagatcgctcctgaagaggagatagcacccgaagaagagaaacctgtccctgttgccgaagaagaggagccagaagtgcctcccccagctgtcccagaagagccaaagaaaatcatcccggaaaaaaaggttccggtcatcaaaaagcctgaagctccacccccgaaagagccagagatgccgaaaaaagtggtgcccgtgaaaaaagtccctactgtcaagaaacctgaaacaccagccgcaaaagtgcccgaggtacctaagaagctcgtccctgtcaagaaggaaccggtccccgttaccaaaaagcccgaggttttaccagagaaagtgcccaaagtccctgaaaagatcattccagagaaagaagtatctgtcccaatcccggctgagccagaagtgccccctgccgaggtcgaggaaaccccagaggaaattatctatgaggagaaagccagcattacgatcggccgcaaagaaaccccaccagttgaggaacgcgaaattgaaaaatatatcaagcccgaggagcccgaacctgaaccacagccagaggagatccctgtgaaagagcctgagccagagaaggtgatcgagaaaccaaagctgaagccccggccgcctcctccacctcctgcaccacctaaagaggacgtgaaggaaaaaatcttccagcttaaggccatacctaaaaagaaagtccctgaaaagcctcaggtgcccgaaaaagtggaattaacccctcttaaagtgcccgagccacccccgccaaaaccagtcgaagaggtggaagtgcccacagtgacgaagagagaacgaaaaatccccgaacctaccaaagtccctgaaataaaacccgcgattccgctgcccgcatag

SEQ ID NO: 208766 - DNA, 543 bp, synthetic construct
  misc_feature 1..543: note = Description of Artificial Sequence: Synthetic coding sequence
  source 1..543: mol_type = other DNA
aaggtgcccgaggtgcccaagaagcccgtgctggaggagaagcccgcggtccctgtgcccgagagggccgaatcacctccacctgaagtctatgaagaacccgaggagatcgctccagaagaagaaatagcccctgaggaagaaaaacctgtaccagtggctgaagaagaggaacccgaggtgcctccacccgccgtgcccgaagaacctaagaaaattattcccgaaaagaaggttcctgtgatcaagaaacctgaggctcctccccccaaagagcccgagcccgaaaaggtgatagaaaaaccaaaactgaagccccggcccccaccacccccgcctgcacctccgaaagaggatgttaaggagaagatatttcaactgaaggccattccaaagaagaaggtgcctgaaaagcctcaggtgcctgaaaaggtggaactgacaccactgaaggttcctggcggggaaaagaaagttaggaaactgctccccgaaaggaagcccgaaccaaaggaagaggtagtactcaagagcggcatctag

SEQ ID NO: 208767 - DNA, 438 bp, synthetic construct
  misc_feature 1..438: note = Description of Artificial Sequence: Synthetic coding sequence
  source 1..438: mol_type = other DNA
gaggacacctaccagctggagatcgccgaggcctaccccgaggacgagggtacctatacattcgtggcatctaatgcagtgggacaggtcagttctaccgccaacttgtctttggaggcaccagagtccattctacatgaacggatcgaacaggagattgagatggaaatgaaggagctgttttctgagggcgaaagcgagcattctgaacgagacacccgcgacgccttcagcgattccgaggacatcgaccacaaaagtatggcagcaaaacgatacgctagcagaatctcaagcacctcatcttggccggagtactttaaaccgtcctttacccaaaaactgacattcaaatacgttcttgagggtgagccggtcgtctttacctgtagactgattgcctgcccaacacccgaaatgacatggttccataattag

SEQ ID NO: 208768 - DNA, 546 bp, synthetic construct
  misc_feature 1..546: note = Description of Artificial Sequence: Synthetic coding sequence
  source 1..546: mol_type = other DNA
atgttcttcgccagccacaccgaggaggaggtgagcgtgaccgtgccggaagtccagaaggaaattgtgacagaggaaaagattcacgtagcaatatctaagagggtcgaacccccacccaaagtgcccgaactgccggaaaagcccgcccctgaagaggtggcccccgtgccaattccaaagaaggtggagcctcccgccccaaaagtgcccgaagtgcctaaaaaaccagtgccagaagaaaaaaaaccggttcccgtccccaagaaggaacccgcagcaccccctaaagtccccgaagtgcctaagaagcccgtgcctgaggagaagatacctgtcccagtggccaaaaaaaaggaggccccacccgcgaaggtcccggaaattccaaagaagaaggtacccgaggagcgaaagccagtgccacgcaaggaggaagaagtccctcctcctcctaaggtcccggcgttacccaagaagccagtccccgaggagaaagtggcagtccccgtgcctgtggccaaaaaggccccacctcctaggtag

SEQ ID NO: 208769 - DNA, 2490 bp, synthetic construct
  misc_feature 1..2490: note = Description of Artificial Sequence: Synthetic coding sequence
  source 1..2490: mol_type = other DNA
gtggaggagttcatcaagctggagcagcaccgggtggaggaggagcacagagtcgagaaggtgcatcgggtgatagaagtgtttgaagcagaagaggtagaagtcttcgagaaaccaaaggccccacctaaaggtcccgaaatctcagagaagatcataccgcccaaaaagccaccaaccaaagttgtgcctaggaaggagccacccgccaaagttcccgaagtgcctaagaagatcgtggtcgaggagaaagtgcgcgttcctgaggaacctagagtgccacccactaaagctcccgaggtcccaaaaaaaatcgtgcctgaagaaaaggtgcgcgaagctgttctgaagaagcctgaagtgcctcccgctaaggtgcctggaatgcctaagaagtccgtgcaggaggaaaagtctccgatcgttatctcagaggatacggaaatgtatatttacgaggcgtccgaagaagcagttctcgaagagaaagttctggtgactcaaccgcagaagacgaagccaaagctggccaaagtccctgaaccacctaaaaaggtggtgccagaggataaaatttacgtcactattcctaagaaacgggagacacccgcaacaaaggagccggatactacacgcggcattttcccggaagttgagcctcccgaagccatacccgagatccctgaacatcctccgacagaggaattcgaagttttcaaggaagtcattcctgagggggagacacccatcgtgaaacgcagaaagacaccgtcacctaccgctcccgaagctatgaaggaagtggtccccgagatgaaaatctttgaagacgttcctgaagagcctgagaccccgaggatgaagactccagaggccccgcaagagatcatccccgcgaagacagtgccttcaaagaaacgtgaacccccgtcagtgaaggtgccggaggcactgcaggagatcgtcccagaaaagaaaactttggttgttcccttgcgaaaacctgaggtactgcccgacgaagtcccagaagctctgagggaagtggttcccgaaaaaaaggtgcatcctcctcagagagcagaggttgtgccagtgaaggtgcacgaggcacctaaagagatcatcccggagaaaaaggtgagcgtggtgcctcccaagaagccagaagtgcctcctgttaaggtgccggaagcatccaaggaagtgattcgagaagaaaaagtgccactggcccccccaaaagaaccagaggttccccccgttaaagtgcccgagcctcccaaggaggtcgtaccagagaagaaggctccagtggctccaccaaaggaacctgaagttccgcctgtcaaagtccctgaggctcccaaggaagtggtgcccgagaaaaaggtgcctgtgccaccacctaagaagcctgaggtcccacccacaaaggtgcccgaagtgcctaaggccgctgtgcctgaaaaaaaacttccagaggccataccccccaagcccgagtcaccgccgcccgaggtacctgaggtcctgcctccaaaggaggtggtcccagaaaaaaaagtgcccgtgcccccggctaagaagccagaagctcctccgcctaaggtgcccgaggcccctaaggaagttgtccttgagaagaaagctagtgtggctgtgccaaagaaacccgaagctcctagagctaaggtaccagaagccgctcaggaggtcgtgccagagaaaaagataccgaaggccccgattaaaaaacctgaggccccagctgttaccgtgcctgaggtcccgcaggagattgttcccgagaagaaaacgctggtgctgcccaagaagccagaagtcccacctgtgacggtgcccgaggcccccaaagaggtggttctggagaagaaggtaccctcggctcctcctaagaagcctgaggtacctccggtcaaagtgcctgaagctcctaaagaggtcgtacctgaaaaaaaagtgccggtgccccctccaaaaaaacctgaagtaccccccacaaaagtacccgaagtcccaaaagcagcagtccctgaaaagaaggtgcctgaagctatcccaccaaagccagagagccctccccccgaagtgccagaggtactgcctccaaaggaggttgtgccagagaaaaaagttccagtccccccggcgaaaaaaccagaagccccacctccaaaagttcccgaagcacctaaagaagttgtgctcgagaaaaaagcgagcgtcgccgtgcctaaaaagcctgaggcgcctagagctaaggtccccgaggccgcacaggaagtcgttccagagaaaaagatccccaaggcgcccattaaaaagccagaggctccagccgtaactgtacctgaagtcccgcaggaggctgccgaaaaggagattccagtcgctccacctaagaaacctgaagctcctatcgtacccgtgccggaggcacaagaagtggttccggagaagaaatag

SEQ ID NO: 208770 - DNA, 504 bp, synthetic construct
  misc_feature 1..504: note = Description of Artificial Sequence: Synthetic coding sequence
  source 1..504: mol_type = other DNA
atggccaccagcgagctgagctgcgaggtgagcgaggagaactgcgaaaggcgagaggctttctgggctgaatggaaggatctgactctgagtacccgtcccgaagaaggatgcagcctccatgaagaggacactcagcgtcatgagacttaccatcagcagggacagtgtcaggtcctcgtgcagcgctcgccatggctgatgatgaggatgggaatactgggccgcgggctgcaggagtaccagcttccttaccagcgcgtgcttcctctccccatattcactcccgccaagatgggcgccactaaggaggaacgcgaggacacacccatccagctgcaagagctgctagccttggagacagccttgggcgggcagtgcgtggatcgccaggaagtggctgagatcactaagcagctccctcccgttgtgccagtgtcgaaaccgggcgcactcagacgaagtttgtctcggtctatgagccaggaagcacagcgaggatag

SEQ ID NO: 208771 - DNA, 744 bp, synthetic construct
  misc_feature 1..744: note = Description of Artificial Sequence: Synthetic coding sequence
  source 1..744: mol_type = other DNA
atggccggcggcgtgctgcccctgcggggcctgcgggccctgtgcagggtcctgttgttcctgagtcagttctgtatactttctggtggagaacagtcccaggcgctggcacagtcgattaaagaccccggaccaacccggaccttcaccgtggttccacgtgctgctgagagcaccgagatacccccctacgtgatgaagtgcccttctaacggcctgtgcagccgacttccagcagattgtattgactgcaccacaaatttttcttgtacatacggtaagccggtcacatttgattgtgcagtaaaaccgtcagttacctgcgtcgatcaggacttcaagagccagaagaacttcatcataaacatgacgtgccgcttttgctggcagcttcccgaaacagactatgagtgcacaaactctaccagttgcatgacagtcagctgtccccgtcaaaggtatccggccaattgcacagtccgggatcatgtgcactgccttggcaaccgaaccttcccaaagatgctgtactgtaactggaccggtgggtataagtggagtacagctctcgcgctgtcaattactctcggcggcttcggggctgatcgattttatctgggacagtggcgcgaaggcctgggaaagctattcagtttcggaggcctcggcatctggacccttattgatgtgcttctaattggagtggggtacgtcgggcctgccgacggttctctctacatatag

SEQ ID NO: 208772 - DNA, 666 bp, synthetic construct
  misc_feature 1..666: note = Description of Artificial Sequence: Synthetic coding sequence
  source 1..666: mol_type = other DNA
atggccggcggcgtgctgcccctgcggggcctgcgggccctgtgccgagtgttactgttcctgagtcagttttgtattttatctggcggagaaagtacggagattccaccttacgtgatgaagtgtccctctaatggtttgtgcagtcggctgccagctgattgcattgactgtaccacaaacttctcatgcacatacggcaagcccgtaacgttcgactgcgccgttaagccatcagttacctgcgtggaccaagattttaagtcacagaaaaatttcattataaacatgacctgtagattttgttggcaactcccagaaaccgattacgaatgcaccaactccacatcatgtatgacagtgtcttgtccacgccaaaggtacccggccaactgcaccgtgagggatcatgtccattgtctgggcaaccgcacttttccaaagatgctgtattgtaattggacaggagggtataaatggagtactgctttggccttaagcataactctgggaggctttggcgccgataggttttatcttggacagtggcgtgagggactgggaaagcttttttctttcggcggactgggaatatggaccctgattgatgtgctattaattggtgtggggtatgtcggccctgccgatggctctctgtacatatag

SEQ ID NO: 208773 - DNA, 1251 bp, synthetic construct
  misc_feature 1..1251: note = Description of Artificial Sequence: Synthetic coding sequence
  source 1..1251: mol_type = other DNA
atggccagcagcagcggcagcagcccccggcccgcccccgacgagaacgagttccctttcggctgtccccccactgtgtgtcaggacccaaaggagccacgcgccctatgctgcgcaggctgtttgtcagaaaaccccaggaacggcgaagatcagatctgtccaaagtgtcgaggggaagatttgcagtcaatctctcccggcagccgccttcggactcaagaaaaagcacatccggaggtggcggaggcggggatagggtgtccattcgccggagttggatgctcttttaagggctcacctcagtcggttcaggagcatgaggtcacttcccaaaccagccacctcaatctcctactcggcttcatgaagcaatggaaggcgcggcttggttgcggactggagtctgggcctatggcgttagaacagaacctgagcgatctgcagctccaggcagcggtggaggtggctggagacctggaagtcgattgctaccgagctccatgctccgaatcacaggaggaactggctctccaacacttcatgaaggagaagcttttagcagaattagaaggaaaattacgggtattcgagaatatcgtcgcagttctgaataaggaggttgaggcgagtcatctggcactggctacatccatccaccagtcacagctggaccgggaaaggatcctgtccctggagcagcgcgtggttgaactccaacagaccctggcccaaaaagaccaggcactgggcaaattggagcagagcttaagactgatggaagaggcctctttcgacggtaccttcctgtggaaaataactaatgtgacacgccgctgccacgagtccgcatgtggccgaaccgtgtcgctgttcagcccggcattctatacagccaagtacgggtacaaactgtgtttgcgactgtatctgaacggtgacgggaccgggaagcgcactcacctcagtctgtttatcgtgatcatgcgcggtgagtacgacgcactgctgccctggcctttcagaaacaaggtcacattcatgttactggaccagaacaatagagagcacgccatcgacgcctttcgtccagatcttagctccgcctcattccagcgcccacagtcagaaacaaatgtggcatcagggtgccctctgttttttcctctgtcaaagttgcagagccctaaacacgcgtacgtcaaggacgacaccatgtttttgaaatgcatcgtcgagacatccacttag

SEQ ID NO: 208774 - DNA, 1251 bp, synthetic construct
  misc_feature 1..1251: note = Description of Artificial Sequence: Synthetic coding sequence
  source 1..1251: mol_type = other DNA
atggccagcagcagcggcagcagcccccggcccgcccccgacgagaatgaatttcccttcggctgcccgcccacagtgtgccaggacccaaaagagcctcgggctttgtgttgtgccgggtgtctgagtgagaacccccgcaacggcgaagatcaaatttgtcccaaatgcaggggagaagatctgcagtccataagcccgggcagccggctccggactcaggaaaaggcacaccccgaggtcgctgaggccggtattggctgtccctttgctggggtgggatgcagctttaagggctcaccacagtctgtccaggaacatgaagtgacttcacagacatctcatctcaacctcttactgggcttcatgaagcagtggaaggcgagactgggttgcggcctggagtccggcccaatggccctggagcagaacctctccgatttacagctacaagctgccgtcgaagtggctggtgatctggaggtggactgttaccgagctccgtgctccgagagccaagaggagctcgccctccagcattttatgaaggagaaattactagcagagctggaaggcaagctcagagtattcgagaacattgtggccgtgctgaacaaggaggtggaagcctcccacctggctttggcgacttctatacaccagtcgcagttagaccgagagaggattctcagcctcgagcaaagggtcgtcgagttgcagcagactctagctcagaaagaccaggccctgggcaaattagaacaaagcttaaggctcatggaggaagcgagcttcgacggcacatttctgtggaagatcaccaacgtgaccaggcgctgtcatgaatccgcgtgcggcagaactgtgtcgctcttcagtccagcgttttatacagctaagtacggctataaattatgcttaaggctttatttgaacggagatgggactggcaaaaggacacacctgtccctcttcattgttataatgaggggagaatatgatgccttgctcccatggccattccgtaataaagtcacctttatgctgctcgatcagaataacagagaacacgcaatcgacgcttttaggcctgatctgagcagtgcctccttccagagacctcaaagcgagactaatgtggcaagcggatgccctctgttttttcccttgtctaagctccaatctcccaaacatgcttacgttaaggatgataccatgttcctcaagtgtatcgtagagactagtacgtag

SEQ ID NO: 208775 - DNA, 885 bp, synthetic construct
  misc_feature 1..885: note = Description of Artificial Sequence: Synthetic coding sequence
  source 1..885: mol_type = other DNA
atgaagcagtggaaggcccggctgggctgcggcctggagagcggcccaatggcactggagcaaaacctcagtgatcttcagctacaggcagccgtcgaagtggcgggcgacttggaggtggattgttaccgcgcaccttgtagtgagtcacaggaggaactggctcttcaacatttcatgaaggagaagctgctggcagagctcgaagggaaactccgggtctttgagaacatcgttgccgtactgaacaaggaagtagaggccagccacctggcactcgctacctctatccaccagtcacagctggaccgagagcgtatactctctctggaacaacgcgtcgtcgagctgcagcagactctggcccagaaggaccaggctcttggcaagctggagcagagcctacgcctgatggaggaggcatcctttgacggcacattcctttggaaaatcacaaacgtgacaagaaggtgccacgagtccgcgtgtggccgaactgtgagtctgttcagtcccgccttctataccgcaaagtatggatataagttatgtcttaggctgtacttgaacggtgacggcaccggcaaacgcactcatctgtctctgtttatcgtcattatgaggggagaatacgacgctctgttgccctggccattcaggaacaaagtgaccttcatgctgctagatcagaataacagagagcacgctatcgatgctttcaggcctgacctctcctctgctagcttccagaggcctcagtccgagaccaatgtggcgtccggctgccccctctttttccccctgagtaagctccagtccccaaaacacgcttatgtgaaagacgacaccatgtttcttaagtgtattgtagaaacatccacatag

SEQ ID NO: 208776 - DNA, 2076 bp, synthetic construct
  misc_feature 1..2076: note = Description of Artificial Sequence: Synthetic coding sequence
  source 1..2076: mol_type = other DNA
atgaacgccgccgtggtgcggcggacccaggaggccctgggcaaggtcataaggaggcctccattgactgaaaaacttctgagcaaaccccccttcagataccttcacgatattatcacagaggtgatccgcatgactggcttcatgaaagggctttacaccgatgctgaaatgaaaagtgacaatgtgaaggacaaggacgctaagatctcatttttacagaaagccatcgatgtggttgtgatggtgtccggagagccccttctggccaagcctgcccgtatagtcgccgggcacgaacccgagcgtacaaacgagctattgcagatcatcggcaaatgctgtctaaacaaactgtcttcagatgacgctgttagacgggtgctggctggggagaagggcgaggtcaaggggcgagcaagcctgacaagtaggtcacaggaacttgacaacaaaaatgttagggaggaggaaagtcgagtacacaaaaatacggaggaccgtggagacgccgaaattaaagagcgatccaccagtcgagacaggaagcagaaggaggagctgaaagaagacaggaagcctagggaaaaggacaaagacaaggagaaagcgaaagaaaacgggggcaataggcacagggagggagaaagggaacgggctaaggccagagcccgccctgataacgagaggcagaaagacagggggaaccgagaacgcgatcgagattcagagcgcaagaaggaaaccgaacgcaaaagtgagggcggtaaggagaaagaacgcctccgtgatagagatagggagagagatagagataaagggaaagaccgggaccgaaggagggtcaaaaacggcgagcatagctgggatctggatagagagaagaaccgggagcacgataaacccgaaaaaaaaagtgcctcgtctggtgaaatgagtaagaaactatcagacgggactttcaaggactcaaaagcagagacggaaactgagatctcaacacgtgctagtaaatcactaaccaccaagacctctaagagaagatcaaagaactctgtggaaggtaggaaagaggataatatttctgccaaatccctggactctattgttagcggtatcaacaatgaacccaatcaggaaaccacaacgagcgaaatcgggactaaggaagctaatatcaatagcacaagcatttccgatgacaactccgcctccctgcggtgtgagaacatccagcccaatcctactgagaaacaaaaaggcgattctacgagtgatgctgagggagatgccggccctgctggacaggacaaatcagaggtgcccgaaacacccgagatccctaacgaacttagttctaacatcaggcggatcccgcgaccaggatcagcacgccccgcacccccccgcgtcaagcgtcaggatagtatggaagctttgcagatggatcgatccgggtccggcaaaaccgtcagtaacgtaataaccgagagccacaattcagataatgaagaggacgatcagtttgtggtggaagcggcccctcagctgagcgaaatgtcagagattgagatggttacggctgtagagttggaggaagaggaaaaacacggggggctggtcaaaaaaatccttgagaccaaaaaagactacgaaaaattgcaacaaagtcctaagcctggggaaaaggagcggtccctctttgagagcgcctggaaaaaggagaaggatattgtgtcaaaagagattgagaaactgagaacctccatccagaccctgtgtaaaagcgccctccccctgggtaaaataatggattatatccaggaggacgtggatgcgatgcagaatgagctgcaaatgtggcactcagagaatagacagcacgccgaagctctgcagcaggaacaaaggattacagactgcgccgtcgagcccctgaaggctgagctggctgagctggaacagctgattaaagatcagcaagacaagatatgcgctgtgaaagcaaatatcttgaagaatgaagagaaaattcaaaagatggtttattccatcaatctgacgagccggcgctag

SEQ ID NO: 208777 - DNA, 1878 bp, synthetic construct
  misc_feature 1..1878: note = Description of Artificial Sequence: Synthetic coding sequence
  source 1..1878: mol_type = other DNA
atgaacgccgccgtggtgcggcggacccaggaggccctgggcaaggtcattcgccggccacccctgaccgagaaattgctgtctaagcccccatttcgatatctacatgacatcattaccgaggttattaggatgacaggatttatgaaaggactttacacggatgcggaaatgaagagcgacaacgttaaagacaaagacgccaaaataagtttcttacaaaaggctattgatgtcgtggttatggtgtcaggagaacctctgctcgcaaaacccgcacgcatcgtcgctggccatgagccagagcgaactaacgaactgctacagattatcggtaagtgttgtctgaacaagttgagctcagacgatgctgtccgccgggtgctggccggtgaaaagggagaagtcaaaggacgggcatctctaacatcgcgcagccaggaactcgataacaagaatgttagggaggaagagtctagagtccataagaacacggaggatcggggagatgcagagataaaggagcggtctacttctagggaccgtaaacagaaggaagagctaaaggaggaccgcaaacctcgggagaaagacaaagacaaggaaaaagcgaaagaaaatggcggcaaccgccacagagagggagagcgagagagagccaaggcaagggctcgacccgacaatgagcgccagaaggatagaggaaatagggagcgcgacagggactccgagcggaagaaggaaacagaacggaaatcggaaggcggcaaggagaaggagcgacttagggaccgggatcgagaaagagacagggataaagggaaggatcgggataggcgacgggtgaagaatggggaacactcctgggacctagaccgagagaaaaatcgagaacatgacaagcccgaaaagaaaagcgctagttccggcgaaatgagcaagaaactctctgatgggaccttcaaagacagcaaagcagagacagagacggaaatctccacacgggcaagcaagtcactcacgacaaaaacctctaagcggaggtccaagaactctgtcgagggtgactccacctccgatgccgagggagatgccggaccggctggtcaggataagtctgaggtccccgagaccccagagatccctaacgaactatctagtaacatccgcaggatcccccggccaggaagcgccagacccgcgcctccacgcgtgaagcgacaagactccatggaagccctccagatggaccgcagtggaagtggcaagacagtgagcaacgtgatcaccgagagtcacaatagcgacaacgaagaagacgatcagttcgtagtcgaagctgctccccaactatcagaaatgtcagagatcgagatggtcactgccgtggagctggaggaagaggagaaacacggcggtctggtcaaaaagatcttggagaccaagaaggattacgaaaaactgcaacaatccccgaaacccggagagaaggaaagaagtctgttcgagtccgcatggaagaaagagaaagacatagtttccaaagagatcgaaaagctacgcacgagtattcagactctgtgcaagtcagcactgcccttaggaaaaataatggattatattcaggaggatgtcgatgccatgcagaatgagctccagatgtggcatagcgagaacaggcagcatgctgaggccctgcagcaagagcagaggatcacagattgtgcagtcgaaccactgaaagcagagctggctgaacttgaacagttgatcaaggatcagcaagacaagatctgtgcagtgaaggcgaatatcctaaagaacgaggagaagattcaaaagatggtttatagcattaaccttacttctcgacgttag

SEQ ID NO: 208778 - DNA, 2076 bp, synthetic construct
  misc_feature 1..2076: note = Description of Artificial Sequence: Synthetic coding sequence
  source 1..2076: mol_type = other DNA
atgaacgccgccgtggtgcggcggacccaggaggccctgggcaaggtcattcggcgcccaccactcactgaaaagcttctgtctaaacctcccttccgctacctgcacgatatcattacggaagtaatccggatgaccgggtttatgaagggcctctacaccgatgctgagatgaagtcagacaacgtcaaggataaagatgctaaaattagctttcttcagaaagccattgacgtagtggtaatggtgtctggtgagcccctccttgctaaacctgccagaattgttgcgggccatgaaccagaacggactaatgagctcctgcagattattggcaaatgttgtttgaacaagctttcctctgatgatgccgtgaggcgcgtgttagctggcgaaaaaggtgaagtcaaaggaagagcctcactgacttctcggagtcaggaactggacaataaaaacgtccgggaggaagaatctagggtgcataagaacaccgaagatcgcggcgacgcagagataaaagaacggagtacatctagggacagaaagcaaaaggaggagctcaaagaggaccggaagccccgcgagaaggacaaggataaagagaaagccaaggaaaacggtggaaatcgccaccgggagggcgagcgagagagagctaaggccagagcaagacccgacaatgaaagacagaaggaccggggcaaccgagagagggaccgggattctgagagaaaaaaggagaccgagcgcaagtcagaaggagggaaagaaaaagaaaggctgagggacagagacagggaaagggacagggataagggtaaggatagagacagaaggcgggtgaagaatggagaacactcttgggacttggatagggaaaagaatagagagcatgacaagcccgagaaaaagagcgccagctccggcgaaatgagtaagaagctttcagatggaacattcaaggattccaaagctgaaactgagactgagatctccactcgagcctctaaaagcctgactactaaaacttcaaagcggaggtctaaaaattcagtcgaggggcgaaaagaagataatattagcgccaagagcctggactctattgtgtcagggatcaacaatgagccgaaccaggaaacaacaacctccgagattggtacgaaagaggcgaatatcaacagcaccagtatcagtgacgacaatagtgcttccttacggtgtgagaacattcaaccaaatccgacagagaaacagaagggcaaaaatgggtcagaacgggagggggatgcaggacccgccgggcaggacaaatctgaggttcctgagacgccagagatccctaacgagctctcatctaatatccgacgcatcccccgaccaggtagcgcacgacccgctcctcctcgggtgaagaggcaggactccatggaggcccttcagatggatcgttctggtagtgggaagactgtgtcaaacgtaatcacagaaagccataattccgataacgaggaggacgatcaattcgtggtggaggccgcccctcagctgagtgaaatgtccgaaattgaaatggtaacggctgtagaactggaagaggaggagaagcacggcggcctggtgaaaaagatcctagaaactaaaaaggactatgagaaactgcagcaaagccccaagcctggcgagaaagagcggtctctttttgagagcgcatggaaaaaagaaaaggacatcgtcagcaaggagattgagaagctgcgcacaagcatccaaactctctgcaaatccgctctacccctgggtaaaattatggactacatccaggaagacgtggacgcgatgcagaatgagctacaaatgtggcattcagagaatcggcagcacgcagaggccctgcagcaggaacaaaggattaccgattgcgcggtggagcctctcaaggcagagcttgctgaattggagcaactgatcaaggaccaacaagataagatttgtgctgtaaaggctaatattctgaaaaatgaggagaaaattcagaagatggtttattccatcaatttgacttccagacgctag

SEQ ID NO: 208779 - DNA, 1878 bp, synthetic construct
  misc_feature 1..1878: note = Description of Artificial Sequence: Synthetic coding sequence
  source 1..1878: mol_type = other DNA
atgaacgccgccgtggtgcggcggacccaggaggccctgggcaaggtcatcagaagaccccctttgactgagaaactgctgagcaagccccccttccggtacctgcacgacattattactgaggttatacgaatgacgggattcatgaaaggcctgtataccgatgcggagatgaagagtgataatgtgaaagataaggacgctaagatctccttcctgcagaaggccatcgatgtggtcgttatggtgagtggcgaacccttgttagcaaagccagcacgcattgtcgccggtcacgagccggagaggaccaatgagcttttacagatcattggcaaatgctgcctgaacaagctgagtagcgatgacgccgtgaggcgcgtgttggcaggggaaaaaggagaggtaaaggggagggcttccttaaccagtcgcagtcaggagctagataacaaaaacgtccgggaagaagaatctagagtgcataaaaacactgaggataggggagatgctgaaattaaggagaggtccactagccgggatcggaaacagaaggaggagctcaaggaggaccgaaagcccagggagaaagacaaagataaggagaaagccaaggaaaacggtggcaaccgacaccgtgagggcgaacgtgagcgagctaaagcacgggcacgccccgataatgaacgccagaaggatcggggtaatagggagcgggatcgagattccgaacgaaaaaaagagactgagcgcaaaagcgagggcggaaaggagaaagaacggctgcgggacagagacagggagagagaccgagacaagggaaaagatagagatagaagaagagttaaaaacggagagcatagctgggacctggaccgagagaaaaaccgggagcacgataagcctgaaaaaaaatcagcaagctccggagaaatgtccaaaaagttgtcagacggcaccttcaaggatagcaaggccgagacagagacggagataagtacccgtgctagtaaaagccttacaactaaaacttcaaagagacgcagtaagaactccgtagaaggcacggcaaagctaatccttgagggcgatgctggacctgctgggcaggacaaatcagaggtgccagagactcctgagattccgaacgaactgtcatcaaatatccggcgcataccgaggccagggtccgctcgaccagcccccccgagagtgaaacggcaggactcaatggaagccctgcaaatggaccggtcaggctccgggaagacagtgagcaacgtgattactgaaagtcacaactctgacaacgaagaggacgaccagtttgtcgtggaggccgctcctcagttgagcgagatgagcgaaatcgaaatggtcactgcggtcgaacttgaagaggaggaaaagcacggggggttagtgaaaaagatactagagacaaagaaagactatgagaagttgcaacagtcacctaaaccaggggaaaaagaacggagcctgtttgaaagtgcatggaaaaaggaaaaggacattgtgagcaaggaaatcgagaagctgcgcaccagcatccagacgctgtgtaaatcggcactcccactcggtaaaatcatggactacattcaggaggacgtagatgctatgcagaatgagctgcagatgtggcacagcgagaaccgacagcacgccgaggcactacagcaagaacagcgtattacggattgcgctgtggagccgctcaaagctgagctcgccgagctggaacagctgattaaagaccagcaggacaagatttgcgcggtgaaagctaatattctgaaaaatgaggagaagattcagaagatggtgtactccatcaatctgacaagtcgaagatag

SEQ ID NO: 208780 - DNA, 1674 bp, synthetic construct
  misc_feature 1..1674: note = Description of Artificial Sequence: Synthetic coding sequence
  source 1..1674: mol_type = other DNA
atggcctacagcgaggagcacaagggcatgccctgcggcttcatccggcagaatagcgggaactccataagtctagacttcgagccctctatagagtatcaattcgtagagcggcttgaagaacgctacaaatgtgccttttgtcatagtgtgctccacaaccctcatcaaaccgggtgcgggcatcgcttttgccagcactgtatcttgtccctgcgcgaactgaatactgtgcctatttgccccgtggataaagaggtgatcaaatctcaggaagtatttaaagacaactgttgcaaaagagaggtgcttaacctctatgtctactgtagtaacgccccaggatgcaatgccaaggttattctgggccgatatcaggatcacctccaacagtgcctgtttcagcctgttcagtgctcaaatgaaaagtgtagggagcccgttctacgaaaggacctgaaggagcacttaagcgcttcatgtcagttccgcaaagaaaagtgtctgtattgtaaaaaggacgtggtggtcattaacttgcaaaaccacgaggagaacctctgtccagagtatcctgttttctgcccgaataattgtgccaaaatcattcttaaaaccgaagttgatgaacacctggcggtttgtccagaggcggagcaagactgcccattcaaacactacggttgtgcggtgactgacaagagacggaacctgcagcagcacgagcatagcgccctcagagagcatatgaggctcgtgctggaaaagaacgtgcagctggaagagcaaatctcagaccttcataaatcactcgagcaaaaagagagtaaaatccagcagctggcagaaaccattaaaaagctcgaaaaagaattcaaacaatttgcccagctgtttggaaaaaatggttctttcctgcccaatatacaggtgtttgcctcccatatcgacaaaagcgcctggctggaggcgcaggtccaccagctgctccagatggttaaccaacaacagaataagttcgacttacgacctctgatggaagctgtggacaccgtaaaacagaaaatcacgttgcttgagaataatgatcagcgactggcggttctagaggaagagacaaacaaacatgatacacacatcaacattcataaagcgcagcttagtaagaacgaagagcgattcaagctcctggagggcacctgctataacggtaaactcatttggaaggtgacggactacaagatgaaaaagagggaggctgtggacggccacaccgtcagtatcttctcccagtctttttacaccagtcgctgcggctataggctgtgcgcacgggcgtatttaaacggcgacggcagcgggcgtggctcccacttgagtctgtactttgtggtaatgcgaggcgagttcgattcactcctccagtggcccttcaggcagcgcgtcacactaatgttgctcgatcagagtgggaagaagaacattatggaaacgttcaagcctgatccgaatagcagctcttttaaacgcccagacggcgagatgaacatcgcctcaggatgtccaaggtttgttgcacatagcgtacttgagaatgccaaaaacgcttacattaaagatgacacgttgttcctaaaggtcgccgtagatctcactgacctcgaggatctctag

SEQ ID NO: 208781 - DNA, 1674 bp, synthetic construct
  misc_feature 1..1674: note = Description of Artificial Sequence: Synthetic coding sequence
  source 1..1674: mol_type = other DNA
atggcctacagcgaggagcacaagggcatgccctgcggcttcatcagacaaaactccggtaacagcataagtctcgattttgaaccctcaatcgagtaccaatttgtcgagcggttggaggagagatacaagtgcgctttctgccactccgttttacacaacccacaccagactggttgtggccaccgcttttgtcagcactgcatcttaagccttcgtgaattaaacaccgtccccatctgtcctgtggataaggaagtcattaaatcccaagaggtgttcaaggacaattgctgtaaacgcgaagtgcttaatttgtatgtctattgcagcaatgctccgggctgtaatgctaaagtcatcctgggacggtaccaggatcatttgcagcagtgtctgtttcagcccgtgcagtgtagtaacgagaagtgtcgtgagcctgttctcaggaaagacttaaaggagcacctgtcggcctcctgtcagttccgcaaggagaaatgtctgtattgtaaaaaagatgtcgtagttataaatctgcagaatcacgaagaaaatctgtgtcctgagtaccctgtgttctgtccgaacaattgcgcaaaaatcattctgaaaacagaagtggacgaacacctggccgtctgcccggaggccgagcaggactgcccctttaaacattatgggtgtgctgtaacggacaagcggcggaacctccaacagcatgagcattcagcactcagagaacatatgcggctggtgttagagaaaaatgtgcagttggaagagcagattagcgacctgcacaagagcctggagcagaaggagagcaagatccagcagctcgccgagactatcaagaagctggaaaaggaattcaagcaattcgctcagttgttcggaaagaatggctcctttctgcccaatatacaggtcttcgcaagtcacatcgacaagtcagcctggctggaagcccaggtgcaccagcttctgcaaatggtcaatcaacagcagaacaagttcgatcttcgccctctgatggaagccgtcgatacagtgaaacagaagattactctcctcgaaaacaacgaccagcggcttgcagtactggaggaagagaccaataagcatgatacccacataaacattcataaggcgcagctgagcaagaacgaggagaggttcaagctcctggaagggacatgctacaacgggaaacttatatggaaggtaaccgactacaagatgaagaagcgtgaggctgtggacggacacactgtctcaatctttagtcagtctttctatacctctcgctgtggatatcgcttatgtgctcgcgcctacctgaacggggatggaagtggccgcggaagtcacttgagtttatatttcgtggtcatgcggggcgaattcgacagcttgctgcagtggcctttcaggcagcgagtgacactgatgctcctcgaccagagcgggaagaagaatattatggagaccttcaagcctgatcccaactcttcctcctttaagaggcctgacggggaaatgaacatagccagcggatgtccacgctttgtggcacatagcgtgctggagaatgctaaaaatgcctacatcaaagacgataccttattcttaaaagtggccgtcgacctcacagaccttgaggacctgtag

SEQ ID NO: 208782 - DNA, 1674 bp, synthetic construct
  misc_feature 1..1674: note = Description of Artificial Sequence: Synthetic coding sequence
  source 1..1674: mol_type = other DNA
atggcctacagcgaggagcacaagggcatgccctgcggcttcatccgacagaatagcgggaactccatctcactggatttcgaaccatcaatagagtaccagtttgtagaacgccttgaagaacgttataagtgcgcattttgtcattctgttctgcataatccgcaccagaccggatgtgggcaccgattctgccaacactgcatcttgagcctgcgagagctgaacaccgtgcctatttgcccagtggataaggaggtaatcaagagccaggaagtctttaaggacaactgctgcaaacgggaggtcttaaatctctacgtctattgcagtaacgcccccgggtgtaatgccaaggtgatcctgggcaggtaccaagatcaccttcaacagtgtcttttccagcccgttcagtgctctaacgagaaatgccgggaaccagtgcttagaaaagatctgaaagagcacctgagcgccagctgccagtttaggaaggagaagtgtttgtattgcaagaaagatgtggtggtgatcaacctccagaatcacgaggaaaacctgtgccccgaatatccagtgttttgtcccaataattgtgcaaaaatcatcctcaaaaccgaggtcgatgagcacctggccgtctgtcccgaagctgagcaggactgccccttcaaacactacgggtgtgccgtgactgataaaagacgaaatctgcagcagcatgaacacagtgcactgcgagaacacatgcgcttagtcctggagaaaaatgtccagctggaggaacagatatcagatctccacaagagcctagagcaaaaagaatccaaaattcagcagctggccgagactattaaaaagctggaaaaagagttcaagcagttcgcacagctgtttggaaaaaacggctccttcttacccaatatccaggtattcgcatcacatatcgacaaatccgcttggcttgaggcccaggtgcatcagctgcttcagatggtgaaccagcagcaaaacaaattcgacttgcgcccgctcatggaagctgtggataccgtaaaacagaagattactctcctggagaacaacgatcagaggctcgccgttcttgaggaagaaaccaataaacacgatacacacatcaacatccacaaagcacagctcagcaagaatgaagaacgcttcaaattactggaagggacttgctataacggtaaactgatctggaaagtcaccgattacaaaatgaaaaaaagggaggccgttgacggacacacagtgtccatcttttctcagtccttttatacttcccgctgtggctatcgattgtgcgctcgtgcttacttgaatggggacgggtcgggcaggggcagtcatctgagcttgtactttgtggtgatgaggggcgaatttgattctctactgcaatggcctttccgccagagggtgacgctcatgctcttagaccagagcggaaagaagaacatcatggagactttcaaacctgaccctaatagcagctcctttaagaggcctgacggtgaaatgaatatagcaagcggctgcccccgttttgtcgcccactccgtgctggaaaatgctaagaatgcttatataaaagatgacacactttttttgaaagtcgctgtcgatctgaccgacctcgaggatttgtag

SEQ ID NO: 208783 - DNA, 1356 bp, synthetic construct
  misc_feature 1..1356: note = Description of Artificial Sequence: Synthetic coding sequence
  source 1..1356: mol_type = other DNA
atggcctacagcgaggagcacaagggcatgccctgcggcttcatcaggcaaaatagtggaaattcgattagtcttgacttcgaaccttccatcgaataccagtttgttgagcggctggaagaaagatataaatgtgccttttgccacagcgtactgcacaacccacaccagacagggtgtgggcataggttttgtcagcattgcattctgtcactgcgcgagctgaatactgtgcctatctgccccgtagacaaagaagtgatcaaaagccaggaggtgtttaaggacaactgctgtaagagagaggtgctaaacttgtacgtgtactgcagcaatgcgcctgggtgtaacgcaaaggtgatccttggtcgttatcaggataaaagaaggaacctccagcagcatgaacatagcgcgctgcgcgaacatatgcgcttggtcttagagaaaaacgttcagttagaagagcagattagcgatctgcacaaaagtctggagcagaaggagagtaagatacagcagctggccgagacgatcaagaaattggagaaagagtttaaacaatttgcccaactgttcggaaaaaacgggagtttcctgcccaatatccaggtctttgcttcacatattgataaatctgcttggctggaggctcaggttcatcagctattgcaaatggtgaatcagcagcagaataagttcgacctgcgccccctgatggaggctgtcgatactgtgaagcagaagataaccctgctggagaataatgaccaacgactggccgtgctggaagaggagacaaataagcacgatacccacattaatattcacaaagctcaattgtctaaaaatgaagaaagattcaagctcctggaagggacatgctacaatggcaagctgatttggaaggtaactgactacaagatgaagaagcgtgaggcagtcgacgggcacacagtgtcgatcttctcgcagtcgttttacacttcccgttgcggatatagactgtgcgctcgggcttaccttaatggggacgggagcggccgaggcagtcacctgtccctgtacttcgtggttatgcgaggtgaatttgactcattactacaatggcctttccgccagcgggtgactcttatgctgttagaccagagcggcaagaaaaatattatggagaccttcaagccagatccaaactccagctcattcaagcggcctgacggagaaatgaatattgcctccgggtgtcccaggtttgtcgcccactctgtcctggaaaacgccaaaaacgcctacataaaggacgacacccttttcttgaaggtcgctgtcgatctgactgatctcgaggacctttag

SEQ ID NO: 208784 - DNA, 1569 bp, synthetic construct
  misc_feature 1..1569: note = Description of Artificial Sequence: Synthetic coding sequence
  source 1..1569: mol_type = other DNA
atgagcctgctgaactgcgagaacagctgcggcagcagccagagcgaatcagactgttgtgtggccatggctagttcatgctccgcagtaaccaaagacgacagcgtaggcggcacggccagcacaggaaacctgtcatcaagtttcatggaggagattcagggctacgatgttgagttcgacccacccctggaaagtaaatacgaatgccccatatgcctcatggccctgcgtgaagccgtgcaaacaccttgcggtcatcggttctgcaaggcctgcattatcaaaagtatcagggacgctggacataaatgtcctgttgacaatgaaattctgttggaaaaccagttgtttcctgacaactttgctaagcgagagatcttgtctctcatggttaagtgtccaaacgaaggctgtctccacaaaatggaactccgccacctggaggaccaccaggcccactgtgaatttgcgctgatggattgtccccagtgtcaaaggccgtttcagaagttccatatcaacatccacattcttaaggactgcccgaggcgacaagtcagctgcgataattgcgccgcgagcatggcctttgaggataaagaaattcatgaccagaactgtccactagccaatgtgatttgcgagtactgcaacaccatcctaatcagggaacagatgcccaatcattacgatctggactgtcccacagctcctatcccttgtacatttagtacctttgggtgtcacgagaaaatgcagaggaatcacctcgctagacacctgcaggagaacacacagtctcatatgcgtatgttggcgcaagccgtgcactctttatccgtgatcccagattcaggctacatctcggaggtcagaaatttccaggaaactatccatcagctcgaagggcgtcttgtcagacaggaccaccagatcagagagctcaccgccaagatggaaacacagtcaatgtatgttagcgaactcaaacgaactattcgtacgctggaggataaggttgcagagatcgaggctcagcagtgtaacggaatctacatttggaaaatcggaaatttcggcatgcacttgaagtgccaggaagaggagaagcccgttgttatacacagccccggcttctatactggcaaacccggttacaagctatgtatgcgcctccacttgcaattgcctacagcccagcgctgtgccaattatatatccttgtttgtgcacactatgcagggggaatacgactcgcacctcccctggcccttccagggtacaatccggctgactatcctggatcagagcgaggcgccagtacggcagaaccacgaggagatcatggacgctaaacctgaattgctcgccttccagagacctacaatacctcggaatcccaaaggttttggatatgtaactttcatgcatctcgaagccctccgccagcggacgttcataaaagacgatacccttctggtccgttgtgaagtcagcacccgctttgatatgggatcattgcgtcgggagggattccaaccacggtctaccgacgccggcgtttag

SEQ ID NO: 208785 - DNA, 1569 bp, synthetic construct
  misc_feature 1..1569: note = Description of Artificial Sequence: Synthetic coding sequence
  source 1..1569: mol_type = other DNA
atgagcctgctgaactgcgagaacagctgcggcagcagccagagcgaaagcgactgttgtgtggccatggcatcctcttgctccgccgtcacaaaggacgattcagtgggcggtaccgcaagcactggcaatctctcctcttcttttatggaagagatccaaggttatgatgtagaattcgacccaccacttgagtccaagtacgagtgtccaatttgcctgatggcccttagggaagctgtgcagacgccttgcggacatcgcttttgtaaggcgtgtattattaagagcattagggatgccggacacaagtgtccggtcgacaacgaaatactactggaaaaccagttatttccggataatttcgcgaaaagggaaattctgtctctgatggtgaaatgcccaaatgagggctgtcttcataaaatggaactccggcacctcgaggaccaccaggcgcactgcgaattcgccctgatggattgccctcagtgtcagcgtccctttcagaagttccacattaacattcatattttgaaggactgccctagacgccaggtgtcttgcgacaattgtgccgcctccatggcctttgaggacaaagaaattcatgaccagaattgccctttggctaatgtgatttgcgaatactgcaacaccattctaatccgcgaacaaatgcccaaccactacgatctagactgtcctacagcccccatcccctgcactttcagtacctttggttgtcacgagaagatgcagcggaatcatctcgcacggcatttgcaggaaaacactcagtcacacatgcggatgctggcccaggccgtgcacagcctgtctgttataccagattcgggttacatctccgaagtacgaaattttcaggaaactattcaccagctcgaaggacgtttggtcaggcaggaccaccagatcagggaactaacagcgaaaatggagacccagtctatgtatgtatcagaactcaaacgtaccattaggactttagaagataaagtggctgagattgaagcacagcagtgtaacggtatctacatctggaaaatcggcaacttcgggatgcatttgaaatgtcaggaggaagaaaagccagttgtcatccattccccaggcttttacaccggcaaacctggatacaagctgtgcatgcgattacacttgcagctaccaaccgcgcagaggtgtgccaattacatttcgcttttcgtgcatactatgcagggcgaatacgacagtcatctcccctggccgttccaaggcacgatacggttgacaatcctcgatcagagtgaagctcctgtgcgacaaaatcacgaggaaatcatggatgcaaagcccgagctactggcatttcaaaggcccacaatcccccgtaatcccaaggggtttggctacgttacgtttatgcatcttgaggccctgaggcagaggaccttcatcaaggacgacactctcctcgttagatgcgaagtttctacacgatttgatatggggagcttacgccgagagggcttccaacctagatccaccgacgcaggcgtctag

SEQ ID NO: 208786 - DNA, 2013 bp, synthetic construct
  misc_feature 1..2013: note = Description of Artificial Sequence: Synthetic coding sequence
  source 1..2013: mol_type = other DNA
atgagcagcggcaagagcgcccggtacaaccggttcagcggcggcccaagcaatctccctacgcccgacgtgaccacaggcaccagaatggagacaacctttggacctgctttctccgccgtcactaccatcacaaaggctgatgggacaagtacgtacaaacagcattgtcgaacaccaagcagctcctctaccctagcctacagtccacgagatgaggaagactcgatgcctccaatcagtactcctcggaggagtgacagcgccatttcagtgaggtcattacactctgaatcttcaatgagcctgcgtagcactttttcactgccggaggaggaagaagagcccgagccccttgtgttcgccgaacagccctctgtgaaattatgctgtcaattatgttgctcagtgtttaaggatcccgtaatcaccacctgtggccacacattttgccgaaggtgcgcactaaaatctgagaaatgccccgttgacaatgtgaagttgacagtcgttgttaataatattgccgtggcagagcagatcggggagttgttcattcattgcaggcatggctgccgcgtggcgggtagtggcaaaccccctattttcgaagtcgaccctaggggctgtcctttcaccattaagttatctgcacgcaaggaccatgaaggttcctgtgactaccggcctgtgcgatgccctaataatccatcttgccctccactgcttcgcatgaacctcgaagctcacctgaaggagtgtgagcatattaagtgcccccacagtaagtatgggtgtacttttatcggaaatcaggatacttatgagactcatctggagacgtgcagatttgagggtcttaaggaattccttcaacagactgatgacagattccatgaaatgcacgttgcattggcccagaaggatcaggagatagctttcctgcgctctatgctgggcaagctgtctgaaaaaattgatcagcttgaaaaaagcctggaactcaagtttgatgtcttggacgaaaatcagtctaagcttagcgaggatcttatggagttcaggcgagatgcctccatgctgaatgatgaactgagccacattaacgcccgtctgaatatgggcattctcggaagttacgatcctcaacagatcttcaagtgtaagggcacctttgtgggccaccagggtcccgtttggtgcctctgcgtgtacagtatgggtgatctacttttttctggatcatcggacaagaccataaaggtatgggatacttgcaccacgtacaagtgtcagaagaccttagagggccacgacgggatcgtcctagcactttgcatacagggttgtaaactctactcaggatccgccgactgcactattatcgtctgggatattcaaaacctgcagaaagtcaatactataagagcacacgacaacccagtgtgtacccttgtcagctcgcataatgttctgttctccgggagcctgaaggctatcaaggtctgggatattgtcggaactgagctgaaacttaaaaaagagcttacaggattgaatcattgggtccgggcattagtagccgcccaatcctacttgtattctggcagttatcagacaatcaagatatgggacattcgaacactcgattgcatccacgttcttcagactagtggcgggagcgtttacagcatcgcagtgaccaatcatcatattgtttgcggcacgtacgaaaacctcatacatgtctgggacatcgaatctaaggaacaagtccgtacgctgactggtcatgtggggactgtatacgcccttgctgtcatctctaccccagaccagactaaggtgttcagcgccagctacgacaggagcctccgggtctggtccatggataatatgatttgtacccagactcttctgaggcatcagggaagtgttacagcactggccgtttcgagaggaaggctcttctccggggcagtcgattcgacagtgaaagtgtggacctgttag

SEQ ID NO: 208787 - DNA, 2115 bp, synthetic construct
  misc_feature 1..2115: note = Description of Artificial Sequence: Synthetic coding sequence
  source 1..2115: mol_type = other DNA
atggcccgggagctgcgggccctgctgctgtggggccggcggctgcggccattattgcgagcacctgctctcgctgccgtcccgggaggcaagcccatcctgtgtccgcgtcgcaccacagctcaactagggccccgtcgaaacccagcttggagcctccaagcaggccgcttattttcaacacagactgcagaggataaggaagagccccttcattcaattattagctccacggaaagtgtgcaaggaagcacctctaagcatgaatttcaagccgagaccaagaagttgctcgacatcgtggcaaggtcgttatattccgagaaagaggtgtttatccgcgaactcattagcaacgctagtgacgcactggaaaaactgcgccataagctggtaagtgatggacaggccttgcccgaaatggaaattcatctccagacaaatgctgagaaagggacgatcacaatacaggataccgggatagggatgacacaggaggaactggtgtcaaatctcggcacaatagcccgatccggcagtaaggcctttttggacgctctgcagaaccaggctgaagcatcatcaaaaatcatcggacaattcggagttggattctacagcgccttcatggtggccgaccgcgtggaagtctatagcaggagcgctgcacctggaagccttggctaccaatggctgtccgatggttcaggtgtgttcgagattgcggaggcatccggcgttcggaccggaaccaagatcatcatacacctcaagtccgactgcaaggagttctctagcgaagccagggtgagagacgtggtgacaaagtattccaacttcgttagctttcctctgtacctgaatggacgcagaatgaacaccctgcaggcaatatggatgatggatccaaaggacgttcgcgagtggcagcacgaggagttctaccggtacgtcgcccaggctcacgataagccacgctacaccctccattataagaccgacgccccgttaaacatacggtctattttctatgtgcctgatatgaagccgagcatgtttgacgtttcccgcgagctcggctcatccgtggccctctacagccggaaggtcctcatccagacaaaggcaacagacattctaccaaagtggctaaggtttataaggggggttgtcgactcagaggatatcccacttaacctgtctagggagctgctgcaggagagtgccctcatccgcaagttgcgagacgtgctgcagcagcgactaatcaaatttttcatcgaccagtcgaagaaagatgcggaaaaatatgccaaatttttcgaagactacggactctttatgcgtgagggcatcgtcactgcaactgagcaggaagtgaaagaagatatagccaagctgctacgttacgagtcatcggcgctcccttccggacagttaacttctctatctgaatatgcgtcacggatgcgggccggaacccgcaacatttactatctgtgtgcccccaatagacaccttgccgagcacagtccgtattacgaggcgatgaagaagaaggacacagaagtgctgttctgcttcgaacagttcgatgagctcaccctgctgcacctgcgggagttcgacaagaaaaaactgatttctgtcgaaaccgacattgtcgttgaccactacaaagaggagaaattcgaggataggagccccgccgctgaatgtctgtctgagaaagaaacagaggagttaatggcttggatgagaaacgtgctgggcagtagagtgacaaacgtcaaagtgacacttcgactcgatacccatccagccatggtaaccgtgctggagatgggggcagctagacatttcctgcgtatgcagcagctggccaaaactcaggaggaacgggcgcagctcctccagcctacgctcgagattaatccccggcatgctctaatcaaaaaactgaaccagctgcgcgcctccgagcccgggttggcgcagctgcttgtagatcagatctacgagaacgccatgatagctgctggcttagtcgacgaccccagggccatggtgggccgactgaacgagctgctggtcaaggcacttgagagacactag

SEQ ID NO: 208788 - DNA, 1956 bp, synthetic construct
  misc_feature 1..1956: note = Description of Artificial Sequence: Synthetic coding sequence
  source 1..1956: mol_type = other DNA
atggcccgggagctgcgggccctgctgctgtggggccggcggctgcgccctcttctccgcgcccctgcgctggcagctgtccctgggggaagcacctcgaagcatgagttccaagccgagaccaaaaagcttttggatattgtagcccgaagcttgtattctgagaaggaggtgtttattcgtgagctgatttccaatgccagtgatgccctggagaagctacgccataaactcgtgagtgacggacaggccttgcccgagatggaaattcacctgcaaactaacgctgaaaagggcacaatcactatccaggacaccggaattgggatgactcaagaagaactggtgagcaacctgggaacaattgcacggtctgggtccaaagcgtttcttgatgccctacagaatcaggccgaagcctcaagtaaaatcataggccaattcggcgtgggcttttacagtgcctttatggtcgcagatcgggttgaagtctacagccgctcagcggcccctgggtcgctcggctatcagtggctgagcgacggcagtggggtattcgagattgctgaggcaagtggagttagaactggcacaaagatcataattcatctgaaatccgactgtaaagaatttagtagtgaggccagagtgagggatgtggtcacaaagtatagtaatttcgtgagcttcccactttatctcaacggccgacggatgaatactttgcaggcgatatggatgatggatccaaaggacgtaagggagtggcagcacgaggagttttatagatacgtggcccaggctcacgacaagccacgctatactctgcattataagacagatgcgcccttaaatatccgctccatcttctatgtgcccgacatgaaaccctccatgttcgacgtgagtcgcgagctggggtccagcgtcgctctttacagccggaaggtactgatacagacaaaggccaccgatattctaccgaagtggctgcgatttattcggggagttgttgactctgaagatataccacttaatctttcccgagaattgttacaggaaagcgcattgatcaggaagctgcgggacgtgcttcagcagcggttgattaaatttttcatcgatcagtccaaaaaggatgcggagaaatatgcgaagttctttgaagactacggtctgtttatgagggaaggtattgtgacagcgaccgagcaggaggttaaagaagacatcgccaagctgctccgctatgagagcagtgcattgccctctgggcagctgaccagcctgtccgagtacgctagccgaatgcgcgctggtactcgcaatatctattacctctgcgccccgaaccgccatctggccgagcacagtccatattacgaagcaatgaaaaagaaagataccgaagtgctgttttgcttcgagcagtttgacgaacttaccctgcttcatctgcgagagtttgacaagaagaagctgatcagcgtggaaacagatattgtcgtcgatcactataaggaagagaaatttgaagatcgttcccccgccgctgagtgcctgtctgagaaggagactgaagaactgatggcctggatgaggaacgtactaggaagtagagtcacgaacgtgaaggtcacgctacgtctggatactcaccctgcgatggtcaccgttctcgaaatgggtgccgcaaggcatttcctgcgaatgcaacagcttgccaagactcaagaggagcgcgcacagctgctgcagcccaccctcgaaatcaaccctagacacgcactcatcaagaagctgaaccagctgagggcctcggagcctggcctggcacagcttctcgttgatcagatttacgagaacgcaatgatcgcagctggccttgtagatgacccacgagccatggtgggacgtctgaacgagttgttggttaaagcactggagcgccactag

SEQ ID NO: 208789 - DNA, 1911 bp, synthetic construct
  misc_feature 1..1911: note = Description of Artificial Sequence: Synthetic coding sequence
  source 1..1911: mol_type = other DNA
atggagggccggggcccctaccggatctacgaccccggcggcagcgtgccctctggagaagcgtcagccgcttttgagaggttagtgaaggagaattcccggctgaaagagaaaatgcagggcattaaaatgcttggcgagttgctcgaggagtctcaaatggaagccacacgcctgcggcagaaagccgaggaattagtgaaagataatgaactgctgcctcctcccagtccctccctggggtcatttgatcccctcgccgaactcactggcaaggattccaatgtgactgcctcccctacagctcccgcgtgtcctagtgataagccagccccggtgcagaaaccaccctcttctggaactagcagtgaattcgaggtggtgactccagaggagcagaactccccagaatcttcctcacatgccaatgccatggcactcggcccactcccacgggaagatggcaatctgatgctacaccttcagagactcgagaccacattgtccgtttgtgccgaagagcctgaccatggacagttgttcacacaccttgggcgtatggcccttgaatttaataggctggcctctaaggtccataagaacgaacagcggacgagcatccttcagaccctgtgcgaacagctcagaaaagaaaatgaggctctgaaggccaagttggacaagggattagagcaacgggatcaagctgcagaaagactgcgtgaggagaatctggagttgaagaagcttttgatgagtaatggaaataaagagggtgcatctgggcggccgggctcgcctaaaatggagggtacaggcaaaaaggctgttgccggtcagcagcaagctagcgtcaccgccgggaaagtgcctgaggttgtggcactcggagccgccgagaagaaagtgaaaatgctggaacaacagcgatccgaacttctggaggttaacaagcagtgggaccagcattttcggagcatgaaacagcaatacgaacaaaaaatcactgaacttcggcagaagctcgcagatcttcagaaacaggtgacggacctggaggccgagagggaacaaaagcagcgtgattttgatagaaagctactgcttgctaagagcaagatcgaaatggaggaaacggataaggagcaattaacagctgaggcgaaggagttgagacaaaaggtcaaatatctgcaggaccagctaagtcccctaacacggcagagggagtatcaggagaaagaaatccagagactcaacaaggcattggaagaggcacttagtatacagactccaccctcctccccacctaccgcatttgggagtccggagggagcaggagcgctgctgcgtaagcaggaattggtcacccagaatgagctgctgaaacagcaggtcaaaatttttgaggaagacttccagcgggagcgctctgaccgggagcgtatgaacgaggagaaagaagaactgaagaagcaagtggaaaagctccaagcccaagttaccctctccaacgcacagctgaaagcattcaaagacgaggaaaaagctcgcgaggctctgcggcaacagaaaagaaaagcgaaggccagtggcgagcgctaccacgttgagccccatcccgagcacttatgtggcgcatacccctatgcctatccccccatgcctgctatggtcccccatcacggattcgaggactggtctcaaatccgatatccacccccaccaatggctatggagcacccccctccgttgccaaactctcggctctttcacctccccgagtatacgtggaggttgccctgcggcggcgttcgaaacccgaatcagtcatctcaggtcatggatccccctaccgcccggccaacagagcctgagagcccaaagaatgaccgagaaggaccacagtag

SEQ ID NO: 208790 - DNA, 1911 bp, synthetic construct
  misc_feature 1..1911: note = Description of Artificial Sequence: Synthetic coding sequence
  source 1..1911: mol_type = other DNA
atggagggccggggcccctaccggatctacgaccccggcggcagcgtgccctcgggagaggcgtcagctgcatttgagcgtctcgttaaggaaaattccagactcaaggaaaagatgcagggcatcaagatgttgggagagctgctcgaggaaagccagatggaggctacacgtctccgccagaaggcggaagagctggttaaggacaatgaactactgcccccaccctctccaagtctcgggtcttttgaccctctggccgaactgactggcaaggattccaacgtgacagctagccccactgcccctgcctgccccagcgataagccagctcctgtgcaaaagccaccatcatctgggacatcctccgagtttgaggttgtaacacctgaggaacagaactcccccgagtcctcaagccacgctaacgccatggccctgggacctctcccgcgggaagatggcaatctgatgcttcatctacagagactcgaaaccacactgagcgtgtgcgcggaggaaccggatcatggacagttgttcacccacttgggaagaatggccttggaattcaatcgactcgccagtaaggtgcacaagaacgagcagaggacctcaattctgcagacgctgtgtgaacagctgcgcaaggagaatgaagctttaaaggcgaagctcgataagggcctggaacagcgtgatcaggctgcagaacgcctgcgcgaagaaaacctggagcttaagaagctgttgatgtccaatggcaacaaagaaggtgcctccggacgaccaggctcacctaaaatggagggtacagggaagaaagccgtcgctggccaacagcaggctagcgtgactgccgggaaagtgccggaagtggtcgcccttggagcggcggagaagaaggtgaagatgctggagcagcagcggtccgagctactggaggtgaataagcagtgggaccaacatttcaggtccatgaagcaacaatatgagcagaagattacagagctgcgacagaagctcgccgacctccaaaagcaagttacggacctagaggccgaacgcgagcagaagcaacgggatttcgatcggaaactgctgcttgcaaaaagtaagatcgagatggaggaaactgataaggagcagctcaccgccgaggccaaggaactgcgccagaaagtaaagtatctccaagaccaactcagcccactcactcggcagagggagtatcaagaaaaggagatccagcggttgaacaaagccctagaggaggccctctcaatacaaacccctccctcatcacctccgacagccttcggatccccagagggcgccggtgcgctgctgcgcaagcaggaattagtcacccagaacgaactgctcaagcagcaggtaaaaattttcgaagaagatttccagcgggagcggtctgaccgtgagaggatgaacgaggaaaaagaggagctcaagaagcaagtcgagaagctacaggcccaggtgacccttagcaacgctcaactcaaagcgtttaaagacgaagagaaggctcgggaggccctcagacaacaaaagcggaaggccaaggctagtggagaaaggtatcatgttgaaccccacccggagcacctgtgcggggcttacccatacgcctaccctccaatgccagcaatggttcctcatcatggcttcgaggattggtcgcaaatccggtacccccctccgcccatggccatggagcaccccccacccttgcccaattctcggttgtttcacttgcccgaatatacttggaggcttccgtgtggaggcgtgcgcaacccaaatcagtcctcgcaggtgatggatcctcccacagcacgacccactgagccagagtctccaaagaatgaccgggagggtccccaatag

SEQ ID NO: 208791 - DNA, 1590 bp, synthetic construct
  misc_feature 1..1590: note = Description of Artificial Sequence: Synthetic coding sequence
  source 1..1590: mol_type = other DNA
atgctgggcgagctgctggaggagagccagatggaggccacccggttgaggcagaaagccgaagaactggtaaaggacaatgagctcctgcctcctccatccccctctttagggtccttcgacccacttgcggaattaaccggcaaggatagcaacgtgacagccagtcccaccgcacctgcctgcccgtcagacaagcctgcccctgtccagaaacccccctcatcggggacttctagcgagttcgaggttgtaactcctgaggaacagaactctcccgaatcatcatcccacgccaatgctatggctctgggtcccctgccaagagaagatggaaatctcatgcttcatctgcaacgcctggagaccaccttgagcgtgtgtgccgaggaacctgaccacggccagctgttcacccacctgggccgaatggctcttgagttcaatagactagcgtctaaggttcataagaatgagcagcgaacctctattctgcagactttgtgcgagcagctgaggaaggaaaacgaagctctgaaagccaagttagataagggacttgagcaaagggatcaggcagccgagagactcagggaggagaacctcgaactgaagaagcttctgatgagtaacgggaataaggagggtgcatctgggcgtcccggtagcccgaagatggagggtaccgggaagaaggcagtcgccggccagcagcaagcttccgtgacagccgggaaggtccctgaagttgtggcattgggagcagccgagaaaaaggtgaagatgcttgaacaacaacggtcagagctgcttgaggtgaacaagcagtgggatcagcactttcggtctatgaagcagcaatacgagcaaaagattactgaactgcggcagaagctggctgacctccagaaacaggtgaccgacctagaggccgagagggaacagaagcagcgagactttgaccggaaattattgctggctaaaagtaagattgagatggaggaaactgacaaggaacagcttaccgcggaggcaaaggagctccgacagaaagttaaatacctgcaagaccagctaagtccattgactcgtcagcgcgaataccaggaaaaggagatccagaggctaaataaagcgcttgaggaggcactgtctatccagactcccccttcctccccgcctacagcattcggcagccccgagggtgcaggagctttgcttaggaaacaagaacttgtgactcagaacgagctgctaaagcagcaagtgaagattttcgaggaagatttccagagggagaggtccgatagggagcggatgaatgaggagaaggaggaactaaaaaagcaagtggagaagctgcaggcgcaagttactctgagtaatgcccaactgaaagccttcaaggacgaggagaaggcacgggaagctctccggcagcagaaaagaaaggcaaaaccggaatacacatggcgactcccctgtggtggcgttaggaaccctaaccagtcttcccaggtaatggatccccccactgctaggcccaccgaaccagagagtccaaaaaacgatcgcgaagggcctcaatag

SEQ ID NO: 208792 - DNA, 1908 bp, synthetic construct
  misc_feature 1..1908: note = Description of Artificial Sequence: Synthetic coding sequence
  source 1..1908: mol_type = other DNA
atggagggccggggcccctaccggatctacgaccccggcggcagcgtgccctccggcgaggcttccgccgctttcgagaggcttgttaaggagaattctaggctaaaggaaaagatgcagggaataaaaatgctcggggagttgcttgaggagagccagatggaagcaaccaggttaagacagaaagctgaagaactggtcaaagataacgagttgctgccccctcccagcccgtctctgggcagctttgatccactcgctgaactgacgggcaaggattctaacgtgacagcctctcctacagcacccgcctgccctagtgacaaaccggctcccgtccagaaaccccccagtagcggtacctcctcagaattcgaagtcgttacccctgaagagcaaaactcccctgagtcctcctctcatgccaatgcaatggcattggggccattacccagggaggacgggaacctgatgctgcacttacaacgccttgagaccacgctcagcgtttgcgcggaggagccggatcacggtcagttgtttacccaccttggaaggatggcactcgaattcaaccgcctcgccagtaaagtccataaaaatgaacagcgcacctccattctccaaactctgtgcgagcaactgaggaaggagaacgaggccctgaaggccaagctggataaaggcctagagcagagagaccaggcggctgagcggctccgggaagaaaacttagaactgaagaagctcctcatgagtaatgggaataaggagggggcctcaggccgcccaggatcacctaaaatggaggggacgggcaaaaaggcagttgccggtcagcagcaagcctccgttactgccggtaaagttcccgaagtagtggctctaggtgccgctgaaaagaaggtgaaaatgctagagcaacagagatcggagctgctggaagtaaataaacagtgggatcaacactttagatccatgaaacaacagtacgagcagaagatcacagaactgcggcagaagctcgctgatctccaaaagcaggtgactgatctggaagccgagcgcgagcagaaacaaagggatttcgatagaaagcttctcctggccaagagcaagattgaaatggaggaaaccgacaaagagcagttgaccgctgaggctaaagagcttcgacagaaggtgaaatatcttcaggatcagttatcacccctcacacggcagcgggagtaccaggagaaggagattcaaaggttaaataaagccctcgaagaagccttgagtatacaaactcccccctcctcccctcctactgctttcgggtctcccgagggagcaggcgctctgctccggaagcaggagctagtgactcagaatgagctgctaaagcagcaggtaaaaatattcgaggaagacttccagagagaacgatctgaccgggagcgtatgaacgaagaaaaagaagagcttaagaaacaagtagagaaactgcaagcccaagtgaccttgtcgaacgcccagttgaaggcttttaaggacgaagagaaagctagagaagcgctgagacagcaaaaacgaaaggccaaggcttctggcgaacggtaccatgtcgagcctcatccagagcacctttgtggcgcctacccctatgcttaccctcccatgcccgcaatggtgcctcatcacgggttcgaggattggtctcaaatcaggtaccctcctccacccatggccatggaacaccctccaccactgcctaatagtagactctttcaccttcccgaatacacctggcggctgccctgcggtggcgtgaggaatccaaaccagtcctcccaggtgatggatccgcccacagcccgaccaacagaacccgaacctgccgatctgcgcctgccacgcaactag

SEQ ID NO: 208793 - DNA, 1479 bp, synthetic construct
  misc_feature 1..1479: note = Description of Artificial Sequence: Synthetic coding sequence
  source 1..1479: mol_type = other DNA
atggaggccacccggctgcggcagaaggccgaggagctggtgaaggacaacgaactgcttcccccccctagccccagtctggggtctttcgaccctctcgccgagctgactggtaaggactcaaatgttaccgctagcccaacagcaccggcgtgtccaagtgacaagccagccccagtacagaagcctccttcttccgggacatccagcgaattcgaggtggttacacccgaggagcagaattcgccggagtctagcagtcatgccaacgcgatggccttggggcccctgccacgggaagacggcaatctcatgctgcatctgcagagactggaaactacactgtctgtctgtgctgaagagcccgatcacgggcagttgttcacccacctggggaggatggctctggaatttaatagactagctagtaaggtgcacaaaaatgagcaaagaaccagcatcctgcaaaccctctgtgaacagctccgcaaggaaaatgaggctctaaaggccaaattggataaaggactcgagcagagggatcaggccgccgaaaggctgcgtgaggaaaacctggagcttaaaaagctcctgatgagcaacggaaacaaggagggcgcttctggacgacctgggtcacctaaaatggagggcacgggtaagaaggctgtggccggtcagcagcaggcatccgttaccgccggtaaagtgccagaggtcgtggccctgggcgcagcagaaaagaaggtgaagatgctggagcagcagcgctctgagttgcttgaggtgaataaacagtgggatcagcacttccggtccatgaaacagcagtacgaacagaagatcacagagctgcggcagaaattagctgacctgcagaagcaagtgacagacttggaggccgaacgcgagcaaaaacaacgggacttcgacagaaaactgctgctggcgaaaagcaaaatagaaatggaagagacggataaggaacaattaaccgcagaagcgaaagagctcaggcagaaggtcaagtatctgcaggatcagctgtcccctcttacacggcagagggagtaccaagaaaaagagatacagaggcttaacaaagccctggaagaggccttgtccatccagactcccccttctagcccacctacggcttttggctctcctgagggtgcaggggctctcctccgtaaacaggaactcgtgactcagaacgagcttcttaagcagcaggtcaagatctttgaggaagactttcagcgagagagaagtgatagggagcgtatgaacgaggaaaaggaggaactgaagaagcaggtcgagaaattgcaggctcaggtgaccctgagcaatgctcagctgaaagcttttaaggacgaggagaaggctcgtgaggcgttgcggcaacagaagaggaaggctaagggaacccatcgaggctgtcctcggcatctcccagagaggaaggtgaagtag

SEQ ID NO: 208794 - DNA, 435 bp, synthetic construct
  misc_feature 1..435: note = Description of Artificial Sequence: Synthetic coding sequence
  source 1..435: mol_type = other DNA
atggagggccggggcccctaccggatctacgaccccggcggcagcgtgccctctggggaggcctctgctgccttcgaacgcctggtgaaggagaactcccgccttaaggagaagatgcaggggatcaagatgcttggggaacttcttgaagaatctcaaatggaagccacacgcctccgccagaaggctgaggagctggtgaaagacaacgaactgctgccaccaccaagtccttctctcgggtcgttcgaccccctggcagaacttacgggcaaagattccaacgtgacagcttccccaacggcacccgcatgcccaagtgacaaaccggctccagtgcagaagcctccgagctctggaacgtcgtcagagtttgaggtagtgacccctgaggaacagaattcgcctgagtcttcctcccacgccaacgcctag

SEQ ID NO: 208795 - DNA, 1752 bp, synthetic construct
  misc_feature 1..1752: note = Description of Artificial Sequence: Synthetic coding sequence
  source 1..1752: mol_type = other DNA
atggaggccacccggctgcggcagaaggccgaggagctggtgaaggacaacgaactgctcccacccccatcgccttctctgggttctttcgatcctctggccgaattaacaggaaaagactccaatgtgacggccagcccgactgctcccgcatgcccatctgacaaaccagcacccgtacagaaacctcctagctccggaactagctccgagtttgaggtcgtgactcctgaagaacaaaactcacctgagtcttcctcacatgctaatgccatggccctgggcccactaccacgggaagatgggaacctgatgttgcatttacagcggctagagaccactcttagtgtatgtgccgaggagcccgatcacggacagcttttcacgcatctgggccggatggccctcgagtttaaccggttagcttctaaagtccacaagaacgagcaaaggacttctattttgcagacgctgtgtgaacagctgcggaaagagaatgaagccctgaaggccaagctcgacaaaggactggagcagagagatcaggctgccgaacggctgcgtgaggagaacctggagctcaaaaaactgcttatgagtaatggcaacaaggagggagccagtggacgtcctgggagtccaaaaatggagggcactggcaagaaagcggttgctggacagcaacaggcctctgtgacagcgggaaaggtgcctgaggtggtggcactgggagccgccgagaaaaaggtcaaaatgttagagcaacagcgctccgagctgcttgaggttaacaaacagtgggaccagcactttagatccatgaagcagcagtatgaacagaaaattactgagcttcggcaaaagctggccgacctccagaaacaggttacggacctcgaggcggaaagggagcaaaaacagcgagattttgaccgcaagctgttgttggccaagagtaaaatcgagatggaagagaccgataaggagcagctgactgccgaggcaaaggaattacgtcagaaggttaagtacctccaagatcaattatctcctttgaccaggcagcgggagtaccaggaaaaggaaatccagcggttgaataaagcactggaagaggccctgagtatccagactccccctagctccccacccaccgcattcggtagtccagaaggcgcgggagcattgttgcgcaagcaggagctcgtgacccaaaacgaacttctgaaacaacaagtcaagatattcgaagaggacttccagcgggaaagaagcgaccgcgaacgaatgaacgaggaaaaagaggaattaaagaagcaggtggagaagctccaggcgcaggtcacgctgtctaacgcccagctgaaagcattcaaggacgaggagaaggcaagggaggccttgcgccagcaaaagcgaaaagctaaagcctcgggagaacgataccacgtggaaccgcacccggagcacctgtgcggcgcctacccatacgcctaccctccaatgccagctatggttccccaccacggatttgaagactggtctcaaatcagataccctcctccccccatggcaatggagcaccctccgccactgcctaacagccgtttgttccacctcccagaatatacttggagactgccctgcggaggggtccgaaacccaaatcagagttcgcaagtgatggatccgcccaccgccaggcccactgagccggaatcaccaaagaatgacagggaaggccctcaatag

SEQ ID NO: 208796 - DNA, 402 bp, synthetic construct
  misc_feature 1..402: note = Description of Artificial Sequence: Synthetic coding sequence
  source 1..402: mol_type = other DNA
atggagggccggggcccctaccggatctacgaccccggcggcagcgtgcccagtggagaggcctctgccgcattcgaaaggctggtcaaagagaactcaaggttgaaagagaagatgcagggaatcaagatgctgggcgagctgctcgaggagagccaaatggaggctacccgacttaggcagaaagcagaggagctcgttaaagacaacgaattgctacctccaccttctcccagtctaggctctttcgaccctctagccgaactgaccggcaaggattccaatgtgaccgcttcaccaactgcgcctgcgtgccctagcgacaaaccagcacccgtacagaaacctccttctagtggaaccagcagcgaattcgaggtcgtcacgcctgaagagcagtag

SEQ ID NO: 208797 - DNA, 1911 bp, synthetic construct
  misc_feature 1..1911: note = Description of Artificial Sequence: Synthetic coding sequence
  source 1..1911: mol_type = other DNA
atggagggccggggcccctaccggatctacgaccccggcggcagcgtcccctcaggggaagctagtgctgcctttgagagactggttaaggaaaattccagacttaaagaaaaaatgcagggaattaaaatgctaggcgagctgctcgaggagagccagatggaagcaactcgcctccggcagaaggcggaggagttggtgaaagacaacgaattgcttcctccgccctcaccatccctgggatcatttgacccactggcggaactaaccggaaaagactccaatgtcacagcctcccccacagcacctgcttgtcccagtgataagccagcacccgttcagaagcccccatccagcggcacttcctccgaattcgaagtggttactcccgaagaacaaaactcacccgagtccagtagccatgcgaatgctatggcgttaggccctctgcccagagaggatggaaatctgatgctccacctgcaacggctagagactaccctctccgtgtgtgccgaggagccagatcatggtcagttgttcacccatctggggcggatggctctggagttcaaccggttagcctccaaagtacacaaaaacgaacagaggacaagcatcctgcagacgctttgtgagcagcttcgcaaggaaaatgaagcccttaaggctaagctggataagggcttggagcaacgggaccaggcagcagaaaggctgcgagaagagaacctcgagcttaaaaaactcttaatgtcaaatggaaataaagagggggcgtcgggaagacctggatctcctaagatggagggcacgggcaagaaagccgtggctggacagcagcaggcaagcgtgactgcagggaaggtgcccgaggtcgttgcgctgggggctgctgagaagaaggtgaagatgctggaacaacaacgctccgaacttttagaggtgaacaagcagtgggaccaacactttcgttccatgaaacagcagtatgagcagaaaataaccgaactccggcagaaactcgccgatctacagaaacaagtcacggatctggaggccgagagggagcaaaagcagagagattttgatcggaagctactcttggcaaagtccaagatcgagatggaggaaacggataaggagcaactgaccgcagaagctaaagaactgaggcagaaagttaaatacctgcaggaccagctgagtccgttaactagacagcgggagtatcaagagaaggaaatccaaagactcaacaaagccctcgaagaagccctgtccatacaaactcccccttcatcacctccgaccgccttcggaagtcccgagggcgcaggggcattgttgagaaagcaggagctggttacgcagaacgagcttctaaaacaacaggtaaagatttttgaggaggattttcagcgcgagcgctcggacagggagagaatgaatgaggagaaagaagagctgaagaagcaggtggagaaactgcaagctcaggtgaccctgtccaacgcacagctgaaggcctttaaggacgaagagaaggcaagagaggcgcttaggcagcagaagagaaaggccaaggcatcaggcgagaggtaccacgtcgaaccacatcccgagcatctgtgtggcgcttacccgtacgcgtatccacccatgcccgccatggtccctcaccatgggttcgaagactggtcacagatacggtacccccctccccctatggccatggaacaccccccccctctgccgaacagccgcctgtttcacctccccgagtatacatggcggctcccctgtggcggggtaaggaatcccaatcagtcatcacaggtcatggaccctccaactgcccgcccgactgaacctgagtcacccaagaatgaccgggaaggtccccagtag

SEQ ID NO: 208798 - DNA, 774 bp, synthetic construct
  misc_feature 1..774: note = Description of Artificial Sequence: Synthetic coding sequence
  source 1..774: mol_type = other DNA
atggaggccacccggctgcggcagaaggccgaggagctggtgaaggataatgagttactgccccccccaagtcccagccttggctctttcgatccgttagcagagcttacggggaaagactcaaacgtcacggcttcaccgactgcaccggcctgccctagtgataagcccgccccagtccagaagccccccagctcagggacgagttctgagttcgaagtcgtgacccccgaagagcagaatagtcccgagagtagttcacacgccaatgccatggccctgggccccctccccagggaggatggaaatctgatgttgcatttgcagagactcgagaccactctgtcagtttgcgctgaggagcctgatcacggccagttattcacccacctgggaagaatggcccttgaattcaataggctcgccagcaaggtccacaaaaacgaacagcggacatcaattctgcagaccctctgcgaacaactgcggaaggagaatgaagcactgaaggccaagctcgataaagggctagagcagagggaccaggcggcagaacggctgcgggaggaaaatctggagctgaagaagctacttatgtcgaatggcaataaagagggggccagtgggcggccagggagtcctaagatggagggcaccgggaaaaaggctgtcgctggacaacagcaagcctccgtgacggccggcaaagtcccagaggttgtagccttgggagccgccgaaaagaaggtgaaaatgctggaacagcagcgctag

SEQ ID NO: 208799 - DNA, 1911 bp, synthetic construct
  misc_feature 1..1911: note = Description of Artificial Sequence: Synthetic coding sequence
  source 1..1911: mol_type = other DNA
atggagggccggggcccctaccggatctacgaccccggcggcagcgtaccctccggtgaggcatcggcggccttcgaacgtctggtcaaagagaacagtaggctgaaggaaaaaatgcaagggatcaagatgctgggcgaattgcttgaagagtcccagatggaagctacccgcctcagacaaaaagccgaagaattagtcaaagataacgaactgctgcccccgcctagccctagcctgggctcattcgacccgttggccgaactcacaggcaaggactcaaacgtcactgcctcacccaccgctccagcctgtccttcagacaaaccggccccagttcagaagcctcctagttctggaacaagtagcgaattcgaggtggtgactcccgaagagcagaactcaccagaatcttctagccatgctaacgccatggccctcgggcccctgcctcgggaggatggaaaccttatgttgcacctgcagcggctcgaaacaactttgtctgtttgcgcagaagaacctgaccatgggcaactgttcacacatctgggacggatggctctggaatttaacaggctcgcaagcaaagttcataaaaacgaacaaagaaccagcatcttgcagacactatgtgagcagttgcgaaaagagaacgaagccctgaaagctaagctcgataaggggctggagcaacgcgatcaggccgctgaacgacttcgagaggaaaacttagagctgaaaaaattgctgatgagcaatgggaataaggagggtgcgagcggccggcccggctcccccaagatggaggggaccgggaaaaaagccgtggcagggcaacagcaggccagcgtaaccgctggaaaggtacccgaggtggtggccctcggagccgctgaaaagaaagttaaaatgttggagcagcaacgcagcgagttgctggaggtgaacaaacagtgggatcagcacttccgtagtatgaagcagcagtatgaacaaaaaatcaccgaacttaggcagaaacttgccgatctgcagaagcaggtgaccgatctcgaggctgagcgcgagcagaaacagcgggactttgaccgcaagctcctgctggccaagagcaagattgaaatggaggagactgacaaggaacaacttacagcagaggccaaagagttaaggcagaaggtgaaatacctgcaggaccagctgtctcctctgacgaggcagcgggaataccaggaaaaagaaatccaacgcctcaacaaggccttggaggaagccctcagcatccagacacccccatctagccctcccaccgcatttggcagtcctgaaggggctggagccctcttaaggaaacaggaattagtgacccagaatgaactgttgaagcagcaggtgaaaattttcgaagaggattttcagcgggaacgatccgatcgagagagaatgaacgaagagaaggaggagctgaaaaaacaggtagaaaaattgcaggcacaagtgactttatcaaatgcccagctgaaggcttttaaggacgaggagaaggctcgcgaggccctcagacagcagaagagaaaggccaaagcgagcggcgagcggtatcatgttgaaccgcatccggaacacctgtgtggggcctatccgtacgcttaccctcctatgcctgcaatggtccctcatcacggattcgaggactggagtcagataaggtacccacccccccccatggctatggaacacccccctccactgcccaactctcgactgtttcacttacctgagtacacgtggagactgccttgcggaggggtgaggaaccccaaccagagctctcaggtgatggatcccccaacagcccgacccaccgaacccgaaagtcctaaaaatgatagagaggggccacagtag

SEQ ID NO: 208800 - DNA, 1719 bp, synthetic construct
  misc_feature 1..1719: note = Description of Artificial Sequence: Synthetic coding sequence
  source 1..1719: mol_type = other DNA
atggagggccggggcccctaccggatctacgaccccggcggcagcgtgccgtctggagaggcctctgccgcttttgaaagactcgtgaaagaaaacagtagattgaaggaaaagatgcagggcatcaagatgttgggggaattactggaagaaagccaaatggaagcaacgcgccttaggcagaaggctgaagagttggtgaaagataacgagctgctcccacccccgtcgccatccctgggttctttcgatcctctcgccgaactaactgggaaggacagcaatgtgacggcgtcaccaactgcccctgcttgcccatccgataagcccgccccagttcagaaacccccatcgagtgggacaagctccgagtttgaagtggtgacgcccgaagagcagaactcccccgaatcaagctcgcacgcaaatgccatggccctgggcccattgccgcgggaagatggaaatcttatgttacacctgcagcggctcgagaccacattgtcagtttgtgctgaagagccggaccacggccagctgttcacacacttagggaggatggccttagaatttaaccgactggctagcaaggtgcacaagaacgaacagagaacctctattctgcaaacactctgtgagcaattacggaaggaaaacgaggccctgaaggcgaaattagacaagggactggagcagcgggaccaggctgccgagagactcagagaggagaatttggagctcaaaaaattactgatgtccaacggcaacaaggaaggggccagcgggcgtcccggatcgcctaaaatggagggcacaggtaaaaaggcagtggcgggccagcagcaggctagtgttacggctggaaaggtccctgaggtcgtcgctctgggggctgcggaaaagaaggttaagatgcttgagcagcagaggtctgagctgctcgaggtgaacaagcaatgggatcaacacttccggagcatgaagcagcagtatgagcagaagattacagaacttaggcagaaactggcggatctccagaagcaggtaactgatctggaggctgaacgggagcaaaagcaacgggatttcgaccgcaaactgctccttgccaaaagtaaaattgagatggaagagaccgacaaggagcagctaactgccgaggctaaagagctgaggcagaaggttaagtacctgcaggatcagctgagtcccttaactcgccaaagggagtatcaggagaaagaaatccagaggttgaacaaggccctcgaggaggctctgagcatccagactccgccttctagtcctccaactgccttcggaagtcctgaaggcgcaggtgcccttctcaggaaacaggaactggtcacacaaaacgaactgctcaaacagcaggtaaagatttttgaggaggattttcagcgggaacgatcagatcgggagcggatgaacgaggaaaaggaggaactgaaaaaacaggtggagaagctgcaggctcaggtgacactctctaacgcacagcttaaagccttcaaagatgaggagaaggcccgcgaagccttaagacagcagaaacgcaaagctaaaccggagtacacatggaggctgccatgcgggggtgtgcgcaacccaaatcagtcaagtcaagtaatggacccgccaacagcaaggcctaccgagcccgagtctcctaagaacgatcgagagggccctcagtag

SEQ ID NO: 208801 - DNA, 1908 bp, synthetic construct
  misc_feature 1..1908: note = Description of Artificial Sequence: Synthetic coding sequence
  source 1..1908: mol_type = other DNA
atggagggccggggcccctaccggatctacgaccccggcggcagcgtgcctagcggggaagcgtctgccgcatttgaacgcctggttaaggagaacagcaggctcaaagaaaagatgcaaggaatcaagatgttgggggagctgctggaagagagtcaaatggaggcaacaaggttaagacagaaggcagaggaactggtcaaggataatgaactgctgccccctccatctccgtccttgggcagcttcgatccgcttgccgaactgacaggcaaagattcgaatgtgaccgcatcgcctactgcgccagcttgtccctcagacaaacctgctcctgtacagaaacctcctagctctgggacctcctccgagtttgaggtcgtaactcctgaagagcagaactctcctgaatcctcctcacacgctaatgccatggctctaggacccctgcctagagaggacgggaacctcatgctccacctgcagagactggagaccacccttagcgtctgcgcagaggagcccgatcatgggcagctgttcacacacctcggacggatggccctcgagtttaatcgtttagcctccaaagtgcataaaaacgaacagagaactagcatacttcagactctctgtgagcagcttcggaaggaaaacgaagccctcaaggctaagttggataagggattggaacagagagaccaggctgcagagcggctgagggaggagaacctggagctgaaaaaactcttaatgtccaacggcaataaagagggcgcatctgggcggcccggatcccctaaaatggagggtaccggcaagaaagctgtggcgggacagcagcaggcttctgtcaccgctggtaaagtcccagaggtggtggccctgggcgctgccgagaagaaagtgaagatgttagaacagcagcgatccgagttactggaggtgaacaagcagtgggatcagcattttcgcagcatgaagcaacagtacgagcagaagatcaccgagctcaggcaaaagctagcagatctacagaaacaggtaacagacctggaagctgagagagaacagaagcagcgcgacttcgatagaaagttgttgcttgcaaagtccaaaattgaaatggaggagaccgacaaagaacaactgactgctgaagctaaggagttgcgccaaaaggtaaaatatctgcaggaccagttgtcccccctaacaaggcagagggaatatcaagagaaggaaattcagagactcaataaagccctggaggaggcactgtctatccaaactcccccctcctcaccccctacagccttcggcagcccagaaggcgccggtgccctcctccgcaaacaggaacttgttacccagaacgaactgctcaaacagcaggttaaaatctttgaggaggatttccagcgcgagcgcagcgatagagagcgaatgaacgaggaaaaggaagaactgaagaaacaggttgagaagctccaggcccaggtgacgctgtctaatgcccagctaaaggcgtttaaagacgaggaaaaggccagagaagctctgcgtcagcaaaagagaaaggcgaaggcttctggcgaacgataccatgtcgagccccaccccgagcacctctgcggtgcctacccctatgcataccctcctatgcctgccatggtccctcatcatggattcgaagactggagccagatcagataccctcctccccccatggccatggagcaccctcctccgctgccgaactcaaggctgtttcaccttcctgagtacacttggagactgccctgcggcggggtcaggaatcctaaccagagttctcaagtgatggaccctcctaccgcccgtccaaccgaaccagagccagccgatctccggctgccacgcaactag

SEQ ID NO: 208802 - DNA, 1671 bp, synthetic construct
  misc_feature 1..1671: note = Description of Artificial Sequence: Synthetic coding sequence
  source 1..1671: mol_type = other DNA
atggagggccggggcccctaccggatctacgaccccggcggcagcgtacccagtggcgaggcctcggccgcgtttgagagactcgtcaaagagaatagccggctaaaagaaaagatgcagggtattaagatgctgggggaacttttagaagagtcacagatggaggccaccaggttacgtcaaaaggctgaggaactggttaaagataacgagctgttgcccccgcccagcccgtccctcggctctttcgaccctctggccgagctgactggtaaggacagcaacgttactgccagcccgacagctcctgcctgccctagtgataaaccagctcccgtgcagaagccgcccagcagcgggacgagttcagagttcgaggtggtcacgcctgaggaacaaaacagtcctgagtcatcatctcacgctaacgccatggcgttaggcccactgcctcgcgaggacggaaatctgatgctgcacttgcagcggttagagacaaccttaagtgtctgcgccgaagagccagatcatggacagctatttacacacctgggccgcatggctcttgaattcaacagacttgcaagcaaggtccataagaacgaacagcggacatccatcctgcaaacattatgcgaacaactgcggaaggagaacgaagcactcaaggcaaagctcgacaagggacttgagcagagagatcaagcagcagaaagattacgggaagagaatctcgagctgaaaaaactgctgatgtcaaatgggaataaagaaggcgcctccggtagacctggatcacctaaaatggaggggaccggcaaaaaggctgtggctgggcagcaacaggcctcagtgaccgccggtaaagtcccggaagtggtagctctcggtgccgccgaaaagaaagttaagatgctggagcagcaacgcagtgaactgttagaagtgaataaacaatgggatcagcatttccgctcaatgaagcagcagtacgagcagaagatcacagaactcagacagaaattagctgacttgcagaagcaggtcactgacttggaagccgagcgggaacaaaagcagagggactttgatcgtaagttattactggccaagtccaaaattgaaatggaggagacagacaaagagcagctgaccgcggaagccaaagagcttcgtcaaaaggtgaagtatctgcaggatcaactgtctcctctcactcggcagcgggagtatcaagagaaagaaatacagcgcttgaataaagccctggaggaggctcttagcatccaaacccccccttccagccccccaaccgctttcggttcccccgaaggagcaggtgccctcctcagaaaacaagagctcgtgacacagaacgagctcctgaaacagcaggtgaagatcttcgaagaagactttcaacgcgaaagatcagatcgtgagaggatgaatgaggaaaaagaggagcttaaaaagcaagtggagaaactgcaggcacaggtgacgctgtcaaatgctcagctcaaagcctttaaagatgaagaaaaggcccgtgaggctctgaggcagcaaaagaggaaggccaagagccttcagaaaatgaccgtccgcggcctcagcgagacgcggctttgtcacctggccccaccctctagctgtcgggcctcttag

SEQ ID NO: 208803 - DNA, 1797 bp, synthetic construct
  misc_feature 1..1797: note = Description of Artificial Sequence: Synthetic coding sequence
  source 1..1797: mol_type = other DNA
atgcagggcatcaagatgctgggcgagctgctggaggagagccagatggaggccacccgtctaagacagaaagccgaggaactggtgaaggataatgagctgctgccccctccttccccctccctgggctcttttgatccattggccgagcttacgggcaaagacagtaacgtgacagcttcccccactgcccctgcttgtccaagtgataagccagcccctgtgcagaagccaccatcttctgggactagttcggagtttgaagtggtgactccagaagaacagaattcaccagagagctcctcgcacgctaacgctatggcactcggtccactccctcgcgaggatggcaacctgatgcttcacctgcagcggttggagacgaccttgtccgtttgtgctgaggagccagatcacggccagctcttcacccaccttggaagaatggctcttgaatttaacaggctggctagtaaagtccacaagaacgagcagcggacttccatcctgcagaccctgtgtgagcaactccgaaaagaaaatgaagcgctgaaagctaagctcgacaaggggctcgagcagcgagatcaggccgcggagcggcttcgcgaagaaaaccttgagctaaaaaaactcttgatgtctaatggtaacaaggaaggtgcaagtggccggccaggatctcctaaaatggaaggaacaggcaagaaggcagtcgcgggccaacagcaggccagtgtaaccgcaggcaaagtgcctgaagtcgttgccctgggtgctgctgagaagaaggttaagatgttggaacagcaacgctcagagctgttggaggtcaacaaacagtgggatcagcattttagatcgatgaaacagcaatacgagcagaaaattactgagctcaggcaaaaattggctgacctccaaaaacaggtcacagacctggaagccgaacgggagcagaagcagcgggattttgataggaaattactgcttgccaaatcaaagatcgagatggaagagaccgacaaggaacaactaactgctgaagcaaaggagctgagacaaaaggtgaagtatttgcaggaccagctgtctccactgactagacagagagaataccaggaaaaagagatccaacggcttaataaggctctggaggaagccctgagcatccagactccaccgagttcccctccgaccgctttcgggagccccgaaggagccggcgccttactgaggaaacaggagctggtcacacaaaacgagctcctcaaacagcaggtcaaaatatttgaggaagacttccagcgagagcgctccgatcgcgagcgcatgaatgaagaaaaagaggagttgaagaaacaggtggagaagctgcaggcacaggtgaccctgtctaacgcacagttaaaggcttttaaagatgaggaaaaagcaagagaagcccttagacagcagaaacgcaaagccaaagcctccggagaaaggtaccacgttgagccgcatcccgagcatctatgtggtgcatatccctacgcataccctccgatgccagcaatggtccctcaccacggcttcgaagattggagtcagatacggtatcccccgccccctatggccatggaacatccacctcctctccccaatagtcggctgttccacctgccagagtatacgtggcgactaccgtgtggtggagtgaggaaccctaatcagtcgagccaagtcatggatcccccgacggcaaggccaaccgaaccagagtctccaaagaatgaccgggagggtccacaatag

SEQ ID NO: 208804 - DNA, 1542 bp, synthetic construct
  misc_feature 1..1542: note = Description of Artificial Sequence: Synthetic coding sequence
  source 1..1542: mol_type = other DNA
atgctgggcgagctgctggaggagagccagatggaggccacccggctaaggcagaaggctgaggagctggtgaaagacaatgaactgcttccaccaccgtccccctccctaggaagctttgacccacttgcagagctgacagggaaagactctaatgtgacagcctccccaacagcaccggcatgcccctcagataagcccgcaccggtccagaagccccccagcagtggcacgagcagcgagttcgaggtggttacaccggaggagcagaatagcccagagtcctcttcacatgccaacgctatggcattaggcccactccctcgtgaagacggtaatctgatgctgcatttgcagcggctggagactacattgagcgtctgcgccgaagagcctgaccatgggcagctcttcacacatttaggccgcatggcactggagtttaacaggctggcatccaaggttcacaagaatgagcagcggaccagtattctgcagacattgtgtgaacaacttcgcaaagagaatgaagccctgaaagcgaagctcgacaaaggactggaacagcgcgaccaagccgcagagaggctacgggaggagaatctagagctcaaaaagctgctgatgagcaatggtaacaaggaaggagcttccgggcggccgggcagcccaaaaatggaaggcacaggcaagaaagctgtggccgggcagcaacaggctagcgtgaccgccgggaaagtgccggaagtagtcgcactgggtgcggcagaaaaaaaagtgaagatgctggaacagcagagatcagagttgcttgaagttaacaaacagtgggatcagcactttcggtcaatgaaacagcagtacgagcagaagatcactgaactgcgccagaaactggccgacttgcagaagcaggtgactgacctggaagctgagagggagcaaaaacagagggattttgaccggaaactgctgctcgctaaaagcaagatcgaaatggaggaaacagacaaagaacagctgacggcagaagccaaggagctgcgacagaaagttaaatatttacaagaccagctgtcccctctgacacgccagagggaatatcaagaaaaagaaatccagcggctcaataaggcactggaggaagcactgtccatccagacgccaccttcatctccaccgaccgctttcgggtcacccgaaggagccggcgcccttctgcggaagcaggagctcgtgacgcagaatgaactgctcaaacagcaggtcaaaatttttgaggaagattttcagagggaaagatcagatagagagcgaatgaacgaggagaaggaagagcttaaaaagcaggttgaaaaattgcaggcccaagtgacactgtccaacgctcaactgaaagcctttaaggacgaggaaaaggctcgtgaggccttacgccaacagaagcgcaaggccaaatcgctgcagaaaatgacggtgcggggcctgtcagaaacgcgcctgtgccacttggccccacctagttcttgtcgtgcttcctag

SEQ ID NO: 208805 - DNA, 1509 bp, synthetic construct
  misc_feature 1..1509: note = Description of Artificial Sequence: Synthetic coding sequence
  source 1..1509: mol_type = other DNA
atgctgggcgagctgctggaggagagccagatggaggccacccggctgaggcagaaggccgaggagcttgtaaaagataatgagcttcttcctccaccctctcccagtctggggtcctttgatcccctcgctgagctgactggcaaagacagcaacgtgaccgcttcccctactgccccagcgtgtccttccgacaaacctgcgcctgtgcagaagcccccctcttctggaaccagcagtgagtttgaggtggttacacccgaggaacagaattcccccgaaagctcctctcacgctaacgctatggctttaggtcctttacctagggaagatgggaacctgatgctgcacctgcagagactggagaccactcttagtgtttgcgctgaggaacctgatcacggacagctcttcacacatctggggaggatggctctggagtttaacagacttgcgagcaaggtgcataagaatgaacaacggacaagcatcctacagaccctgtgcgaacagctgcgtaaggagaatgaggctctcaaggcaaaactcgataaaggacttgagcaacgtgaccaggctgctgaacgcctcagagaggagaacctcgagctcaagaagctgctcatgtctaatggcaacaaggagggggccagcgggcgccccgggtctccaaaaatggaaggcactggtaagaaagctgtagccggccaacagcaggctagtgtgaccgcgggcaaagtacctgaggtagtggcgttaggggcggcggaaaaaaaggtgaagatgttggaacaacagcgctcagagctgctggaagtgaataagcagtgggatcagcatttccgctcaatgaagcaacagtatgagcagaagattactgagttacgacaaaaactagccgacctccagaagcaagtaaccgatctagaggcagagagagagcagaaacagagggactttgatcgcaagctcttgctcgcaaagagtaaaatagaaatggaggaaaccgacaaggaacagttgactgctgaggctaaggaactacggcagaaggttaagtacttgcaagaccagctctcccccttgacgaggcagagagagtaccaggagaaggaaatccagaggttgaacaaagccctggaggaggccctgtctatccagactccaccctcttcccccccgactgcctttggctccccagagggtgctggagccctgctgagaaagcaggagttggtcacacagaatgaactcctgaagcagcaggtcaaaatcttcgaggaagacttccaacgcgagagaagtgaccgcgagcgaatgaacgaagaaaaagaagagctgaagaagcaggtggagaagcttcaggcgcaggtgacactgtccaacgctcaactcaaggctttcaaggatgaggaaaaggcccgagaagcattgagacaacagaagaggaaagcgaagggcacccatcgggggtgccctaggcaccttcccgaacgcaaagtgaaatag

SEQ ID NO: 208806 - DNA, 1290 bp, synthetic construct
  misc_feature 1..1290: note = Description of Artificial Sequence: Synthetic coding sequence
  source 1..1290: mol_type = other DNA
atgagccgggaccccggcagcggcggctgggaggaggccccccgggctgcggccgctttgtgtaccctgtatcacgaggcaggacagcggctgcgacgactgcaagatcagttggctgctcgtgatgcactgatagctagactgagggctcggcttgctgctctagaaggcgacgcagcaccatcactcgttgacgccctcttggagcaggtagcgaggtttcgtgagcagctgcgcaggcaggaaggcggcgctgctgaagcccagatgagacaggagatagaaaggctaacagagcgtcttgaagagaaggaacgcgaaatgcaacagctgttatctcagccgcagcacgaaagggagaaggaggtggtgttgcttaggcggagtatggccgagggtgaacgggcaagagcggccagtgatgttttatgtcgatcgctggcaaatgagactcaccagcttagacgaactctaaccgcaactgctcacatgtgccagcatctcgccaagtgcctggacgaacgacagcatgctcagcgcaatgtaggcgagagatctccagaccagtcagagcacactgacggccacacgtcagtgcaatctgtcatcgagaagctgcaggaagagaatcgcctgttaaaacaaaaggtgacacacgttgaggatcttaacgccaaatggcaacggtataacgcctccagagacgaatacgttaggggattgcacgcccagttgcgcggcctgcaaatccctcatgagcccgaactgatgaggaaggaaatttccagattaaatagacagctggaggaaaagatcaacgactgtgccgaggtgaaacaagagctggccgctagtcgcactgctagggacgccgctcttgagcgcgttcagatgctggaacaacagatcctggcctacaaagatgacttcatgagcgagcgggctgaccgagaaagagcgcaaagtcgaattcaggagcttgaggaaaaggtggcctcgctccttcaccaggtctcctggcgccaggatagccgcgaacctgatgccggtcggatccacgccggtagcaaaaccgctaagtatctcgcagccgatgctctggagctcatggtacctggcgggtggcgccctggaactggcagccagcagcctgagccccctgcagaagggggtcacccaggggcagcacagcgaggccaaggcgacttacaatgtcctcactgcttacagtgtttctccgatgagcagggagaggaacttttaagacatgtggccgaatgctgccagtag

SEQ ID NO: 208807 - DNA, 969 bp, synthetic construct
  misc_feature 1..969: note = Description of Artificial Sequence: Synthetic coding sequence
  source 1..969: mol_type = other DNA
atgcagcagctgctgagccagccccagcacgagcgggagaaggaggtggtactgttgaggcggtctatggccgaaggggagagggcccgtgctgcgtccgatgtgctctgtcgaagcttagctaatgagacacatcagctgcggcgtacgttgacggccactgcccatatgtgccagcatctcgccaagtgcttggatgaacggcaacacgcacagagaaatgtgggggaaagaagccctgaccaaagcgaacacacagatggacatactagcgtccaaagcgtgatcgaaaaacttcaggaggagaaccgcctcctgaagcaaaaggtgactcatgttgaggacctcaacgccaagtggcagcgctacaacgcctcaagggacgagtacgtgcggggcttgcacgctcagttgagaggactgcagatacctcacgaaccagagctgatgcgtaaggaaatctctcgacttaatcggcagctcgaagagaagatcaatgattgcgccgaggtgaaacaagagctggcagcctcaagaaccgccagagatgcagctctggaacgggttcagatgctggaacagcagatcctggcgtacaaggatgactttatgtcagaaagggccgacagggagagagctcaatcccggattcaggagctggaggaaaaagtggccagcctgctgcaccaggtctcgtggcgacaagacagtcgcgagccggacgcaggacgaatacacgccggtagcaagactgcaaagtacctggcggccgacgccttggagctcatggtgcctggcggttggagacccggtacaggctcccaacaacccgaacctcccgccgagggcggacatcctggggctgcccaacgggggcagggggacttacagtgtccgcattgcctgcagtgtttctcggacgagcagggtgaggaactgctgagacacgttgcggagtgttgccagtag

SEQ ID NO: 208808 - DNA, 837 bp, synthetic construct
  misc_feature 1..837: note = Description of Artificial Sequence: Synthetic coding sequence
  source 1..837: mol_type = other DNA
atggccgaggcccggagccagcccagcgccggcccccagctgaacgccctccctgatcatagcccactgctacagcctggcttagctgcgctgcgaaggagagccagagaagctggcgtaccactggcacccctccccctgaccgatagctttctgctgaggtttctgcgcgctagggactttgacctggatctggcctggaggttgctgaagaactactacaagtggagggctgagtgccctgagatttctgctgatttgcatcccagaagtataatcggcctgttgaaggcgggataccacggcgtcctacgatcaagggacccaactggctccaaggtccttatttacagaattgctcactgggaccctaaggtatttacagcttatgacgtctttcgcgtctcgctgatcacaagcgaattaatcgttcaggaagttgagactcagcgaaatggcatcaaggctatctttgacctggaaggttggcagttttcccatgccttccagatcaccccatcagtggccaaaaagattgcagcagtcctcacggacagcttcccactgaaggttagggggatccacctgatcaacgaacccgtcatcttccatgctgttttcagcatgatcaaaccctttctcactgaaaaaataaaagaaaggatacacatgcacggtaacaactataagcaaagtctgctccaacattttcccgatattctgcctctggagtatgggggagaggaattcagtatggaggatatttgccaggaatggactaattttattatgaaaagtgaggactatctttcttcaatttctgaatcaatacagtag

SEQ ID NO: 208809 - DNA, 2361 bp, synthetic construct
  misc_feature 1..2361: note = Description of Artificial Sequence: Synthetic coding sequence
  source 1..2361: mol_type = other DNA
atgaccagcatcttccacttcgccatcatcttcatgctgatcctgcaaataagaatccagctaagtgaagaaagcgagttcctggtcgaccggtctaagaacggcctgatccacgtccctaaagatctgagccagaaaacaactattctcaatatttcacaaaactatatttctgagctgtggacgtcagatattctctcactgtcaaagctgaggatcctgatcattagtcacaacagaattcagtacctggacattagcgtgttcaagttcaaccaagagctagagtatctggatctcagtcataataaactggtgaaaatttcgtgtcaccctactgtaaacctgaaacacctggatctgtcgtttaatgcctttgacgcactgccaatctgcaaagagttcgggaatatgtctcaactcaagttcctcggcctttccacaacccatctcgagaaatctagtgtgttgccaattgcccaccttaatatctcaaaggtcctcctggtcctcggcgagacctatggtgagaaggaagaccccgagggtttacaggacttcaacaccgagagcctacacatcgtgttcccgacaaataaagagtttcattttatcctcgatgtgtccgtgaagaccgtggccaatctcgagctctctaacatcaagtgcgtcctggaagataacaaatgctcatacttcctgtccattctcgcgaagctgcagacgaacccgaaattgtctaaccttacgctgaataacattgaaacaacttggaacagcttcatcaggattctgcaattagtgtggcacaccactgtgtggtacttctctatctccaacgtgaagctgcagggacagcttgatttcagggattttgattattctggcacctccctcaaagccctttcgatccaccaggtggtgtcagacgtatttggtttccctcagtcatacatttacgagatttttagcaatatgaacatcaagaactttaccgtctccggaacccgcatggttcacatgctttgtccttcaaagatctcccctttcctgcacttagattttagcaacaacctgttaactgataccgtattcgaaaattgtgggcacctgacagagcttgaaaccctgatcctgcagatgaatcagttaaaagagctttcaaagattgctgaaatgaccacccaaatgaagagtcttcaacagctggatatcagtcaaaactcagtgtcttatgatgaaaaaaagggggactgttcctggaccaagtccttattatcactcaatatgtcaagtaacatcctgaccgataccatctttcgctgcctacccccaaggattaaggttcttgacctgcatagcaataagattaaatccattcccaagcaggttgtcaagctagaagccctacaggagctgaatgttgcttttaatagcctgactgaccttcccggttgtggcagtttctcttccctgtcagttctcataatcgatcacaattcagtgtcccatccctcggcggatttcttccagtcgtgccagaagatgcgtagtatcaaagctggcgacaacccatttcagtgtacctgcgaactgggtgaattcgtgaagaatatcgaccaggtatcatccgaggtgctcgaaggctggcccgatagctacaagtgcgactaccctgaatcctaccgcggaacactgcttaaggacttccatatgtctgagcttagctgtaacattacactcctcatcgtgacaatcgtggctaccatgctggtgcttgccgttactgtgactagcctttgtagttatctggacctcccgtggtacctgaggatggtgtgtcagtggacccagactcgccggcgagcccggaatattccactggaagagctccagcggaatctgcagtttcacgcattcatctcatacagcggtcatgacagcttttgggtgaaaaacgaactgctgccaaacttggagaaggaaggaatgcagatctgtctgcacgagagaaatttcgtgcctggcaagtccatagtagagaacatcatcacttgtatagagaagagctacaaaagcattttcgttttaagcccgaactttgtacagagcgaatggtgccactatgagctgtattttgctcaccacaacctctttcacgaagggagcaattcgctgattctcattctgcttgaacccatcccacagtactcaattccgtcctcttaccacaaactcaagtcacttatggccagacgcacatacctcgaatggccgaaggagaagtccaagcggggcttgttctgggcgaatctgagagctgcaatcaacatcaaactcaccgaacaggcgaagaagtag

SEQ ID NO: 208810 - DNA, 2361 bp, synthetic construct
  misc_feature 1..2361: note = Description of Artificial Sequence: Synthetic coding sequence
  source 1..2361: mol_type = other DNA
atgaccagcatcttccacttcgccatcatcttcatgctgatcctgcaaatccgcattcagctgtccgaagagtcagagttccttgttgataggtctaagaatggactgatccacgtgcctaaagacctctctcaaaagacaactatcctgaacatcagtcagaattacataagcgaactctggacttctgatattctcagcctgtccaaactgagaatcttgattataagtcataaccgcatccagtacctggatatcagcgtgttcaaattcaaccaggagctggaatatttggacctgagtcacaataaacttgtcaaaatctcctgtcaccctacagtgaatctcaagcacctcgacctgagttttaacgcctttgacgcattgcccatctgcaaggaattcggaaacatgtcacaactgaaatttctgggactttctactacccaccttgaaaagtcttcggtgcttcctattgcacacctgaacatatcgaaggtcttgctggtactgggggagacctacggcgagaaggaagatccagaaggtttacaggactttaacaccgagtcactgcatattgtctttcctacgaacaaagaatttcattttattctggacgtctctgtcaagacagtagcaaatctggagctcagcaacatcaagtgcgtgctagaagacaacaagtgctcatattttctgtccattcttgccaaactgcagactaatccgaagctgtcaaatctgacactgaataatatcgagacaacatggaacagcttcatacggattctgcagcttgtatggcatactaccgtttggtacttctccatatctaacgtaaagctccagggacagctggactttcgggacttcgattactccgggacctccctgaaggccttgtctatccatcaggtggtcagcgatgtgttcggcttcccccagagctacatttatgaaatcttttcaaatatgaatattaagaactttactgtaagtggtaccagaatggtgcatatgctgtgtccgtccaagatttctcctttcttgcatttggattttagtaataacctgctcactgataccgtgttcgaaaattgtggtcatttgacagagctggagaccctcattttgcaaatgaatcagctgaaggagctttctaaaattgcagagatgaccactcagatgaagtcccttcagcagctggacattagtcagaatagcgttagctatgatgaaaaaaaaggagactgtagctggaccaagtccctcctgtcactgaatatgtcttccaatatcctcacagacaccatcttccggtgcttaccacctaggattaaggtactggacctgcattctaacaagatcaaaagcataccaaagcaggtggtaaaattggaggcgctacaggagctgaatgtcgcctttaactccctaactgatctaccgggctgcggatccttcagcagtctcagtgtccttataatagaccacaattccgtgtcccatccttccgccgactttttccagtcttgccaaaagatgcggtccattaaggcaggtgataaccccttccagtgcacctgtgagctgggagaattcgtgaagaacattgaccaagtctcctctgaggtgctggagggttggcctgactcttacaaatgcgactatccagagtcctatcggggaacacttctcaaggatttccacatgagcgaattaagctgcaacatcacgctgctgatcgtcactattgtagcaaccatgctggtgcttgctgtgacggttaccagcctctgctcataccttgacctgccctggtatctgagaatggtgtgccagtggacacagacaaggcgtcgggctcgaaatatccccctggaggagttacagcgtaatttgcaattccacgcatttatctcctatagcggtcacgactccttttgggttaagaacgagctcttgcccaatctggagaaggaaggcatgcagatctgtctgcacgagagaaattttgttcccggcaagtccattgtcgagaatattatcacctgcatcgagaaatcatataaatctatcttcgtactctcccccaactttgtgcaatccgagtggtgtcactacgagctgtacttcgcccatcataatcttttccatgaaggaagcaacagcctgattcttatcctactggaaccaattccacagtactcaatcccctcgtcctaccacaagttaaagagcctgatggcccgtcggacctacttagaatggccgaaagagaaatccaaacgaggactattctgggcaaacctgagagccgctatcaacatcaagctcacagagcaggccaaaaagtag

SEQ ID NO: 208811 - DNA, 486 bp, synthetic construct
  misc_feature 1..486: note = Description of Artificial Sequence: Synthetic coding sequence
  source 1..486: mol_type = other DNA
atgaccagcatcttccacttcgccatcatcttcatgctgatcctgcagatcagaattcaactctctgaagaaagtgagtttctcgtagaccggtctaagaatgggctgatccacgtaccaaaagacctgtctcagaaaaccactatcctcaacatcagccagaactatataagcgagctatggacatccgatattctgtccttgtccaaattgcggattctcatcatcagtcacaaccgaatccagtatctagatataagcgtgttcaaatttaaccaggagttagagtatttggacctctctcataataaactggtcaagattagttgtcaccctaccgttaatcttaaacacctcgacttgtcattcaacgccttcgacgccctccctatatgcaaggagtttggcaacatgagccagctgaaattccttggactttccaccacacatctcgaaaagagcagcgtgctgcccatcgcccactag

SEQ ID NO: 208812 - DNA, 147 bp, synthetic construct
  misc_feature 1..147: note = Description of Artificial Sequence: Synthetic coding sequence
  source 1..147: mol_type = other DNA
atgaccagcatcttccacttcgccatcatcttcatgctgatcctgcagattagaattcaattgtccgaagagagcgagtttttagtggacagatctaagaatggactgattcacgtacctaaagatcttagccagaaaaccacttag

SEQ ID NO: 208813 - DNA, 72 bp, synthetic construct
  misc_feature 1..72: note = Description of Artificial Sequence: Synthetic coding sequence
  source 1..72: mol_type = other DNA
atgaccagcatcttccacttcgccatcatcttcatgctgatcctgcaaatcagaatccaactgagtgaatag

SEQ ID NO: 208814 - DNA, 273 bp, synthetic construct
  misc_feature 1..273: note = Description of Artificial Sequence: Synthetic coding sequence
  source 1..273: mol_type = other DNA
atgaccagcatcttccacttcgccatcatcttcatgctgatcctgcaaatcagaatccagctttccgaagagtccgagtttctggtggaccggagcaagaatggcctgatacatgtcccaaaagacctcagccaaaagaccacaatcctgaacataagccagaattacattagcgagttgtggacgtccgacatactgtcgctctctaagttacgaattctgattatctctcataatcgaatacagtacctggacatttccgtgttcaaatag

SEQ ID NO: 208815 - DNA, 2355 bp, synthetic construct
  misc_feature 1..2355: note = Description of Artificial Sequence: Synthetic coding sequence
  source 1..2355: mol_type = other DNA
atgccccacaccctgtggatggtgtgggtgctgggcgtgatcatcagtctgtccaaggaggagtccagtaaccaggccagcctgtcctgcgaccggaatggcatttgtaaaggatcaagtggaagtctgaattccatccctagcggcctgaccgaagctgttaagagcctcgatctgagtaacaataggatcacctatatcagcaactctgacctgcagcgatgcgttaacttgcaggccctggtactcactagcaacgggataaatactattgaagaagacagtttttcgtcgctagggagccttgaacatctggatctttcgtataactatctgagtaatctatccagctcctggttcaaacctctttcctccctcaccttcctcaacctattgggcaatccctataagacccttggcgagaccagcttgttttcccacctgacaaaactgcagatactcagggtgggcaacatggacactttcactaaaatccagagaaaagactttgcagggttgacatttttagaagaattagagatcgacgcttccgacctacagagttacgaacctaagagcctgaagagtatccagaatgtgtctcatcttatactccacatgaagcagcatatcttactactagagatctttgtggacgttaccagcagtgtggagtgtctggagttgcgggatacagatctggacaccttccatttttccgagctctctactggtgagacgaattctctgatcaagaaattcacctttcggaacgtaaaaataaccgacgagtctctattccaagtaatgaagctactgaaccagatctccggtctgttggagcttgagtttgacgactgcaccctgaatggggttggtaactttagagcttcagacaatgatagggtgattgatccgggcaaggtagagacactgactatcagaaggttacatatcccccggttttatctgttctatgacctgtccacactctattctctaaccgaaagagtcaaaaggattaccgtcgagaactcaaaagtatttctagtgccttgtctgctcagccagcacctaaaatcgttggaatatttagacctttctgaaaacctgatggtagaagaatatttgaagaatagcgcgtgcgaggacgcttggccctctctgcagacccttattctgcgtcagaaccacctggcaagcttggagaagactggcgagacgctgctcaccctcaagaatctgacgaatattgacatctccaagaacagttttcattccatgcccgagacgtgtcaatggcccgagaagatgaagtacttaaatctttctagtacacgcatccacagcgtgaccggatgcatacccaagacccttgagattctggatgtgtccaataataatctcaatctgttcagtctcaacctcccacagttaaaggaactgtacatatcccggaataagctcatgacactgcctgatgcttccctcctaccgatgttgctggttttgaagatctctagaaacgcaatcacaacattcagcaaagagcaattggacagcttccacaccctgaaaaccctggaggccggcggtaacaatttcatatgttcctgtgagtttctgagtttcacccaggagcagcaggcactcgcaaaagttttgatcgactggcccgccaactatctatgcgattccccctctcatgtaagagggcagcaggtgcaggatgtccggttatcagtgtccgagtgccaccggacagctctcgtatccggcatgtgctgcgcactgtttctgcttatccttcttaccggtgtcctctgccaccgattccacgggctgtggtacatgaaaatgatgtgggcatggttgcaggccaaaaggaaaccgcgcaaggccccttccagaaatatctgttatgatgccttcgtttcatatagtgagcgcgatgcatactgggttgagaacctgatggttcaggagctcgagaatttcaaccctcctttcaagttatgtctgcataagcgcgattttatcccagggaaatggattatagacaatatcattgatagtattgaaaagtctcataagacagtgtttgttttgtcagagaactttgtaaaatccgagtggtgtaaatatgaattagacttttcacacttcagactgttcgacgagaacaatgacgcagcgattcttattctgttagaaccaatcgagaagaaagctatcccgcagaggttttgtaagctccgaaaaatcatgaacacaaaaacttatctcgaatggcctatggatgaagcccaaagagagggcttctgggtcaaccttagagcagccattaaatcttag

SEQ ID NO: 208816 - DNA, 2715 bp, synthetic construct
  misc_feature 1..2715: note = Description of Artificial Sequence: Synthetic coding sequence
  source 1..2715: mol_type = other DNA
atgcggcagaccctgccctgcatctacttctggggcggcctgctgcccttcggcatgctgtgcgcatccagcacaactaaatgtaccgtgagccacgaggttgccgactgcagtcacctcaaacttactcaagtaccagatgatcttcctactaacataaccgtgctgaaccttacgcataatcagctccgtcggctgcctgcagctaacttcacccgatactcccaactgacctctctggacgtgggattcaacactatatctaaactcgaacccgaactatgtcagaaattgcccatgctcaaggttctcaacctgcagcacaacgagctgagccagctgtcagacaagacattcgccttttgcacaaatctgacggagttgcaccttatgtctaactccattcagaagatcaaaaacaacccctttgttaagcagaagaatctgataaccctggacctttctcataacggactatcttcaacaaaacttggaacacaagttcagctagagaacctgcaggaactgctgttgtctaacaacaaaatccaagccttaaaatccgaggagctcgacattttcgcaaactcttctcttaagaaacttgaattgtcttcaaaccagataaaggagttttcacccggctgcttccacgccattgggaggttatttgggctgttcttgaacaatgtccagttggggcccagcctgaccgagaagctttgcttggagttggccaataccagcataagaaatctgtctctcagcaatagtcaattatcgacaacctctaacacgactttcctaggtctgaaatggacaaacttgactatgctcgacctgtcatacaacaatctcaacgtcgtgggcaatgactcctttgcttggcttccacagctggaatactttttcctggagtacaacaatatccagcacctgttttcccattcactgcacgggctgttcaatgtcagatacttgaacctgaagcggtccttcacgaagcagagtatctccttagcttctctccccaaaatagatgacttttccttccagtggctgaaatgcctagaacacttaaacatggaagataacgacatcccaggaatcaaatccaatatgttcacaggtctgatcaaccttaagtatcttagtctgagtaacagctttacctcattgagaaccctaactaacgagacatttgtgtctctggcgcacagccccctacacattttaaaccttacaaaaaataagatttctaaaatcgaatcagacgctttttcgtggctaggtcatctggaggtgctggatcttggactcaacgagattggacaggaacttactggccaggagtggcgaggactcgaaaatatatttgagatctatctcagttacaataaatatctccagctaacacgtaatagcttcgcgctggtaccttctctccaacggcttatgctaagacgcgtcgctctgaaaaatgtggattcatcccccagccctttccaaccactgcggaatctgacaatattggacctcagcaacaacaacattgccaacattaacgacgacatgctggaggggttagagaaactggagatcctggacttacagcacaataatttggcacgcctgtggaaacatgcgaacccgggcggaccaatctactttctgaaaggactgtcccacctacacatcctgaatctggagtccaacggcttcgacgagattcccgttgaagtgtttaaggacttattcgagttaaagattatagacctgggtctgaacaatttgaacacactgccagcaagtgtgttcaacaaccaggtgtctctgaaatcccttaacttgcagaagaatctgatcacttccgtggaaaaaaaagtgtttggaccagccttccgtaacctgacagagctcgacatgagatttaacccttttgattgtacgtgcgaatccatcgcctggttcgtgaactggatcaacgagactcacacaaacataccagagcttagctcacactacctctgtaatacgcctccgcactatcacggtttcccggtgagactgtttgacacctcatcctgtaaggatagcgctccgttcgaattgttctttatgatcaataccagcatactgctgatattcatttttatcgtactgctgatccatttcgagggatggcgaatctctttttattggaatgtgtccgttcatagagtactgggctttaaggaaatcgataggcagacagagcaattcgagtatgcagcttatatcattcatgcttataaagataaggactgggtgtgggagcactttagttcaatggaaaaagaggatcaaagcctcaagttttgcctagaggaaagggacttcgaggcaggagtattcgagctggaggccattgtgaactccattaaacggtcacgcaaaatcatcttcgtgataactcaccatttgctcaaagaccccttgtgtaaaaggtttaaagttcaccacgccgtccagcaggccatcgagcagaatctagacagcataattttagttttcttggaagaaattcccgactataaacttaaccacgctttatgtctgaggcgagggatgtttaagtcacactgtatattaaattggcctgtgcagaaagagcggataggcgccttccggcataagctccaggtggccctcggatccaaaaatagcgtgcactag

SEQ ID NO: 208817 - DNA, 1884 bp, synthetic construct
  misc_feature 1..1884: note = Description of Artificial Sequence: Synthetic coding sequence
  source 1..1884: mol_type = other DNA
atgctggacctgagctacaacaacctgaacgtggtgggcaacgacagcttcgcctggctcccacaacttgagtattttttcttagaatacaacaacatccaacacctgttctctcactctctgcacggcctctttaatgttcggtatcttaatctcaagaggagttttacaaagcagagcatcagccttgcttcactgcccaagatagacgactttagcttccagtggctaaaatgcctggagcatctaaacatggaggacaatgatatccctgggattaaaagtaacatgtttacaggactcattaacttgaagtatctaagtttaagcaactcgtttacaagcctgcggactcttactaacgagacgttcgtttctttggcacattctccactccacattctcaatctcaccaaaaataagatatccaaaatcgagtctgatgctttttcctggctcggtcatttagaagtgctggatctgggtctcaatgagattggccaggagctgactgggcaggagtggagaggtctggagaacatcttcgagatctatctgtcctacaacaaatacctgcagttaactcggaactcctttgctttggttccatccctacagaggctgatgctgcggcgggtcgccctgaaaaacgtagacagttcaccttcaccttttcagccactgcgcaatctcacgattctggacctctccaataataacatcgccaatatcaacgacgatatgctcgagggtctggaaaaactcgagatactggacctgcagcataataacctcgctaggctgtggaaacacgccaaccctggagggcccatttatttccttaaggggctcagccatctgcacatcttgaacctggaatctaacggctttgacgagatacccgtcgaagttttcaaggacctgtttgaactcaagattatcgacctgggattaaacaatcttaatacgctgcctgctagcgtattcaataatcaagtgtcgctgaaatcgctgaacctgcaaaaaaacctcattacatccgtagagaagaaggtgttcggacccgctttcaggaatttaactgaactggacatgcggttcaacccctttgactgtacttgtgagagcatcgcatggtttgtcaactggataaacgagactcacacaaatattcccgagctgtctagtcactatctgtgcaacacccccccgcattatcacggttttccggtgcggctgtttgacacaagcagctgcaaagatagcgctcccttcgagctcttctttatgatcaatacatctattctcctcattttcattttcatcgtgttgctgatacattttgaaggctggagaattagcttctattggaacgtgagcgtccacagagttctcgggtttaaggagatcgataggcagaccgaacaatttgaatatgcagcttatatcatccatgcttacaaggataaagattgggtgtgggagcacttctcttccatggaaaaggaagatcagtcactgaagttctgcctcgaagagcgagacttcgaggcaggagtgtttgagttggaggccattgtcaattctatcaagcggtcacgcaaaatcatcttcgtcattacccatcacttattgaaggatcctctctgcaaaagatttaaagttcatcacgccgtgcagcaggcaatcgagcagaatctagattctataattctggtattcctggaggagattcccgattacaaactcaaccacgccctttgtctaagaagaggtatgttcaaaagtcactgcattctcaactggcccgtacagaaggaacgcattggcgcctttcggcacaagctccaggtagctttgggaagcaagaactctgtacactag

SEQ ID NO: 208818 - DNA, 2613 bp, synthetic construct
  misc_feature 1..2613: note = Description of Artificial Sequence: Synthetic coding sequence
  source 1..2613: mol_type = other DNA
atgcggcagaccctgccctgcatctacttctggggcggcctgctgcccttcgggatgttgtgcgctagctcaacaactaaatgtacagtcagccacgaggttgccgactgttcccacctgaaactgacccaggtgcctgatgacttgcccacgaacattacagtactgaaccttacacacaatcaactcaggagactgcctgcggctaactttactcggtactcacagttaacctctctcgacgtcggattcaacactatatctaagctggaacccgagctttgccagaagctcccaatgctcaaagtcctaaaccttcagcacaacgagctgtcacagttaagcgacaaaacttttgcgttttgtactaatctgaccgagctccacctcatgagcaattcaattcagaagatcaaaaacaaccctttcgttaagcaaaaaaacctgattacgctcgacttatcacacaacggattgagcagtaccaaactcggcacccaagttcagctggagaatctgcaggaattgttgctatctaacaataagatccaggctttaaaatccgaggagttagatatcttcgccaactcctctttgaagaagttggagctgtcgtccaaccaaattaaagaatttagccccggctgtttccacgccattggtaggctgtttggcctcttcctcaataatgttcagctgggacccagtctgaccgaaaagctttgccttgaactggccaacacaagcatccgcaacttaagcctcagtaactcacaactgtctaccacaagcaacactacttttcttggtcttaagtggaccaacctgaccatgctcgacctttcttacaataatctgaatgttgtgggcaatgacagcttcgcatggctgccacagcttgagtattttttcttggaatataacaacatacagcatcttttttcccactcgctgcacggtctgtttaacgtgagatacttaaatctcaagcgatcttttacaaagcagagcattagcctcgcctccttgcctaagatcgacgatttctccttccagtggctcaaatgcttggaacatcttaatatggaagacaacgacattcccggtatcaagtctaatatgttcactgggcttatcaacctgaagtacctctccctgagtaatagctttacctccctgagaaccttgacaaatgagacttttgtgtcactcgcccattccccattacacattctcaatctcaccaaaaacaagatttctaaaattgagagcgacgcgtttagttggctgggacatctggaggtgctggacctcggattgaatgagatcgggcaggagctgaccggccaggagtggaggggcctggagaacatcttcgaaatatatctgagctataacaagtacctgcagttgacgaggaactcatttgcactggtgccctccctgcaacgactgatgcttcgcagagtggcattaaaaaacgtggactcctccccatcacccttccagccattgcggaacctgactatcctggacttaagtaacaacaacatcgccaacataaacgacgacatgctggagggcctggaaaaactggagattctcgatctgcaacacaataacctggctaggctgtggaaacatgccaacccgggagggcccatttatttcctcaagggactctcccacctccacatcctgaacttggagtctaatggtttcgacgagatcccggtggaagtcttcaaggatcttttcgagctgaagatcatcgatctgggtctgaataatctgaacacactgcctgcaagcgtgttcaataaccaggtatctctgaagagtctaaacctgcagaagaatctgatcacttctgtcgagaagaaggtattcggacctgcgttcaggaacctgaccgagttagatatgagattcaatcctttcgactgtacctgcgaatccatcgcctggttcgtgaattggattaacgaaacccacacaaatatccccgagttgagcagccactatctctgcaacaccccaccacattaccacggatttcccgttcgcctctttgatacaagtagctgcaaagactctgcccccttcgaactcttcttcatgataaacacgagcatcctactgatttttatcttcatagttctcctgatccactttgagggctggagaatttctttttactggaacgtcagcgtgcatagagtcttaggcttcaaggagatcgacaggcagaccgagcagtttgaatatgccgcttacatcatacatgcctacaaggacaaggactgggtctgggaacacttttcttccatggaaaaagaagatcagagtctgaaattttgtctggaggaacgagattttgaggccggagtgttcgagctcgaagccattgtgaattccatcaaacggtctcgaaaaattatttttgtcataactcaccacctgctaaaggaccccctgtgcaagcggttcaaggtgcaccacgctgtgcagcaagccatcgaacagaacctggatagcatcatcctagtttttctggaggagattcctgattacaagctcaatcacgctctctgcttgaggcgcgcaaaatag

SEQ ID NO: 208819 - DNA, 2391 bp, synthetic construct
  misc_feature 1..2391: note = Description of Artificial Sequence: Synthetic coding sequence
  source 1..2391: mol_type = other DNA
atgaccaaggacaaggagcccatcgtgaagagcttccacttcgtgtgtctaatgattatcatagtgggtacaaggatccagttttcagatgggaatgaatttgccgtcgacaagtctaagcgtgggcttatccacgtccccaaggatctgcctctgaagacaaaagtgctggacatgagtcagaactacatagcagagttgcaggtgtctgacatgtcctttctgtctgagctaactgtgctgaggctcagccataacagaattcagctgctcgacttgagcgtgttcaagtttaatcaggacctcgagtacctggacctgtcccacaaccagctgcagaagatcagctgccacccaatagtctccttccgtcacctggatttgagttttaatgattttaaagcgctaccgatctgtaaggaatttggcaacttgagtcagttgaactttctcggactgtccgcaatgaagctccaaaagctggacctcctccccattgcccacttgcatctgagctatatactgctggatctgaggaattattatatcaaagaaaacgagactgagtcccttcagatcctcaacgcgaaaacgcttcatctggtgtttcaccccacaagcctcttcgctattcaggtgaacatcagtgtcaacacacttgggtgtttacagctgaccaacattaagctcaacgacgataattgtcaagtctttattaaatttctgtctgaactcacaagaggttcaactcttttgaatttcaccctgaatcacattgagaccacgtggaagtgcttagttcgcgttttccaattcctttggcctaagccagtggagtatctgaatatatataacttaactatcatagagagcatacgcgaggaggacttcacctattcgaagactactctgaaggctctcaccatcgagcatatcactaatcaggtgtttctcttttctcaaaccgccttgtacacagtgttctcagaaatgaacatcatgatgcttaccatcagcgacactccgttcattcacatgttgtgcccacacgcaccgtccacgttcaaattccttaacttcacacagaatgttttcactgactccattttcgagaagtgttctactctggtgaaactggagacgctgattttacaaaaaaatggtctgaaagatctgttcaaagtcggccttatgacgaaagacatgccatccctggagatcctggatgtcagttggaactcattggagagcggaaggcataaagaaaactgcacatgggtagaatccattgtggtgcttaacctgtcctcaaatatgttgactgattcagtgttccgatgcctacccccccgaatcaaggtgttagatcttcacagtaacaaaatcaaatcggtgcccaaacaagttgtgaaactggaagccctgcaggagctgaacgtcgcattcaattccctgactgacctgcccggttgtggctctttctcgtcccttagtgtactgattattgaccataactcagtgagccaccccagtgcagattttttccagtcatgccagaaaatgcgttctattaaagctggagacaaccccttccagtgcacttgtgaactgcgagagtttgtgaagaacattgatcaggtgtcaagcgaggtcctggaaggctggcccgattcgtacaaatgtgactatcccgaatcataccgagggtccccacttaaggacttccatatgagcgaattgtcctgcaatatcacactgcttatagtgaccatcggcgccactatgctggtgcttgctgtgacagtcacttccctctgtatttacctggacctgccatggtatttaagaatggtgtgccaatggacgcagaccaggcgaagggcccgaaacatccctttagaagagctacagcgcaacctccagtttcacgcatttatttcatatagcgagcacgactcagcgtgggtcaaaagtgaacttgtgccttatctcgagaaggaggacattcagatttgtttacacgagagaaatttcgtaccagggaagtcgattgttgagaatattattaattgcatcgaaaaatcatacaagtccattttcgtcctatcaccaaacttcgttcaatcagaatggtgccattatgagctctattttgcccaccacaacctgtttcacgaagggtcaaacaacctgattctgattttgctcgagcctattccccagaacagcatccctaataagtaccataagttgaaggccctgatgactcaaagaacgtacctgcaatggcccaaagagaaaagcaaacgggggctcttctgggcaaacattagagctgcctttaacatgaaactcacactcgtgacagagaataatgatgtcaaaagctag

SEQ ID NO: 208820 - DNA, 2391 bp, synthetic construct
  misc_feature 1..2391: note = Description of Artificial Sequence: Synthetic coding sequence
  source 1..2391: mol_type = other DNA
atgaccaaggacaaggagcccatcgtgaagagcttccacttcgtgtgtctgatgattatcatcgtggggactcgaattcagttctctgacgggaatgaattcgctgtggacaagtcaaaacggggactcattcacgtccccaaagacttacccctgaaaacaaaagtcctcgatatgtcccagaattatatcgctgagcttcaggtgtcagacatgtctttcttatctgaactgactgtgctcagactgtcccacaatcgcatacaactgctcgacctgtccgtgtttaagtttaaccaggaccttgagtatttggacttatcacacaatcagctacagaagataagctgtcatccgatcgtgagcttcaggcatctggacctgtcttttaacgactttaaggccctccctatatgcaaagagttcggaaacctgtctcagctgaattttctgggacttagcgctatgaagcttcagaaactggacctgcttcctatcgcgcacctgcatctttcttacatcttactggacctgcgtaattactacatcaaagagaatgaaacagaaagcctgcagatattgaatgccaagaccctgcacctggtgtttcatccgacttcacttttcgctatccaggtcaatataagcgtaaatactctcgggtgtcttcaactgactaacattaagctgaatgacgataattgccaggtttttataaaattcctgagcgaactgactcggggatccactttgttgaactttacccttaaccatatcgagaccacatggaaatgtcttgtccgggttttccaatttttatggccgaagcccgtggagtacctgaacatctataaccttacaattattgagtccatcagagaggaagacttcacgtattccaagaccaccctgaaagctctaacaattgaacatattacaaaccaggtgtttctgttcagccagactgccctgtacacggtattttcagagatgaatatcatgatgttaactatcagcgacactccattcattcacatgctatgtccccacgcccccagtacatttaagtttctcaactttactcagaacgtatttacggacagcatcttcgagaagtgttcaactctggtgaaattggaaacattgattttacaaaagaacgggttgaaagacctgttcaaagttggcttgatgacaaaggacatgcccagcctggagattttagatgtctcctggaactcactggagagcggcaggcacaaggagaactgcacctgggtggagtctattgtggtgctgaatttgtcatcaaacatgctcaccgactcggtgtttcggtgccttcctcccagaataaaagtcctcgatcttcacagcaacaaaatcaaatcggtccccaagcaagtcgtcaagctcgaggctcttcaggagctgaacgtggcctttaattcattgacagatcttcctggttgtgggtctttttcgagcctttccgtgctgattatcgatcacaacagtgtgagccaccctagtgcagactttttccaatcttgccagaagatgcgaagcatcaaggcgggcgataacccatttcagtgtacatgcgaattgcgggagttcgtgaagaatatagatcaggtcagttcagaggttctggaagggtggcctgattcatataaatgcgactaccctgaatcatatagaggcagtcctctcaaagattttcacatgagcgaactgtcgtgcaatattacgttattgatcgtcaccatcggtgctacaatgttggttttggcggtgacagtcacgtccctgtgcatttaccttgacctgccttggtacttgcgaatggtgtgccaatggacacagacccggcgcagagctagaaatattcccctggaggaactgcagaggaacctccagtttcacgcatttattagttattctgaacatgacagcgcctgggtgaagtccgagttggtcccctaccttgaaaaagaggatattcaaatatgcctgcatgaacgcaacttcgttcccggtaaatcaatcgttgagaatattattaactgtattgaaaaatcttacaagtctatctttgtgctatccccaaacttcgtccagtctgagtggtgccactacgagttatactttgcccaccataatttatttcacgaggggtccaataatttaatcctgatcttgctggagcccatcccccagaatagtatcccaaacaaataccacaagttgaaggcattgatgacacaacgtacataccttcaatggccaaaagaaaagtctaaacgagggctgttctgggctaacattcgagctgcctttaacatgaaattgactcttgtcacggagaacaacgatgttaagagctag

SEQ ID NO: 208821 - DNA, 453 bp, synthetic construct
  misc_feature 1..453: note = Description of Artificial Sequence: Synthetic coding sequence
  source 1..453: mol_type = other DNA
atgaccaaggacaaggagcccatcgtgaagagcttccacttcgtgtgtctcatgattattatcgtgggtaccaggatacaattctcagatgggaacgaatttgctgtggacaaaagcaaaaggggcctgatccacgtgcccaaggaccttccactcaagaccaaggttcttgatatgtctcagaactatattgcagagcttcaggtgagcgatatgtctttcctgagtgaactgacggtcttgagactctctcataacaggattcagcttcttgaccttagtgtgttcaagttcaatcaagatctggaatacctggatctgagccataatcagctccagaaaatcagctgtcaccctattgtcagctttcgccacctggacctctccttcaatgacttcaaggctctgcccatctgtaaggagtttgggaacctgtctcagctcaatttctag

SEQ ID NO: 208822 - DNA, 1443 bp, synthetic construct
  misc_feature 1..1443: note = Description of Artificial Sequence: Synthetic coding sequence
  source 1..1443: mol_type = other DNA
atgaccaaggacaaggagcccatcgtgaagagcttccacttcgtgtgtctcatgatcatcatcgttggcacccgtattcaattttctgacggcaatgaattcgccgtcgacaagtctaaacgcggccttatccatgtgcccaaagatctgcctctcaaaacgaaagtgctggatatgtcccagaactacatcgccgagctgcaggtgagcgatatgtcattcctgtctgagctcacagtgttgcggcttagccataaccgcattcagctgctcgacctctcagtgttcaaattcaatcaagatttagagtatctcgacctcagccataatcagcttcagaagattagctgccaccctatcgtgtcatttcgtcacctggacctgtcctttaatgacttcaaggcactccccatatgcaaggaatttgggaacctgagccagcttaactttctgggtctgtccgccatgaaacttcagaagctggatctgctgcccatcgctcaccttcatctctcttacattctgctagacctgcgcaattattatattaaagagaatgagaccgaaagtctgcagatcctcaatgctaagacactacatctcgtgttccaccccacgagtctctttgctatccaagtgaacatttccgtcaacaccttgggatgccttcagcttaccaacataaaattgaatgacgataattgccaagtgttcatcaaattcctgtccgaactcacgaggggatcaactctcctgaattttactctgaatcacatcgagaccacctggaagtgcttagtaagggtgtttcaattcctgtggcctaagcctgtcgagtatcttaacatctataatcttacgatcattgaatctattagggaggaagattttacttattccaagacaaccctaaaagcgttgacaatagagcacatcaccaaccaggtgtttttgttctcccagacagctctgtacaccgtgttttccgagatgaacatcatgatgctgactatttctgataccccatttatccacatgctgtgcccccacgctccatctacctttaaattcctgaattttacacagaacgtgtttaccgatagcattttcgagaagtgctctaccctggtgaaactggaaaccctcatcttcgtgctttctcctaatttcgtgcagagcgaatggtgtcactacgagctttattttgcccatcataatctctttcacgaaggatccaacaacctcatcctcatcttattggagcccataccacagaatagcatccctaacaagtaccataaactaaaggcactgatgacacaaagaacttacctgcagtggcccaaggagaagtcgaaaaggggactgttctgggcaaacatccgggccgccttcaatatgaagcttactttagtcacggagaacaacgacgtgaaaagctag

SEQ ID NO: 208823 - DNA, 276 bp, synthetic construct
  misc_feature 1..276: note = Description of Artificial Sequence: Synthetic coding sequence
  source 1..276: mol_type = other DNA
atgaccaaggacaaggagcccatcgtgaagagcttccacttcgtgtgcctcatgatcataattgtaggtaccagaattcagttctcagatgggaatgaattcgctgttgataaatccaaacgcggcctgatccatgttcctaaggatttgccactgaaaaccaaagtgctggacatgtcccaaaactatatagccgagctgcaggtctccgacatgtcttttctgtctgaactcactgtactccggttgagccataatcggattcaattgctgtag

SEQ ID NO: 208824 - DNA, 3150 bp, synthetic construct
  misc_feature 1..3150: note = Description of Artificial Sequence: Synthetic coding sequence
  source 1..3150: mol_type = other DNA
atggtgttccccatgtggaccctgaagcggcagatcctgatcctgttcaacatcatcctgatcagcaagctcctgggtgccagatggtttcctaagaccctgccctgcgatgtgaccctggatgtgcctaaaaatcatgtcatcgtggattgtacagataagcacctgactgaaatcccgggcggaattcccacaaacacaactaatctgactctgaccattaatcacataccagacattagtcccgcctcattccatcgactggaccacctggtcgaaatcgatttccggtgtaattgcgtcccaattcctctaggatccaaaaacaatatgtgtataaaacgcctacaaattaagccccgttcgttctcaggtctcacatacctcaaatctctttacctcgacgggaatcaactcctagagatcccccagggcctccctccctccctgcagttattaagccttgaggccaataatattttttcgatacggaaagaaaatttaaccgagctggcaaacatagagatcttgtacctagggcagaactgttactaccgtaacccctgctatgtgtcctacagcatagagaaggacgcatttcttaatctgaccaaattaaaagtactctccctcaaagacaataacgttaccgcagtccctactgttctcccgtcaactctcaccgagctatatttgtacaacaacatgatagctaaaatacaggaagatgattttaacaacctcaaccagctgcagattctcgacctttcaggcaactgccctaggtgctacaatgctcccttcccatgcgctccatgcaagaataatagccctctacagatccctgtgaacgctttcgatgcgctgacagagctcaaagtgctccggctgcactctaatagcctgcagcatgtgcctcctcgctggttcaagaatatcaataagctgcaagagctcgacctctcccaaaacttcttggccaaagagattggtgacgcaaagtttctgcatttcctacctagcttgatccagctggatctatctttcaattttgagctgcaggtgtacagggcaagtatgaatttgagtcaggccttctcttcattgaagtctctcaagatcctgcgcatacgcggatacgtgttcaaagagctcaaatccttcaatttaagtcctctgcataacctgcaaaatcttgaggtgctcgatttggggaccaactttatcaagatcgcaaacctgtccatgttcaagcagtttaagcggctgaaagtgatagacttgtcagtgaataaaatctcaccctccggtgattctagcgaggtcgggttttgcagcaacgccaggacctcagttgagtcatacgaacctcaggtcctggagcagctgcactatttccggtatgataaatatgcccgctcttgcaggtttaaaaacaaagaggccagtttcatgtcagttaacgagtcatgttacaaatacggccagactctagatctgtcgaagaactccatcttcttcgttaagagtagcgatttccagcacctcagctttttgaagtgcctcaatctgagcggcaatctaatctcacagaccttaaacggtagcgagttccaaccattggctgaattgagatacttagatttttcaaataacaggctggacctgttacatagcaccgccttcgaggaactgcataagctcgaagttctggacatctcctccaatagccactattttcaaagcgagggaattacgcatatgctgaatttcactaagaatctcaaggtcctccaaaagctgatgatgaatgataatgatattagttctagcacctcccgtacgatggaatccgagagcctccgaacactcgaatttaggggtaaccatctggacgtgctctggagagagggcgataacagatatctacagttattcaaaaatttgctcaaactggaggagctagacattagcaagaactcactgtcgtttctcccctcgggcgtgttcgacggcatgccacccaatctgaagaatcttagtttggccaagaacggcctgaagtcattcagctggaagaaacttcagtgcctgaaaaacctggagactctcgatttatcacacaaccaattaacgaccgtgcccgaacgactttctaactgttctcgctccctgaagaatctgattttgaaaaataatcagattaggagtctcaccaagtacttcctgcaggatgccttccagctgcgctacttagatttgtcatctaataagatccaaatgatccagaagacctcattccctgagaacgtgctgaataacttgaagatgttgttgctccatcacaaccgtttcctgtgcacatgcgacgccgtgtggtttgtgtggtgggtcaatcacaccgaagtaacaatcccttacctggcaacagacgttacctgtgtgggccccggcgcccataaaggccaatccgtgatctcactcgacttatatacttgtgagctggatctaacaaatcttattttgttttctctcagcataagcgttagcctgttcctgatggtgatgatgacagcatctcacctctacttctgggacgtctggtacatctatcacttctgcaaggctaaaataaaaggatatcaaaggcttatttcccctgattgctgctacgacgcctttatcgtgtacgacaccaaggatccagcagtcactgagtgggtactagccgaactggtcgcaaagctcgaggaccctagagagaagcactttaacctgtgtctcgaggagagggactggctgccaggccaaccagtcctggagaacctatcccagtccatccagctgagtaagaagacagtgttcgtgatgactgataagtatgcaaagaccgaaaacttcaagattgccttttatctttctcaccaaaggctgatggatgagaaagttgatgtcattatcctcatatttctcgaaaagcccttccagaagtctaaattccttcaactgcgtaaacgtctgtgcggatcctccgttctcgaatggccaactaatccacaggcacacccatacttttggcagtgtcttaagaacgccttggccaccgacaaccacgtggcttacagtcaggttttcaaggaaaccgtctag

SEQ ID NO: 208825 - DNA, 1074 bp, synthetic construct
  misc_feature 1..1074: note = Description of Artificial Sequence: Synthetic coding sequence
  source 1..1074: mol_type = other DNA
atgcggcggcagctgcggagccggcgggcccccagcttcccctacagctacaggtatagattggatgatcctgacgaggccaatcagaactacctcgcggatgaagaggaggaagctgaggaagaggctcgggtgactgtcgtgcccaaaagcgaggaggaggaggaggaggaggaaaaggaggaagaggaggaggaggagaaggaagaggaggaaggccagggtcagcctactggcaacgcctggtggcaaaagctacagatcatgagtgagtatctatgggaccctgaacgaagaatgtttttggcccgcacagggcagtcctggtctctgatcctgctgatctatttcttcttctacgcctccctcgctgcagtaataaccctgtgcatgtacacattgttcctaactatcagtccctatattcctacgtttactgagcgggttaaacctcctggcgtgatgatccggccgttcgcacatagtctcaacttcaactttaatgtcagtgagcctgacacttggcagcattatgtcatctcactcaatggctttctacagggctacaacgactccttacaggaggagatgaacgtggactgccctcctggccagtacttcatccaggatggtaacgaagatgaagacaaaaaagcctgccagtttaagaggagcttcctaaaaaattgttcaggccttgaagatccgactttcggctacagcacgggccaaccatgcatcctgttgaaaatgaataggatcgtcggatttcgacccgaactcggtgacccggtgaaagttagctgcaaggtgcagagaggcgacgagaacgatatccgaagcatttcgtattaccctgagagtgcaagctttgatcttcggtactacccctactacgggaagcttacacacgtcaattacacgtcaccccttgtggcaatgcacttcaccgacgtagtgaagaaccaggccgttccagtgcagtgtcagctcaaagggaagggggtgataaatgatgtaataaatgaccggtttgtgggtcgggtcatatttaccttgaacattgagacttag

SEQ ID NO: 208826 - DNA, 3180 bp, synthetic construct
  misc_feature 1..3180: note = Description of Artificial Sequence: Synthetic coding sequence
  source 1..3180: mol_type = other DNA
atgaaggagagcagcctgcagaacagcagctgcagcctgggcaaggagacaaagaaagagaacatgttcttgcagtcatccatgctgacctgcatcttcctcctgatcagtgggtcgtgcgagctctgcgctgaggaaaacttcagtaggtcttatccctgcgatgagaaaaagcaaaatgacagcgtaattgctgaatgctccaatcgtcgcttacaggaggttccccaaaccgtggggaagtatgtgacagagctggacctttcagacaactttattactcatatcacgaacgagtctttccagggcctgcagaatctcaccaaaatcaacctgaaccacaatccaaatgtgcagcaccagaacggcaaccctgggatccagtccaacgggctgaacattactgatggggcctttctgaacttgaagaaccttcgtgagctgttgttggaggacaatcaattacctcagataccctctggactgccagagtccctcacagaattatccttgatccagaataatatttataacataacaaaggagggaatctcccgcctgattaatttgaagaacctgtacttagcttggaattgctacttcaacaaggtgtgtgaaaaaactaatatcgaagatggggtgttcgagactctgaccaatctggagctgctttctctcagctttaacagtctgtcccatgtcccacctaaactcccttcctcactgagaaaactgttcctaagcaacactcagataaaatatatcagtgaggaggatttcaaggggctgataaacctcacgcttctggatctgtccggaaactgtccaaggtgttttaacgcccccttcccatgtgttccttgtgatggcggggcctcaatcaatatcgaccgatttgcgttccaaaatctcacccaactgcgctatctcaatctaagttccacatcactccgaaaaatcaacgctgcttggttcaaaaacatgccccatcttaaggttttagacttggaattcaactacctggttggcgagatcgcatctggggccttcttaaccatgctaccccgcctggaaatattggatctgtcctttaattatataaaagggagctatccacagcatattaacataagtcggaatttcagtaagctgctgtccttgcgagccctgcatctgcgcgggtacgtgttccaggagttgcgtgaggacgatttccagcctcttatgcagttacccaatcttagcacaatcaatctaggtattaactttattaagcaaatcgactttaaattgtttcagaacttcagtaatctcgaaataatctacctgtccgagaataggatatcaccactggtgaaagatactcgacagagctacgccaactcaagttcctttcaacggcacattagaaaacggagatctaccgacttcgaattcgatcctcactcaaatttttaccacttcacccgtcctctgattaaaccccagtgcgctgcgtacggaaaagcactcgatctcagcttaaatagcattttcttcattggaccgaaccagttcgaaaatcttcccgacattgcttgtctcaatctaagcgcaaactccaatgcccaagtgctgtccggaacagagttcagcgcaatccctcatgttaaatatctcgacctgacaaataatcgcctcgattttgataacgcatcagcattgacagagttgagtgatctcgaggttctcgacctttcttacaactcacattatttccgtatcgccggggtcactcatcacctggaattcattcagaactttacgaatttgaaggttctaaacttgtcccacaacaacatatacacactcacagataagtataatttagagagcaagagcttagtggagctggttttctcaggaaacagactggatatcttgtggaatgacgacgacaaccgatacatctctatttttaaggggttgaaaaacctgactcggctcgacctttccttgaaccgactgaagcatataccgaatgaagcttttcttaatttgcctgccagtctgactgaactgcacataaatgacaatatgctgaagttcttcaactggaccctgctacagcagtttccccggctcgaactgctcgacctcagggggaacaaacttctgttccttacagactctttgagcgactttacctccagtctgcgaactctcctgctcagtcataatcgaatctcccacttgcctagtgggttcctttccgaagtaagttccctgaagcacctggatctgtctagcaatctgctgaagacgataaacaagtcggccttagagacaaaaaccaccactaagctctccatgctggagctgcacgggaacccattcgagtgtacatgtgacatcggagactttaggcggtggatggatgagcatttgaacgtaaaaatacctcggctggtggacgtgatctgcgccagtcctggagatcagcgaggtaagagtattgtgtccctcgagctcaccacgtgtgtaagcgacgtgactgctgtgatcttgttcttctttacattcttcatcacaaccatggttatgttagctgcccttgctcaccacttgttttactgggacgtgtggttcatctacaacgtctgcctggctaaagtgaagggctaccgcagcctgagtacatcacagactttctacgatgcctacatctcttacgacaccaaggatgcctctgtcaccgactgggttatcaacgagctgcggtaccaccttgaagaatcccgcgataaaaatgtactgctctgtctggaggagcgagattgggaccccggactggccattatcgacaacctgatgcagtccatcaaccagtctaaaaaaaccgtgtttgtcttgacaaaaaaatacgctaagtcgtggaacttcaagactgccttctacctcgctttgcaacgcctcatggatgagaacatggacgttattatctttatactgcttgagccagttttgcagcactcacaatacctgagattacgccagcgaatttgtaagtccagcatactgcaatggccggacaatccaaaggccgagggccttttctggcagaccctaagaaacgtggtgctgacagaaaatgattctagatacaacaatatgtatgttgattccattaagcaatactag

SEQ ID NO: 208827 - DNA, 3099 bp, synthetic construct
  misc_feature 1..3099: note = Description of Artificial Sequence: Synthetic coding sequence
  source 1..3099: mol_type = other DNA
atgggcttctgccggagcgccctgcaccccctgagcctgctggtgcaggcgattatgctggcgatgacgctggccctggggaccctgccagcctttctgccatgcgagttgcagcctcatggtctggtaaactgcaattggttgttccttaagagtgtcccccatttctcgatggcagctccgagaggtaatgttacaagcctgagtctatcctccaaccggatccaccatctgcatgattccgactttgctcacctgccgtcattgcgacatctcaacctaaaatggaattgtcctccagtggggttatccccaatgcatttcccatgtcatatgacgattgagcctagcacatttctggccgtgcccactcttgaagagctgaatttgagttataacaacatcatgactgtgcctgcattaccgaaatccttaatttcattgtccctgtcgcacacgaatattctgatgctagattcagcttctcttgctggcctacatgctctgcggttcctgtttatggatggcaattgctactacaagaacccttgtcgacaggcattggaggtggctccaggtgccctgctcggcctgggaaatctcacccacttatccctgaagtataataatttaactgtggtcccccgcaacctgcctagctccttggaatatctgcttctgagctacaacaggattgttaaattagcacctgaggaccttgctaacctgacagccttaagggtcctcgatgtgggcggaaattgtagaagatgtgaccatgctccaaacccttgtatggaatgtcctcggcattttccccaacttcatcccgataccttctctcacctttcaaggctcgaaggcctggtgcttaaagacagctcattaagttggttgaatgcgagctggttccggggactgggcaacttgagagtgctggatcttagcgaaaatttcctgtacaagtgtatcactaagactaaggccttccaaggcttaacgcagctgcggaaactcaatctctcgttcaactaccagaaacgggtctcattcgcacacctgtctctcgccccatcctttggaagtttggtcgcgctcaaagagctggacatgcacggcattttctttcggtcactcgacgagaccaccctgagacccttggcaaggctcccgatgctgcagacattgcgccttcagatgaacttcattaaccaggcccaattgggcatttttagggcatttcctgggctgagatatgtggatctatcagataaccggattagtggtgcaagtgagctcaccgccactatgggagaggcggatgggggcgagaaggtctggcttcaaccaggggatctggcgcccgcgcccgtcgacactccatcctcagaggacttccggcctaattgtagcaccctgaatttcacattggacctgagccgcaataatcttgtgaccgttcaacctgaaatgttcgctcagctatcccatctccagtgcctgaggttatcccataattgcattagccaggcagtgaacggcagtcaatttctgccattaacaggtctgcaggttctcgatctgtcccataataaactagacctgtatcacgaacatagtttcaccgagctcccccggctcgaggccctcgacctgtcttataattcacaaccattcggcatgcagggcgttggccacaatttcagctttgtggcccacttgcgcaccctgagacacctgtccttagcacataacaatatccacagccaagtatctcagcagctgtgtagtacgtccctccgggcgcttgacttctcagggaatgccctgggtcacatgtgggctgagggggatctctatttgcatttttttcagggcctcagtggactcatttggctggatttgagccagaaccgcctccacacactgctccctcaaacattaaggaatctacccaagagtctccaggtacttcgccttcgggataactaccttgctttcttcaaatggtggtccttgcactttctgcctaaactggaggtcttagacctcgctggtaatcagctgaaggccctgactaatgggtcacttcctgccggcacacgcttgcggaggctcgacgtatcctgtaattccatctcgttcgtcgccccggggttcttcagtaaagctaaggaactacgggaactcaacctaagtgcaaatgcgctgaaaacagttgaccacagctggtttggtcccctcgcctccgccctccagatcctggacgttagcgcgaatcccctacattgcgcgtgtggtgcggcttttatggactttctgcttgaggtgcaggccgctgtgccagggttgcctagtcgggtcaagtgcggctctccgggtcagctgcagggtctatccatcttcgcccaagacctgaggctgtgcctggacgaggccctttcctgggattgtttcgcgctgtccctattagctgtggccctgggtctgggagtgccgatgctgcaccacctatgcggatgggacctctggtattgttttcacctgtgtctagcctggctcccttggcgcggaaggcaatcaggcagggacgaggacgccctgccatacgatgctttcgtggtgttcgataaaacccaaagcgcggtggccgactgggtgtacaacgagctacggggtcaacttgaggagtgtcgaggacgttgggccctgcgactgtgcctagaggagagagactggctcccgggaaaaacattattcgagaacctgtgggctagtgtctacggatccagaaaaaccctgtttgtgctggcccatacagaccgtgtctccgggctgctaagagcttcattcctgcttgcccagcagcgcctgcttgaagatcgtaaggatgtagtcgtgcttgtgattctgtctccagacgggcgccggagccggtatgtgaggctgcgccagagactttgtcgacagagtgtgctcctctggccacatcaaccgtccgggcagcgctcattttgggcccagctaggaatggccctgacccgggataatcatcatttttacaatcggaacttctgccagggtcccaccgctgagtag

SEQ ID NO: 208828 - DNA, 2139 bp, synthetic construct
  misc_feature 1..2139: note = Description of Artificial Sequence: Synthetic coding sequence
  source 1..2139: mol_type = other DNA
atggcctgcaccggccccagcctgcccagcgccttcgacatcctgggggccgcaggacaggataaactgctttacttaaaacacaagttaaaaacccctcgccccggatgccagggacaggatctgctccacgctatggtgttactgaaactgggccaagagaccgaggccagaatatctctcgaagctctcaaagctgatgctgtggcaaggttggtggcccggcaatgggcgggcgtcgacagcacggaggatccagaagaacctcccgacgtctcctgggcagtggctagactttaccacctcctcgctgaagaaaaactgtgtccggcctcactccgagatgtggcctaccaggaggctgtaagaacactatcctcccgggacgaccaccgactcggggagctccaagatgaagctcgcaatagatgtgggtgggatattgccggcgatccgggtagcatcaggacgcttcaatctaacttggggtgcctccctccttccagcgctctgccatcaggcactcggagcctaccgagacctatcgacggcgtctctgactggtctcagggatgcagcctcaggagtacaggcagtccagcctctttggcctcgaacctggaaatctcacaatcaccgaccatgccattcctttccctccacaggagcccccacgggccttctaagctgtgtgatgatccccaagctagtttggtgccagagccagtaccaggcggctgtcaggagcccgaggagatgagctggcctccctccggcgaaattgccagccctccagaactgccatcaagcccaccccccggactgcccgaagtggcacccgacgcaacatctaccggcctccccgacacacccgcagctcctgagacttccaccaactatcctgttgaatgcaccgaaggcagtgcaggcccacagagcttgccactccccatcctggaaccagttaaaaatccatgtagcgtgaaagaccagactccgcttcagctgtcggtggaagacaccacttcacctaacacaaagccctgccctccaaccccaacaacccccgagactagcccacccccaccaccgcctcctcccagtagcaccccctgcagcgcacatctgaccccatcgtctctgttcccgtcatctctggagtcaagctccgaacagaagttttacaattttgtgattcttcacgctcgggctgacgagcacattgcgctaagggtgagagaaaagctcgaagccctgggggtacccgacggcgcaaccttctgtgaggactttcaggtgccggggagaggcgagttgtcatgcctccaggatgctatagatcatagtgcgttcatcatcctgctcctaacctctaactttgattgtagactgagtctgcatcaggtgaatcaggctatgatgtcgaatctgacacggcagggctcgccagactgtgtaatcccattcttgccgctggagtcttcacctgcccagttatcaagcgatactgcctctctgctaagcggcttggttcggctggacgagcactcccagatatttgcccggaaggtcgcaaacacctttaagcctcatagattgcaggccagaaaggccatgtggagaaaagagcaagataccagggccctcagagagcagagtcagcacctggatggagagcgtatgcaagcagcagcccttaatgcagcctacagcgcttacctgcagtcatacttgagctatcaagctcagatggagcaactgcaggtagcctttggaagccacatgtctttcgggaccggagcgccatatggtgcacgcatgccttttggaggccaagtgcctctgggcgccccaccccccttccctacttggcctgggtgcccacagccacctccactccatgcctggcaggctgggaccccgccacctcccagcccacagccagccgcgtttccacagtcattgcctttccctcagtctccagcgttccccaccgcctcacctgctccacctcaaagccccggtctccagcctttaattatccaccacgcacagatggttcagctgggcctcaataatcacatgtggaaccagcgagggtctcaggctcctgaggataagacacaagaggctgaatag

SEQ ID NO: 208829 - DNA, 3042 bp, synthetic construct
  misc_feature 1..3042: note = Description of Artificial Sequence: Synthetic coding sequence
  source 1..3042: mol_type = other DNA
atgggcctgggcaccctgagcccccggatgctggtgtggctggtggctagtggaatcgttttttacggcgagctctgggtctgcgccggtctagactacgactatacctttgatggtaacgaggaggacaaaactgaaaccatagactataaagacccatgtaaagcggcggtattctggggggatattgctttagatgatgaggacctgaacatttttcaaatcgaccgcaccattgatctgacccagaaccccttcggtaatctcgggcacactaccggaggcctaggagaccacgccatgtctaaaaagcgcggagccctgtaccagctcatcgaccgcatccggcgcattggattcggactcgaacaaaataatacggtcaaaggaaaggttcctcttcagttctcaggacagaatgagaaaaacagggtgccgcgcgcggcgacatctagaacagagcgcatctggccaggcggagttatcccctatgtcatcggcgggaacttcactggttcccagcgcgctatgtttaaacaggccatgaggcactgggagaagcacacgtgtgtgacattcatcgagagaagtgacgaagaaagttacattgtctttacttatcggccctgcgggtgctgttcctacgtgggcaggaggggcaacggtccccaggccatctcgatcggcaagaactgtgataaattcggaatagtggtgcacgagctcggccacgtcatcggcttttggcatgagcacacgagacctgatagggataatcacgtcaccattatacgagaaaatatacagcccgggcaagagtacaatttcttgaaaatggagcctggagaggttaatagtctcggcgagcggtacgactttgactctataatgcactacgcgagaaacaccttttctagggggatgtttctggacaccatactcccctcacgcgatgacaacggcatcaggccggcgatcggccagcgcaccaggctgagcaagggcgacatcgctcaggcccgaaaactatacaggtgtcctgcttgcggggagacccttcaggagtccaatgggaatttgagtagccctggattccccaatggatacccgtcttacactcattgtatttggcgggtgtcggtgaccccgggggagaagattgttctcaattttaccaccatggatctgtacaaaagcagcttatgctggtatgactatattgaggtgagggacgggtattggcgcaagtctccattgttgggccggttctgtggggataagcttcccgaggttctgaccagtaccgattccaggatgtggatcgagttccgcagcagtagcaattgggtggggaagggctttgcggctgtctacgaggcaatttgtggcggggaaataaggaagaatgaaggccaaatccaaagcccaaactaccccgacgactaccgtcccatgaaagagtgcgtgtggaaaattaccgtgagtgagtcctaccatgttggcttaacgtttcagagtttcgagatcgagcgtcacgacaactgcgcgtacgactacctggaagtgcgcgacgggaccagtgagaactcccctttgattggacgcttctgcggctacgataagccagaggacataagaagtacatctaacacactgtggatgaaattcgtgtctgatggaaccgtcaacaaggcgggcttcgcagcaaacttttttaaagaggaagatgagtgtgctaagccggaccggggaggctgcgagcaacgatgtctgaatacactgggatcgtatcagtgcgcatgtgagcccggttacgaactcggccccgatcggagaagctgtgaggcagcatgtggcggactcctgaccaaattaaacggtactatcaccacccccggatggcccaaggagtaccccccaaacaaaaactgtgtatggcaggtggtcgctccaacgcagtataggatctctgtgaagttcgaatttttcgagttggagggcaatgaggtatgcaaatatgattacgttgagatatggtcaggcctctcatctgaatcaaagttgcatggcaagttttgtggcgccgaagtgcctgaggttatcactagccagttcaacaacatgcggatcgaattcaagagtgacaacacagtatctaagaaaggttttaaggctcacttttttagcgataaggacgagtgtagcaaagacaatggaggttgccagcatgagtgcgtgaacaccatgggttcctatatgtgtcagtgccggaacgggttcgttctacacgataacaagcacgattgtaaggaggctgaatgcgaacagaagatccactcaccttccgggttaatcacgtcaccaaattggccagataaatatccttcaaggaaagagtgcacttgggaaatttctgccactccaggacacagaatcaagctggctttttctgagtttgagattgagcagcatcaagagtgtgcctacgaccacctcgaggtcttcgatggggagaccgagaagagccccatcctcggtcggctgtgtggcaacaaaattcctgatcctcttgtcgctactgggaataaaatgttcgtgcgcttcgtctctgatgcatccgtccagaggaaaggatttcaagcaactcactccactgaatgtgggggccggctgaaggccgagtccaagccccgcgacctgtactctcacgcccagtttggcgataacaactaccctggacaagtagattgtgagtggctcctcgtgtccgagagggggagcaggctagagctgtcattccagacctttgaagtggaggaggaggccgattgcgggtatgattacgtggagctctttgacggcttggatagtacggctgtagggctgggccgattctgcggttcggggccccccgaggagatttattctattggggatagcgttttaattcactttcacaccgacgacaccattaataaaaaaggcttccacatcagatacaagagcattcgttacccagacaccacgcatacgaaaaagtag

SEQ ID NO: 208830 - DNA, 1179 bp, synthetic construct
  misc_feature 1..1179: note = Description of Artificial Sequence: Synthetic coding sequence
  source 1..1179: mol_type = other DNA
atgggcctgggcaccctgagcccccggatgctggtgtggctggtggcatccggaattgttttttatggcgagctttgggtctgcgcaggcctggattatgactacacattcgatggcaatgaagaggacaaaacggagaccatagactataaagacccgtgtaaggcagcagtcttctggggggatatagccctggatgacgaagacttaaatatattccagatagatcggacaattgatttgactcagaacccattcggcaaccttggacataccaccggcggcctaggcgaccatgccatgagcaaaaagagaggggccctgtatcagctgatcgaccgcattcggcggatcgggttcggactggagcagaataacacagtgaaaggaaaagtgccccttcagttctctggccagaatgaaaagaacagagtccctagagctgccacgagtcgcacggagagaatatggcccggaggtgtgatcccttacgtcattggagggaatttcactggttcccagcgtgccatgttcaagcaggccatgcggcactgggaaaagcacacctgcgttacttttattgagagatcagatgaggaatcctatatcgtgttcacttatcgcccatgcggctgctgtagctatgtgggaaggaggggaaatggccctcaggccatttccataggcaaaaattgcgataaatttgggatcgtggttcacgagctaggccatgtgataggcttttggcatgaacacacgcgccccgatagggataaccacgtcactattattcgggagaacatccaaccggggcaggagtacaattttttaaagatggagcccggagaagtaaactctttgggggaacgctatgatttcgattccattatgcattacgcacgtaataccttcagtaggggtatgtttctggatacaatcctgccctcgagagacgacaatggtattagacccgcaattggacaaagaactaggctgagcaagggggacatcgcacaagcaaggaagctgtatcgctgccctgcttgtggagaaacgctgcaggagagcaatggaaacctttcaagccctgggtttccaaatggttaccctagttacactcactgtatttggagagtgtctgtaacccccggtgagaaggtcgtgttttctctatgttag

SEQ ID NO: 208831 - DNA, 3048 bp, synthetic construct
  misc_feature 1..3048: note = Description of Artificial Sequence: Synthetic coding sequence
  source 1..3048: mol_type = other DNA
atgccccgggccaccgccctgggcgccctggtgagcctgctgctgctgctgcccctgcctcgcggtgctggaggcctgggcgaacgccccgatgcaactgccgactacagcgaactggacggagaggagggtactgaacagcagctagaacattaccacgacccatgcaaagccgccgttttttggggggacattgctttagacgaggacgacttaaagctgttccatattgataaagcccgggattggaccaaacagacagtgggcgctaccggccactcgaccgggggtttggaggagcaagcctccgagtccagtccagacacaaccgccatggacacgggaactaaggaggccggaaaggacggccgcgaaaatactaccctgctccacagccccggtacccttcatgctgcagcgaaaaccttctcccctcgcgtccggcgagccaccacaagtcgtaccgagagaatctggcctggaggcgtgattccttatgtcattggaggcaattttaccggcagtcagcgggcaatctttaaacaggcaatgcgccattgggaaaagcacacatgcgttactttcatagagaggacagacgaggagtcgttcattgtattttcttatcggacctgtggttgctgttcttacgttgggaggcgagggggcggccctcaggccatctcaattgggaagaattgcgacaagttcggcattgttgcacacgagctcggccatgtagtgggcttctggcatgagcacacgagaccggaccgtgatcagcatgtgacaatcattagagagaacatccagccagggcaggagtataatttccttaagatggaggcaggagaagtctcgtctctcggcgaaacatacgactttgattcaattatgcactatgccaggaatacattctcccgcggcgtgttcctggataccatccttccaagacaagatgacaacggcgtaagaccgaccattgggcaaagggtaaggctttcacaaggggacatagctcaagcccgcaaactgtacaaatgcccagcatgtggcgaaactcttcaggacacaaccggtaacttcagcgcccctggatttcctaatggctatccatcatactcacattgtgtttggcggatctctgtaacccccggggagaagatcgtcctgaacttcaccagcatggacttgttcaaatctagactctgctggtatgactacgtggaggttcgggatggatactggcgcaaagcgcccctgctggggcgtttttgtggcgacaagattccagagccactggtcagtacagacagcagattatgggtcgagtttaggtcctcgtctaatattctcgggaagggcttttttgccgcctacgaggccacatgtggtggggacatgaacaaagatgctggccaaattcagtctccaaattatccggatgattaccgaccatccaaagagtgtgtgtggcgaatcaccgtaagtgagggcttccacgtgggccttaccttccaagcctttgagatcgaaaggcatgatagctgcgcttacgactatcttgaggtgagagacgggccaacagaagagagcgccctgatcggacatttttgcggttatgaaaagcccgaggacgtgaagtcgtcaagtaaccgtttgtggatgaagtttgtttctgacgggtcaattaataaggcagggtttgcagccaatttctttaaagaagtagatgagtgttcctggccagaccatggggggtgtgagcatcggtgcgtaaacacattgggatcctacaaatgcgcatgtgaccctggatatgagctcgccgctgacaagaaaatgtgcgaggtggcctgcggcggcttcatcaccaagctgaatggcacaatcacgagcccagggtggccaaaggagtatccgaccaacaagaattgtgtttggcaggttgtggctcctgctcagtaccggatcagcctccagtttgaggtatttgagctcgaaggcaacgatgtatgcaagtatgattttgtggaggtccggtcagggctgtctcccgatgccaagctgcatgggcgtttctgcgggagcgagactccggaggtcattacctcacagtctaacaatatgagggtcgagttcaagtcagacaataccgtgtccaaacgaggtttccgagcacacttcttttcggacaaggacgaatgtgctaaggacaacggaggttgccaacatgagtgcgtgaacacgttcggttcctacctgtgtcgatgccggaacggatactggctgcacgagaacggtcatgattgcaaggaggcgggttgtgcccataaaatcagcagtgttgagggtaccctagcgtctcccaactggcccgacaaatacccttcaagacgggagtgcacttggaacatctctagcaccgctggccaccgcgtcaaactgacattcaacgaattcgaaattgagcaacatcaggaatgtgcttatgaccacctggaaatgtacgacggacctgattccttagcccccatactcggacggttttgtggaagtaaaaaaccagaccctaccgtggcaagcggaagcagcatgtttctgcgcttctatagcgacgcctccgtgcaaagaaaagggtttcaggccgtgcactctactgagtgtggcggtcggttaaaagccgaggtccagaccaaggagctatactctcatgcacagtttggcgataataactatcctagtgaggcccgttgtgattgggtgattgtcgcagaagatggctacggagtggaattgaccttccgcacattcgaagtagaggaagaagccgattgtgggtacgactatatggaagcctacgatgggtatgatagtagcgctcccagactgggacggttttgtggatctggaccactggaggaaatttacagcgcaggggacagtttgatgattcggttccggacggatgacaccataaataaaaaaggtttccacgctcgatatacttctacaaagttccaggacgcactgcacatgaagaagtag

SEQ ID NO: 208832 - DNA, 2298 bp, synthetic construct
  misc_feature 1..2298: note = Description of Artificial Sequence: Synthetic coding sequence
  source 1..2298: mol_type = other DNA
atgagcggcgaccacctgcacaacgacagccagatcgaggccgacttccggctgaatgatagccacaaacataaggacaagcacaaagatcgcgagcacagacacaaggaacacaagaaggaaaaagatcgggaaaagagcaagcacagtaattctgaacacaaggattctgagaagaagcacaaagaaaaagagaaaactaagcacaaagacggatcctcagagaagcacaaagacaagcacaaagacagggacaaagagaaacgaaaggaggaaaaagttcgggcgtccggggacgctaagattaaaaaggagaaagagaatggcttttcgtcgcctccccagattaaagacgagcccgaggacgatggatattttgtgcctccgaaggaggacatcaaacctttgaagaggcctcgggatgaggacgatgcagattacaagcccaagaagattaaaacagaagatacgaagaaagagaagaagcgaaaactggaggaggaggaagacggcaagctgaaaaaacctaaaaacaaggataaggacaaaaaggtgccagaacccgacaataaaaagaaaaagccaaaaaaggaagaagagcagaaatggaaatggtgggaggaggagcgttaccccgaaggcatcaagtggaagtttctggagcataagggacccgtgtttgcccccccgtatgagcctctacctgaaaacgtgaagttctactacgacggcaaagtgatgaaactctctccaaaggccgaagaagtcgctaccttctttgctaaaatgcttgaccatgaatatactacaaaggagatttttagaaagaacttcttcaaagattggaggaaggaaatgaccaatgaagagaagaacattattacgaatctcagtaaatgtgatttcactcagatgagtcaatatttcaaggcccagaccgaggccagaaagcagatgagcaaggaagagaagctcaagatcaaggaagagaacgagaagctactgaaagagtatggattctgtattatggacaatcataaagaacggattgccaattttaagattgaacctccaggtctttttcgcggccgaggaaatcatccgaaaatgggaatgctgaaacgtaggattatgcccgaagacataataatcaactgcagtaaggatgcaaaggttcccagcccacccccaggccataaatggaaagaagttcgacatgataacaaggtgacctggttggtaagttggaccgagaatattcagggatccatcaagtacatcatgcttaacccaagcagtaggattaagggtgaaaaggattggcagaagtacgagactgctaggcgactgaagaaatgcgtagataaaatcaggaatcagtatcgtgaagactggaaatctaaagaaatgaaagtccgacaacgcgccgtggcactctatttcatcgataagctggccctgagagccggaaacgaaaaagaagagggggagacagccgatacagttggatgttgttccctccgtgtggagcatatcaatttgcatcccgagcttgacggacaagaatacgttgtggagttcgactttcttggcaaggattctatccgatactacaataaagtccccgtagaaaaaagggtattcaaaaacttacagctctttatggagaacaaacagccagaggatgacctttttgaccgcctcaacaccgggattttgaataagcatcttcaggacctgatggagggactaactgccaaggtctttcgcacatacaatgcgagtatcacacttcagcagcagctgaaagagttaaccgctcctgatgaaaacattcctgctaagattctgtcatataaccgcgccaacagggctgtggctatactctgcaaccatcagcgggcgccgccaaaaaccttcgagaaatccatgatgaatctacagacaaaaattgacgccaagaaggagcaactggccgacgctcgccgggacctgaaatccgctaaggcggatgccaaagtgatgaaggatgccaagaccaagaaagtcgttgagtctaagaagaaggccgtccagcgactggaagagcagctgatgaaactcgaagtgcaggcaaccgatagggaggagaataagcagatcgcactcggaaccagcaaactaaactacttagaccccaggattaccgttgcttggtgtaagaagtggggggtgcccattgaaaaaatctacaataagacccagagggagaagttcgcctgggccatcgacatggcagacgaggattacgaattctag

SEQ ID NO: 208833 - DNA, 1806 bp, synthetic construct
  misc_feature 1..1806: note = Description of Artificial Sequence: Synthetic coding sequence
  source 1..1806: mol_type = other DNA
atgcgggtggtgcggctgctgcggctgcgggccgccctgaccctgctgggcgaggtgcccagacgacctgccagcaggggtgtaccaggatctcgcaggacccagaaagggtcaggcgccaggtgggaaaaagagaagcacgaggatggcgtcaagtggaggcagctcgaacacaaagggccatactttgcaccgccatacgaacccctgcccgacggggtccggtttttctacgagggacgccctgtgaggctaagcgtggctgctgaagaagtcgcgacgttttacgggagaatgcttgaccacgagtacacgaccaaggaggtgttccggaagaacttcttcaatgattggcggaaagagatggcagtggaagagcgggaagtaatcaagagcctggataagtgtgacttcacagagatccacagatacttcgtggataaagcagcggcaaggaaggtgctgagccgcgaggagaaacagaaactgaaggaggaggcggaaaagctgcaacaggagttcggctactgtatcctcgacggacaccaggaaaagatagggaactttaaaattgagccgccaggcctgtttagaggccgtggggatcaccccaaaatgggcatgctcaaaaggcggattacccccgaggatgtcgtgatcaattgttccagggactcgaaaattccagagccgccagcagggcatcagtggaaggaagtgcgaagcgacaatacagtgacttggctggcggcatggacggaatctgtacaaaattcaatcaaatacattatgttgaacccgtgttcgaaattgaagggagagacagcatggcagaaattcgagacagcgcggcggctacgaggcttcgtcgatgaaataagatcacagtaccgagccgattggaaatcacgggagatgaagacccgccagcgagctgtggccctatacttcatcgataaacttgcactccgcgctgggaatgagaaagaggacggggaagcagctgacaccgttggttgctgttccctgcgcgtggaacatgtgcaactgcaccccgaagccgacgggtgccagcacgtggtcgagtttgacttcctgggcaaggactgcatccggtattataatagggttcccgtggagaagcctgtgtataagaacctccagctgttcatggaaaacaaagatccgagagatgacctgttcgaccgtctgactactacatcacttaataaacacctgcaagagctcatggacggtttgaccgctaaagtttttaggacgtataatgcgagcatcactctccaggagcagttaagggcattaactcgagctgaagatagcatcgctgcgaagatccttagctataaccgagctaaccgcgttgtggccatcttgtgtaaccaccaacgcgctactccaagcacgtttgaaaaatctatgcagaacctgcaaactaagatccaggctaagaaggagcaagtggcagaggcccgagccgagctcaggagggcccgagccgagcataaggctcagggtgatggaaagtctaggagcgtgctggaaaagaaacgccgattacttgagaaactccaggagcagctggcacaactgagtgtgcaagcgactgataaagaggaaaacaaacaggtggctcttggcactagtaaattgaactatctggacccacgcatctccattgcctggtgtaaacggtttcgcgtgccagtcgaaaagatttacagcaaaactcagagagagcgcttcgcgtgggcgttagctatggccggggaagatttcgaattctag

SEQ ID NO: 208834 - DNA, 1512 bp, synthetic construct
  misc_feature 1..1512: note = Description of Artificial Sequence: Synthetic coding sequence
  source 1..1512: mol_type = other DNA
atgctggaccacgagtacaccaccaaggaggtgttccggaagaactttttcaatgactggagaaaggaaatggctgtcgaagaacgggaggtgattaagtccctggacaaatgcgacttcacagagatccatcgatacttcgtggataaggccgcagctcggaaggtgttgtctcgagaggaaaaacaaaaactgaaggaggaggccgagaaactacagcaagaattcggctactgcatactggacggtcaccaggagaaaattggaaactttaaaatcgagccccccggcctttttagaggtcgtggcgatcaccccaagatggggatgttaaagagacggataaccccagaggatgtcgtcataaactgctctcgtgattccaagattcctgagcctccggccggtcaccagtggaaggaagtacgctccgacaacactgtgacctggcttgctgcgtggactgaaagtgtccagaatagcataaaatatataatgctgaatccatgcagcaaacttaagggagagaccgcttggcagaagtttgaaacggcaaggcgattaaggggattcgtggatgaaattagaagccaataccgagctgactggaagtcacgcgaaatgaagacacgacagagagcagtggctctatactttatcgataagctggctttacgcgctggcaatgaaaaggaagatggagaagctgctgatacagtggggtgctgtagtttgcgtgtcgagcatgtccaattgcacccagaagccgacggctgccagcacgtggtggaattcgacttcctaggaaaggactgcatcagatactataaccgagtgcctgttgaaaagcccgtgtataaaaatttgcagcttttcatggagaataaggatcccagggacgacctgttcgatcgccttacaacaacttctcttaacaagcatctgcaagagctcatggacggcttgacagccaaggtcttcagaacatacaacgcctctatcacgctgcaggagcagttacgagctctgactagggcagaggattcaatcgctgcaaaaattctgtcctacaacagggccaatagggtggtggctatactgtgcaatcatcaacgagccacacccagcaccttcgagaaaagtatgcagaacttgcaaactaagatccaggccaaaaaagagcaggtcgccgaggctagggccgagcttaggagagcaagagcagagcataaagcgcagggagacgggaagtctcgttcggtgttggagaaaaagcggcgcctcctggagaagctacaggaacaacttgctcagctcagtgttcaggctacagacaaagaggaaaacaaacaggtcgcccttggcacatcgaaattgaactacctcgacccccggatttccatagcctggtgtaagagattccgggtgcccgtagaaaagatctattctaaaacgcagcgcgagcgatttgcctgggcccttgcaatggctggagaagacttcgaattctag

SEQ ID NO: 208835 - DNA, 1512 bp, synthetic construct
  misc_feature 1..1512: note = Description of Artificial Sequence: Synthetic coding sequence
  source 1..1512: mol_type = other DNA
atgctggaccacgagtacaccaccaaggaggtgttccggaagaacttctttaatgactggcgaaaggaaatggccgttgaagagagagaggtgattaagtccctggataaatgtgatttcacggagatacaccggtacttcgtggataaggccgccgccaggaaggtcctctcaagggaggagaaacagaagctgaaagaggaggccgaaaaactgcagcaggagtttggttattgcattttggatgggcaccaagagaagatcggcaatttcaaaattgaacctcctggcctcttccgggggcggggcgatcatcctaaaatgggtatgctgaaacgccggataaccccagaagacgtggtcatcaactgctctagggactctaagatccctgaacctcctgccggccaccagtggaaggaagtgagaagtgacaacacagtcacgtggctggcggcttggacagaatctgttcagaactcaatcaagtatataatgctgaacccatgcagcaagttgaagggggaaactgcctggcaaaaattcgagacggcccggaggctgaggggattcgtggacgagattcggagtcagtaccgcgcggactggaaatcccgtgagatgaaaactcgacagcgcgccgtggcactgtatttcattgacaaactggcacttagggctggtaacgagaaggaggacggggaggccgcagacaccgtcgggtgctgttcacttcgcgtggagcacgtgcagctgcatccggaggcggatggttgtcagcatgtggtcgaatttgactttcttggaaaggactgcatcagatactacaatcgagttccagttgaaaagcccgtctataagaatcttcagcttttcatggaaaataaagatcctagagatgatctgtttgatagactgaccaccacaagccttaacaaacatttgcaggaactgatggacgggttgacagcaaaggtattccggacttacaacgccagtatcacactccaagagcaactgagggcactgacacgtgctgaggacagtatcgctgcaaagattcttagctataacagggccaatcgcgtcgtagctatactgtgcaatcatcagcgagccaccccttcaaccttcgagaagtcaatgcagaatctccagacaaaaatccaagcgaaaaaagagcaggtcgcagaagcgagggccgagctccgtcgagccagagccgagcataaagcgcagggcgatggaaagtcccgatcagtcctggagaagaagaggagactgttggagaagttgcaggaacagttggcccagctgagcgtgcaggccacagacaaagaggaaaataagcaggtggccctgggaactagcaagctgaactacctagacccccggataagtattgcgtggtgtaagagattcagagtgcctgtagagaagatttattccaaaactcagagggagcgctttgcctgggcgctggcgatggctggggaggactttgagttttag

SEQ ID NO: 208836 - DNA, 1512 bp, synthetic construct
  misc_feature 1..1512: note = Description of Artificial Sequence: Synthetic coding sequence
  source 1..1512: mol_type = other DNA
atgctggaccacgagtacaccaccaaggaggtgttccggaagaactttttcaatgactggcggaaggagatggccgtcgaggaacgcgaagtgattaagtctttggacaagtgcgactttaccgagatccacagatattttgtcgataaagcagcagcccgcaaggtactgagccgcgaagaaaagcaaaaactgaaggaggaagccgagaagcttcagcaggaattcgggtactgtattttagacggtcaccaggagaagattggaaatttcaaaatcgagccacccggtctgtttcgcgggaggggcgatcaccccaaaatggggatgcttaaaaggcgaattacaccagaggacgtggtaatcaactgctcccgagatagtaagatccctgaaccccccgccggacaccaatggaaggaagtgaggagtgataatacagttacatggctggcagcctggaccgagagcgtgcagaacagcatcaagtacatcatgctaaatccttgctctaagctcaagggggagaccgcctggcagaaatttgagactgccaggagactccgaggcttcgtggatgaaatccgcagccagtatagagcagactggaagtcgcgtgagatgaaaactcgccagagagccgtggctctgtactttatcgacaaactggcacttcgcgcgggtaacgaaaaggaggatggggaggcagcagatacagtggggtgctgctcactgcgagtggagcatgttcaattgcaccccgaggcagacggttgtcaacacgtcgtggaattcgatttcctcggcaaagattgtatcaggtattacaatagagttccagtggaaaaacccgtttacaagaacctgcagctctttatggagaacaaagatccgcgcgatgacctcttcgaccgactgaccacaacctccctgaataagcatctacaggaacttatggacggcctgacagcgaaagtgttccgcacctacaacgcatctattacccttcaagagcagctgcgggctctcacaagagctgaggactccatcgctgcgaaaatcctatcttacaacagagccaatagagtcgtagccattctgtgcaaccatcagcgggccactccttcaacgttcgagaagtctatgcagaatctccagacgaaaatccaggcaaaaaaagaacaagtagccgaggcaagagccgagctgcgccgcgcccgcgcggaacacaaagcccagggagatggaaagtcaagaagtgtactggaaaaaaagcgcaggttgctcgaaaagcttcaggaacaactcgcccagctgtctgttcaggccacagacaaggaggaaaacaaacaggtagcgctcggcacaagcaaactgaattacttggaccctaggattagcatcgcttggtgcaagaggtttagggtacctgtggagaagatttatagtaaaacccagagagagagattcgcctgggcactggctatggccggggaggatttcgagttttag

SEQ ID NO: 208837 - DNA, 4569 bp, synthetic construct
  misc_feature 1..4569: note = Description of Artificial Sequence: Synthetic coding sequence
  source 1..4569: mol_type = other DNA
atgagccggaacgacaaggagcccttcttcgtgaagttcctgaagtcctctgacaactccaaatgttttttcaaagccctcgagagtatcaaagaatttcagtcagaagagtacttgcagatcatcacagaagaggaagcccttaagatcaaggagaatgacagatccctctatatatgtgaccccttctccggagtcgtgttcgaccacctcaaaaaactgggttgtaggattgttggtccacaggtcgtgatcttttgcatgcaccaccagcgctgcgtccctcgggcggaacaccctgtgtacaacatggtgatgagcgacgtgaccatctcctgcacttccctggagaaagagaaacgcgaggaggtgcataagtatgtccagatgatggggggtagagtgtatagggacctcaacgtgtccgtgacacaccttattgccggagaggtcggctcaaaaaagtacttggtcgccgctaacctgaaaaagccaattttgcttccctcttggattaaaaccctgtgggagaagtcacaggagaaaaagataacccggtatacagatataaacatggaagactttaaatgtcccatttttctgggctgtatcatctgtgtgactgggttgtgtggcctcgatcggaaagaggtgcagcagctgaccgtaaagcacggtggtcaatatatgggacagctgaaaatgaacgaatgcactcatctgatcgtccaagagcctaagggacagaagtacgaatgtgccaaaaggtggaatgtgcattgcgtcacgactcaatggttcttcgactccatcgagaagggattttgtcaggatgaatcaatttataaaaccgagcccagacctgaagccaagaccatgccaaacagcagcacacccaccagtcagatcaacaccatagatagtcgcaccttatccgacgtgagtaacattagcaacattaacgcttcgtgtgtcagtgaatctatctgtaacagtttgaactcaaagctcgagccgacactggagaacctggagaatctcgacgtgtctgcattccaagctcccgaagacttgcttgatggctgtaggatctacctgtgtggctttagcgggcgcaagctggacaagttgaggaggcttataaacagtggaggaggagtgcggttcaatcaactaaatgaagatgtgacccatgtcatcgtaggtgactacgacgacgaactgaaacaattttggaataaatcagcacatagaccccatgtggtgggtgccaaatggcttctggagtgcttttccaagggttatatgttgtccgaggaaccttacattcacgcaaactaccagcccgtcgaaatccccgtgtctcacaagcctgagtctaaagccgctttgctcaagaagaagaacagtagctttagcaagaaagactttgcccccagtgaaaagcacgaacaagcagatgaagatctattatcacaatacgagaacgggtctagcactgtcgtggaggccaagacgtccgaggctcgcccattcaacgatagcacacacgccgagcctttgaacgactctacgcatatcagcctgcaagaagaaaatcagtcgtcagttagtcactgtgtcccggacgtttcgacaattaccgaggagggccttttttcacagaagtcgtttctcgtcctgggatttagcaatgagaatgaaagcaacatcgcaaatatcatcaaggagaacgccggaaagattatgtccctcttatcgagaactgtggccgattacgcggtggtacctcttctcgggtgtgaagtagaagcaacggtgggcgaagtggtgaccaatacctggctcgtgacttgtatagattaccagactcttttcgaccccaagtctaatccactgttcactcccgtccctgtgatgacaggtatgacaccgctggaagactgtgtgatcagtttctcccaatgcgcaggcgctgaaaaggaatctttaaccttccttgcaaatctactaggagcctcggtccaggaatatttcgtgagaaaatctaacgctaagaaaggcatgtttgcctcaactcatttgattctgaaagaaagaggcggaagcaaatatgaagctgccaaaaaatggaaccttcctgctgtgacaattgcctggcttctggaaacggctagaaccggtaagagggcagatgaatcgcactttctaattgagaattcaaccaaagaggaaaggtcactcgaaaccgaaattacaaacggtatcaacttaaactcagatactgctgagcacccgggaacaagacttcagactcacaggaaaaccgtcgtcacaccactggatatgaataggtttcagtccaaggcgttcagggcagtagtaagccagcacgcaaggcaggtcgcagcttccccggctgtgggtcaacccctgcagaaggagccgtcattacacttggatacgccctccaagttcctgagcaaggacaagttgtttaaaccctcttttgacgttaaagacgctctggccgccctagagacccctgggcggccctctcagcagaaaagaaagccatccaccccactctccgaagttatcgtgaagaatcttcaacttgcgctggccaacagctcccgaaatgcggtcgccctgagtgcctccccacagctgaaggaggcccagagcgagaaagaggaagctccgaaacctctccataaggtggttgtttgtgtctctaagaagctcagcaagaagcagtcagagcttaacggcatcgcagcctcactgggcgcagattaccggtggagctttgatgaaactgttacccactttatttatcagggcaggccaaatgacaccaaccgagagtataagtcagttaaagaacggggtgtacacattgtcagtgagcactggctcctagactgtgctcaagagtgtaaacaccttcccgagtccctgtaccctcatacctacaatcctaagatgtctctggacatcagcgccgtgcaggacggaaggctttgtaacagcagactgttatctgccgtgtcttctaccaaggacgatgagccagacccactcattcttgaagaaaacgatgtcgacaacatggctacaaacaacaaagagtcagccccaagcaacgggtctggtaagaacgactccaagggcgtcttaacccagaccctcgaaatgcgcgagaacttccagaagcaattacaggagattatgtccgctacatcaattgtgaaacctcagggccaacggacatctcttagtaggtctgggtgtaacagtgcttccagtacaccggacagcacacggagcgcaagatccggaaggagtagagttttagaagccttgaggcagagtaggcaaacagttcctgacgtgaacaccgaaccgtcgcagaacgaacagatcatctgggacgaccccacagcccgcgaggagcgggctagactggcctccaacttgcagtggcccagttgtccaactcagtattccgagcttcaagttgacatccagaacctggaagactcacctttccagaagcctctgcacgattctgaaattgcaaaacaagccgtttgcgaccctggcaatatccgggtgaccgaagcgcccaagcatcccatctctgaagagctggagaccccaattaaggattcccatttgataccaactccgcaagctcctagcatagcttttccattggccaatccacccgtagctcctcatccacgtgagaagatcatcacaattgaggagacacatgaagagttgaagaagcaatacatattccagcttagctcactgaacccacaagagaggattgactattgtcatttaatcgagaaattgggtggcttggtcattgaaaagcagtgcttcgatccaacttgcacacatatcgtcgtcgggcatccactccggaacgagaagtatctggctagcgtcgctgcaggcaagtgggtgctccaccgttcctacctcgaagcttgtcggaccgccggtcactttgtgcaggaggaagattatgagtggggctctagctccatcctggacgtgcttactgggatcaatgtgcaacagaggaggttggcacttgccgccatgaggtggcgtaaaaagattcagcagcgacaagagtctggcatcgtcgaaggtgcattcagcggatggaaggtcattctccacgtcgaccagagtcgagaagccggttttaaacggttgctgcaatctggcggggcaaaggttctgccgggccacagcgtgcccctattcaaggaagcgacccatttattctcagacttgaacaagctcaagcctgatgactcgggtgtcaatatcgccgaggcagccgcacaaaacgtttactgcttgagaacggagtatattgcagactatttgatgcaggaaagcccaccccacgtcgagaattattgccttcctgaagcaatctcatttattcaaaacaataaagaattggggactggactgagccagaaacgaaaggcccccacagagaaaaataaaattaaacggccgcgcgtgcattag

SEQ ID NO: 208838 - DNA, 3138 bp, synthetic construct
  misc_feature 1..3138: note = Description of Artificial Sequence: Synthetic coding sequence
  source 1..3138: mol_type = other DNA
atgggcagccagccccccctgggcagccccctgagccgggaggagggagaagcccccccccctgcccccgccagcgagggcagaagacggtccagaagagtacgtttgaggggaagctgccgccacagaccgtccttcttggggtgtcgagaactggccgcatctgctcctgccaggcccgccccagcttccagcgagatcatggccagtgctgccaaggaattcaaaatggataatttctcccccaaagcaggaacttccaaactccagcaaacggtgcctgctgacgcatctccggattccaaatgccccatatgtcttgaccgattcgataatgtgagttaccttgaccgctgccttcataaattttgcttcagatgcgtccaggaatggtccaagaataaagctgaatgccccctgtgtaagcagccttttgacagcatcttccacagcgtgcgggctgaggatgactttaaggaatacgtactgaggcctagctataacgggtctttcgtgactcccgaccggaggtttaggtaccgaacaaccctcacgagggaacgaaatgcctccgtgtactccccctcgggcccagtgaaccgccgcactacaacacccccagatagtggcgtcttgttcgagggcctcggtatcagcacgcgtcccagggacgtggaaatcccacagttcatgaggcaaatcgcagtgcggcgcccgacaacagcagatgaacgctcactccggaagatccaggaacaggacatcattaactttagaaggacactgtacagagccggcgcgcgagttcggaacatagaagacggagggcggtatcgcgatatttccgcagagttcttcagaagaaatccggcctgccttcatagacttgtcccatggctgaagcgggagctcacagtgctgttcggcgcccatggctcactggtgaacatcgtgcagcacatcatcatgagcaatgtgacacgctatgatcttgaatcccaggcctttgtatccgacctgagaccatttttgcttaatagaaccgagcatttcattcatgagtttatcagctttgctaggtccccatttaatatggccgcttttgatcagcatgccaactacgattgcccagcgccatcctacgaggagggatcacacagtgacagctccgttattaccatcagtccagatgaggcagagacccaagagcttgatatcaacgtcgcaacagtgtcccaggccccgtgggatgacgagacaccaggcccatcatactcctcctctgaacaggttcacgtgaccatgtcttcactacttaacacctcagacagcagtgatgaagagctcgtcactgggggggctacctctcaaattcagggcgtgcagacaaatgatgacctgaataatgactccgatgactcaagcgacaattgcgtaattgtgggattcgtcaagcccttggccgagcgaacccctgaattggtggaactgtcctcggactctgaagatctgggctcgtatgagaaaatggaaactgtgaaaacccaggagcaggagcagagttacagctccggagatagcgacgtttctcgatgctcatcaccacattctgtactggggaaggatgagcagattaacaaaggacactgcgattcttcaactagaataaaaagtaagaaagaggaaaaaaggagcacatctctgagctctcctcgaaacctcaactcttccgttcggggcgaccgggtctacagtccctacaatcacagacaccggaagcgaggaaggtcccgcagtagcgacagtcggtcccagagccgtagtggacacgaccaaaagaaccacagaaagcatcacggaaaaaagcggatgaagtccaaaagatcacgcagccgcgagagttcacgccccagggggaggagggataaaaaacgaagccggaccagggattcatcctggtctcgaagaagccaaacactatccctcagttcagagagcaccagccgtagcagatcgaggtcatctgaccacgggaagcgtcggtcccggtcacgaaaccgcgataggtattatttgaggaacaactatggaagccgatacaaatgggaatacacgtattattcaaggaacaaggatagagacgggtacgaaagcagctaccgacggcgaacactgagcagggcacattattcacgccaatcatccagtccagagtttagagtgcagagcttcagcgaaaggaccaacgctcgcaaaaagaacaaccattctgagcggaagtactattactacgagaggcaccggtctcgttccctctcaagtaaccgctctcggacggcaagcaccggcaccgaccgggttagaaatgaaaagcctggcggtaagcggaagtacaaaactcgtcacctagagggcacaaacgaggtggcacagccatctcgcgaatttgcatcaaaggctaaagattctcattatcagaaatcctcaagcaagctcgatgggaattacaaaaacgagtccgatactttctctgactccagaagttccgacagggaaaccaagcacaagcgccggaagcggaagacgcgttctctatctgtagagatcgtgtacgaaggaaaggctacagacacaaccaagcatcataaaaagaagaagaaaaagcataagaagaaacacaaaaagcaccacggggataacgcttcccgatccccggtcgtcataacaattgattcagactccgataaagactcggaggtaaaggaagatactgaatgtgataactccgggccacaggaccccctgcagaacgagtttttggctccctcattggagccctttgagactaaggatgtagtcaccatcgaggctgagttcggcgtgttggataaggagtgtgatatagcgaccttatctaataacctgaacaatgctaataagaccgtggacaatataccgcccctggccgcctcagtggagcagacactggacgtacgagaggagtccacgttcgtcagtgacctcgaaaaccaaccatccaacatcgtgtcgctgcaaaccgaacctagccggcagctgccctcaccacgcacttccctgatgagtgtttgtctgggcagggactgtgatatgtcttag

SEQ ID NO: 208839 - DNA, 2943 bp, synthetic construct
  misc_feature 1..2943: note = Description of Artificial Sequence: Synthetic coding sequence
  source 1..2943: mol_type = other DNA
atgatcatggccagcgccgccaaggagttcaagatggacaacttctccccaaaagccgggactagcaagttacagcagaccgtccctgcggatgctagtcccgactcaaagtgtccaatttgcctggacaggttcgataacgtcagttatttggatcgctgtcttcacaaattttgcttcaggtgtgtgcaggaatggagcaaaaataaagcagaatgtcccctttgcaagcagcctttcgacagcatctttcacagcgtccgcgccgaagatgatttcaaggaatatgtgctaagaccctcatataatggatccttcgtgactcccgaccgccgcttcaggtatcgaactacgctcactcgggagaggaatgcaagcgtgtactctcccagtgggcccgttaacaggcgaacaactacgccacccgatagtggagtgttgtttgagggcctgggtatttctacccgcccacgcgacgtggaaattccacaattcatgcgacagatcgccgtgcgcaggccgaccactgccgacgaacgttctttgagaaaaatacaggaacaggatatcattaacttcagacggacactgtacagggccggcgctagagtgcggaatatagaagatggcggacgttatcgcgatatctctgcggaattcttcaggaggaatcccgcctgtcttcaccgattagtgccctggctcaagagagaactcaccgtgctcttcggcgcccatggctcattagttaacatcgtgcagcatattattatgtcgaacgtgacacgatatgacctggagtcacaggcgttcgtttcagacctgcggccattcctgctcaataggaccgagcacttcatccacgaatttatttcttttgcaaggtcacccttcaacatggccgcttttgaccagcacgctaattacgactgcccagctccatcttacgaagaagggtcacactctgattctagcgtcatcaccatcagtcctgacgaggccgagacccaagaacttgacattaatgttgccacagtctcacaggctccctgggacgatgaaactccaggcccctcctacagcagctccgaacaggtacacgtgacaatgtcgtctctgctgaacacatcagactcttcagatgaggagttggttactggaggggccacttcccagattcagggggtacaaaccaacgatgaccttaataatgacagcgacgactcctccgacaattgcgtgatagtgggtttcgtgaagccacttgcggaacgcactccagagctggtggagttgtcctccgactcagaggatctggggagttacgagaagatggagactgttaagacacaagaacaagaacagtcatactcaagcggagacagcgacgtgtcccgctgttctagtccacacagtgtgctcggcaaggatgaacagatcaacaagggccactgtgactcctccaccaggatcaagtcaaaaaaggaagagaaacgctcaacatcattaagctcacccagaaacctcaactcatccgttcgtggcgaccgcgtctacagtccgtataaccatagacatagaaagcgtggacggtctaggtccagtgattcacgttctcagagtaggagcggccacgaccagaagaaccacagaaagcaccacggaaagaagaggatgaagtccaaaagatcgcggagtcgcgagagctcacggcctagagggcggagggataagaagagaagccgcactcgtgattcttcttggtcccggcggtcacagaccctctcactaagcagcgagtctacaagtcgcagcagatcccggtcctcagatcacggaaaacggcggtccagatctcggaaccgcgaccgttattacctcaggaataattacggtagccgctacaagtgggaatacacctactacagtcggaataaggaccgggacggttatgaaagctcctaccgcagaaggacactatctagagctcattattcgcgccaaagctcttcacctgagttccgggtccagtctttttcagaacgcacaaacgccaggaaaaaaaataatcactccgagcggaagtattactattatgagcgacacaggtcacgttcgttatcatcaaaccggagtcgcactgctagcacaggaactgatcgggtgagaaacgagaaacctggtggcaagcgaaagtacaaaactagacacctagaaggcactaacgaagtggcacaaccgtcaagagagtttgcctccaaggccaaggattctcattaccagaaatccagcagtaagctggatgggaactacaaaaacgagtctgataccttctccgatagcagatccagtgaccgggagaccaaacacaaacgccggaagaggaaaactcgctcgctttccgtggaaatcgtgtacgaagggaaggcaacggacacaacgaagcaccataagaaaaagaaaaaaaaacataagaagaaacataaaaagcatcacggagacaacgcatcgagaagccccgtggtgattactatcgacagtgacagtgataaggattctgaagtcaaggaggacacagaatgcgataattcggggcctcaagaccccttacaaaacgagttcctggccccatcgttggaacctttcgagacgaaagacgtagtgactatagaagctgagttcggagtgttggataaggagtgtgatatcgctaccctgtccaacaatctgaacaatgccaacaagacggtggacaacattccgcccttggcggcttctgtggagcagacacttgacgtccgagaggagagtacattcgtgagcgacctcgagaaccagccaagcaatatcgtgagtcttcagacggagccttcccgccagttgccttctccacgcacatcactgatgtcagtgtgcctcggtagagattgtgatatgtcttag

SEQ ID NO: 208840 - DNA, 999 bp, synthetic construct
  misc_feature 1..999: note = Description of Artificial Sequence: Synthetic coding sequence
  source 1..999: mol_type = other DNA
atgaagctgggccgggccgtgctgggcctgctgctgctggccccctcggtcgtgcaggcagtcgaacccatctctctagggttggcactggctggagtgcttacaggttacatctatccgagactctactgcctattcgccgaatgttgcggacagaagcgatccctttcccgggaggctctccagaaggacctagatgataacctatttgggcaacaccttgccaagaagatcatactgaatgcggtgtttggattcatcaacaatcctaagcctaagaagccgctgaccctttcactccatggatggacgggaaccgggaagaactttgtgtccaagattatcgctgaaaacatctacgaagggggactaaattccgactacgttcacttattcgtggcaacattgcacttcccacatgcctccaacattacactgtacaaggaccagctgcagctctggatccgcggaaatgtgtccgcatgcgcgaggagtatttttattttcgatgagatggataaaatgcacgccggtctcatcgatgcaatcaagccattccttgattactatgacttggttgatggagtgtcctatcagaaggcaatgtttattttcctttcaaacgctggcgccgagagaatcaccgacgtggctctcgatttttggcggagcggtaagcagagggaagatataaagctcaaggacattgaacatgcgctctccgtttcagtcttcaataataagaatagtggcttctggcactccagcctgatcgataggaaccttatcgactacttcgtccccttcctgccattggagtataagcaccttaaaatgtgcattcgcgtcgagatgcagagtcgcgggtacgagatagatgaagatatcgtttccagggtcgccgaggagatgacctttttccccaaagaggaacgggtgttttctgataaaggatgtaaaacggtattcaccaagcttgattactactatgacgactag

SEQ ID NO: 208841 - DNA, 906 bp, synthetic construct
  misc_feature 1..906: note = Description of Artificial Sequence: Synthetic coding sequence
  source 1..906: mol_type = other DNA
atgaagctgggccgggccgtgctgggcctgctgctgctggccccctccgttgtgcaagccgttgagccaattagccttggcctggctctcgctggcgtgttgacagggtacatctaccccaggttgtattgtctgttcgccgagtgttgcgggcagaagaggtcactttctcgggaggccctgcagaaagacctagacgataacttattcggccaacatttggccaaaaagatcattttgaatgctgtgttcggttttattaacaacccaaaaccgaagaaaccccttactctttccctgttcgtcgccactctgcactttccgcacgcctctaacatcaccctgtacaaggaccagctacagctgtggatccgcggaaacgtctctgcatgcgccagaagtatatttatttttgacgaaatggacaaaatgcacgcagggctgatcgatgccatcaaaccattcctggactactatgatctggtggatggggtgtcatatcaaaaagcaatgtttatcttcctgtctaatgctggcgccgaacggatcaccgatgttgctctcgatttctggcgatccggaaagcagagggaggacattaagctgaaggatattgaacacgccctgagcgtgagtgtcttcaataacaaaaacagtggcttttggcactcttcactgatcgatcgcaatctcattgactactttgtgccattcctaccgttagagtacaaacatctcaagatgtgcatcagggttgaaatgcaatctcgaggttacgagatcgatgaggacatcgtgtcgcgggtggccgaagagatgaccttctttcctaaggaggaacgcgtgttttccgataaggggtgtaagaccgtgttcacgaaattagactactattacgatgattag

SEQ ID NO: 208842 - DNA, 1011 bp, synthetic construct
  misc_feature 1..1011: note = Description of Artificial Sequence: Synthetic coding sequence
  source 1..1011: mol_type = other DNA
atgctgcgggccggctggctgcggggcgccgccgccctggccctgcttctcgctgccagggtggtggctgcattcgagcctatcaccgtgggactcgccattggcgccgcctcggctattacgggctacttatcttacaacgatatctattgccgttttgcagaatgctgtagggaggagaggccactgaacgctagcgcgctgaaacttgacctggaagagaagctgttcggacaacacctggctactgaagtcatttttaaagctctgacaggattcaggaacaacaagaatcctaagaagccactgactctgtccctgcatggctgggctggaaccggaaagaatttcgtatcccaaatcgttgcagagaatctccaccctaaagggctgaaatctaattttgttcatctgttcgtaagtactctgcacttcccgcatgaacaaaagattaagctctaccaagatcaactgcagaagtggatccgcggtaatgtgagcgcctgcgccaacagcgtcttcatattcgatgagatggataaactccatcctggcattatcgacgctataaaaccatttctggattattacgagcaagtagacggcgtgagctatcgtaaggccattttcatatttttgagcaacgccggtggcgacctgatcaccaagacggctttggatttttggagagccggccggaagcgagaggatatccagctgaaagacctggaacccgtgctttctgttggtgtgtttaataataagcacagtggcctgtggcactctggcctcattgataaaaatctgatagactattttataccctttctccccttggagtatagacatgtgaagatgtgcgtgcgagctgaaatgagagccagaggtagtgctatcgatgaggacatagtgacaagggttgccgaggaaatgacatttttcccccgggatgagaagatctatagtgacaaaggttgcaagactgtccagtccagattggattttcattag

SEQ ID NO: 208843 - DNA, 426 bp, synthetic construct
  misc_feature 1..426: note = Description of Artificial Sequence: Synthetic coding sequence
  source 1..426: mol_type = other DNA
tgacgggtggtggccgccttcgagcccatcaccgtgggcctggccattggcgcagcgtccgcaattacggggtatctgtcatataacgacatctactgccggtttgccgaatgctgcagagaagagaggccactgaatgccagtgccttaaaactcgacctggaggagaaactatttggacaacacctggctacagaagttatcttcaaggccttgaccggattcaggaacaataagaacccaaaaaagccattaaccctctccctccacggctgggccgggaccgggaagaattttgtgagccagatcgtggctgaaaatctgcaccctaagggcctcaagagcaacttcgtacatctgttcgtgagcacacttcactttcctcacgaacagaaaatcaagctgtaccagagttccctgacttag

SEQ ID NO: 208844 - DNA, 918 bp, synthetic construct
  misc_feature 1..918: note = Description of Artificial Sequence: Synthetic coding sequence
  source 1..918: mol_type = other DNA
atgctgcgggccggctggctgcggggcgccgccgccctggccctgctcctcgctgccagagtggtggcggcatttgaacctatcaccgtcggactggcgattggtgccgcaagcgcaatcaccggctacctctcgtacaacgatatatactgtagattcgcggagtgctgtcgggaagaacgtccattaaacgcatccgccctcaagctggacctggaggaaaagctcttcgggcagcatctggcgacagaagtcatcttcaaggcactgacaggcttcagaaataataaaaaccccaaaaagccgctgacccttagcttattcgtgagtactctgcactttccccacgagcagaagatcaaactttaccaggaccagttgcagaagtggattagggggaacgtctcagcatgtgcgaactcagtcttcatcttcgacgaaatggataagttgcatcccgggatcatcgatgcaatcaagccattccttgattactatgagcaggtggacggtgtgtcttatcgcaaagcgatctttatatttctttcgaatgctggcggggacctgatcactaaaaccgccctggacttttggagagcagggcggaaaagggaagacattcaactcaaagaccttgaacctgttctctctgtgggagtttttaataacaaacatagtgggctttggcacagcggactaatagacaaaaacttgattgattattttataccttttctccctcttgagtatcgtcacgtcaaaatgtgcgtgcgggctgagatgcgagccagaggaagcgctatcgatgaggatattgtgacaagggtcgccgaagaaatgaccttctttccacgagatgagaagatatatagcgacaaaggctgtaaaaccgtccagtccagattggatttccattag

SEQ ID NO: 208845 - DNA, 1011 bp, synthetic construct
  misc_feature 1..1011: note = Description of Artificial Sequence: Synthetic coding sequence
  source 1..1011: mol_type = other DNA
atgctgcggggcccctggcggcagctgtggctgttcttcctgctgctgctccccggtgctccggagccgagaggcgcatctcgaccgtgggagggcactgacgagcccggctccgcatgggcctggccaggctttcaacggctgcaggagcagctgagagctgcaggggctctttcaaaacgatactggacactgttctcttgccaggtgtggcctgacgactgtgacgaggatgaggaagccgccacggggcccctcgggtggagactgcccctcttggggcagcggtatctggacctgctgactacttggtactgctcgtttaaggattgttgccctcgcggggattgtcgcatatctaacaatttcacaggactcgaatgggacctcaatgtaagacttcacggccagcatcttgttcagcaactggttctacggaccgtgcgggggtaccttgagaccccacaacctgaaaaagccctcgccttgagtttccatggttggtcgggcactggcaagaattttgtggccaggatgctggtcgagaacctgtaccgggacggtctgatgtctgactgtgtgagaatgtttatcgcaacttttcacttccctcaccccaagtatgtggacctgtacaaggagcagttgatgagtcagatccgagaaacgcaacagctgtgccatcaaacgctcttcatctttgatgaggccgagaagttgcaccccggtctgctggaagtgctggggcctcacctagaacgccgggcccccgagggccaccgcgcagagagcccatggacaatcttcctgttcctttccaatctgaggggggatatcataaacgaagtggtgctcaagctcttaaaagctggctggagcagggaggaaatcacaatggagcacctggagccccacctacaggcggagatcgtcgagaccatcggattcagtttcctcaccacccgctggcctcacctggatttaccaacaagcagtgtggcccctacatag

SEQ ID NO: 208846 - DNA, 462 bp, synthetic construct
  misc_feature 1..462: note = Description of Artificial Sequence: Synthetic coding sequence
  source 1..462: mol_type = other DNA
atgctgcggggcccctggcggcagctgtggctgttcttcctgctgctgcttcctggggcccccgagcctcgaggcgcctcccgcccttgggaagggacggacgaacccggatcagcctgggcgtggccggggttccagcggctacaggagcagctccgcgctgctggtgcactgtccaagcgatattggaccctgttctcttgccaggtgtggcctgacgattgcgatgaagatgaggaagcagccaccggacccctgggctggcggttaccgctgctcggtcagaggtatctggaccttctgactacttggtactgttcattcaaagattgttgtcccaggggggactgtaggattagcaacaacttcacgggaaagaattttgttgcacggatgctggtagaaaacctatatcgggacggtctgatgtccgattgtgtcaggatgttcattgcaacctag

SEQ ID NO: 208847 - DNA, 1194 bp, synthetic construct
  misc_feature 1..1194: note = Description of Artificial Sequence: Synthetic coding sequence
  source 1..1194: mol_type = other DNA
atgctgcggggcccctggcggcagctgtggctgttcttcctgctgctgctgcccggagcacccgagccaaggggtgccagcaggccttgggaaggcaccgatgaaccagggtctgcctgggcctggcctggatttcagcgcctgcaggagcaactgcgtgctgccggcgccctctctaagagatattggacgctgttcagttgccaggtatggcccgacgactgtgacgaggacgaagaagccgcaaccggtcccttaggctggaggctgcccctcctcgggcaaagatatctggatttattgaccacttggtattgttccttcaaggattgctgtccacgcggggattgtaggatttccaataattttactggtctcgagtgggatctaaatgtcagactccacgggcaacatctggtccagcagctcgtgctgcgtacagtgaggggctaccttgagaccccgcagccggaaaaagcgttggccctatctttccacggatggtctggtacgggcaagaacttcgtggcgcgtatgctggtcgagaatctctatagagacggcttaatgtctgactgtgtgagaatgttcattgccacgttccacttcccccacccgaagtacgtcgatctctacaaggagcaacttatgagccagatccgcgagacccagcaactgtgtcaccagaccttgtttatctttgatgaggcagagaaactgcatccgggcctgttagaagtcctagggccgcatctggaacgacgtgcaccagagggacaccgcgccgagagcccctggacaatcttcctgttcctgtctaacttgaggggcgatattatcaatgaagttgtgctaaagttgctcaaggcaggatggagccgcgaagaaataaccatggagcatctggaaccgcacctccaagctgaaattgtggaaacaatagacaatggcttcggacatagccgtctggtaaaagagaacttgattgactattttattccttttcttcccctggagtataggcacgtgaggttgtgcgcccgagatgcttttctctcacaggaactcctctacaaggaagaaaccttggatgagatcgcccagatgatggtatacgttccaaaagaagaacagctatttagttcgcaagggtgtaagagcatctctcagagaatcaattacttcctgtcctag

SEQ ID NO: 208848 - DNA, 525 bp, synthetic construct
  misc_feature 1..525: note = Description of Artificial Sequence: Synthetic coding sequence
  source 1..525: mol_type = other DNA
atgggcctgtgcgtgcccttcgccgtgaccaccagcttcctgagcctggggttagaatgggacttgaacgtgcggctgcatggacagcaccttgtgcagcagttggttttgcgcactgttcgggggtacttagagacaccacaacctgagaaggccctggctctgagttttcacggctggtctgggaccggtaaaaatttcgtggcccgcatgcttgtagaaaacctgtaccgcgatggcttgatgtcggactgtgttagaatgttcatcgcgaccttccacttccctcatcccaaatatgtggatctgtataaggagcagttaatgagccaaatccgcgaaacccagcagctttgccatcagactcttttcattttcgatgaagccgagaagctgcatccgggattgctggaggtcttgggaccacacctggagaggagagctcccgaaggacaccgggcagaaagcccctggaccattttcctgttcctgtccaatctcaggggagacattattaacgagtag

SEQ ID NO: 208849 - DNA, 1866 bp, synthetic construct
  misc_feature 1..1866: note = Description of Artificial Sequence: Synthetic coding sequence
  source 1..1866: mol_type = other DNA
atggagttccccggcggcaacgacaactacctgaccatcaccggcccctcccatccattcctgagcggagccgaaactttccatacaccatccctgggggacgaggagtttgagatcccacctataagtctggatagcgaccctagtttagctgtaagcgacgtggtgggacacttcgatgacctggccgatccatccagctcccaggatgggagcttttccgctcagtatggtgtgcagacactggacatgccagttggcatgacgcacggtctgatggagcaaggcggcggtttgctctcagggggcctcaccatggacctggatcacagtattggtacccagtacagcgcgaacccgccagtaacaattgacgtgcctatgacagatatgacgagcggcctgatgggccattcgcagctgacaactatcgatcaatctgaactttccagtcaactggggctatcactgggcggaggcaccatactcccacctgcacaatctcccgaggatcgactctccacgacaccttctcctacctcaagccttcatgaggatggcgtggaggattttcggcgacagctgccctcacagaagaccgtcgtagtggaggcaggaaagaaacagaaggcccccaaaaaaagaaaaaaaaaagacccaaacgagccccaaaagcctgtgagcgcctacgctctgttcttcagggatacccaggctgcgataaaagggcagaacccaaacgcaacctttggcgaagtctcaaagatcgtcgcctctatgtgggactccttaggagaagagcagaagcaggtctacaagcgtaagacggaagcagcaaagaaggagtatctcaaagcccttgctgcttacaaggacaatcaggagtgccaggcaaccgtcgagacggtggagctggatccagctcccccctcacaaactccctcacctccgcccatggccaccgtggatcctgcctcgcctgcccccgcttctatcgagcctccagccctctccccaagcattgttgtgaactctacgttgagctcatatgtcgctaatcaagcctctagcggcgctggcggccaaccgaacataacaaagttgatcattaccaaacaaatgctgccaagtagcatcacaatgagtcaagggggtatggtgaccgtcatcccagccaccgtggtgacatcaaggggtctacagctcggccaaacgtccacggccaccatccagccaagtcagcaagcacaaatcgtgacccgctctgtgctgcaagccgccgccgcagccgcagccgcagcttccatgcaattgccccctccgcgacttcagccccccccacttcagcagatgccccagcccccaacacaacaacaagtcacaatactccagcaacctcctccactccaggccatgcagcagccaccaccccagaaagtcaggattaatctgcagcagcagcctccaccattgcaaataaaatctgtccctttgcccactctgaagatgcaaaccactttggtgccccctacagttgagtcatcccctgaacggcccatgaataatagcccagaagcgcacacggtggaggcccctagccccgaaacaatatgtgagatgataaccgatgtcgtgcccgaggtagaaagccctagccagatggatgtagaactggtgtcaggctctcctgtagccctctctccacagcccagatgcgtgagaagtggctgtgaaaatcccccaatagtctctaaggactgggataacgaatactgctcaaacgaatgcgttgtcaagcactgtagggatgtctttttggcctgggtggctagcagaaattctaatactgtggtcttcgtgaaatag

SEQ ID NO: 208850 - DNA, 1866 bp, synthetic construct
  misc_feature 1..1866: note = Description of Artificial Sequence: Synthetic coding sequence
  source 1..1866: mol_type = other DNA
atggagttccccggcggcaacgacaactacctgaccatcaccggcccatcccatccgtttctctcaggcgcggagacattccataccccgagcctgggcgatgaagaatttgaaattccacccatttccctggactccgaccccagcctcgctgtgtccgacgtggtcgggcactttgacgatcttgctgatccttcgtccagccaggatggatccttttctgcacaatatggagtgcagacgctggacatgcccgtgggaatgacacacggtctcatggagcaaggcggtggactgctgtctggtggtctgaccatggacctggaccactctattggaacgcagtattccgcaaaccccccagtcaccattgatgtcccaatgaccgacatgacgtcaggtctcatgggccactcacagcttacaacaatcgaccagtcggagcttagcagtcagctgggtcttagtctcggaggcgggacaatcctacctcccgcccaaagcccagaggataggctatccaccaccccgagtcctacatcgtcgttgcatgaagatggagtggaggatttccggagacagcttccttcacagaagacagtggtggtggaagccggaaaaaagcagaaagctcctaaaaaacgcaagaagaaggatccgaatgaaccccagaagcccgtcagcgcttacgctctttttttccgggatacacaggcagcaattaaaggacagaatcctaacgctacatttggtgaagtgtctaaaatcgttgcctcaatgtgggattctctaggagaggagcaaaagcaagtgtacaagaggaaaaccgaggccgcgaaaaaagagtacctgaaagcccttgctgcttacaaggataaccaggagtgtcaggcgactgttgagaccgttgagctggaccccgccccgcctagtcagacgccaagccctccacccatggccactgtagatccggcctccccagcaccagccagtatcgagcctccggccctgagccctagtatcgtggtgaatagtaccctgtcatcctacgtggcaaaccaagcctcctcaggggctggcgggcaaccaaatataacaaagctgatcattacaaagcagatgctgccgtcctcaataactatgtctcagggcgggatggttacagttatacccgccacagtggtcactagccggggcttacaactgggccagactagcacagccactatacaaccttcccagcaggctcagattgtgactcgctctgttctgcaggctgccgcagctgctgccgccgccgcgtctatgcagcttccacccccgcggcttcagcctcctccactgcagcagatgccccagccgccaacccaacagcaggtgaccatccttcagcagcctccacctttacaggcgatgcagcagcccccgccacaaaaggtcaggataaatctacaacaacagcccccgcccttacagatcaagagcgtgcccctgcccacactcaaaatgcagactacactggtgcctcccacagtcgaatcatcgcccgagaggcctatgaacaacagccccgaggcacataccgtggaggctccttctcccgagacaatttgtgagatgattaccgatgtggtgcccgaggtggagtcacccagtcagatggatgtcgagctggtatctggttctcctgtggcactgagtccacagccccgctgcgtaaggtctgggtgcgaaaacccaccgatcgtatccaaggactgggacaacgaatactgctctaatgagtgtgtggtgaaacattgccgggacgtgtttctcgcgtgggttgcgagcaggaattcgaatacagtggtgtttgtgaagtag

SEQ ID NO: 208851 - DNA, 1797 bp, synthetic construct
  misc_feature 1..1797: note = Description of Artificial Sequence: Synthetic coding sequence
  source 1..1797: mol_type = other DNA
atggagaccttccacacccccagcctgggcgacgaggagttcgagatcccccccatcagcctggactccgacccttctctggccgtgagcgacgtggtgggccacttcgatgacctggctgatccctcttcttcccaggacgggtcattttcggcacaatacggggtgcagacattggatatgcctgtgggcatgacacacgggctgatggagcagggaggcggattgctctcaggcggactcaccatggacctggatcactccatcgggacccagtattccgccaatccgcctgttaccattgacgtgcctatgacggacatgacgagcggactcatggggcattctcaactgacaactattgaccaatcagaactctctagccagttgggcctgtcacttggtgggggaactattctgcccccagcacagagtccggaggataggttgagtacaacaccatctcctacatcttcccttcatgaggacggggtggaggatttcagacgacaattgccatctcagaaaacagtggtggtggaagccgggaaaaagcaaaaagctcccaaaaagaggaagaaaaaggatccaaatgagccacagaagcctgttagcgcctacgccctgttctttcgggacacccaggctgcgattaaaggacagaacccaaacgccacattcggcgaagtgtccaaaatcgtggctagcatgtgggatagcctcggtgaggagcaaaagcaagtctacaagaggaagaccgaggccgccaaaaaggaatatctcaaagcccttgcagcatacaaagataatcaggaatgccaggccaccgtggagaccgtcgaactggatcccgctcccccatctcagacgcccagtccacccccaatggcaacagtagaccccgcatccccagcccccgcatccatagaaccccctgctctgtccccaagcatcgtggtcaacagcactctgagttcttatgtggctaatcaagctagctcaggggccggagggcaacctaatattactaagttaattataaccaagcagatgttgccaagtagcatcactatgagtcaaggtgggatggtcacagtcattcctgcaactgtggtgacctctaggggcctgcagttgggtcaaaccagcacggctaccatccagcctagccagcaggctcaaatcgtaactcgttcagtgctccaggctgccgcagctgcagctgccgccgcctcaatgcaactacccccaccgagactgcagcccccccctttgcagcagatgcctcagcccccaactcagcagcaggtcactatattacagcaaccgccgccgctgcaagccatgcagcaacctcccccccagaaggtgagaattaatttgcagcagcagcctcccccactgcagatcaagtctgtgccccttccaacgctgaaaatgcagactacactggtgccccctactgtcgagtcatcccctgagcgtcccatgaataactctcctgaggcccacaccgtcgaggcccccagccctgaaaccatatgcgagatgatcaccgacgtagtgcctgaagtcgaaagcccctcgcagatggacgtggaacttgtcagcggttcaccggttgccctgagcccccagccacgctgtgtaagatctgggtgtgagaatcctcccatagtgagcaaagattgggacaatgaatactgtagcaatgagtgcgtggtgaagcactgccgggatgtcttcctggcatgggtcgcttcaagaaattcaaacacagtggtgttcgtcaagtag

SEQ ID NO: 208852 - DNA, 1650 bp, synthetic construct
  misc_feature 1..1650: note = Description of Artificial Sequence: Synthetic coding sequence
  source 1..1650: mol_type = other DNA
atgcggaacctgaagagccacctgagcccctggatcctgatcccccactggctatctcaaatgtggctggccaccctcatgacatggcagttctttagccccgacctggatcactcaatcggcacccagtactcagcgaacccgcccgtgaccatagacgtgccaatgaccgatatgacgtctggacttatgggacatagccagctgacaacaatcgatcagtccgaactaagttctcagctcggtcttagtctggggggtgggaccatcctaccccctgcccagtcgccagaggaccgtctgtcaaccaccccttctcccactagcagtcttcacgaagatggcgtggaggactttcggcgtcagctgccgtctcagaaaaccgtggtggtcgaggctggtaagaagcagaaggctccaaagaaaagaaaaaaaaaagaccctaacgaaccccaaaagccagtgagtgcgtacgcactgttcttccgcgacacacaggccgctatcaaaggacagaaccccaatgctacttttggggaggtgagcaagattgttgcgagtatgtgggacagtttgggagaagagcagaagcaggtgtataaacgcaaaaccgaagccgcaaaaaaagagtatctcaaggctcttgccgcatataaagataaccaggagtgtcaggccaccgttgaaaccgtcgagctagatccagcccctcccagccagacccctagtcccccccctatggccacagtggacccagcctcacccgcccctgcatcgatcgagccaccagccctgagcccctccatcgtggtaaattctaccctcagcagttacgtggctaaccaggcttcaagcggcgccggtggacagccgaatattaccaagcttatcatcacaaaacagatgctgcctagctctatcaccatgagtcagggaggcatggtgacagtaattcctgcgaccgtggttacaagcagaggcctccagctaggacagacatccaccgcgacaatccagccttcccaacaagcccagatcgtgactcggtccgtgctgcaggctgctgcagcggccgctgccgcagcctcgatgcagctaccacccccccggctccagccacctcctttgcagcagatgccccagcccccaacccagcagcaggtgacaatcctacagcagccccccccactccaggcgatgcagcagccaccccctcagaaggtccggatcaacctacaacagcagcccccccccctccagatcaaatctgtgccactgcccacactcaagatgcagacaacccttgtgccacccactgtggagtctagtccagagaggcccatgaataattctcccgaggcgcacactgtggaggctccgagccctgagaccatatgcgagatgattacagatgtagttcccgaagtagaaagcccttctcagatggatgtggaactcgtgagtggatcccccgttgctctgtctccccagccgaggtgtgtcaggagtggctgcgagaatccgcctatcgtgagtaaagattgggataacgagtactgtagcaacgagtgcgtcgtcaagcattgccgcgatgtgtttctagcctgggtggccagcagaaacagtaataccgtggtgttcgtcaagtag

SEQ ID NO: 208853 - DNA, 1020 bp, synthetic construct
  misc_feature 1..1020: note = Description of Artificial Sequence: Synthetic coding sequence
  source 1..1020: mol_type = other DNA
atgatgcccttctgccacaacatcatcaacatcagctgcgtgaagaacaattggtcaaatgacgtgcgtgcctcactgtactctctcatggtgttaattattttaaccactctcgttgggaatctgatcgtgatcgtctcgattagtcactttaagcaacttcacacacccacaaactggctgatacattcaatggctactgtggattttctgctgggctgcttagtcatgccttactccatggttcgctctgccgagcactgttggtacttcggggaggtattctgtaaaattcataccagtacagacattatgcttagtagcgcctcaatcttccacctcagcttcattagtatagaccgctactatgccgtttgtgatccgcttaggtacaaggcaaagatgaatatattagttatctgcgtgatgattttcatctcctggagtgtgcctgctgtcttcgcctttggcatgatattcctggaactgaactttaaaggagctgaggagatatattataaacacgtgcactgccggggcgggtgctccgtgtttttcagcaagataagtggcgttctgacattcatgactagtttctatatacctggctcaatcatgctgtgcgtctattatcgcatctatcttatcgctaaagaacaagcccgtctcatctcagacgccaaccaaaaactgcagattggcttggagatgaaaaatggaatctcccaatcaaaagaaagaaaggccgtgaagaccctggggattgtcatgggcgtgtttctgatttgttggtgcccattcttcatctgcactgtgatggacccattcctgcactatattatccctccgacattaaatgacgtccttatctggttcgggtaccttaattctaccttcaatcccatggtgtacgcattcttctatccatggttcagaaaggcattgaaaatgatgctgttcgggaaaatcttccaaaaagattccagccggtgcaaactctttctggagctgtccagttag

SEQ ID NO: 208854 - DNA, 921 bp, synthetic construct
  misc_feature 1..921: note = Description of Artificial Sequence: Synthetic coding sequence
  source 1..921: mol_type = other DNA
atgtacagcttcatggccggcagcatcttcatcaccatcttcggcaaccttgcaatgataatttcgatcagctacttcaaacagctgcacacgcccactaattttcttattttgagcatggctattaccgattttctgctgggcttcacaatcatgccttacagtatgattcggagcgtcgagaactgttggtacttcggcctcaccttctgcaaaatttattactccttcgacctcatgctgtccataactagcatatttcacctctgcagcgttgcaattgacaggttttacgctatatgttatccactgctctactctaccaaaatcacgattcccgtgataaagcgtctgctcctgctttgctggagcgtaccaggagcatttgcgtttggcgtcgtgttttcggaagcatacgccgatgggatcgagggatatgacatcctggtcgcatgcagctccagttgtccggtaatgttcaacaagctgtgggggaccactctgtttatggccggcttcttcacacctggatcaatgatggtcggaatatatggaaaaatattcgcggtgtcacggaagcacgcgcacgccatcaacaatctacgcgagaatcagaataatcaggtcaaaaaggacaaaaaggctgccaaaacactagggattgtaatcggcgtttttctgctttgctggtttccttgttttttcactatcctgttggatccctttctgaatttttcgactccagtggtcctgttcgatgccctgacatggtttggctattttaactcaacttgcaacccattaatttacgggtttttctatccctggttccgccgagccctcaagtacattcttctgggtaagatcttctctagttgttttcataacactattttgtgtatgcagaaggagtctgagtag

SEQ ID NO: 208855 - DNA, 1056 bp, synthetic construct
  misc_feature 1..1056: note = Description of Artificial Sequence: Synthetic coding sequence
  source 1..1056: mol_type = other DNA
atggccgtgagcagcgagcagcacgagctgagccacttcaagcggacgcagaccaagaaagagaagtttaactgctctgagtacggaaacaggtcttgtccggagaacgagcgctccctgggagtcagggtcgctatgtactcgttcatggcagggagcatcttcatcaccattttcggaaacttggccatgatcataagcataagctattttaagcagctgcatacccccacaaacttcctcatcctctcaatggccataacagatttcttgttggggtttacaattatgccatattctatgatccgctctgttgaaaattgttggtatttcggcttaacattctgtaaaatctactatagttttgacctgatgcttagcatcactagtatcttccacctatgcagtgtcgccattgaccgcttttatgccatttgttacccactgctctacagtactaaaattactattcccgtaatcaagaggcttcttctgctgtgctggtccgtacctggggctttcgctttcggagtcgtcttttctgaagcgtacgccgatggcatcgaaggctatgacatacttgtcgcctgttcgagtagctgccctgtcatgttcaataagttgtggggtacaaccttgttcatggccggatttttcacccccgggtccatgatggtaggcatctacggcaagattttcgctgttagtcgcaagcatgcgcatgcgattaacaaccttcgcgagaaccagaacaatcaagtcaagaaggacaagaaggctgccaaaactctgggcatcgtgatcggcgtgttcctgctgtgctggtttccttgcttttttacgatcctgctggaccctttcttaaactttagcaccccggtggtattatttgacgccctgacctggttcggttactttaacagcacctgcaatcctctgatttatggattcttttatccttggttcagaagggccctgaaatacatcttgttgggcaaaattttctccagctgttttcacaacaccattctgtgtatgcagaaggaatcggagtag

SEQ ID NO: 208856 - DNA, 921 bp, synthetic construct
  misc_feature 1..921: note = Description of Artificial Sequence: Synthetic coding sequence
  source 1..921: mol_type = other DNA
atgtacagcttcatggccggcagcatcttcatcaccatcttcggcaacctggctatgatcatctccatcagttacttcaaacagttacacacacccacgaatttcctgatcctctccatggcgataacagatttccttctcggctttaccattatgccatacagtatgattaggtcagtggagaactgttggtatttcggattgaccttctgtaagatttactacagctttgatctgatgttgtccattacaagtatctttcacctgtgcagtgttgctatcgacaggttctacgctatctgttatccattgttatacagcacgaagatcacaatccccgttatcaaacgtcttctgttattatgttggagcgttccgggggcctttgcattcggtgtggtcttcagtgaagcatacgctgatggtattgagggctatgatattctggtagcttgctctagttcatgcccagtgatgtttaacaaactctggggaacaacactgttcatggctggcttcttcactcccggtagcatgatggtgggcatctacggcaaaatattcgctgtttcccggaagcacgcacacgctattaacaatctgcgcgaaaaccagaacaatcaggtgaagaaggacaaaaaggccgccaaaacacttggtattgtcattggagtctttctgctatgctggtttccctgcttttttacaatcctcctggatccgttccttaatttttccacacccgtggtgttattcgacgcacttacttggtttggctattttaattctacctgtaaccccttaatttacggattcttttatccgtggtttcgccgggccttgaagtatattctactgggcaagatatttagtagctgcttccacaataccatcctgtgtatgcagaaagaatcagaatag

SEQ ID NO: 208857 - DNA, 1038 bp, synthetic construct
  misc_feature 1..1038: note = Description of Artificial Sequence: Synthetic coding sequence
  source 1..1038: mol_type = other DNA
atgagcagcaacagcagcctgctggtggccgtgcagctgtgctacgccaatgtgaacgggtcttgcgtgaagattcctttcagccctggaagtcgagtcatcctctacattgttttcggattcggggccgttttagccgtcttcggcaacctgctggtgatgatatctatactccacttcaagcagctccattctccaaccaactttctagttgcatcactggcctgtgctgattttttggtgggagttactgttatgcctttttcaatggtacggactgttgagtcatgctggtactttggtagatctttttgcaccttccacacatgttgcgacgtggccttttgctactcatctctgttccatctttgcttcataagtattgatcggtatatcgctgtgacagaccccctggtgtacccgacaaagttcacagtaagcgtctccgggatctgcatctccgtatcttggattctccccctcatgtatagcggcgccgttttttataccggcgtgtatgacgacggcttagaggaactgagcgatgctctcaactgcatcggcgggtgtcagaccgttgttaaccagaactgggtgttaacagacttcctttctttcttcattcctacatttattatgataattctgtacggcaacatctttctggtagcccgccggcaggcgaagaaaattgagaataccggtagcaaaactgaatccagctccgagtcttataaagcacgggttgcacggagagagcggaaggctgcgaagacccttggcgtgaccgtagtcgcgtttatgatcagctggctgccctatagcatcgacagtctaatcgatgcattcatgggcttcattacacctgcatgcatctatgaaatctgttgctggtgcgcctattataatagcgctatgaaccccttgatctacgctctgttttacccatggtttcggaaggctatcaaagtgatagtgacggggcaagttctgaagaatagtagtgctaccatgaacctcttctccgaacatatctag

SEQ ID NO: 208858 - DNA, 957 bp, synthetic construct
  misc_feature 1..957: note = Description of Artificial Sequence: Synthetic coding sequence
  source 1..957: mol_type = other DNA
gtgaacggcagctgcgtgaagatccccttcagccccggcagccgggttattctctatattgtgttcggattcggagcagtgttggcagtattcggcaacctgctggttatgattagtatcctgcatttcaagcaactgcacagccccaccaactttctggttgcttcgcttgcatgtgccgactttctggtcggcgtgactgtcatgccgttttctatggtaagaacagtcgagtcctgttggtatttcggaaggtccttctgcacattccacacatgttgtgatgtggcattctgctactcaagcctgtttcacctgtgtttcatcagtatagacagatacattgcagtgactgatccgcttgtgtatccaaccaagttcacagtgtctgtgtccggcatttgcatttcagtgagttggattctacctctgatgtactccggtgcggtcttttatactggggtgtacgacgatggactggaggaattgagtgatgccttaaattgcataggcggatgccagacggtggtcaaccagaactgggtcctcaccgatttcctgtcattcttcatccccactttcatcatgatcattctttacggaaacattttcttagttgcccgcagacaggcgaagaaaattgagaatacggaaagctacaaggcaagagttgcccggagggaaaggaaagctgctaaaacccttggcgtcacagtggtggcattcatgataagttggctaccatattcaatcgactccttgatcgacgcctttatgggtttcatcactcccgcttgtatctacgagatctgttgttggtgcgcctactacaatagcgccatgaacccgctgatttatgcattgttctacccttggttcagaaaagctataaaggtcatcgtcaccggccaggtgctgaaaaattcgtctgcaactatgaacctttttagtgaatag

SEQ ID NO: 208859 - DNA, 1410 bp, synthetic construct
  misc_feature 1..1410: note = Description of Artificial Sequence: Synthetic coding sequence
  source 1..1410: mol_type = other DNA
atgcccatccgggccctgtgcaccatctgcagcgacttcttcgaccattctcgggacgtcgccgccattcattgcggccatactttccacctgcagtgtttgatccaatggtttgagacggccccctctagaacgtgtcctcagtgtcgtatccaagttgggaagagaacgattataaataaattgtttttcgacctggcccaggaggaggagaacgtgctcgacgccgagttcctgaagaacgagctggacaatgtgcgagctcagcttagccagaaagacaaggagaagcgtgactcacaggtcatcatcgacacgctgcgggacactcttgaagaaagaaatgcaacggttgtgtctctgcagcaggccctgggtaaggccgaaatgttgtgcagtacccttaagaagcagatgaagtatttggagcagcagcaggacgaaaccaagcaagcgcaagaggaggccaggcgcctgaggtccaagatgaagacaatggagcagatagagttattacttcagtcccagcggcccgaggttgaggaaatgatccgagatatgggcgtggggcaatccgccgtggaacagctggccgtctattgcgtctctctaaaaaaggagtacgaaaacctgaaggaagctcggaaagccagcggcgaggttgccgacaagcttcggaaggatttgttcagtagtaggtctaaactgcagaccgtgtattccgaactggaccaggcaaaactggaactgaaatcggcacaaaaggacctgcaatccgcagataaggagatcatgagccttaagaagaagctgactatgctgcaggagacactcaatttgccccccgtggcaagcgaaaccgtcgacaggttagtgctcgaaagtccagctccagtggaggttaatttaaagctgcggaggccctctttcagggatgatatagatttgaacgccactttcgacgtagatacaccgcctgctcggccttcctcaagccagcatggatactacgagaagctgtgcctggaaaagtcacacagccctattcaagacgtccctaaaaagatctgtaaggggccacgcaaggagagccaacttagcctgggtggacagtcctgtgctggtgaacctgatgaggagctcgtgggtgcttttccaatatttgtgcgcaacgccatcctgggccaaaagcagccgaaaagacctaggtcagagagcagctgtagtaaagatgtcgtccggacgggtttcgatggacttggagggcgcacgaagtttatccaaccgacagatacggtgatgatccgtcctctccccgtgaagcccaagactaaggtaaagcagagggttcgcgttaagaccgtgccgtctttgttccaagctaagctagatacctttctgtggtcgtag

SEQ ID NO: 208860 - DNA, 4059 bp, synthetic construct
  misc_feature 1..4059: note = Description of Artificial Sequence: Synthetic coding sequence
  source 1..4059: mol_type = other DNA
atggccagcgacagccccgcccggagcctggacgagatcgacctgtctgcgttgcgggaccctgccgggattttcgaattggtcgagctcgtcggaaatgggacctacggacaggtttataagggccggcatgtaaaaacagggcagttagccgctatcaaggttatggatgttaccggggacgaggaagaagaaattaaacaggagatcaatatgctgaagaagtactcacatcaccggaacattgccacatattacggagcctttatcaagaagaatcctcccgggatggatgaccagctgtggctcgtgatggagttttgcggcgctgggtccgtgacagatcttattaagaacacgaagggaaacacattgaaagaggagtggattgcgtatatctgcagggagatactgagagggttgtctcacctgcaccaacataaagtcatacatcgggacatcaagggccaaaacgttctccttaccgaaaacgctgaggtgaagctcgttgactttggcgtgtctgcacaacttgaccggaccgtcggaaggagaaacacttttattgggacgccctattggatggcacccgaagtcattgcctgtgacgagaatcccgatgcaacatatgacttcaagtccgacttgtggtcactcggcattacggccattgaaatggctgaaggggcacctcccctgtgcgacatgcacccaatgagagctctgttcctcatccctcggaatcccgctccccggcttaagtcaaagaagtggagtaaaaaattccagagttttattgaatcatgtttggtcaagaaccattctcagagacctgccactgaacaactgatgaagcatccctttattcgagaccaacctaatgaacgccaagttcgaatccagttaaaggaccacattgatagaactaagaaaaaacggggagagaaggatgagactgagtacgagtatagcgggtctgaggaggaagaagaggaaaatgattcaggtgagcccagctcaatcttaaatcttccgggggaatccactctccgacgagattttctccggttgcaactcgccaacaaagagcggtctgaggcactgagacgccagcaactggaacagcagcagagggaaaatgaggaacacaagcgccagctgctagctgaacgacagaagcgtatcgaggaacagaaggagcagagacggcgcctcgaagaacagcaaagaagggagaaagagctcaggaagcagcaggaacgagagcagagacgccattacgaggagcaaatgcgccgagaagaggagagaaggcgagccgaacacgagcaagaatatattcgacgccaactagaggaagaacagcgacagcttgaaatcctgcagcagcagctcctgcacgagcaagctttactgctcgagtacaagcggaagcagctggaggaacagagacaggctgaacgtttgcagaggcagctgaaacaagaacgcgattacctcgtttccctgcagcaccaacggcaggagcaaaggcccgtggagaagaaacctctgtatcattacaaggaggggatgtcaccttcagagaagcctgcttgggccaaggaagtcgaagaacggagtcggttgaacaggcagtcttctcccgccatgccgcataaggtcgccaaccgcatatccgatcctaaccttccacctcgtagcgaatcctttagtatttcaggggtccaacctgcacggacccccccgatgctgcgaccagttgacccacagatcccccatttagttgccgtcaagtcccagggcccggcactgaccgcttcccagagcgtccacgaacagcccactaagggtctgtcaggattccaagaggctctcaacgtgacttctcatcgggtggaaatgccccgccaaaatagcgacccaacatctgaaaacccgcccctccccaccagaatcgagaaatttgacagaagctcctggctccggcaggaggaagatatcccccccaaggtgccccagagaacaacttcgatatcaccagccctagcaagaaaaaatagccccgggaacgggtctgcactcgggccgagactgggaagtcagccgatccgggccagtaacccggacctgcgtcggactgaacccatcctggagagcccgctacagcgcacttcctctggaagttctagttccagtagcacaccctcatcacagccaagtagccaggggggcagtcagccaggctcccaggctggtagttctgagcgaactcgtgtgcgagctaacagcaaaagtgaggggtcacccgttttgcctcacgagcccgcaaaggtgaaacccgaagagagccgcgacatcacccgcccctcacgtcccgctgacttaacagcgttggcaaaggagttaagggagctgcgaattgaggaaaccaaccgacccatgaaaaaggttactgattacagttcaagttccgaggaatcagagagctcagaggaagaagaagaggatggcgaatctgagacccatgacggcaccgtggcagtctcggacatccccaggctgatacctaccggggcccctgggagtaacgagcagtacaatgtaggcatggtaggcacacacgggctggagacaagccatgcagacagtttttcagggagcatttccagggaaggcacactcatgatccgagaaacaagcggggaaaaaaaacgcagtggacatagcgactccaacgggttcgctgggcatatcaacttgcctgacctggttcaacagtcccactctcctgcaggcactccaaccgagggtctcggcagagttagtactcattcccaggaaatggattcagggactgaatacggcatgggctccagcacaaaagcaagctttaccccttttgtggacccccgggtatatcagacttcacctactgatgaagatgaagaagatgaggagagttctgcggccgccctgtttacatccgagctgctgcggcaagagcaggccaagttaaacgaagctaggaaaatatcggtcgttaacgtgaacccgaccaacatccgaccacattctgacacccccgagatcagaaaatacaagaaacgatttaacagtgagatactgtgcgccgcgctgtggggagtgaacctcttggtgggaacagagaatggcctgatgctgctggaccgctctgggcagggaaaagtatataatttgatcaataggcgacgattccaacaaatggacgtcctggaagggttgaacgtccttgtgactatttcggggaagaagaataagttgcgtgtttattacctgagctggctgcggaaccgcatcctgcacaacgaccccgaagtcgagaagaaacaaggatggataaccgtcggagatctcgagggctgcattcattacaaggttgtgaaatatgagcggattaagttcttggttatcgcgctgaaaaacgctgttgaaatctacgcttgggcgcccaaaccctaccacaaattcatggcttttaagagctttgcagacctccagcacaagcccctgcttgtcgatttgaccgtggaggaaggacaacgcctcaaagtgatttttggcagccatacaggctttcacgttatcgacgtcgactctgggaattcttatgatatctacatacccagtcatattcaagggaatattacaccccacgctattgttattctgcccaaaaccgacggcatggagatgctggtgtgttatgaagacgagggggtgtatgtcaacacttacggtcgcattaccaaagatgtggtacttcaatggggcgagatgccgacatcagtggcatatatccactccaaccaaattatgggctggggtgagaaagccattgagatccgctcagtcgagacaggccacctcgacggcgtgtttatgcataaaagagcccagaggctaaagttcctgtgcgaacggaatgataaagtctttttcgccagtgtcaggtccggcgggagctcccaagtgttttttatgacactgaaccgaaattccatgatgaactggtag

SEQ ID NO: 208861 - DNA, 3831 bp, synthetic construct
  misc_feature 1..3831: note = Description of Artificial Sequence: Synthetic coding sequence
  source 1..3831: mol_type = other DNA
atggccagcgacagccccgcccggagcctggacgagatcgacctgtctgcactccgagaccctgctgggatcttcgaactagtggaactggtgggcaacgggacttacgggcaggtctacaagggcagacatgtgaaaaccggacagttagctgctatcaaggtgatggatgttacaggggacgaggaggaggagattaagcaggaaatcaacatgctgaaaaagtactcccaccacaggaacatagccacctactacggagcatttatcaagaaaaatccccccgggatggatgatcagctctggttggtgatggaattctgcggggcgggcagtgtgaccgatttgatcaaaaataccaaggggaacactctgaaggaagagtggatcgcatacatctgccgggagatcttgcggggtctttctcaccttcaccagcacaaggtgatccatcgcgatatcaaaggacagaacgtcctcctgaccgagaacgctgaagtgaagctcgtcgacttcggcgtctctgcacagctggaccgtaccgtcggccggcggaacacctttataggcacaccttattggatggctcctgaggtgatcgcctgtgacgaaaacccagacgccacttacgactttaagtccgatctctggagtctgggcataacggccatcgagatggcagaaggtgccccacccctctgtgacatgcatcccatgcgcgccctgttcctgattcctagaaatccagcccctcgcctcaagtcaaaaaaatggagcaaaaaatttcagtcctttatcgaaagttgtttagtcaaaaaccacagtcagaggccagccacggaacaactgatgaaacatcccttcatacgggatcaacctaatgaaaggcaggtgcgcatccagctcaaagaccacatcgataggactaaaaaaaaacgcggtgaaaaagatgaaacagagtacgagtattccggctctgaggaagaggaggaggagaatgattctggggagccttcctcaattctgaatctcccaggcgaatccacgctaagaagagactttctgagactgcagctggcaaacaaggaaagaagcgaggctctgcggaggcaacaactggagcagcagcagagggagaacgaggaacataagcgccaactgctggctgaaaggcaaaagaggatagaggagcagaaggagcagaggcgccgcttagaggaacaacagcgtcgggagaaggagctgagaaagcaacaagagcgggaacagcgcaggcattacgaagaacagatgagaagggaagaggagcgacgaagggctgaacacgagcaagagtacaagcgtaaacaacttgaggaacaacgacaagccgaaagactgcaacgccaactgaagcaagagcgcgactatttggtcagtctgcagcaccagcgccaagaacagagacccgtggagaaaaaaccgctgtaccactataaggagggcatgagcccatcagaaaagccggcctgggccaaggagattcctcacctcgtggcggtcaagtcccaagggccagccctgaccgcatctcagagtgttcatgagcagcctactaaaggcctgtcgggcttccaggaagctctaaatgttactagccatagagtggaaatgccccgccagaacagcgatccaacaagcgaaaaccctcctttacccactcggatagaaaaatttgaccggtcgagttggttacggcaagaagaggatattcctcccaaggtgcctcaaaggacaacaagcatatcccccgcactggcacggaagaatagccccggaaatggttcagccctcggcccccgcctcggctctcagcctataagggcttcgaaccctgatcttcggaggacagaacccatccttgagagtcctctgcagcgtacatccagcggaagtagttcctcaagctccacaccatcttcccagccatcctcacaaggcggcagccagcctggcagtcaggcgggttcatcagaaagaactagggtgcgcgcaaatagtaaaagcgaggggagccccgtcctacctcacgagcccgcaaaagtcaaacccgaggagtctagggacattactcgcccgtcacgccccgccagctacaaaaaggccatcgatgaggatctcaccgccttagctaaagagctgagggaactgcggatcgaggagacaaaccgccctatgaagaaggtaactgactactcatctagtagcgaagagtcagagtcctctgaggaggaagaagaggacggtgaatcggaaacccacgacggtacagtggcggtgtcagatatcccgcggctcatccccaccggggctcccgggtcaaatgaacagtataacgtcggtatggtcggcacacacggcctggagacttctcacgcagacagcttttctggcagcattagtcgtgagggcactcttatgatacgagagaccagtggagagaaaaaacgcagcggccattccgactctaacggttttgcgggacacattaacctgcctgatctggttcagcaatcacattccccagccggtacacctactgaaggactggggcgagtctcaacccactcccaagagatggacagcggcaccgaatatgggatggggagcagcacaaaggcatcctttacccctttcgtggaccccagagtatatcagacatctccaacggacgaagacgaagaggatgaggagtctagcgcagccgccctctttacgtccgaactcttaaggcaggagcaggcaaaattaaacgaggctaggaagatttctgttgttaacgtcaaccctacaaacataaggcctcactccgacacccccgaaattcggaaatataagaagcgattcaacagcgagattctctgtgcagccctttggggcgtgaacctgctggtgggaaccgaaaacgggctaatgctgttagaccgctccgggcaggggaaggtatataacctgatcaatagacgaaggttccagcagatggatgttttagagggcttgaatgttctcgtgaccatttcaggaaagaaaaacaagctgagggtgtattatctgtcttggctccgcaacaggatccttcataatgatccggaggtagagaagaaacaagggtggataaccgttggagacctagagggctgcattcactacaaagtggttaagtacgagaggatcaagtttctcgtcatcgcactgaaaaacgccgtagaaatatatgcctgggcccccaaaccatatcataaattcatggccttcaagtccttcgctgacctgcagcacaaacctctcttggtcgatctcaccgtagaagagggtcagcgcctgaaagtgatcttcggctcacacactgggtttcacgtgatcgatgtggatagtggtaactcttatgacatatatataccttcccatattcaggggaatattacgccgcatgccattgtgatccttcccaaaacagatggcatggaaatgttggtatgctacgaagatgaaggcgtatacgttaatacctacggacgcattaccaaagacgttgttttgcagtggggagaaatgcccaccagcgttgcctacatccactctaatcagattatgggttggggggaaaaggctatcgagattcggtcggtggagacaggccacctggatggagtctttatgcataagagggcacagcgtctcaagttcctttgtgagcgtaacgacaaggtgttctttgcctctgttcgcagtggaggttcctctcaagtcttcttcatgaccctgaatagaaattcaatgatgaattggtag

SEQ ID NO: 208862 - DNA, 3996 bp, synthetic construct
  misc_feature 1..3996: note = Description of Artificial Sequence: Synthetic coding sequence
  source 1..3996: mol_type = other DNA
atggccagcgacagccccgcccggagcctggacgagatcgacctgtccgccttacgggatcccgccggcatatttgagcttgtagaactcgtgggcaacggaacctacggacaggtctacaaaggccgacatgtgaagacggggcaactggctgcgatcaaagtgatggacgtgacaggggacgaggaggaggagatcaagcaagagattaacatgttaaagaagtactcccaccaccggaacattgccacctactacggcgcgtttatcaaaaagaatcctccgggtatggacgaccagctatggttggtgatggagttctgcggcgccggctctgttacagacctaattaagaacaccaaaggtaatacccttaaggaagaatggattgcctatatctgcagagagatcttgcgcggccttagccacttgcatcaacataaggttatccatcgggatatcaaaggacagaacgtcttgctcaccgagaatgctgaagtgaaactggtggacttcggggtgtcagctcagttggaccggacagtcgggcggagaaatacattcataggaactccatactggatggcaccagaggtgatagcgtgtgacgagaaccctgatgctacgtatgatttcaagtcagatctgtggagcctgggcatcaccgccattgaaatggccgaaggggcacccccattatgcgatatgcatcctatgcgcgccctgttcctaattccaagaaaccccgctcctagacttaaatctaaaaagtggtccaaaaagttccagtcctttatcgaatcctgtctagtgaagaaccactcacagaggcccgccactgaacaactcatgaagcacccatttattcgggatcagcctaacgaacgccaggtcaggatccagctcaaagaccacatcgatcgtaccaaaaagaagcggggggaaaaggatgagactgaatacgagtactctggaagcgaagaagaggaggaggagaatgattccggagaacctagttcgattttgaacctacccggcgagtcaacactcaggcgtgactttttaagacttcaactggcgaacaaggaacggagcgaagctcttaggagacaacagctggagcagcaacagagagagaatgaagagcacaagcggcagctgctcgccgaaaggcagaagaggatagaagagcagaaggagcaaagacgcagattggaagaacaacagcgaagagagaaggagcttcggaaacagcaggaacgcgagcaaaggcgccattacgaagagcagatgcggagggaagaggaacgacgaagggcggagcatgagcaggagtacaagagaaaacaactggaggaacaaagacaggccgaaaggcttcagaggcagctgaagcaggagcgcgactatctcgtgagtctccaacaccagcgacaggagcagcgtcctgtcgaaaagaagcccctataccactacaaagagggcatgagtcccagcgagaaaccggcgtgggcgaaagaggtagaggagcgtagccgactcaataggcagagcagtccagccatgcctcacaaggtggcgaataggatctctgatcctaatctcccacctcgctctgaatcattttctataagcggggttcagcccgctaggacacccccaatgttgagacccgtggaccctcaaataccccatttggttgcggtgaaatcacagggtcctgcacttacagcatctcaaagcgtgcatgagcagcccactaaaggactgagcggcttccaggaagctctaaacgttacgtcacatcgtgtggaaatgccaagacaaaattccgaccccacctccgaaaatccgcccttaccaactcgaatcgaaaaattcgaccggagtagttggcttaggcaggaggaggacattccacccaaggttccgcagaggacaacttctatctcccccgccctggctcgcaagaattcccctgggaacggtagtgcactggggcccagactgggctcacagccgatccgcgcgagtaacccagacctgaggagaacggagcctatcctggagtctccattgcagcggaccagtagcgggtcatcgtcttcctccagcactccttcttctcagccaagctcccagggtggaagccaacctgggtctcaggccggctccagtgagcggaccagggtacgcgcaaactccaagtccgagggcagccctgtcttgcctcacgaacctgcaaaggtaaagcccgaggagagtagggacatcactcggcccagcagacctgccagctacaagaaggccatagacgaagatctgaccgctctggcgaaggaacttagggagctccggattgaggagaccaacagacccatgaaaaaggtaacggactattccagctcgtctgaagagtctgagtcatccgaggaagaagaagaggacggggagtcagaaacccacgatggaaccgtggccgtttctgacattcccagactcatcccgaccggtgctcccggctccaacgaacagtacaatgtgggaatggtcggtacccacggtctcgagacaagccatgccgacagtttcagcgggtccatatcccgggaggggaccctcatgatcagggagacaagcggggaaaaaaaacgaagtggacactctgatagtaatggattcgcagggcacattaatcttcctgacctggttcagcagtctcattcaccagcagggacacctacagaggggctgggcagggtgtccacacactcacaggagatggactccggtacagagtatggcatggggtcatctacaaaagcctctttcaccccatttgtggacccacgtgtgtatcaaacttcaccaacggacgaagacgaggaggatgaagagagctcggccgcagccctattcacgtccgaattgctacgacaagagcaggccaagcttaacgaggcccggaaaatctcagtggtcaatgttaatccaacaaatatcagaccccactctgatacacctgaaattcgtaaatacaagaagcggtttaactcagaaatactgtgcgccgctctctggggggtgaaccttcttgtcggcaccgagaacgggcttatgctcctggaccgcagcggtcaggggaaagtgtacaacctgatcaatcgacgcaggttccaacagatggatgttctagagggcctcaatgtgctggtgactatatcaggcaagaaaaacaagcttcgtgtctactacctgagctggctgagaaacagaatactgcataacgaccctgaggtggagaaaaaacagggctggatcacagtcggcgatctagagggctgcatccactacaaggtggttaagtacgagaggattaaattcctcgtgattgccctgaaaaacgccgtggagatttatgcttgggcaccaaagccctaccacaaatttatggcgtttaagtctttcgcagatcttcaacataagcccttgctggtggatctgactgtggaagagggccagaggctgaaggttatatttggttcccatacaggcttccacgtgatcgacgttgattcagggaatagctatgacatctatataccctcccacattcaaggtaatattaccccacatgccattgttattctcccaaaaaccgatggcatggagatgctggtgtgttatgaagacgagggagtatatgtcaacacatatgggcggattaccaaggatgtagtccttcagtggggggaaatgccaaccagtgtggcttacatccacagtaaccagatcatgggatggggggagaaagcgatcgagattcggagtgtggaaacgggacacctggatggggtgttcatgcataaacgggcacaaagactcaaattcctgtgtgaaaggaacgacaaggttttctttgcaagcgttcgcagcggaggatctagtcaggtgttttttatgaccctgaatagaaacagtatgatgaattggtag

SEQ ID NO: 208863 - DNA, 4017 bp, synthetic construct
  misc_feature 1..4017: note = Description of Artificial Sequence: Synthetic coding sequence
  source 1..4017: mol_type = other DNA
atggccagcgacagccccgcccggagcctggacgagatcgacctgtccgctctgagagatcccgctggcattttcgaattagtggagttagtgggaaacgggacttacgggcaagtctacaagggtcgccatgtgaagaccggtcagctggcggcaatcaaagtgatggatgtgaccggggacgaggaggaagagatcaaacaggaaatcaacatgcttaagaagtattctcaccatagaaatattgcgacttactatggtgctttcattaagaagaatccgcctggcatggatgatcagctatggctcgtgatggaattctgcggagccgggagcgtgaccgatttaataaagaatacgaagggcaacacattaaaagaagagtggattgcttacatatgtcgagaaattttgcgcggactatcacatctgcaccagcataaagtgattcatcgcgatatcaaggggcagaacgtgctcctgaccgaaaacgcagaggtgaagatcgtagattttggggtgagtgcccagctggatcggactgtggggcgcagaaatacgttcatcggaaccccctactggatggcaccagaggtgatcgcctgcgatgaaaatccagacgctacttacgacttcaaaagcgacctttggagtttaggcatcaccgcaattgagatggccgagggggctcctcccctctgcgacatgcatcctatgcgcgcactgttcctcatcccccgcaaccccgctccacggctgaagtcaaaaaaatggtcaaagaagttccagtcattcatcgaatcctgcctggtgaaaaaccactcccagagaccagccaccgagcaattgatgaaacacccctttatccgcgaccagcctaatgaacggcaagttcggatacagctgaaagaccatatagatcggactaaaaagaaacgtggagaaaaggatgagactgagtatgaatactccggatcagaggaagaggaagaggaaaacgacagcggagaaccctcgtcgatcctgaatctacctggggaaagtaccctccgccgcgattttttgcggcttcaactggctaacaaggaacgcagtgaagctctcagacgccagcagttagagcaacagcagcgcgaaaacgaagagcataaaaggcaactccttgctgagcggcagaaacgaatagaggaacagaaggaacagcgcaggcgattggaggagcagcagaggcgcgaaaaggaacttcggaagcagcaagagcgcgagcagcggaggcattatgaagagcagatgcgaagggaagaagaacggcgacgcgccgagcatgaacaggagtacaaacgtaaacaactcgaggagcagcgccaggctgagcgtctccagcggcagctgaagcaggagcgggattatctggttagtcttcaacaccaaagacaagagcagaggccagtagagaaaaaacccttgtatcattacaaagaaggtatgagcccttcagaaaaacctgcctgggccaaggaagtcgaagagcggagcaggctgaacaggcagtcatcacctgcaatgcctcacaaggtggccaacaggatctctgaccccaatctgcctcctcggtccgagagcttctcaatttctggcgtgcagcctgctcgtactcctcctatgctgagaccagtggatccacaaatcccacacttagtagccgtgaagagccagggacctgccctaacagcatctcagtccgtccacgagcagccaactaaaggactgtctggcttccaagaggccctcaatgtcacgtcccatcgggtagagatgccaaggcagaatagtgaccccacaagtgagaatccccccctgcccacacggatcgagaagtttgataggagttcctggctgaggcaggaagaggacatccctccaaaggttcctcagcgcaccacgtcgataagtcctgccctggctagaaagaatagccctggcaatgggagcgcccttgggccaagactcggttctcagcccatcagggcaagtaatccagatctgcgacgtactgagcccattctggagtctccacttcagcgtacgagctcaggttcgagttcgtcctcctccacacctagcagccaaccaagcagtcaaggaggctcccagcctgggtcacaagccggaagctcagagcgcacgagggtgagagcgaatagtaaatcagaagggagcccagtcttgcctcatgagcccgctaaagtgaaacctgaggaatcacgggatatcactaggccatctcgaccagcagtatctgctttcctctcgaaaagctttgaattgttaatctatcaggatttgaccgcattggccaaagagcttcgagagctgaggatcgaagaaactaacaggcctatgaagaaggtgacggactactcttcctcctcagaggaaagtgagtcctcggaagaggaggaggaagacggcgagtcagaaactcatgacggaaccgtggccgtgtctgacatcccaagactgatccccactggcgcgcctggatcgaatgagcagtacaacgttggcatggtgggaactcatggtctggaaacctcccatgcagacagcttctccgggagcatcagccgcgaaggcaccctaatgataagagagacttcgggcgaaaagaagcggagcggccactcagactccaatggattcgctgggcatatcaacttgccggatctcgtccaacaatcccacagtccagctggtacacccaccgagggattaggcagggtgtcaacacattcacaggagatggatagtgggacagagtatggcatgggaagtagcaccaaagcgagttttaccccgttcgttgatccaagagtatatcagacatcgcccaccgacgaagacgaggaggacgaagagtcttcagccgcagccctgtttactagtgagctgctcaggcaggagcaggcaaagcttaatgaggctcgcaagattagcgtcgtgaatgtcaaccctaccaatatccggccccactcagacacccccgagatcagaaaatataagaagcggttcaattcggagatactatgcgcagccttgtggggcgtcaatctacttgtgggtacggagaatggcctaatgctcctcgataggtcagggcagggaaaagtttataacttaatcaacaggcgtcggtttcaacagatggacgtgctagaaggactcaacgtgctagtgacaatcagcgggaaaaagaacaaactgcgagtgtattacttatcttggttgaggaacagaatcctccacaacgaccccgaggtcgaaaagaagcagggctggatcaccgtcggggacctcgaagggtgcatccactataaagtcgtcaagtatgaacgaatcaagttcctggtgattgctctgaaaaatgccgtggagatctatgcctgggcacctaagccttaccacaaattcatggcttttaagtctttcgccgatttacagcataagccactgctggtagacctcacagtggaggaagggcagagactaaaggtcatatttggcagccacactggatttcacgtgatcgatgtggacagtgggaactcatatgacatctacatacctagccacatccagggtaatattactccacacgcaatcgtgatcttaccaaaaacagacggcatggagatgttggtgtgttatgaggacgaaggagtatatgtcaacacatacggaagaatcacaaaagacgttgtcctacagtggggtgagatgccaacctcagtggcttatatccactccaatcagattatgggctggggcgagaaagcgattgagatcaggtccgttgaaactggccacctggacggagtgttcatgcacaaacgggcgcagagactcaaattcctgtgtgagagaaacgacaaagtgttttttgcttctgtccggagcggtggatctagtcaagtgtttttcatgactttaaatcggaactcgatgatgaattggtag

SEQ ID NO: 208864 - DNA, 4083 bp, synthetic construct
  misc_feature 1..4083: note = Description of Artificial Sequence: Synthetic coding sequence
  source 1..4083: mol_type = other DNA
atggccagcgacagccccgcccggagcctggacgagatcgacctgtctgccctgagagacccagctggaatcttcgagctcgtggagctggttggaaacggcacctatggccaggtgtacaaaggccgccatgtgaaaactggccagctcgctgctattaaagtgatggatgtgaccggggacgaggaggaagaaataaagcaagaaattaacatgctcaagaaatattctcaccataggaatattgccacatactacggagcatttatcaaaaagaatcctcccggtatggacgaccaactctggctggtcatggagttttgtggggccggcagtgtcaccgacctcatcaaaaataccaaaggaaataccctcaaagaagagtggatcgcgtatatatgtcgagagatcctgaggggtttatcccacctgcaccagcataaagttatccaccgtgatattaaaggccagaacgtgctacttaccgaaaacgccgaagtaaagctggtggactttggagttagtgcgcagttagataggaccgtgggacggcgcaacaccttcattgggacaccatattggatggcccctgaggtaatagcttgcgatgaaaaccccgatgcgacctatgattttaagagcgatctgtggtccctgggtattaccgccatagagatggccgagggagctccccccctgtgtgacatgcatcccatgagggctctgttcttgattccacggaacccggctcctagactaaagtctaagaagtggtcaaagaagtttcagtccttcatcgagtcatgtctggtgaagaaccacagccagcgaccagccaccgagcaactgatgaaacacccattcatccgagatcaacctaatgagaggcaggtccggatccaattaaaagaccatattgacaggacaaagaagaagcggggggagaaggatgaaactgagtacgagtactctggatcagaggaggaggaagaagaaaacgattccggagaaccaagcagcatcctcaatttgcccggcgagtctaccctcaggagagacttccttaggctgcagctcgcgaataaagagaggtccgaggcactgcgcaggcagcagctggagcagcagcagcgcgagaatgaagaacataaaagacagctgttagccgaacggcagaagcgcatcgaagagcaaaaagagcagaggcgtcgcctggaggaacagcagcggagggagaaagaactgcgcaaacagcaagagagggagcagcggaggcactacgaggagcagatgaggcgagaggaggaaaggcgcagggcagagcacgagcaagaatacataagaagacaattggaggaggaacaacgtcaactggagatcttacagcaacaattactgcacgaacaggccctcctgctggaatataagcgaaaacagttggaagagcagcggcaggcggagagactgcagcgccagctgaaacaagagcgagactatcttgtgagcttgcagcaccagcgccaagaacagcgacctgtggagaaaaaacccctgtaccactataaggagggcatgtctccaagtgagaaaccagcgtgggccaaagaagtggaagagcgatcacggctgaatagacagagctctccagctatgccccacaaggtagcaaatcgcatctccgaccccaatctcccccctcggtctgagtctttttccatcagcggagttcagcctgcgagaaccccccctatgctgcgaccggtcgacccacaaattccacacctggtcgccgtcaagtctcaagggccagccctgacagcctcccagagcgttcacgagcaaccaacaaaagggctgtccggcttccaggaggcgcttaacgtgacaagccaccgggttgagatgcctagacagaactcagaccctacgtcagagaacccacctctgcccacccggatcgagaagttcgatagaagttcttggctccgccaggaggaagatattcccccgaaggtgccacagcggactacctccatttcccctgcactggcgaggaagaattcgcccggaaatgggtctgcactgggcccacgccttggctcgcaacccatacgggcttcgaaccccgatttgcgcagaaccgagcccatcctggaatctccactgcaacggacaagcagtggttcgagctccagcagctccaccccatcttctcagccctcgtcccagggcggtagccaaccgggctctcaagccggaagtagcgaaagaacacgtgtgcgagctaatagcaaatccgaaggctctcctgttctacctcacgagccagccaaagtgaaacccgaagagagtcgggacatcactcgcccatcccggcccgccagctataaaaaagctatagacgaagatttaactgcactcgcaaaggaacttcgcgaactccgcattgaggagaccaacagacccatgaaaaaagtgaccgactactcttcatccagcgaggaatctgaaagttctgaggaagaagaagaggatggagaatctgagactcacgacggcaccgtggccgttagcgacattccaagactcataccaacaggtgccccgggttccaatgaacagtacaatgtgggtatggtcgggactcatgggttggaaacttcccatgccgactcattttccggcagtatcagccgcgagggcaccctcatgattagggaaacgagcggagagaagaagcgttcggggcattccgatagcaacggcttcgcaggtcatattaacctccctgacttggtgcaacagtcccacagccctgctgggacacctacagagggattggggcgagtgtcaacccactcccaggagatggacagcggcaccgagtacggcatggggtcctccaccaaagctagttttactcccttcgttgacccaagggtctatcagacttcacctaccgacgaggacgaggaggacgaagaaagttccgccgctgccctcttcacgtccgaattgctcagacaagagcaggcaaaacttaacgaggctcggaagatttccgtggttaacgtgaatccaaccaacatccgcccgcattccgatactcccgagataaggaagtataaaaagcgctttaattctgagatcctttgcgctgctctgtggggggtaaatctactggtgggtactgagaatggcctaatgttactggacagatctggtcaagggaaggtttataatctgattaatcgcaggcggttccagcaaatggacgtcctagaggggctgaatgttttggtgacaattagcggcaaaaaaaacaaactaagggtatattacctctcttggctacggaatcggattctccacaatgatcccgaggtcgagaaaaagcagggttggattacagtaggagacttagaaggatgtatccactacaaggtggtgaagtatgaaaggatcaaattcctggtgatcgctttgaaaaatgctgtggaaatatacgcctgggctcctaagccctatcacaagttcatggcatttaagagcttcgccgacctccagcacaagccgctgctcgtagacctgacagttgaagagggacaaagattgaaggttatttttggctctcatactggctttcacgtcatcgacgtggatagcgggaactcatatgatatatacatcccttctcacatccaggggaacatcacacctcatgccatcgtaatccttcccaaaacggacggtatggaaatgttagtgtgctacgaggatgagggcgtttatgtgaatacatacggaaggatcacaaaagatgtagtccttcagtggggtgaaatgcccacatctgtggcttatatccattccaaccagattatgggttggggtgaaaaggccatcgaaatcagaagtgtggagaccggccacctcgacggcgtctttatgcacaagcgggcccagcgcctaaagtttctctgtgaaaggaacgataaagtgttctttgcgagcgtgcgttctggcggctcgagccaggtctttttcatgacccttaatcgtaattccatgatgaactggtag

SEQ ID NO: 208865 - DNA, 3894 bp, synthetic construct
  misc_feature 1..3894: note = Description of Artificial Sequence: Synthetic coding sequence
  source 1..3894: mol_type = other DNA
atggccagcgacagccccgcccggagcctggacgagatcgacctgtccgctctgcgcgacccagctggcattttcgagctagttgaactggtgggcaacggaacctacggccaggtgtataaaggccggcacgttaagaccgggcaactcgcagccatcaaggtgatggatgttacgggcgacgaggaagaggagatcaagcaagagattaatatgctaaagaagtactcacaccaccgcaatatcgctacctactatggcgcgttcataaaaaaaaatccacccgggatggacgaccagctctggctggtaatggagttctgtggggctggatctgttacagacctgattaaaaacactaaaggaaatacactgaaggaagagtggatcgcctacatttgtagagagatcctgcgtgggctcagccacctgcatcaacacaaagtcatccatcgagatattaaaggccaaaacgtcctgctgactgagaatgccgaggtaaagctcgtcgacttcggggtgtctgcccagctggaccgcaccgtgggtcgcagaaataccttcattggaaccccttattggatggctccggaggtaatcgcttgcgatgaaaatcccgacgccacttacgactttaaatcagacctctggagtcttggcataactgctatcgaaatggctgagggcgctccccccttgtgcgacatgcatccaatgcgagccctctttctcattcctcggaacccggcccctcgcctgaagagtaaaaagtggtcaaagaagtttcagagctttatcgagtcatgtctggtgaagaaccactcacaacggcctgctactgaacagctaatgaaacatcccttcataagggaccagcccaacgaaaggcaagtgagaatccagctgaaagaccacattgacagaacaaagaagaagcgcggcgagaaagacgaaaccgaatacgaatacagtggaagtgaggaagaagaggaggagaatgactcgggcgaaccctccagcattctgaacttgcccggggagtcgacgctacggagggactttctgaggcttcagctggccaacaaggagcggtctgaagccctgcggcggcagcaactcgagcagcagcaaagggaaaacgaggagcacaagagacagctcctcgcagaaagacagaagcgcatcgaggaacaaaaagaacagaggcgcagacttgaagagcaacagaggcgcgagaaagagcttagaaagcagcaggagagagagcagagacgacactatgaagagcagatgcgcagggaggaggagcggagaagagcggaacatgagcaagagtacatccgtagacagcttgaggaagaacaacggcagttggaaattctacagcagcagcttctgcatgaacaggcactactcctagagtacaagcggaagcagcttgaggaacagagacaggccgaacggctgcagcgacagctgaagcaggaacgcgactacctcgtcagcttgcagcaccaaaggcaagaacagcgtcctgttgagaagaaacccctgtatcactacaaagagggtatgtctccgagcgaaaaaccagcttgggcaaaggagatccctcatctggtagctgtcaagagccagggacccgcattgacagccagccaatctgttcatgaacagcccactaaaggcctgagcggtttccaggaagctctgaatgttacctcgcatagggtcgagatgcctcggcagaactccgatcctacctccgaaaatccgccgctgccgaccagaatcgaaaaattcgatagatcaagttggctccgccaagaggaagatatcccacccaaggtgcctcagcggaccacttctatctcgccagctctggctagaaaaaatagccccggcaatggctcagccctcgggccacgacttggctcacagccaataagggcctcaaatcctgacttgcgtcgaactgagccgatcctcgagtcaccgttacagcggacctcttctggcagttcgtctagttcttccactccttcttcccagccatcttcgcagggaggatcacagcccggtagccaggctggaagtagcgaacgtactcgggtgagggcaaattctaaaagtgaaggatcccctgttctccctcacgagcctgctaaagtcaagcccgaggaaagccgagacatcacacgtccttctagaccagcggacctcacagcccttgccaaggagctccgcgagttgagaatcgaggagaccaatcgtccaatgaagaaggtgactgactactcaagtagttccgaagagtctgaatcttctgaggaagaagaggaggatggggagagcgagacccacgatggcactgtggccgtgtccgatattccccgactaatccccactggagccccagggagcaatgagcagtataatgttggcatggtcggtactcacggtctggagactagccacgcggacagtttctctggctctataagccgcgagggaactctgatgatccgtgagactagtggagagaagaagaggagcgggcactccgacagcaacggtttcgccggacacattaatctgccagacctggtgcaacagtctcactcccccgcaggaacaccgacagagggactgggccgagttagcacccatagccaggagatggactccggaactgaatatggtatgggaagcagcaccaaagcgagcttcacccctttcgtcgacccgcgggtgtatcagactagcccaactgatgaggacgaggaagatgaggagagctcagctgcagctcttttcactagcgaactgctgcgccaggagcaggccaagctaaacgaagctagaaagatcagcgtcgtgaacgttaaccctacaaacattaggccccacagcgacacacctgagatcagaaaatacaagaaaagatttaattcagaaattctgtgtgccgctttgtggggggtcaatctcctggtcgggactgagaatggattgatgctgctcgacaggagtgggcagggaaaagtgtataatctgattaatcgccggcggttccagcaaatggatgttctggaaggtcttaacgtattagtgacgatctctgggaaaaagaacaaactgagggtgtactatctttcctggctgaggaaccgcatccttcacaacgacccggaggttgaaaagaagcagggttggattacagtaggcgatctggaaggatgcattcattacaaagtggtaaagtacgagcgcatcaagttcctagtcattgccttgaaaaatgctgttgaaatctacgcttgggctcctaagccctaccacaaattcatggccttcaagtcctttgcggatctccaacataaacccctcctcgtggacctgacagttgaagagggtcagcggctcaaggtaatctttgggtcccatactggctttcacgtcatcgatgtggacagcggtaacagctacgatatatacatccccagccatattcagggcaacatcacacctcacgccatcgtgatcctgccgaagaccgatgggatggagatgctggtttgctacgaggatgagggcgtgtacgtaaacacctatggacgtattacaaaagacgttgtgcttcagtggggagaaatgcccacaagcgtggcctacatacattcgaaccagatcatggggtggggggaaaaagctatagaaatcagaagcgtagagaccggccatctcgatggggtctttatgcataagcgagcgcagcgccttaagtttctgtgtgagcgcaatgataaggttttctttgccagtgtccgatccggggggtcttcccaagtgttttttatgactcttaatagaaacagtatgatgaactggtag

SEQ ID NO: 208866 - DNA, 3972 bp, synthetic construct
  misc_feature 1..3972: note = Description of Artificial Sequence: Synthetic coding sequence
  source 1..3972: mol_type = other DNA
atggccagcgacagccccgcccggagcctggacgagatcgacctgtccgccttgcgggaccccgccgggatttttgagcttgtggagctagtgggcaatggaacatacgggcaagtatataaagggcgccatgtcaaaactggacaactcgcagcaattaaggtgatggacgtcacaggtgacgaagaggaggaaatcaagcaagagatcaatatgctgaaaaagtatagtcatcaccggaatatcgccacttattatggcgcttttataaaaaaaaatccgccagggatggacgaccagctctggctggtgatggagttctgcggagccggttcagtgaccgatcttatcaaaaacacaaagggcaacacactgaaagaggagtggatcgcctacatttgccgggaaatcctgcggggactgtcacatctgcatcagcataaggttattcatcgcgatataaaggggcagaatgtgctactcaccgaaaacgctgaggttaaattggtggattttggagttagcgcacaactggaccgtacagtagggagaagaaatacttttatcgggactccatactggatggcacccgaagtcatagcctgtgacgagaaccccgacgccacctatgattttaagtccgacctgtggtcgctgggtattacagccattgaaatggccgaaggagccccacccctgtgtgacatgcatccaatgcgagccctgtttttgatcccgcgtaatccggctccccggcttaaatcaaagaaatggagcaagaagttccagtcttttattgagtcctgcttggtcaaaaaccacagccagcgtcccgcaacggagcaattaatgaagcatccttttatccgcgatcagcccaatgagagacaggtgaggatccagctcaaagatcacatagaccgcactaaaaagaagaggggcgaaaaagatgaaacagagtacgagtacagcggatcggaggaggaagaagaggaaaatgatagcggtgagccgagcagtatcctgaatttgcctggcgagtctaccctgcgtcgggatttcttgcgcttacaactcgctaataaggagcgatctgaagccctcaggagacaacagctggagcaacagcagagggagaatgaagagcacaagcgccagctattagcagaacggcagaaaagaattgaagaacagaaagagcagagacggaggcttgaggagcaacaacgccgggaaaaagagctccgcaaacagcaggagagagaacagcgacgccactacgaagaacagatgaggcgtgaggaggagcgcaggagagccgagcacgaacaggagtacaaacggaaacagctcgaagagcaacggcaggccgagcggctacagcgccagctgaagcaggaacgggactacctggtaagtctgcagcaccagaggcaggaacagagacctgtggaaaagaaacccctgtatcactacaaagagggaatgtccccatccgagaagcccgcgtgggctaaagaggtggaagagcggtcaagactgaatagacaaagcagccctgccatgcctcataaagttgccaatagaatttccgacccaaacctgccaccaaggagcgagagcttcagtatcagcggggtgcagccagctcggacaccaccaatgctccgccctgttgatcctcagatccctcatctagtcgctgtgaagtcccaggggcctgctctcacagccagccagtctgttcacgagcaacccacaaagggcctctcaggcttccaggaagccttgaatgtcacatcacacagggtggagatgccccggcaaaattccgatccaacttctgaaaacccgcccctcccaacgcggattgaaaaatttgacaggtcttcctggttgaggcaggaggaggacatccccccgaaagtcccacagaggaccacctccatttcacccgctttagcaaggaaaaattcacctggaaatggatcagcccttggacccaggctgggctcccagcctataagagcatcgaaccctgaccttagaaggactgagcctattcttgaatccccactgcagaggacaagctctggcagcagcagttcaagcagcacaccaagctcccagccgagtagtcaggggggatcacagcctggaagccaggccggcagcagcgaacgtaccagagtcagggcgaactcaaagtcggaaggatctcctgtgctcccgcatgagcccgccaaagtcaaaccggaggagtctcgcgacattacacggccttcacggcctgctgacctcaccgcccttgcaaaggaattacgggagctgaggattgaggaaaccaatcgtccaatgaaaaaagtgactgactattcttcatcatctgaggaaagcgagagcagcgaggaagaggaggaagatggagagtcagaaacccatgatgggacggtggccgtgtctgacatcccaagattaatacccactggagcgcctggaagtaatgagcaatacaatgtaggcatggtgggtacacacggccttgaaacctcacatgctgactccttcagcggaagtattagtcgggaagggacccttatgatcagagagacctcaggcgaaaaaaaacgctccggtcatagtgatagtaacggctttgcgggccacataaacctgccagacctggtgcagcagtcgcatagtcccgctgggactcccacagagggcctgggcagggttagcacacacagccaggaaatggattcgggcaccgaatatggtatgggctcgtccactaaggccagcttcacgcctttcgtcgaccccagggtgtatcagacttcaccgaccgatgaggacgaggaggacgaagagtctagtgccgccgcactttttacaagcgagctcctccggcaggagcaggccaaacttaatgaggcaagaaagatatctgttgtgaatgttaatccaactaatattagaccccatagcgatactcctgaaatccggaaatataaaaaacggtttaatagtgagatattgtgcgccgccctgtggggcgtcaatctcttagttgggaccgaaaatggcttgatgctgctcgacagatccggacaggggaaggtgtacaacctgatcaatcgccgcaggtttcagcagatggatgtgctcgaggggctgaacgttctggtgaccatctccgggaaaaagaataagcttcgggtatattatctgtcttggctgagaaataggatcctgcataacgaccccgaggttgagaagaagcaaggctggatcaccgtgggggacctcgagggatgcattcattataaggtggttaaatacgaacggatcaagtttctggttatcgccttaaaaaacgccgtagaaatttacgcgtgggccccgaagccttaccataagttcatggcttttaaatcattcgccgacttgcagcacaagcccttacttgtggacctcactgtggaagaaggacaaaggctgaaggtgattttcggatcccatactggtttccacgtcatcgatgtggactctggaaatagttatgatatctatatcccgtcgcatattcagggcaacatcactccccacgccatagtcatcctccctaagacagacggcatggaaatgctggtgtgctacgaggacgagggagtttatgttaatacatatgggaggattacgaaggacgtggtcctgcagtggggcgagatgccaacatccgtcgcctatattcatagcaaccaaattatgggctggggcgaaaaagcgattgaaatccgttccgtcgagaccggtcacctcgacggcgtgttcatgcacaaaagagcccaaagactgaagtttctgtgtgaacggaacgacaaggtgtttttcgcctccgtaagatccggagggagttctcaggttttttttatgacactgaaccggaactccatgatgaactggtag

SEQ ID NO: 208867 - DNA, 3807 bp, synthetic construct
  misc_feature 1..3807: note = Description of Artificial Sequence: Synthetic coding sequence
  source 1..3807: mol_type = other DNA
atggccagcgacagccccgcccggagcctggacgagatcgacctgagcgccctccgggatcccgccggcatttttgagctagtggaactggtcggtaatggaacctatggacaagtgtacaagggccgccacgtgaaaaccggtcaactagcagccatcaaagtgatggacgtgaccggggatgaggaggaggaaataaagcaggaaatcaacatgctcaagaaatactcacaccaccgcaacatcgccacatattatggggcctttatcaaaaagaatcccccagggatggacgatcagttgtggctggtgatggaattctgtggggcgggctcagtgacggatttaatcaagaacacaaagggcaataccctgaaagaagaatggatcgcatacatatgtcgagaaattctgagaggactttctcatctgcatcagcataaagtcatccaccgagacatcaagggacaaaacgtcctcctcacagagaacgcagaggtcaaactggtcgatttcggagtgtcagcccaactagaccggacagtcggtcggcgcaacaccttcattggaaccccatattggatggccccagaggtgattgcctgcgacgagaatcccgatgccacctacgatttcaaaagcgacctgtggagtctcggaattacagccatagagatggccgaaggggcacctccactctgcgacatgcatccaatgagggcccttttcctgattccacggaaccccgccccccggctcaaatctaagaagtggtccaagaagtttcagtccttcattgagagttgcctagtcaagaatcactcacagcggcccgctaccgagcagctaatgaaacacccttttatcagagaccagcctaacgagcgacaggtccggattcagctcaaagatcacatcgaccgcaccaagaaaaaaagaggtgagaaggatgaaacagagtacgaatacagtggatccgaagaggaggaagaggagaatgacagcggagaaccttctagtatactgaacttgccaggggagagcaccctgcggagagactttctgcgtctgcagttggccaacaaggaaaggagcgaggccctgcgtcggcagcagttagagcaacagcagcgcgagaatgaggaacacaagaggcagctgctggccgagcggcagaaaagaatagaagaacagaaggaacagcgaaggcggctcgaggaacagcaacggagggagaaggaacttaggaagcaacaggagagagagcagcgacgacactacgaggaacaaatgcgtcgcgaagaagaaaggaggcgagcagagcacgaacaggaatacaaacgaaaacagctcgaggagcagagacaggcagagcggctccaacgacagctgaagcaggagcgcgattatttggtgagcctccaacaccagagacaggagcagagacctgtcgagaaaaaaccactttatcactataaagaaggcatgtccccatctgaaaagcctgcctgggccaaggagatcccccacctggttgcagtgaagtctcagggacccgctctgaccgcttctcagtcggtacatgaacagccaacgaagggattgtcggggttccaggaggctttgaacgtgacttctcaccgcgttgagatgccaaggcagaactctgatcctacgagcgagaatccccctttgcccacccgaattgagaagttcgaccgaagtagttggttgcggcaagaggaggacatacccccaaaagtcccccagagaactacgtctatcagccctgctcttgctcgcaagaattctcctggaaacggctccgctcttggccccagattaggcagccagccgattcgtgcgagcaatccggatctgcgcaggactgagcctatactggaatccccacttcagcggacctcctccggatcctcctcaagctccagcactccttcgagtcagccgtccagccaagggggatcccaaccgggctcgcaggcaggaagcagcgaaagaaccagggtaagagccaactctaaatccgagggctcacccgtgctacctcatgaaccggctaaggtgaagcctgaggaaagccgtgatattaccagaccatcacggccagctgatctcacagcgctggcaaaggaattacgggagttacgaattgaggagactaacagacccatgaaaaaagttactgattactcttcttcttccgaagaatctgagagctccgaagaagaggaagaagatggagaaagcgaaactcatgatggcacggtagccgtatccgatatccctcgattgatccctaccggtgcccccgggagcaatgagcagtacaatgttgggatggtcggcacccacggtttggagactagccacgccgactcattttccggttccatttcgagagagggtaccctaatgattcgcgagaccagcggtgagaagaagagaagtggccattcagactcgaatgggtttgctggtcatatcaatctaccagatctggtacagcagtctcactccccagctgggacgcctaccgagggcctgggcagggtatcgactcacagccaagaaatggactctggcaccgagtatgggatgggtagctccacaaaggcctctttcactccgttcgtggacccacgagtttaccagaccagcccgaccgatgaggacgaggaggatgaggagagcagcgcggccgcattatttacctccgaactgctgagacaagagcaggcaaagctaaacgaggccaggaagatctcagtggtcaatgtgaacccaaccaatatacgcccccatagtgacacccctgagatcaggaaatataagaaacgcttcaactccgaaatcctctgcgcagctctctggggcgttaatctgctcgtcgggactgaaaacggtcttatgcttctggacagatccggacagggaaaggtctataatctgatcaaccggagaagattccagcaaatggatgtgcttgaaggactgaatgtcctggtgacaatctcagggaagaaaaacaaactgcgtgtatattatctgagctggctgaggaatcgaatcctgcataatgaccctgaggttgaaaagaaacagggttggattactgttggagatctcgagggatgtattcattataaggtcgtaaagtacgaacggatcaaattcttggtcattgccctcaaaaacgctgtggagatttacgcatgggcaccaaagccataccacaagttcatggcttttaaatcttttgcagatctgcaacacaaacccctgttagtcgatttaacggtggaggaaggacaaagactgaaggtcatatttggctctcacacaggatttcatgtgattgatgttgattctgggaattcttatgacatctatatcccatcacacatccagggaaacatcacaccccatgctatagtaatcttgcccaaaacagacggtatggagatgctagtttgttacgaggatgagggagtctacgtaaatacgtatgggaggatcacgaaagacgtcgtgttacagtggggcgagatgcctacatcggttgcatacatccatagtaatcagattatgggatggggtgaaaaggcgattgagataaggtccgttgagaccggccacctggacggcgtctttatgcacaaaagagcacaacgcctaaaatttttgtgtgaacggaacgataaggtgttttttgcttccgtccgatcgggggggtccagtcaggtattctttatgactctgaaccggaacagtatgatgaattggtag

SEQ ID NO: 208868 - DNA, 3918 bp, synthetic construct
  misc_feature 1..3918: note = Description of Artificial Sequence: Synthetic coding sequence
  source 1..3918: mol_type = other DNA
atggccagcgacagccccgcccggagcctggacgagatcgacctgtctgctctgcgagaccccgcaggcattttcgaactcgttgagctcgttggtaacgggacttatggccaagtctacaagggacggcacgtgaaaactggccagctggccgctattaaggtaatggatgtgactggtgacgaggaagaagagatcaagcaagagattaacatgctgaagaaatatagccaccatagaaacatcgcgacatattacggcgcctttatcaaaaaaaacccgcctgggatggacgatcaactctggctggtcatggagttctgcggagctggctcagttactgacttaatcaaaaatactaaagggaataccctgaaggaggaatggattgcgtatatatgtagggaaatattacggggactgtctcatcttcaccaacacaaagtgatccaccgcgatataaaaggacagaatgttctgctgaccgaaaacgctgaagtaaaactagtcgactttggagtgagtgcgcagctggacaggactgtggggcgtcggaatacattcattggaacaccctactggatggccccagaagtgatcgcttgtgacgagaatcctgacgcgacttacgacttcaaaagcgacctttggagcttgggaattacagccattgagatggccgagggggctccccccctttgcgatatgcacccgatgcgggccctgttcctaattccacgaaatcccgctccaagactaaaatcaaaaaaatggtccaaaaagtttcagtccttcattgaatcctgcctcgtgaaaaatcacagtcagcgccctgccaccgagcagcttatgaagcacccgtttattcgcgaccagcctaacgagcgtcaggtgaggatccagcttaaggaccacattgatcgcactaaaaagaaaagaggggaaaaggatgagaccgagtacgagtatagcggcagcgaggaggaagaagaggaaaacgactccggcgaaccgagttccatcctgaacctccctggggagagtacgcttcggcgggatttcctaagactccagttggccaataaagagcgatccgaagcgctgaggcgccagcaactggagcaacaacagagagagaatgaagaacacaagagacaacttttggccgagaggcaaaagcggattgaggagcaaaaggagcagcgccgtaggctcgaagagcagcagagacgcgagaaggagttacggaaacagcaggaacgagagcagaggcggcactatgaagagcagatgagacgtgaagaggagcggagaagagctgagcacgaacaggagtatattcgccgccagctcgaagaggagcagagacagctcgagattctccagcagcaactccttcacgagcaggccttgctgctggagtataaaagaaagcagctggaggaacagaggcaagccgagcgcctccagaggcaacttaagcaggagcgcgactatctggtgtctctgcagcaccagcggcaggagcagcggcctgtcgagaagaagccattataccattataaagaaggaatgtctccatccgagaaacccgcctgggccaaagaaattccacacctggtcgcagtaaagagccagggccccgctctcacagccagccaaagtgtccacgaacagcccactaaaggactgagcgggttccaggaggctctgaacgtgaccagccacagggtggagatgcccagacaaaactccgatcccacctcagaaaaccccccactgccaacacgaattgagaagttcgaccgcagtagttggcttcggcaagaagaggacattcccccaaaagttccacagcggactaccagtatcagcccagcacttgcccgtaaaaattcccccggcaacggctctgctctcgggccgcgcttgggttcacaaccaataagggccagtaaccccgatttgcgccgtacggaacctattctggagagccccctacagcgcacctcttctgggagcagcagtagcagctccaccccctctagccaaccttcgtctcagggtgggtcccagcctggctcccaggcggggtcttccgagagaaccagagtcagagccaacagcaaatctgagggaagccccgtgcttccacacgagcctgctaaggttaaacccgaggagagtcgcgacatcacaaggcctagtcgacctgcatcatacaaaaaggcaatcgacgaggatttgacagctttggcaaaggagctgagagagctgcgcattgaagagacgaaccgccccatgaaaaaggttacagattattcgagctcaagcgaggagagcgaatcaagtgaggaagaggaggaagacggagagagcgaaacgcacgacggaacagttgctgtaagcgatatcccacgcctgattccaacaggcgccccagggagcaatgagcagtataacgtagggatggttggaacccacggcctggagacttcccatgctgattcattctccgggagcatctcccgggagggcaccttaatgattagggagacgtccggcgagaaaaagcgatccgggcatagcgacagcaacggattcgccggccatattaatctcccggatttggtgcagcaatcccactctcccgccgggacacctactgaggggctcggcagggtgtctacacattctcaggagatggacagcggcactgaatacggtatgggcagctcaactaaagcctctttcacgccctttgtcgatcccagggtgtaccagacctctccaaccgatgaggatgaagaggacgaagagagctcagctgccgcccttttcacttctgaactgctcaggcaggaacaggctaagctgaacgaggcacggaagatttcagttgtgaacgtaaatcccacaaatattcgcccgcacagcgacaccccagaaatcaggaagtataagaagaggttcaacagcgagatcttatgcgccgctctatggggagtcaatctgctggtgggaaccgaaaacggactgatgctcttagacagaagcgggcaaggtaaagtgtataatttaataaatcgtcggcgattccagcagatggacgtcctggagggtctaaatgtcctggtaacgatttccggtaagaagaataagttaagagtttactacctctcttggctccgcaatagaatactgcataacgaccccgaggtagagaagaagcagggatggataacagtaggagatctagaagggtgtatccactataaagtcgtgaagtatgagagaatcaagtttctggtgattgccttgaagaatgccgtggagatatatgcctgggctccaaaaccataccacaagttcatggcattcaaatcatttgccgatctgcagcacaaaccattgctggtcgatctgacagtcgaagagggccagcgcttgaaggttattttcggcagccatacaggctttcacgtgattgatgttgattcaggcaactcctacgacatttatattcccagccatatacagggaaacatcacaccacatgccattgtgattctccccaagaccgacgggatggaaatgttggtgtgctacgaagacgaaggcgtgtacgtgaatacatacggtcggattacaaaggacgtggttctgcagtggggagagatgcctaccagcgtggcttatattcacagcaaccagatcatgggatggggagagaaagctatcgagatccggagtgtcgaaactggccaccttgacggagtgttcatgcacaagagggcccaaagactgaagttcctgtgtgaacgcaacgataaggtgttctttgcctcagtacgaagcggaggttcttcacaggtcttttttatgactcttaataggaattcgatgatgaattggtag

SEQ ID NO: 208869 - DNA, 3939 bp, synthetic construct
  misc_feature 1..3939: note = Description of Artificial Sequence: Synthetic coding sequence
  source 1..3939: mol_type = other DNA
atggccagcgacagccccgcccggagcctggacgagatcgacctgtcggccctccgagaccctgccggaattttcgagctggtggaactggtgggaaatggaacatacggacaagtctataaggggaggcacgtcaaaaccggccaattagcagctatcaaggtgatggatgtcacgggggacgaggaagaagagataaaacaggaaattaacatgttgaaaaaatattcacatcacaggaacattgccacttactatggagccttcatcaagaagaaccctcctgggatggatgaccagctctggctggtaatggaattctgcggagccggttctgtaaccgacctcatcaaaaacacaaagggtaacaccctcaaggaggaatggatagcttacatttgcagggaaatcctgaggggactgtctcaccttcatcagcacaaggtgatacacagggacattaaaggacagaacgtgctcctgaccgaaaacgcggaggtgaaaatcgttgacttcggcgtgagtgcacaactcgataggacagtgggcagacgcaatacttttatcgggactccttattggatggcaccagaggtgatcgcctgtgatgagaacccggacgccacttatgatttcaaatcagacctttggagcctggggatcactgcaatcgaaatggccgagggggccccccctctatgcgatatgcaccctatgagagccctctttctcataccaaggaatcccgccccaagactgaagtccaagaagtggtctaagaagtttcagtcatttatagaatcctgcctagtaaagaatcactctcagcgccccgccaccgagcaactcatgaagcatcctttcattagagatcagcctaacgaaagacaagtccgcattcagctgaaggatcacatcgaccgaacgaagaagaaaaggggagaaaaggacgagacggagtacgagtattcagggtctgaagaagaggaagaggagaacgactctggagagccaagttcaatcctgaatctcccaggagaatccactttgaggagggacttcctgcggctacagttggccaacaaagagaggagtgaggccttgcgccgccagcaactggagcagcaacagagagagaacgaagaacataaacgccagcttctcgctgagcgtcagaaacgtattgaggagcaaaaagaacagcggagaagattggaggagcagcagagacgggaaaaggagcttagaaaacaacaggagcgagaacagaggcggcattacgaagaacagatgcggagggaggaagagcgccggagagccgagcatgaacaggaatacatcaggagacaattggaagaagaacagcgacagctggaaattctgcagcagcagcttcttcacgaacaggcactgctgctcgagtataagcgtaagcagctggaagagcagcgacaggctgaaagacttcagcggcagcttaagcaggagcgggattatttagtgtccctccagcaccagagacaagaacagcgacccgttgagaaaaagcccttgtaccattataaggaaggaatgtcaccatcagagaagccggcgtgggctaaggagatcccgcatttagtggccgtgaaaagtcagggcccggccctgactgcctcccagtccgttcatgaacaacccaccaagggactgagtggctttcaggaagcgctcaatgtgaccagtcacagagtggaaatgccaaggcagaattccgatcccaccagcgagaacccgcccctgcccacacgaatcgagaagtttgatagaagtagctggctgaggcaagaagaagacatccctcctaaggtccctcagaggacaacatcaataagccccgcactagcccgcaagaattccccaggcaacggaagcgcccttggcccccgcctcgggtcccaacctattcgagcctcgaatccagacttgaggcggaccgagccaattctcgagagtcctctacaaagaacttccagcggatccagtagctcttcaagcacgccttctagccaacctagcagccagggcggcagccagcccgggtcccaggcgggttcttccgagagaaccagggtgagagcaaatagcaagtcagaagggtcacccgttctcccacatgaacccgctaaagtgaaacccgaggagtcgagagatatcactcgcccgagccgccctgccgtgtcggctttcctctcaaaatcgtttgaattgctgatttaccaggacctgactgctctggccaaggaactgcgcgaactgaggatcgaggagaccaacaggccaatgaagaaagtgaccgattattcctcttcctctgaggaatccgagtcttctgaggaagaggaggaggacggcgaatctgagacccacgacggcacagtggccgttagcgacatcccccgtcttatcccaaccggcgcgccagggtccaacgaacagtacaacgtggggatggtcggaacccacggcctagaaacctcccacgccgacagtttttcaggcagcatcagccgggaaggaacacttatgatcagagaaactagcggagaaaagaaacggtctggacacagcgattccaatggatttgccggccatataaacctgccagacctcgttcagcagtcacacagccccgctggaactccaactgagggattagggagggtttcgactcactctcaggagatggactcagggacagagtacggcatgggatcatccaccaaagcgtcatttacaccatttgtggatcctcgggtctaccagacctcacctacagatgaggacgaggaggatgaagagtcatccgccgccgctctgttcacttccgagcttcttcgacaagaacaggcaaagctcaatgaagcccggaaaatctcagtggtcaatgttaaccctacaaatattcgcccccattctgacacgccggaaatcaggaagtataagaaacgctttaactccgagatactgtgtgccgctctttggggagtgaatcttctggttgggacagaaaatggactgatgctgctcgatcgcagtggacagggtaaagtctacaaccttatcaatcgccgcaggtttcagcagatggatgtgcttgagggcttgaatgtgctggtcaccattagcggtaaaaagaataaacttagagtctattacctctcgtggcttagaaacagaatcttacacaatgatcctgaggtcgaaaaaaagcaagggtggatcacagtgggcgatcttgaagggtgtatccattataaagtggtgaagtacgagcgaatcaaattcctggttatagctctaaagaacgcagtcgaaatatatgcttgggcgcctaagccatatcacaagtttatggcatttaagtccttcgccgatctgcaacataagcctttattagtggatttgacagtggaagagggccagcgactcaaggtgattttcggtagccataccggatttcacgtgatcgacgtggattcaggcaattcttatgatatatacattccgagccacattcagggtaatattacaccacacgctatcgttatcctgccaaagactgacggcatggaaatgcttgtgtgttacgaggatgaaggcgtttatgtaaacacctacggtaggattaccaaggacgtggttctgcaatggggagagatgcccaccagcgtggcatatattcacagcaatcaaatcatgggctggggcgagaaggctattgaaattcggagcgtcgagaccggacacctagacggggtatttatgcacaagcgtgcacaaaggttaaaattcctgtgtgagagaaatgataaggtattctttgcatcagtgaggagtggtgggagcagccaagtgttctttatgactctcaacagaaacagtatgatgaactggtag

SEQ ID NO: 208870 - DNA, 1725 bp, synthetic construct
  misc_feature 1..1725: note = Description of Artificial Sequence: Synthetic coding sequence
  source 1..1725: mol_type = other DNA
atgcccccccagctgcaggagacccggatgaaccggagcatccccgtggaagttgacgaatctgaaccctatccaagccagctcctcaaacctatccctgagtacagccctgaggaggaaagcgagcctcctgcccccaatatccgtaatatggccccgaacagcctgtccgcccctaccatgctccacaactcttctggagatttttcccaggctcactctacactcaaacttgctaaccaccagcggcccgttagtaggcaggtcacgtgtctccgtacccaagtgcttgaagatagcgaggattccttctgccgcagacaccccggcctgggaaaggctttccctagtgggtgtagtgcagtttccgagccagcttcggaaagcgtcgtgggcgccctgcccgccgaacatcaattttcatttatggagaaacggaatcaatggctcgtgtcacaactcagtgccgcgtctccagacaccggccacgatagcgataaatcagaccaatcactccctaatgcaagcgctgacagcctcggtggctctcaggaaatggtgcagaggccccagccacaccgcaacagggcagggttggaccttcccacgatcgatacagggtacgactctcagccccaagacgttctgggtattcggcagcttgaaaggccactcccccttacatcagtttgttatccccaggacctgcctcgtccacttcgatcccgcgaattccctcaattcgaaccccagcggtacccagcttgcgcacagatgctgccccctaacttgtccccgcatgccccctggaactatcactaccactgcccaggctcaccagatcaccaggttccttatggacacgactatccacgggccgcctaccagcaggtcatccaacccgcattgcccggacagcccctccccggtgcaagcgtgcggggactgcaccctgtgcagaaagtgatcctgaactacccctctccctgggaccatgaagaacgacccgcgcagcgggactgctctttcccgggcctcccaagacatcaggatcaaccccaccatcagcctcccaatagggccggcgcccccggagaatccttggagtgccccgcagaacttagaccacaggtgcctcagcctcctagcccagcagcagtgccccggcccccatcaaatccacctgcacggggaactctcaagacctcaaacctccctgaggagctgcggaaagttttcattacctactcaatggatacagctatggaagtggttaaatttgtgaatttcctactggtgaatggatttcagacagccatagatatttttgaggataggatccgcggtattgatattattaaatggatggaaagatatttgcgggataaaacggtgatgataatagtcgccatcagtcccaaatacaagcaagatgttgagggagcagagagccaactggatgaggatgagcacggcctgcacacgaaatacatacatcgcatgatgcagattgagtttatcaagcagggtagtatgaacttccggttcatccctgtgctcttccccaacgctaagaaggagcacgtacccacctggctgcaaaacactcacgtctactcctggcccaagaacaagaagaacattcttttgcgcttactccgtgaagaagaatatgtggctcccccccgaggtccactgccaacactccaggttgtgcctctatag

SEQ ID NO: 208871 - DNA, 1695 bp, synthetic construct
  misc_feature 1..1695: note = Description of Artificial Sequence: Synthetic coding sequence
  source 1..1695: mol_type = other DNA
atgaaccggagcatccccgtggaggtggacgagagcgagccctacccgtcacagctgctgaagcccatccccgaatattccccagaagaagaatcggaaccccctgctccaaacattaggaatatggctcccaattcgctcagtgccccaaccatgctgcacaattctagcggtgatttctcacaggctcactcaaccctcaaactggcaaaccatcaaaggcctgtctctcgtcaggttacatgcctccgcacgcaagtcttagaggactctgaggacagcttttgcagaaggcaccctggattaggtaaagcctttccgtccggctgtagtgccgtgagcgaaccagccagcgagagcgtggttggggcgctgcctgcagaacaccagttttctttcatggagaagaggaatcaatggctagtgtcccagctctcggcagcctctcctgatactggccacgactctgataagtccgaccagtccctgcccaacgcatctgctgattccctcggggggtctcaggaaatggttcagcggccacagccacacaggaaccgagcaggattggacttgcccactatcgatactgggtatgacagccagccgcaggatgtgctaggtatccgccaacttgaaagaccactcccactgacttcagtatgctatccccaagacctgcctcggcctctgcgatcccgggagttccctcagttcgagccacaaagataccctgcctgtgctcagatgctgccccccaacctgagcccacatgccccctggaattaccactatcattgcccaggatcacctgatcaccaggtgccctatggacacgattaccctagagccgcatatcagcaggttattcaacccgctctgcccgggcagcctctacctggcgctagtgtcaggggcctgcacccggtacagaaagtcatactaaattatccgtctccctgggatcacgaggagaggccggcccagagagactgctcctttcccgggttacccagacatcaggaccagccacaccaccagccacctaatcgcgctggtgcgccgggcgagtcactggagtgtcctgcagaattacggcctcaggtgccccagccaccttcgcctgctgccgtgccccggcctccgagtaaccctcctgcccgaggcactctcaaaactagcaaccttcccgaggaactacggaaagtgttcataacttactccatggataccgctatggaagtcgtcaaattcgtgaacttccttctcgtgaacggctttcaaacagctatagacatttttgaagatcgcatccgtggcattgacattattaagtggatggagcggtacctgcgcgacaccgtgatgattatagttgccatctctcccaagtataaacaggatgtggagggcgccgagagccaactcgatgaggacgagcatggactgcacaccaagtatatccatcgcatgatgcaaatcgagttcatcaagcagggctcaatgaattttcgctttatcccagtgctgttccccaacgcaaaaaaggaacatgtccccacatggctgcagaatacacatgtatacagctggccgaagaataagaaaaacattctgctgagactgctccgcgaggaggaatatgtggctcccccccgcggacctctgcccacgttgcaggtggtgcctctctag

SEQ ID NO: 208872 - DNA, 1698 bp, synthetic construct
  misc_feature 1..1698: note = Description of Artificial Sequence: Synthetic coding sequence
  source 1..1698: mol_type = other DNA
atgaaccggagcatccccgtggaggtggacgagagcgagccctacccaagtcagctcctaaaacccatcccagagtactccccagaagaagagtctgagccccccgcccctaacatacggaacatggctccgaactccctgtcagctcctactatgctccacaattcctctggtgacttttctcaggcacactctaccctaaagctggccaatcaccagcgacccgtgtcgagacaggtgacatgcttaaggactcaggtgcttgaagattcggaggacagcttttgtcgaagacaccctgggctaggaaaggccttcccaagtgggtgtagcgctgtctccgaaccagcttccgagagtgtggtaggcgcattgccagcggagcaccagtttagctttatggagaaaagaaaccagtggcttgtctcgcagctgtccgccgcctcccctgataccgggcacgattccgataaaagcgatcagtctttacccaatgccagcgccgattcactcgggggctcccaggagatggtgcagcgaccgcaaccacatcgcaatcgtgcaggcctcgacttaccaacaatcgatacaggttatgacagccagcctcaagacgtcctgggcattaggcagttagagaggccactgcctctcacctcagtgtgctacccacaagacctccctcgtcccctccggagcagggagttcccacagtttgagccccaacgttatccggcgtgcgcccagatgctacctccaaacctgtccccccatgccccgtggaattaccattaccattgtccaggatctcccgaccaccaagtcccctatggtcacgactaccctcgggcggcttatcagcaagtgattcagcctgctctcccaggccaaccacttccaggcgccagcgtccggggcttacatccagtgcagaaagtaatccttaactacccgagcccgtgggaccatgaagagaggccagctcaacgggactgttctttcccaggactgccacggcaccaagatcagcctcatcatcagccacccaacagggcaggggcacccggtgaatcccttgaatgtcctgccgaactgcgtccacaggtgcctcagcctcccagccctgccgctgttccccgcccaccctctaatcccccggcccggggtaccctgaagacatctaacctgccagaagaacttagaaaagtgttcatcacctatagtatggatactgctatggaagtggtgaaattcgtgaactttctactcgtgaacggcttccagacagctatcgacatattcgaagaccgaataagaggtatagacattatcaaatggatggaacgatatctgagagataaaacagtgatgatcatcgtagcaatttcaccaaaatacaagcaggatgttgaaggcgctgagagccagctggatgaagatgaacacggcttgcataccaaatacattcataggatgatgcaaattgagtttataaagcaaggaagtatgaattttcggtttattcccgtcttatttcccaacgctaagaaagaacatgtgccgacttggttgcagaatactcatgtttactcctggcctaaaaacaagaagaatatactcctgaggctgctgcgcgaggaggagtatgtggcaccacctcgagggcctctgcctacgctgcaggtggtgcctttgtag

SEQ ID NO: 208873 - DNA, 1725 bp, synthetic construct
  misc_feature 1..1725: note = Description of Artificial Sequence: Synthetic coding sequence
  source 1..1725: mol_type = other DNA
atggccccccagctggaggagacccggatgaaccggagcatccccgtcgaggtggacgaatctgaaccttacccaagtcagctgctcaaacctattcccgagtattccccagaggaagagagcgagcccccagcacccaatatcagaaatatggcccccaactcactctccgctcctacgatgctgcataattccagtggcgactttagccaggctcactctaccctcaagctcgctaaccaccagagacctgttagtaggcaggtgacttgcttgcggacccaggtcctggaggacagcgaagattccttttgccgccggcacccaggcttgggcaaagcctttccctccggatgtagcgctgtttccgagccagccagtgagtcggtggtgggggctctgcccgctgaacatcagttctcattcatggagaaaagaaatcagtggctggtttctcagttatccgcagcttccccagataccggacacgactccgataaatcggaccagtcccttccgaacgcaagtgcggactccttgggcggtagccaggagatggtgcagagacctcagccgcaccgcaatcgcgccggtttagatctgcctaccatcgacactggttatgactcacaaccccaggatgtactggggattaggcagctggaacgcccactcccacttaccagtgtgtgttacccgcaggatctaccacgccccctccggagtagggagtttccccagtttgaaccacagcgttaccctgcatgtgcacagatgctcccacccaatctctcccctcacgctccctggaactaccactaccactgcccaggttcacctgatcaccaggttccctacggccatgattacccgcgggccgcatatcagcaggtcattcagcctgccctcccagggcagcccctgcctggtgcatccgttagggggctccatcctgtgcaaaaggtgatcttgaactacccatctccatgggaccatgaggaacggccagcccagcgggattgtagcttcccaggactgccccgacaccaggaccagccacaccatcagcctcctaatcgcgccggagcgcctggtgagagcctggaatgtccagccgagttacgtccccaggtgccacagcccccatcccctgccgccgtgccaagacctccttctaatcccccagctaggggcacactaaaaactagcaacctccctgaagaactccgcaaagtattcattacctactctatggacacggcaatggaggtggttaagttcgtcaacttcctgctggtcaatggttttcaaacagccattgatattttcgaggaccggatcaggggtatcgacattatcaagtggatggagcggtacctacgggataagaccgttatgatcatagttgccattagccctaaatacaagcaggatgtggagggggcagagtcccagctggacgaagacgaacatggcctgcatacaaagtacatacacagaatgatgcagatcgagtttattaaacagggcagtatgaatttccgattcattccggtgctgtttcctaatgccaaaaaagaacacgtgccgacatggctccaaaatactcacgtttacagttggccaaaaaataagaaaaatatcctcctgcgcttactgagagaggaggagtatgtagctcctcctcgcggtcctctgcctaccttgcaggttgtgcccctgtag

SEQ ID NO: 208874 - DNA, 462 bp, synthetic construct
  misc_feature 1..462: note = Description of Artificial Sequence: Synthetic coding sequence
  source 1..462: mol_type = other DNA
atggaggtggtgaagttcgtgaacttcctgctggtgaacggcttccagactgccatagatatttttgaagatcggattcgggggatcgatatcatcaagtggatggagagatatttgcgagataaaaccgtcatgataattgttgccattagtccaaagtacaaacaggatgtggaaggagcagagagccagttggacgaggacgagcacgggctgcacactaagtacatccacagaatgatgcagatagagttcatcaagcagggctctatgaatttccggtttatccctgtcctctttcctaacgctaaaaaagaacatgtccccacctggcttcagaacacccatgtgtacagttggcccaagaacaagaagaacattctgcttcggctgctcagggaggaagagtatgtggctccccccagagggcccttaccaacactgcaagttgtgcccctctag

SEQ ID NO: 208875 - DNA, 330 bp, synthetic construct
  misc_feature 1..330: note = Description of Artificial Sequence: Synthetic coding sequence
  source 1..330: mol_type = other DNA
atgatcatcgtggccatcagccccaagtacaagcaggacgtggagggtgcagagagccagctggacgaggacgaacatggtttgcatacaaagtacatccaccggatgatgcagatcgagtttattaagcagggttcaatgaacttcagattcattcctgtgctttttcccaacgcaaagaaggaacacgttcctacttggctccagaatactcacgtgtacagctggcccaaaaacaagaagaatatcctgcttaggttgctgcgagaggaggaatatgtggctccgcctcgcggtcctcttccgacgctgcaggtggtgccgctgtag

SEQ ID NO: 208876 - DNA, 1596 bp, synthetic construct
  misc_feature 1..1596: note = Description of Artificial Sequence: Synthetic coding sequence
  source 1..1596: mol_type = other DNA
atgatcagccccgacccccggcccagccccggcctggcccggtgggcagaaagttacgaggcaaagtgcgaacgtagacaggagattagagaaagtcgccggtgccgcccgaacgtcactacatgtcgacaggttggaaagactctccggattcagcagagagaacagctgcagagggcccggctgcagcagttctttcgtcggcgcaatttagagctagaagaaaagggtaaagctcagcacccgcaggcgcgggaacagggcccgagcaggcggccaggccaggtgacagggacaagcagcgaggtgttcccggcccaacatccccctccctcgggaatctgcagggatttgtctgaccacctctcgtctcaagccggagggctgcctccccaggacacgcccatcaaaaagccgccaaaacatcatcgtggtacccagacaaaggctgaggggcctacgatcaaaaacgacgccagtcagcagacaaactatggcgtcgcggtcttggataaagagattatacagctgtctgattatttaaaggaggccctccagcgggaactggttcttaagcagaaaatggtcattctgcaagatttattgagcaccctaatccaggctagtgattcttcctggaaaggtcaactaaatgaggacaagctgaaaggcaaattacgcagccttgagaaccaactttatacttgtacccagaagtatagcccatggggtatgaagaaggtgctgttagagatggaagatcagaagaacagttacgaacagaaggctaaagaatcgctgcagaaggtgttggaggaaaaaatgaacgcagagcagcagctgcagagcacccagaggtcattagccttggccgagcaaaagtgtgaagaatggcgaagccagtatgaagctcttaaggaggattggcggactttgggaacccagcatcgggaactcgagtcgcagctccacgtgctgcaatccaaattacagggggctgattcgagggatctgcagatgaaccaagcactgaggttcctggagaacgagcaccagcagttgcaggccaaaatagagtgcctgcaaggagatagagatctgtgttccctggatacccaagacttgcaggaccaactgaaacgctctgaagctgagaagcttacgctggtgactcgcgtgcaacaactacagggccttctgcagaaccagtctctgcagttgcaggaacaggagaaactgctgaccaaaaaggaccaggccctgcccgtgtggtcccccaaatcttttcctaatgaagtcgagcctgagggcaccggaaaagagaaggattgggacctgagggatcaactccagaagaagaccctccaactgcaggccaaagaaaaagagtgcagagaactccatagtgaactcgacaatctgagcgacgagtacctctcttgcctgagaaaactccagcactgtagagaagaacttaaccagagccaacaactccctccaaggcgccagtgtggccgctggcttcccgtcctgatggtggtaattgcagcagccttagctgtgttcctggcaaacaaggacaatctgatgatctag

SEQ ID NO: 208877 - DNA, 549 bp, synthetic construct
  misc_feature 1..549: note = Description of Artificial Sequence: Synthetic coding sequence
  source 1..549: mol_type = other DNA
atgaagaaggtgctgctggagatggaggaccagaagaacagctacgaacagaaggccaaggagtccctacagaaggtgctggaagagaagatgaacgcagaacaacagctacaaagcacgcagagatcccttgcgctggccgaacagaagtgcgaggagtggagatcacagtacgaagctctcaaggaagattggaggacgttggggacccagcaccgagaactagagagtcagcttcacgttttgcagtcaaaactacaaggggctgatagtagggacctgcaaatgaatcaagctttgcgttttctcgagaacgagcatcaacagctgcaagccaaaattgagtgcttacagggggatcgagatctgtgttcacttgacacacaagatttgcaggatcagttgaaacgctcagaggcagaaaagctgaccctggttacaagggtgcagcagctccagggcctgttacagaaccagtcactccagctgcaggagcaagaaaagctcctcacaaagaaagggcaacagatctactatcataagttctag

SEQ ID NO: 208878 - DNA, 1656 bp, synthetic construct
  misc_feature 1..1656: note = Description of Artificial Sequence: Synthetic coding sequence
  source 1..1656: mol_type = other DNA
atgatcagccccgacccccggcccagccccggcctggcccggtgggctgaaagctacgaagcaaaatgcgagcgtaggcaggagatcagagaatcccgccgctgccgccctaacgtgacaacctgccgacaggtgggcaagaccctgcgcatacaacagcgagaacagctccagcgggccaggttacagcagttctttagaaggaggaacctggaactggaggagaagggcaaagcacagcacccacaggcccgcgagcaaggcccgtcgaggagacctggccaggtgactgtactcaaggaacccctatcttgtgctcgcagaatcagctctccacgagagcaggtgaccggaaccagctccgaggtatttccggctcagcaccctccaccctctgggatctgtcgcgacttgtccgaccatttatcttcacaggctggcgggttaccaccacaagacacacccatcaaaaagcctccgaagcatcaccgcggcactcagactaaggcggagggccctaccattaaaaacgacgcttcccaacagactaactacggcgtggctgtgctggataaggagatcatccagttgtccgactacctgaaagaggccctgcaacgagagttagttcttaaacaaaaaatggtgatcctgcaggatcttttgtctacgctgatccaggcttctgactcctcttggaagggtcagcttaatgaggataagctcaagggaaagctgagatcactggagaatcaactctatacttgtacccagaaatactctccttggggaatgaagaaagtattgctggagatggaagaccaaaaaaattcttatgagcaaaaggcaaaagagtccctccaaaaggtcctggaagaaaaaatgaatgctgagcaacagctgcagtccacacagcggagcctggcattagccgaacaaaagtgcgaggagtggaggtctcagtatgaagccctgaaggaggattggaggactctgggcactcagcatagagaactggaaagtcagctgcacgtcctgcagagtaaattacaaggagctgattcccgcgacctgcagatgaatcaagccctgcgattcttggaaaatgagcaccagcagctgcaagctaaaatcgaatgtctgcaaggcgaccgggatctatgttccctggacacccaggacctccaggaccagcttaagcgaagcgaagctgagaagctgacccttgttacacgcgttcagcagttgcaggggctattacagaaccaatccctgcagttgcaagagcaggaaaagttgctgacgaagaaagatcaggcactgcctgtttggagcccgaagagctttcccaatgaagttgaaccggaagggacaggcaaagaaaaggactgggatcttcgcgatcaactgcagaaaaaaaccttgcagctgcaggccaaagaaaaggaatgcagggaacttcactcagaactagacaatctgagcgacgaatatctgtcctgtctcaggaaactgcagcattgccgcgaggaattgaatcaaagccagcagttgcctccacgtcgccaatgcgggaggtggctgcctgtcctcatggtggtaatagctgccgccctggcggtgtttctagcgaacaaggataacctgatgatttag

SEQ ID NO: 208879 - DNA, 1656 bp, synthetic construct
  misc_feature 1..1656: note = Description of Artificial Sequence: Synthetic coding sequence
  source 1..1656: mol_type = other DNA
atgatcagccccgacccccggcccagccccggcctggcccggtgggcagaaagctacgaagctaagtgtgagaggaggcaggagatcagggaatccaggcggtgtaggccgaacgtaacaacctgcaggcaagttggtaagactttaagaatccagcagagagaacagctgcagcgggccagactgcagcagttctttcggaggcgcaacctggaactggaagagaaaggaaaggctcaacacccacaggcaagggagcaggggccatccaggcgacctgggcaggtgacggtcctcaaagaacccttgagttgtgcccgcaggattagcagcccacgagagcaggtgacaggtacatcgtctgaggtattcccggcccagcaccccccaccctctggtatctgtcgagacctgtccgatcacctctcatcacaggccggggggctgcctccacaagatactcctattaaaaaacccccaaaacatcaccggggtactcagactaaggctgaggggccaaccatcaagaatgatgcatcacagcaaactaattacggcgtggcagttctcgataaggaaatcatccagttgtctgactacctcaaagaagccctgcaacgcgaactggtgttgaagcagaagatggtcatcctgcaggatcttctgtcaacactgattcaggctagcgactcttcttggaaagggcagctgaatgaggataaactgaaaggcaagctgcggagcctggaaaaccagctgtatacatgcacccagaaatactctccatggggcatgaagaaggtcctcttggagatggaggaccagaagaattcttacgaacaaaaggccaaggagtcactccagaaagttttagaggagaaaatgaacgcagaacaacagctgcagtccacacaacggtcacttgctctcgccgagcaaaaatgtgaagagtggaggagccagtacgaagcgttgaaggaggactggcggaccctggggactcaacatcgggagctcgaatcccaactccacgtcctgcagtctaagctacagggggctgactctcgcgacctgcaaatgaaccaggcattgagatttttggaaaacgagcaccagcagttacaggctaagatcgaatgtctgcagggggacagggacttgtgttcactagacactcaggacctgcaggaccagctaaaaaggtccgaggccgaaaagctcaccctggtgaccagggtgcagcagttgcagggtctcctacagaatcaaagcctccagttgcaggagcaagagaagttgctcaccaagaaggaccaagccctccctgtctggagccccaagagcttcccgaacgaggtcgaacccgagggaaccggtaaagaaaaggactgggatctcagggatcagctccagaagaagactttacaactccaagccaaagagaaagaatgccgtgagctccacagtgagttagataacctgtccgacgagtatctgagctgtttacgtaaactgcagcactgtcgcgaagagctgaaccagtctcaacagttaccacctcggaggcagtgtgggaggtggctgcccgtgctcatggtggtaatagccgcagccctcgcagtcttccttgcaaacaaggacaaccttatgatctag

SEQ ID NO: 208880 - DNA, 1596 bp, synthetic construct
  misc_feature 1..1596: note = Description of Artificial Sequence: Synthetic coding sequence
  source 1..1596: mol_type = other DNA
atgatcagccccgacccccggcccagccccggcctggcccggtgggccgagagctacgaagcaaagtgcgagcgcagacaggaaatccgggaatcccggcggtgtaggccgaatgtaacgacctgtcggcaggttggcaagacactgcgaatacagcagcgagagcagctgcaaagagcaaggttgcaacagtttttccgacggaggaatctggagttagaagagaaaggcaaagcccagcatcctcaggccagagaacagggccccagtagacggcccgggcaggtgactggtaccagtagtgaggtgttcccagctcaacatccaccgccctcggggatttgtagagacttgtcagatcacctgtcgtcccaagccggcggactccccccacaagacacccccatcaaaaaaccgccaaagcatcaccgtggcacccaaaccaaggcagagggacctacaatcaagaacgatgccagccagcagactaattatggtgtggcagtattagacaaagaaataatccagcttagcgactatctaaaggaagccctgcagagggagcttgtactgaagcagaagatggttattctccaggatttactctctacactgattcaggcctctgattcttcctggaaaggccagctgaatgaagacaagttaaagggcaaactgcgcagtctggagaaccagctgtacacctgtactcaaaagtattccccttggggcatgaaaaaagtcctgctggagatggaagatcagaaaaattcttacgagcagaaggcaaaggagtcccttcaaaaagtacttgaggaaaagatgaacgcggagcagcaactgcagtcgacgcagcggtctttggccttggctgagcagaagtgcgaggaatggcggtctcaatacgaagccttgaaagaggactggcgcactctgggcactcagcatagggagctggagtcacaactgcacgtgcttcaatctaaacttcagggcgcagatagtcgggaccttcagatgaaccaggctcttcgcttcctcgaaaacgagcaccagcagttacaagctaaaatcgaatgtctgcaaggtgatagagatttatgctcccttgatactcaggacctacaagatcagctcaagaggtcagaagccgagaaactcaccctcgtgaccagggtccaacagctgcaggggttactgcagaaccagagccttcagttgcaggagcaagaaaaactgctgactaagaaagaccaggctttgccagtctggagccccaaaagtttcccgaacgaggtggagccagaagggaccggtaaggaaaaggactgggaccttcgggatcagctgcagaaaaagacactgcagttgcaggcaaaggaaaaggagtgtagggagctgcatagcgaacttgataacttatctgatgagtatcttagctgcctgaggaagctgcaacactgtcgcgaggaactgaaccagtcccaacagctgcctccacgtagacaatgcggcagatggctaccagttctcatggttgtaattgctgccgcgctggccgttttcctcgcaaataaagacaacctgatgatatag

SEQ ID NO: 208881 - DNA, 1215 bp, synthetic construct
  misc_feature 1..1215: note = Description of Artificial Sequence: Synthetic coding sequence
  source 1..1215: mol_type = other DNA
atgatcagccccgacccccggcccagccccggcctggcccggtgggcggaaagttacgaggctaaatgtgaaagaagacaagagatccgagagtcccggagatgcaggccaaacgtgacaacatgccggcaagttgggaaaacattgcgtatccagcagagagaacagctccagcgcgccaggctgcagcagttttttcgccgtagaaatttagagctggaggagaaaggtaaggcccagcacccccaggcgcgggaacagggcccctcaagaagaccagggcaagttacaggtacctccagcgaagtattcccagcccagcaccccccaccttctggaatatgccgggatctcagtgatcacctgagctctcaagccggcggactgcctccacaggacactccaatcaagaagccaccaaaacaccatagaggtacgcagacgaaggctgaagggcctactattaagaatgatgcttctcagcagactaattacggagttgccgtgttagacaaggagatcatccagctctctgattatctgaaggaggcactccagagggagctagtgctgaagcagaaaatggtgattcttcaagatttgctgagcaccctgattcaggccagcgattcttcctggaaggggcagctcaatgaagacaagctgaaaggcaaactgaggagcctggaaaatcagctgtacacttgcacacagaaatatagtccatggggcatgaaaaaagtcctgctcgagatggaagaccagaaaaactcttacgagcagaaggctaaggaatccttacagaaggtcttagaggagaagatgaatgccgaacaacagctgcaatcaacccagaggagtctcgccctcgcagaacagaagtgcgaggaatggcgcagccagtacgaggccctcaaggaggattggcggaccttaggaacccaacaccgcgagctggagtcacaacttcatgtgttacagagcaaactgcagggagccgacagcagggacctgcagatgaaccaggccctgcgttttcttgagaacgagcaccaacagttgcaagcaaagatcgagtgtctgcagggagacagagatctgtgtagccttgacacccaagacctgcaagatcaactcaagcgtagcgaggccgaaaaactcactctcgtgactcgggtacagcagttacaggaagctgcagggtggacgacttag

SEQ ID NO: 208882 - DNA, 963 bp, synthetic construct
  misc_feature 1..963: note = Description of Artificial Sequence: Synthetic coding sequence
  source 1..963: mol_type = other DNA
atgatcagccccgacccccggcccagccccggcctggcccggtgggcagaatcttacgaagccaagtgtgaacggcgccaggagatcagggaaagcagacgatgcaggccgaatgtcactacttgtaggcaggtggggaaaactttgcggatccaacaacgcgagctcgaggaaaaggggaaggcccagcacccccaagcaagagagcagggcccgtctcggaggcccggccaggtgacagtgctgaaagaaccactgagttgcgcacgccgaatcagctcaccaagggagcaagtcaccggaacatcttctgaggttttcccagcacagcatccaccaccttccgggatttgtcgagatctgtctgaccacctttccagtcaggccggcggacttccccctcaggacaccccaatcaaaaaaccacccaagcatcataggggaacccaaacaaaggctgaggggccaaccattaaaaatgacgcttcccagcaaacgaattatggtgtcgccgttctcgataaggagatcatccagctttcagactatctgaaggaggccctgcagcgggagctcgttctcaagcagaaaatggtcatccttcaagacctcctctcaacacttatccaggcttcagactcatcctggaagggacagctgaacgaggacaaacttaaaggaaagctgcggtctttagagaaccagctttatacatgcactcagaagtactcgccgtggggaatgaagaaagtcctgctcgagatggaagatcagaaaaactcgtacgaacagaaggccaaagagtctctccagaaggtgcttgaagagaaaatgaatgctgaacagcaactccagtccacccaagtgtggggttgccacatagacatgggcctcgggacccccggaagcttgggaaacaaggggagtcagctgcacaactcactggagccctcacctttatag

SEQ ID NO: 208883 - DNA, 81 bp, synthetic construct
  misc_feature 1..81: note = Description of Artificial Sequence: Synthetic coding sequence
  source 1..81: mol_type = other DNA
atgatcagccccgacccccggcccagccccggcctggcccggtgggccgagtcatatgaagccaagtgtgagcgacggtag

SEQ ID NO: 208884 - DNA, 1671 bp, synthetic construct
  misc_feature 1..1671: note = Description of Artificial Sequence: Synthetic coding sequence
  source 1..1671: mol_type = other DNA
atgcagaagttcatcgaggccgactactacgagctggactggtactacgaggaatgctcagacgtcctttgcgccgagagagtgggacagatgactaagacctacaacgatatcgatgctgttactagacttctagaggaaaaagaaagggaccttgagctggcggcaaggatcgggcaatctctgcttaagaagaacaagacactcacagagagaaatgagcttctggaggagcaagttgagcatatcagagaagaagtcagccagctgcgccacgagctcagcatgaaggatgaactgctacaattttatacatctgctgccgaggagtccgaacccgagagtgtatgttccacacctctgaaaagaaacgagagctctagctctgtacagaactactttcacctggattcactgcagaaaaagctgaaagacctcgaagaggagaacgtcgtactgcgttcagaggctagccagctgaaaactgaaacaataacatatgaggaaaaggagcagcagctagtaaacgactgtgttaaggaactgagagacgccaacgtgcagatcgcaagtattagcgaggagctggccaagaaaacggaagacgcggccagacagcaggaagagatcacacacctcctgtcgcaaatcgtcgacctgcaaaagaaagcaaaagcttgcgccgtggagaacgaggaacttgtgcagcatctaggggccgctaaagatgctcagcgtcagttgactgcagaactgcgcgaactggaggacaagtatgccgagtgtatggaaatgttgcacgaggcccaagaagagcttaaaaatctgagaaacaagacgatgccgaacactacttcaagaaggtaccacagtttgggcctctttccaatggacagtttagctgctgaaatcgagggcactatgcgtaaagagctccagctggaggaggcagaatctccagacatcacgcatcagaaacgcgtcttcgaaaccgtgaggaacatcaaccaggtcgtgaagcaacgttccctcactccaagccccatgaatatacccgggagcaaccagtcctcagctatgaactccctcttgtcttcttgcgtaagcacaccgaggagctctttttacgggtcagacatcggaaacgtcgtcctggacaataaaacgaattctatcatcttagagactgaagctgctgaccttggcaacgacgaacgaagtaagaaaccgggcacccctgggacacctggtagtcacgaccttgagacagcactacgccgcctgtctttgagaagagagaattatctgagtgaacggcgcttctttgaagaggaacaggagcggaagttacaggagctggctgagaagggtgaactgcgctcggggagcctgacacccaccgagagcattatgtccctcgggacacattcgcgcttctcagaattcactggctttagtggcatgtccttctccagccggtcttatctacccgagaagttacagatcgttaagccccttgagggcgaccatgccggaccgcgtcccctcagcgttctgttgggggacagtctctggagtcttatccacctgcggaaggcggggcacctgtgtcacgcctactccttctttttcagagactcccacccccgctgttggtttgagttcttatag

SEQ ID NO: 208885 - DNA, 438 bp, synthetic construct
  misc_feature 1..438: note = Description of Artificial Sequence: Synthetic coding sequence
  source 1..438: mol_type = other DNA
atgaccgtgcacaacctgtacctgttcgaccggaacggcgtgtgccttcactattccgagtggcataggaagaagcaggctggaatccctaaggaggaagagtacaagctcatgtacgggatgcttttctccatacgcagtttcgtctctaaaatgtccccgttggatatgaaagacggttttctggcctttcagacaagcagatacaaactgcactattacgaaacccccactggtataaaagtggtgatgaacaccgatttgggcgttggacccatacgggacgtccttcatcacatctactctgctttgtacgtggagctggtcgtcaagaacccactgtgtcccctgggacagacagtccagtccgaactgttccgatcacgactcgacagttacgttcggtctctgccattttttagtgcaagggccggttag

SEQ ID NO: 208886 - DNA, 438 bp, synthetic construct
  misc_feature 1..438: note = Description of Artificial Sequence: Synthetic coding sequence
  source 1..438: mol_type = other DNA
atgaccgtgcacaacctgtacctgttcgaccggaacggcgtgtgccttcactatagcgaatggcaccgcaaaaagcaggcaggaataccaaaagaagaagaatataaactcatgtatgggatgttgttctcgatcaggtcctttgtcagcaaaatgtcccctctggacatgaaagacggcttcctggcattccaaacctctaggtacaagttgcattactatgagactccaacaggaatcaaggttgtcatgaataccgaccttggcgtcggtccgattcgcgacgtgttgcaccacatttacagcgcgctgtacgtcgagcttgttgtcaagaatcccctgtgtccgctgggtcagacagttcaatccgagttattcagatcccgattggatagctacgtgcgcagcctgcccttctttagtgcacgcgccggctag

SEQ ID NO: 208887 - DNA, 3402 bp, synthetic construct
  misc_feature 1..3402: note = Description of Artificial Sequence: Synthetic coding sequence
  source 1..3402: mol_type = other DNA
atgagccccacccagtgggacttccccgtggagctgtgctgccggccaatggcattcgtgactctgaccggtctggacgtggtctacaatgccgtgcatagggccgtttgggatgccttttgcgccaaccgacgcgcagatagagttccaatttcatttaaggttctgcctggtgatcacgagtatccaaaatgccgcccaaaacggacatcttacgagtggtacatccctaaaggtattctgaagactggctggatgaataagcatttgaatctggtcccggctctcgtggtcgtattttacgaactcgattgggacgaaccacagtggaaggagaaacagtctgagtgtgccacaagagtagagatcgttagacaatcccttcagggaagaaacactaaggttgccgtggtactgattcaaaagaagactcccctcccccccggcgaagacgttatcgcttcagagcgggctgccgcgctgtgcaacgcctgtgagctgtctggcaaatctctcttcgtgctccctcacacggaccatctagtgggttacattattcgtctggagaacgccttctacgagcacgcacagacatactactacacagaaatcagacgcgtgaagagtcacaaggagtttctaaataaaacaacccaccagctgctgtttgtgaggcaccagtttaaaatcgctttctttagcgagttgaaacaggatactcagaacgccctgaaaaactacaggactgcttataacctggtgcacgaactacgggcgcacgagactaatatcctcgagataaaaactatggccggatttattaactacaaaatctgccgattatgtttccagcataacaccccgctggacgcaatcgcacagtttaggaagcatatcgacctttgcaaaaaaaaaatcgggagcgctgaactaagctttgaacatgatgcttggatgtccaagcagtttcaagccttcggggatctcttcgacgaagctatcaagttaggtctgactgctatccagacacagaacccagggttctactaccagcaggccgcctactatgcccaggaacgaaaacagttggccaaaacactgtgcaatcacgaggctagcgtgatgtaccctaatccagatcccctcgagacccagactggggtgctggacttctacgggcagcggtcctggaggcagggtatcctgagctttgacctctcagacccagaaaaagaaaaagttgggatattagctatccaactgaaagagaggaatgtagtgcattctgagataatcatcactctcctgtcaaacgctgtggcccagttcaaaaagtacaagtgccctcgcatgaagtcccacttgatggtccagatgggcgaagaatattactacgctaaggattacaccaaagctcttaaacttctggattacgttatgtgcgattaccgatctgagggatggtggacactgttaaccagcgtgttgactacagctttaaaatgctcctatttgatggcccagctcaaagactacattacctacagtctggaacttctcgggagggcttctacactcaaggatgaccagaagagcagaattgaaaagaatctgatcaacgtgctgatgaacgaaagtcccgatccggaaccagactgcgacatactggccgttaagaccgcccaaaagctctgggccgatcgcatctcattggccgggagtaacatcttcaccatcggggtccaggattttgttccttttgtccagtgtaaagctaagttccatgcaccatcctttcacgtcgatgtgcctgtccagttcgacatctatctgaaggcagactgccctcacccaatcagattcagtaagctttgtgtcagcttcaacaatcaggaatacaaccagttttgtgtgatcgaagaggcatcgaaggctaatgaagtgctggaaaatttaactcagggcaagatgtgtctggtcccaggcaagacccggaaactgctgttcaaattcgtcgccaaaacggaggacgtgggcaagaagatcgagattacttcagtcgatcttgccctgggcaacgagacaggccgctgtgtggttctgaattggcaaggaggcgggggggacgcagccagctctcaggaagcactgcaggcggcaaggagtttcaagagacggccaaagctgccagataatgaagtgcattgggatagtataattatacaggccagcactatgatcatctctagagtacccaacatatcagtacacctgctgcacgaacctccggccctgactaatgagatgtactgcttggttgttacagtgcaaagccacgaaaagacccagatccgcgacgtgaaactgaccgccgggttgaagccggggcaagatgccaatctcacccaaaaaacccatgtgacccttcacggtacggagctttgcgatgaatcctatcccgcccttctcaccgacatccccgtcggggatctgcatcccggcgagcagcttgagaagatgttatacgtgcgctgtggcaccgtgggttcaaggatgtttctggtgtatgtgtcctatctgatcaacacaaccgtggaagagaaagagatcgtttgcaaatgccacaaagatgagaccgttacaatcgagactgtcttccccttcgatgtcgccgttaagtttgtgtccacgaagttcgagcaccttgaacgagtctatgctgatatcccattccttctgatgaccgacctattgagcgcttccccctgggctttaacaatcgtctcctcagagttacagctagccccgagcatgacgaccgtagaccaactggagtcccaggtggataatgtgatcttacagaccggtgaatcggcctctgaatgcttctgtctacagtgcccgtctctgggcaatattgaagggggagtcgccacgggccactacatcatttcctggaaaagaacatcggccatggagaatatccctataattacgacagtgatcacgcttccccacgtgatcgtcgagaatatccctctccatgtcaatgctgacctcccgtctttcggcagagttagagagagtctccctgtgaaatatcacctgcaaaacaagactgatctagtgcaagatgtggaaatttccgtggagccgagtgatgcttttatgttctcaggcctgaagcagattcggttgcggatcctacccggaacagaacaggagatgctttataatttctatccattgatggcgggatatcagcagttgccgtccctgaatataaatttgctcaggtttcctaactttactaatcaactgcttcggagattcataccgactagtattttcgtgaaaccccaggggagactgatggatgatacgtccatcgccgccgcttag

SEQ ID NO: 208888 - DNA, 3261 bp, synthetic construct
  misc_feature 1..3261: note = Description of Artificial Sequence: Synthetic coding sequence
  source 1..3261: mol_type = other DNA
atgagccccacccagtgggacttccccgtggagctgtgctgccggccaatggcatttgtgacactgactggcctggatgttgtgtacaatgccgtccacagagccgtgtgggacgctttttgcgccaaccggagggcagacagggttccgatctctttcaaagtccttcctggcgatcatgagtatcctaaatgcaggccaaagaggacctcatacgaatggtatatccctaaggggattctgaagactggctggatgaacaagcacctgaacttagtgcccgccctggtcgtggtgttttatgagcttgactgggatgaacctcagtggaaagaaaaacagagtgagtgtgccacgagagtcgagatagtaagacagtcactccagggaagaaacacgaaagtggcagtggtccttatccagaagaagaccccactgccccccggcgaagacgtgatcgctagcgaacgggctgccgctctctgcaatgcatgtgaactcagtggcaaaagcctgtttgtactccctcacaccgatcatctggtcggatacatcattcgcctggaaaacgcgttttatgaacatgcccagacctactactacacagaaatacgccgcgtaaaatcccataaagaattcttgaataagacaacgcaccagctgctgtttgtccgacatcagttcaaaatcgcctttttctctgagttgaagcaggacactcagaatgcactgaaaaactatagaaccgcttacaacctggtccatgagctgagagcccatgagaccaacatactggagattaagacaatggctgggtttatcaattacaaaatatgcagattgtgtttccagcataatactcccctggatgctatcgcccaatttcgcaagcacatcgatctgtgtaagaaaaagatcggatctgccgagcttagctttgaacacgacgcctggatgagcaagcagttccaggcgtttggcgacctgtttgacgaggcaatcaaactcgggctgaccgcaatccagacccagaaccctgggttctattaccaacaggcagcctactatgcccaggagcgaaagcaactggcgaagactctgtgtaaccatgaggcatccgtgatgtatccaaatccagaccctttggaaacccagaccggagtgctcgatttctacggacagcgaagctggaggcagggaatactgagctttgacctgtctgatcctgaaaaggagaaggttggcattttggcgattcagctcaaggaacgaaacgttgtgcactctgagatcatcatcaccctgctctccaacgccgtggctcagttcaaaaaatacaagtgtcctagaatgaaatcccatctcatggtgcagatgggagaagagtactattacgctaaggactacaccaaagccctcaagcttttagactacgtcatgtgtgattacagatctgaaggttggtggaccctgcttacatctgtgcttactacagctttgaagtgctcctatctaatggcccaactgaaagattacattacctactctctcgaactgctaggcagagcgagtacactgaaagatgaccaaaaaagtcggatagagaagaatcttatcaacgtgctcatgaacgagtccccagaccccgaacccgactgcgacatcctcgccgtgaaaaccgcgcagaagttgtgggcagaccgcatcagtctcgctgggtcaaatatcttcaccattggagtacaggatttcgtgcccttcgttcagtgcaaggctaaatttcatgccccttctttccacgtggacgtgcccgtacagtttgatatttacttgaaagcagattgcccccaccccattcggttcagcaagctttgcgtgagttttaacaatcaggaatataaccagttctgcgtgatcgaggaagccagcaaggccaatgaagttttagagaacctgacccaggggaagatgtgcttggttccaggcaagacacgcaagctcctgttcaaatttgtggccaagacagaagacgtgggaaagaagatcgaaattacaagcgtcgacctcgccttgggaaatgaaacaggtagatgcgtggttttgaattggcaaggtggagggggagacgcggcctcttcacaggaggccctgcaggctgcacgctcattcaagcgtcgaccgaagctccctgataacgaggtgcactgggactctatcattatacaagcaagcaccatgattatctctagggttcccaacatatctgtgcacctgctccatgagccacctgccttgacaaatgaaatgtactgcctagtagtgacggtacaaagccacgagaagactcagattagagatgttaaactgacagcaggactgaagccaggccaagatgcaaacctgacacaaaagacacatgtgacactgcacgggactgaactgtgcgatgaatcttacccggctctgctcacagacatccctgtgggcgatctgcatcccggcgaacagttagagaaaatgctttacgtcagatgtggcacagtaggaagcaggatgttcttagtctacgttagttatctcatcaacaccaccgtggaagaaaaagagatagtctgtaagtgtcacaaagatgaaactgtgaccattgagaccgttttcccctttgacgtggccgtgaagttcgtatctacaaagttcgagcacctggagagggtgtatgccgatatcccatttttgctcatgaccgatctgctctctgcctcaccatgggctctgacaatcgtctcaagcgaactgcaactcgcaccttccatgacaacagtggaccaactggaatcgcaggtggataacgtgattttgcagaccggcgaatctgcatccgagtgtttttgtctgcaatgtccgagtttagggaacatcgaaggcggtgtggccaccggacactacattatttcctggaagcggaccagtgcgatggagaacattcctattataaccaccgtgatcacccttcctcacgtgatagtggaaaatattcctttgcacgtgaatgccgaccttccgagcttcgggcgggtgcgcgaaagtctccccgtcaaataccatttgcagaacaaaacggacctggtgcaggatgtcgagatctccgtcgagccatcagatgccttcatgttcagtggtcttaaacagatccgcttaccagcccaagcattttatacttatcagtacttctgccaagccaccgggtctacccacgggtag

SEQ ID NO: 208889 - DNA, 3057 bp, synthetic construct
  misc_feature 1..3057: note = Description of Artificial Sequence: Synthetic coding sequence
  source 1..3057: mol_type = other DNA
atgagccccacccagtgggacttccccgtggagctgtgctgccggcccatggcgttcgtgaccttgaccgggctggatgtcgtttataacgcggtacaccgagccgtttgggacgctttctgcgcaaatcgcagggcggatagagtgccaatatcattcaaggtgcttcctggggatcatgagtacccaaagtgccgtcccaagcgaacctcctatgagtggtatatccccaagggcattctgaaaactggttggatgaacaagcatctcaacttggtgccggccctggtggtcgtcttttatgagctggattgggacgagccccaatggaaagaaaaacaaagcgagtgcgctactcgagtcgagattgtgaggcagagcttgcagggacgcaacactaaggtagcagtggtgctcatccaaaagaagactccccttccacctggagaagacgttatcgcttctgagagggctgcagccctgtgtaatgcatgcgagctctcgggcaagtcactatttgtcctcccccacacagatcatctcgtgggctacattatcaggctggaaaacgctttttatgaacacgcccaaacgtattattacactgaaatccgcagagtcaaatcacacaaggagtttttgaacaaaactacacatcagctgttatttgtgcggcaccaattcaaaatcgccttctttagcgaactcaaacaggatacgcagaacgccctgaaaaactaccggaccgcttataacctagttcacgagctcagggctcacgaaactaatatactggagattaagactatggccggattcataaactacaagatctgccgactctgcttccaacacaacacccctttggatgccattgcccaattcaggaagcatattgacctctgcaaaaaaaaaatagggtctgccgagttgagctttgaacatgatgcgtggatgagcaaacagttccaggcattcggagacctgttcgatgaggcaatcaagctggggttaaccgccattcaaacccagaatcccggcttttattatcagcaggctgcttactacgcgcaagagaggaagcaactggcaaagactctgtgcaatcacgaggcttctgttatgtatcccaacccggatccgctcgaaacgcaaactggggtcctcgatttttatggacagagatcgtggcggcagggcatcttaagttttgatctgtctgatccagaaaaggagaaagtaggtatcttagccattcagctcaaggagaggaatgttgtgcattcagagatcattatcactcttcttagtaacgcagtggcccagtttaagaaatataagtgccctaggatgaaatcccatctcatggtgcagatgggcgaagagtactattatgcgaaggattacactaaagccttgaaattgctggattatgtcatgtgcgactaccgtagcgagggctggtggaccctcctgacgtccgtgctgacgaccgcgctcaaatgctcatacctcatggcacagctgaaggattacatcacatactcgctggaactgctcgggagagcatccacactgaaggatgaccaaaaaagtcggatagaaaagaatcttataaacgtgctcatgaacgaatcaccagaccctgagccagattgtgacatattggcagtaaagactgctcagaaattgtgggcagaccggatctctttggcagggagcaatatctttaccattggtgttcaggattttgttcctttcgtgcagtgcaaggccaagtttcacgcaccatcgtttcacgtcgatgttcctgtccagttcgacatttacctgaaagccgattgtccccatcctattaggttttcaaagctgtgcgtctcatttaataatcaggaatataatcaattctgtgtgatagaagaagcctctaaagccaacgaagtccttgaaaatctcacccaaggaaagatgtgcctggtcccaggcaaaacccgtaaactactattcaagtttgttgccaagaccgaagacgtgggcaaaaaaatcgagataacatctgtggacctggccctaggcaacgagaccggtagatgtgtggtcctgaactggcaagggggcggcggagacgcggctagctcccaagaggcccttcaggccgcccgaagtttcaaacggcgcccaaagctgcctgataacgaggtgcattgggattccatcatcattcaagcctccacaatgataatctcaagggtacctaacatcagcgtccatcttctccacgagcccccagcccttaccaatgagatgtattgccttgtggtgacggtccagtctcatgagaagacccagatcagggacgtgaaacttaccgcggggctgaagcctggccaagacgctaatctcactcagaagacacacgtaacgctgcacggtacggagctgtgcgacgaaagctatccagccctcctcaccgatattccggtgggcgatctccatcccggagaacagctggaaaaaatgctctatgtgcggtgcggcacagtgggatcacgcatgttcctggtgtacgtctcttacctaatcaacactactgtggaggagaaagagatcgtgtgtaaatgccataaagatgagactgtgacaatcgagaccgtttttccgttcgatgtagctgtgaagttcgtcagcaccaaattcgaacacctggagcgagtgtacgcagacattccctttctcctgatgacggacctcttatcagcctcgccctgggccctgaccattgtctctagcgagcttcagttagccccttccatgacaaccgttgatcaattagagtcacaggtggataacgtcatcctgcagacaggggaatctgcttctgctttgtattatctattggaaaaggacttgtccaatggcgagtacccccaccaccacaattgccaccattccgcggctagggattgtggggagtacccttctccatgtgagtgtcggagtgccgtaatctgggcatgccagcgcgtggtgacctgtcaggtgtcgcctaccgagtag

SEQ ID NO: 208890 - DNA, 2091 bp, synthetic construct
  misc_feature 1..2091: note = Description of Artificial Sequence: Synthetic coding sequence
  source 1..2091: mol_type = other DNA
atggaggacgccggcggcggcgaggagcagggcctgctgttccaggaagagacaattgacctgggcggagacgagtttggttcagaggagaatgagactgcgtctgagggttcgagtccactggctgacaagctgaatgaacatatgatggagtcggtcctgatttctgatagcccaaactccgagggtgacgccggagatctggggcgcgtgcgcgacgaggcggagcctggtggggagggagatccgggtccagagccggcagggacaccatcgcccagcggcgaagcagacggcgactgtgcccctgaggatgccgccccctcttcgggtggagcccctaggcaagacgctgcaagagaagtgcccggtagcgaagccgccaggccagaacaagaacctcctgtggcggaacccgtaccagtatgtaccatattctcccaacgcgctcctcccgcatcgggcgatggcttcgaaccgcagatggtcaagtctcccagtttcggcggcgcctcagaggcgagcgctagaacccccccacaggtggttcagccctctccctccctgagcacgttttttggcgataccgcagccagccactctctggcctcagacttttttgattcattcactactagtgcattcatttcagtgtccaatcctggggctggctctcctgccccagcttcacctcctccgctcgctgttcctggtactgaaggccgccccgagcccgtcgcgatgcgggggcctcaggctgctgcacccccagcctcccccgagccatttgctcatattcaggcagtattcgctggatccgatgaccccttcgccaccgccctgtccatgtctgagatggatagaagaaatgacgcatggctgccgggggaggcaactcgcggagtcctgagggcagttgccacccagcagcgcggggctgtgtttgtggataaggagaacctgacaatgcctggcctgcggttcgacaatatccagggcgacgctgtgaaggacctgatgctaaggtttctgggagagaaggcagctgcgaagcgccaggtcttgaacgctgacagtgtggaacagagctttgtgggcttaaaacagttaatctcatgccggaactggagagcagcagtggacctctgcgggaggctcctcactgcacacggtcaggggtacggcaaaagcgggttgttgacctctcacacaaccgactccctgcagctgtggtttgttcgactggcacttctggtgaagctagggctgtttcagaacgctgagatggagttcgagccttttggcaatttagaccaacccgacttatactatgaatactatcctcatgtttacccaggccgacgcggttcaatggttcctttcagcatgagaatactccatgcagagctccaacaatacctgggaaacccccaggagtcacttgataggctgcataaggtgaaaaccgtgtgttcgaagatattagcaaacctggagcagggcctggctgaggatgggggcatgtcatccgtcacccaagaaggccgccaaggctgctcgtacctggtggcatccattagactatggagaagtcgcttgggaagagtgatgtactccatggccaattgcctattgctcatgaaggactatgttctggcagtagaggcttaccactctgttataaaatactacccagagcaggagccacaactgctctctggcattggtcgcataagtttgcagattggggatattaaaaccgcagagaagtatttccaggacgtggagaaagtcacccagaagctggacggactacaggggaaaatcatggtcctgatgaacagcgcatttctgcacttgggccagaacaactttgccgaagcacaccgattttttactgagatattgcgcatggatcccagaaacgctgtgcagatgctgtctgctagccacccaaccggtaaggagccaagcccgaaagacgctgaagaacacccggaggggcacagggacagcgcagagcctggccctgctcgacctatggtgcctcaacgggccccccctggtcccgccctgtgcgctcaaccatag

SEQ ID NO: 208891 - DNA, 2208 bp, synthetic construct
  misc_feature 1..2208: note = Description of Artificial Sequence: Synthetic coding sequence
  source 1..2208: mol_type = other DNA
atggaggacgccggcggcggcgaggagacccccgcccccgaggcccctcacccaccgcagctggcgccccctgaagagcagggactgttgttccaggaagagactatagatcttggcggcgacgaattcgggtccgaggaaaacgagaccgcctcagaaggctcttcacctctagcggacaagctgaatgagcatatgatggagtctgttctgatttcagatagtcccaattccgagggagatgcgggagacctgggacgagtaagggatgaggccgagccaggcggagaaggagaccctgggcccgaaccggccggcacccctagtcccagcggagaagctgatggcgactgtgctccagaggacgcagctccctcaagcggcggggctcccaggcaggacgcagcaagagaggtgccgggcagcgaggcggcacgacctgagcaggagccccccgtggcagaacctgtacccgtgtgtaccattttttcgcagcgagccccacctgcctccggcgacggtttcgagccacagatggttaaatctcctagtttcggcggcgcatccgaagcctctgccaggaccccgccacaggtcgtccagccctccccttctctcagtacatttttcggggatacggccgccagtcactccctcgctagcgacttttttgattcctttactaccagtgcattcattagcgtttctaacccaggcgcaggcagcccagccccagcaagccctcctcctctggctgtgccgggaactgaggggcgccccgagcccgtcgctatgagaggtccccaggccgcggcaccgccagctagtcccgaaccgttcgcccatattcaggctgtctttgcaggatccgatgacccgttcgccaccgccttatctatgagcgaaatggatcgtcgcaatgacgcatggcttccaggggaagccaccagaggagtattacgcgctgtcgccacccagcagaggggagccgtgttcgtagacaaagaaaacctcactatgcccggactgaggtttgacaatatacaaggcgatgctgtgaaagacctaatgttgcgatttttgggcgagaaggccgctgccaaaaggcaggtgctgaacgccgattccgtggaacaatcttttgtaggattgaagcagttaattagttgtagaaactggcgggccgccgtggacctctgcggcaggctgctgacagctcatggccaaggttacgggaagtcaggattgttgacctctcacacaaccgacagtcttcaattgtggttcgtcagattggcactcctggttaaattgggcctgttccagaacgctgagatggagtttgagcccttcggcaacttagaccaacctgatctgtactatgaatattaccctcatgtgtacccaggccgccgcggctctatggtcccattctctatgagaattctccacgccgagctgcagcagtacctcgggaacccccaagagtcactcgatcgcctgcacaaggtgaagactgtgtgtagtaaaattttagctaatctcgagcaggggttagcagaagacggggggatgtccagtgttacccaagaagggagacaagcttctatccgtttgtggcggtctcgactgggacgggttatgtatagcatggcaaactgtctgctgctcatgaaggactatgtgttagcagtggaggcatatcactccgtgataaaatactacccggagcaggaaccccaattgttgagtgggatcgggcggatctctctgcagattggagatatcaagacggccgaaaagtatttccaggacgtcgaaaaggtgactcagaagctggacggacttcaggggaagatcatggtgctgatgaactcagcattcctacacctgggacagaataatttcgccgaagcccatcggttcttcaccgaaattctccgcatggacccccgaaacgccgtagccaacaacaacgccgctgtgtgtcttttatacctgggtaagctgaaggatagcttgagacaacttgaggccatggttcagcaggaccccagacactaccttcacgaatccgtcctctttaacctgaccactatgtacgaactggaaagctcacggtcaatgcagaagaagcaagcgcttcttgaagccgttgccgggaaagagggggactccttcaacacacaatgcttgaagctcgcttag

SEQ ID NO: 208892 - DNA, 2208 bp, synthetic construct
  misc_feature 1..2208: note = Description of Artificial Sequence: Synthetic coding sequence
  source 1..2208: mol_type = other DNA
atggaggacgccggcggcggcgaggagacccccgcccccgaggccccgcaccccccgcaattagcccccccagaagaacagggcctgcttttccaggaggaaactattgatttaggtggtgacgagttcggaagcgaggagaacgaaacagcaagcgaagggtcaagtcccctggcagataagctcaatgagcacatgatggaatccgtgctgatatctgactctcccaattctgagggagacgccggggatctgggccgtgtaagagacgaggctgaacctggtggcgagggtgatcccggcccagagccggcgggcaccccttctccctccggggaagccgatggtgattgcgccccagaagacgcagcgccctcttccggtggagctcctcggcaggatgcagctagagaagtccccggaagcgaagccgctagaccagagcaggagcctccagtggctgaaccagttccggtttgtaccatcttcagccaacgggctccaccggctagcggcgatggatttgagcctcagatggttaaatcacctagctttggcggagcatcagaagcttccgcccgaacccctcctcaggttgttcaacccagccccagtctttctacatttttcggcgacaccgccgcgtctcattccctggccagtgacttctttgattcattcaccacctccgcatttatttctgtgagcaaccccggggctgggagcccagcccctgcgtcccctcctccactcgcagttcctggcacagaaggccgccccgaacccgtggcaatgagaggcccccaggccgcagcgccgcctgccagccctgagccttttgcccatattcaggccgttttcgctggatccgatgaccctttcgccaccgccctctcgatgtcagaaatggaccgccgcaacgacgcctggcttccaggagaggcaacccgcggagtcttgcgcgccgtagcaacacagcagaggggggccgtcttcgtagataaagagaacctgacgatgccgggactacgcttcgacaatatacagggggatgcggtgaaagatttaatgctccgttttctgggtgagaaagcggccgcaaagagacaggtgcttaatgctgactcagttgaacagagctttgtcggactcaagcagttgatctcctgccgaaattggagggcagccgtggacctgtgcggccggctactgaccgctcacggccaagggtacggaaaatctgggctgttgacatcacataccacggactctctgcagctgtggttcgtgcgcctcgccttactagtgaagctgggcttatttcaaaatgccgaaatggagttcgaacctttcggtaacctggaccaacctgacttatactacgagtattatccacatgtgtatcccgggagacggggctcaatggtgccttttagtatgagaatcctccacgccgagctgcagcagtacttggggaacccacaggaaagtttggatcggctgcacaaggtgaagaccgtctgctcaaaaattctcgccaatctggaacagggtctggccgaggacggcgggatgagcagcgtaacacaggagggtcggcaagcatcgataaggctgtggcggtctcgacttggcagagtcatgtactcaatggcaaactgtctactgctgatgaaggattacgttttagccgtggaagcctaccactctgttatcaaatattatcctgagcaggagcctcagctcctgagcggcataggaagaatctccttacagatcggggacatcaagacggctgagaagtactttcaggacgtggaaaaagtgacgcagaagttggatggcttacagggcaaaatcatggttctaatgaatagcgctttcctacatctcggccaaaacaattttgctgaagctcacaggtttttcacagagatcttgaggatggacccgaggaatgcagttgctaataacaatgctgctgtgtgtcttctctacctgggcaagctaaaagactccctccgacagctcgaggctatggtgcaacaggacccaaggcattacctgcacgaatctgtgctgttcaacctcacaaccatgtacgaattagaatccagccggagcatgcagaagaagcaggccttgttggaagcggtggccggcaaagagggcgattctttcaatacccagtgccttaagctagcctag

SEQ ID NO: 208893 - DNA, 423 bp, synthetic construct
  misc_feature 1..423: note = Description of Artificial Sequence: Synthetic coding sequence
  source 1..423: mol_type = other DNA
atgagcggcagcttctacttcgtgatcgtgggccaccacgacaacccagtgtttgagatggagttcctccccgcgggcaaagccgagagcaaagacgaccaccgtcatctgaaccagtttattgctcacgcggccctggacctagtggatgagaatatgtggctcagcaataacatgtacctgaaaactgtggataagttcaacgagtggtttgtatcagctttcgtcactgcaggtcacatgcgctttatcatgctgcacgacatccgacaggaggacggcatcaaaaattttttcacagacgtgtacgatttgtatataaagttttctatgaacccattctatgagccaaatagtcctatcaggtcttcagcctttgaccggaaggtccagttccttggcaagaaacatcttctgtcttag

SEQ ID NO: 208894 - DNA, 423 bp, synthetic construct
  misc_feature 1..423: note = Description of Artificial Sequence: Synthetic coding sequence
  source 1..423: mol_type = other DNA
atgagcggcagcttctacttcgtgatcgtgggccaccacgacaacccagtcttcgagatggaatttctacctgcagggaaggccgagagcaaggatgatcaccgacacctgaatcagttcatcgcgcatgcggccctggatctggttgacgaaaacatgtggctcagcaacaatatgtacctgaagaccgttgataagtttaatgaatggtttgtgtcagcctttgtcactgcaggccatatgcggttcatcatgctgcacgatattaggcaggaggacggaatcaagaactttttcaccgacgtttatgacctttacataaaattctccatgaatcccttctatgagccaaattctcccatccggtcatctgccttcgacaggaaagtgcagttccttggcaagaaacatttactttcttag

SEQ ID NO: 208895 - DNA, 423 bp, synthetic construct
  misc_feature 1..423: note = Description of Artificial Sequence: Synthetic coding sequence
  source 1..423: mol_type = other DNA
atgagcggcagcttctacttcgtgatcgtgggccaccacgacaacccggtctttgaaatggaatttttgcccgcagggaaagctgagtccaaggacgatcaccgccacctcaaccagttcatagcccacgctgcattagacctggtcgatgaaaatatgtggctgagcaacaatatgtaccttaaaaccgtagacaaattcaatgagtggtttgtcagcgcctttgtgaccgcgggacacatgagatttatcatgcttcatgatatccggcaggaggacggaatcaaaaacttcttcactgacgtgtacgacctgtatatcaagttctccatgaacccattttatgagcccaactctccaattcggagctcagcattcgacaggaaagtgcaattccttggaaagaaacaccttctcagctag

SEQ ID NO: 208896 - DNA, 423 bp, synthetic construct
  misc_feature 1..423: note = Description of Artificial Sequence: Synthetic coding sequence
  source 1..423: mol_type = other DNA
atgagcggcagcttctacttcgtgatcgtgggccaccacgacaaccctgtctttgagatggagttcctaccagcaggtaaagccgaatctaaagatgatcatcggcacctgaaccaattcatcgcccatgccgcactggatctggtggacgaaaatatgtggctttctaataatatgtacttgaagaccgtagataagtttaacgagtggtttgtgagtgcctttgtaacggcaggccacatgagattcatcatgctgcacgacattaggcaggaagacggcatcaagaatttctttactgacgtttatgacctctacatcaagttctccatgaacccattctacgagccaaacagtccaatcagatcctcagcattcgaccgtaaagtccagttcctgggaaaaaagcacctgcttagttag

SEQ ID NO: 208897 - DNA, 444 bp, synthetic construct
  misc_feature 1..444: note = Description of Artificial Sequence: Synthetic coding sequence
  source 1..444: mol_type = other DNA
atgagcggcagcttctacttcgtgatcgtgggccaccacgacaaccccgtgttcgagatggagttcctgcctgcggggaaggctgaatcaaaagacgaccatcgtcacttaaaccagttcatcgcccacgccgctctggatctggtcgacgaaaacatgtggctctctaacaatatgtacctgaagaccgtggataaattcaatgaatggtttgtgagcgccttcgtaaccgccgggcatatactgacattccttgtgaagatgcggttcattatgctacacgacatcaggcaggaggatggaatcaaaaattttttcacagacgtttatgacttatacattaagtttagtatgaaccccttttacgagcctaattcgccgattcggagttccgcattcgaccggaaggtgcagtttctcggaaagaagcaccttcttagctag

SEQ ID NO: 208898 - DNA, 525 bp, synthetic construct
  misc_feature 1..525: note = Description of Artificial Sequence: Synthetic coding sequence
  source 1..525: mol_type = other DNA
atgagcagctggaagcaggaccggagcggcctgcggagcaccgagctgaacgtgttggagtaccagccactatgcgccgtgaggagccacattctgaagaccatgtctggctcattttatttcgtgattgtaggtcaccacgataaccccgtgttcgaaatggagttcttaccagccgggaaggctgagtccaaagatgatcacaggcatctaaaccagttcatagcacacgccgctctcgatttggtggacgaaaacatgtggctcagcaataacatgtacttgaagaccgtggataagttcaatgagtggtttgtgagtgctttcgtaaccgctggtcacatgcggtttattatgctccacgacatccggcaggaggatggcatcaagaacttttttaccgatgtctatgatctctacattaaattttccatgaatccgttttatgagcctaattcacctatccgcagctcagctttcgacagaaaagtccagttcctgggcaagaaacacttgttgagctag

SEQ ID NO: 208899 - DNA, 225 bp, synthetic construct
  misc_feature 1..225: note = Description of Artificial Sequence: Synthetic coding sequence
  source 1..225: mol_type = other DNA
atgagcggcagcttctacttcgtgatcgtgggccaccacgacaaccccgtgtttgaaatggagttccttcctgctggcaaggcggagagcaaagacgaccaccgccacctgaaccagtttattgcacatgccgcccttgatcttgtggatgagaatatgtggttatccaataatatgtacctgaagacggttgacaagtttaacgaatggttcgtgagcgcatag

SEQ ID NO: 208900 - DNA, 423 bp, synthetic construct
  misc_feature 1..423: note = Description of Artificial Sequence: Synthetic coding sequence
  source 1..423: mol_type = other DNA
atggccgtgtgcatcgccgtgatcgccaaggagaactaccccctgtatatcaggagcactccaaccgagaacgaactaaagtttcattatatggtacacactagtctggacgtcgtcgacgaaaagatttccgcaatgggtaaggccctggtcgatcaaagggagctttatctggggttgttgtatccaactgaggattataaggtgtacgggtatgtcaccaactccaaagtgaaatttgttatggttgtagatagttcaaacactgcattgagagacaatgaaatccggtccatgtttcgcaagctgcacaattcgtacacagacgtcatgtgcaaccctttctataaccccggagaccgaatacagagttccagagcgttcgacaacatggtgacaagcatgatgatacaggtctgctag

SEQ ID NO: 208901 - DNA, 357 bp, synthetic construct
  misc_feature 1..357: note = Description of Artificial Sequence: Synthetic coding sequence
  source 1..357: mol_type = other DNA
atgagccggcaggccaaccggggcaccgagagcaagaagatgagctccgagcttttcaccctgacctatggagccctggtgacgcaactgtgcaaagattacgaaaacgatgaagatgtcaataaacaactggataagatgggattcaacatcggtgttcggttaatcgaagactttctagcccggtccaatgtaggtaggtgtcacgacttcagggaaacagctgacgtcatcgctaaagaaagaaaaatgtttctggggaagcaaaacaagactaagcggcaggctaaactgtacgacgctgtaaaggagcgtggggctgcttcttgtaccgacgcctcccctctgctttcatag

SEQ ID NO: 208902 - DNA, 405 bp, synthetic construct
  misc_feature 1..405: note = Description of Artificial Sequence: Synthetic coding sequence
  source 1..405: mol_type = other DNA
atgggcttcaacatcggcgtgcggctgatcgaggacttcctggcccggagtaacgtcggccgctgccacgactttcgggaaaccgccgacgtgatagcaaaggtcgcgtttaagatgtaccttggcattaccccctctattaccaattggtcacccgcaggtgatgagttctcgctcattcttgaaaacaatccactggtggatttcgtggagctgcccgataaccattctagcttaatctatagtaacctactgtgtggagtgctacgtggtgccctggagatggtccaaatggctgtggaggctaaattcgtgcaggataccttgaagggcgacggcgtgacagagatcagaatgaggttcatcaggcggatcgaggacaatctgcccgctggggaggaatag

SEQ ID NO: 208903 - DNA, 405 bp, synthetic construct
  misc_feature 1..405: note = Description of Artificial Sequence: Synthetic coding sequence
  source 1..405: mol_type = other DNA
atgggcttcaacatcggcgtgcggctgatcgaggacttcctggcccgctccaatgtaggccggtgtcatgacttccgggaaacagctgatgtaatcgccaaggtcgcgtttaaaatgtacctcggtatcaccccctccattacgaattggtctccagccggagatgaatttagcctgatcctggagaataaccccctggtcgactttgtagagttacccgacaatcacagttctttgatctattctaacctgttgtgcggggtactccgcggagcacttgaaatggtgcagatggctgtggaggctaagttcgtgcaggacaccctcaagggggacggcgtgacagagatacgtatgagattcatccggagaatcgaggacaacctccctgcaggagaggagtag

SEQ ID NO: 208904 - DNA, 543 bp, synthetic construct
  misc_feature 1..543: note = Description of Artificial Sequence: Synthetic coding sequence
  source 1..543: mol_type = other DNA
atgagccggcaggccaaccggggcaccgagagcaagaagatgagcagtgaactttttaccttgacttacggggccctggtgactcagctgtgcaaagattatgaaaacgatgaagatgtcaataagcagctcgacaagatgggttttaacattggtgtacgtctgatcgaagatttcctcgcaaggtcaaatgtcggcagatgtcacgatttcagggagacagccgacgtgatcgcaaaggtggcttttaaaatgtatctaggcattacgcccagcatcactaattggtcacccgccggcgacgagttttcactgatcctcgagaacaatcctcttgtagattttgtggagcttcctgacaaccacagctccctcatctactctaatcttctatgcggtgtcctgagaggggctctggagatggttcagatggcggtggaggctaagttcgtgcaagatacactcaagggggacggggttactgagattcgtatgcgcttcatacgaagaatcgaagacaatctgcctgccggtgaagaatag

SEQ ID NO: 208905 - DNA, 498 bp, synthetic construct
  misc_feature 1..498: note = Description of Artificial Sequence: Synthetic coding sequence
  source 1..498: mol_type = other DNA
atggccatcttcagcgtgtacgtggtgaacaaggccggcggcctgatttaccagcttgatagctatgcccctcgggccgaagccgagaaaacattcagctatcccctcgatcttctcttgaaacttcacgatgagcgggtgcttgtggcctttgggcaacgtgacggcattagagtggggcacgccgtcttagcaatcaacggcatggatgtgaacggtcgttacacagcggacggcaaggaaatgctggagaccgacaccttcaagttacattgttaccagaccctcacggggatcaaattcgtcgtcctcgctgatcctcggcaggccggcattgactccctgctgcgaaagatttacgagatctattcagattttgcactgaaaaaccccttctatagcttggagatgccaatcaggtgcgagctcttcgaccagaatctgaagctggcattggaagtcgcagaaaaggcggggaccttcggtcctggctcttag

SEQ ID NO: 208906 - DNA, 660 bp, synthetic construct
  misc_feature 1..660: note = Description of Artificial Sequence: Synthetic coding sequence
  source 1..660: mol_type = other DNA
atggccatcttcagcgtgtacgtggtgaacaaggccggcggcctgatctatcagttggattcttatgcccctcgtgccgaggccgagaagaccttcagctatccccttgacctgttactcaagcttcacgatgagcgggtgctcgtcgccttcgggcagagggacggcattcgagttggtcatgccgtgctagcgattaatggtatggacgtgaacggccgctataccgccgatggcaaagaagtgctcgaatacctagggaacccagctaactatccagttagcatacgctttggccggccgagacttactagcaatgagaagctgatgttggcctcaatgttccactcgctcttcgccatcgggtctcagctgtctcctgagcagggtagtagtggaatcgaaatgctggaaactgacaccttcaaactgcactgctaccagacattgaccggcatcaagttcgtggttctagccgatcctagacaagccggcatcgactcactgctccgcaaaatttatgaaatttattccgattttgccctgaagaatcctttttactcactggaaatgcccattcgctgcgaattgttcgaccagaatctgaagctcgccctggaagtcgcagagaaagccggcaccttcggccctggaagctag

SEQ ID NO: 208907 - DNA, 4308 bp, synthetic construct
  misc_feature 1..4308: note = Description of Artificial Sequence: Synthetic coding sequence
  source 1..4308: mol_type = other DNA
atggcccagtgcgtgcagagcgtgcaggagctgatccccgacagctttgtgccttgcgtggctgcattatgtagcgatgaggctgagagactcactcgcctaaaccacctctcattcgcagaactactcaagccattcagccgcctgactagcgaggtacatatgcgggatccaaacaatcaactgcacgttattaaaaatctgaaaatcgctgtcagcaatatcgtgacccagcctccccagcccggtgcaattcgtaagttgttaaacgacgtcgtctcaggtagtcagcccgccgagggactggtggcaaatgtcatcactgctggagactatgatctcaacatttctgccactacaccatggtttgagtcgtatcgagagaccttcctgcagtctatgcctgcactggatcacgaatttctgaaccactatcttgcctgtatgttggtcgcaagcagctcagaagctgagccggttgagcaattttctaagctgagccaagagcagcatcggatccagcacaacagtgactactcctatccaaagtggtttattcccaataccctgaagtattatgtgctcctccatgacgtctccgcaggcgacgagcagcgggccgaatcgatatatgaagagatgaaacagaaatatggaacacaggggtgctacctgctaaaaatcaacagcaggaccagcaatcgggccagcgatgagcagattcccgacccctggtctcaatatctccagaaaaatagcatccagaaccaggaatcctacgaagatgggccgtgtacaatcacctcaaacaaaaacagcgataataacctcttgagcctggatggattggataatgaggtcaaagatggattgcctaacaacttcagggcgcaccctctccaactggaacagtcttcggacccttcaaatagcatagacgggccagatcaccttaggtccgcttccagtctgcacgaaactaaaaaaggcaatactggcatcattcacggagcttgtctaaccctcacagatcatgaccggatccgacagtttatccaggagtttaccttccgtggcctactgccgcatattgagaaaactattcggcagttgaacgatcaactaattagccgaaagggtttaagtaggagtctgttttccgctacaaaaaagtggttctcaggaagcaaagtaccagaaaaatcgattaacgatctgaaaaatacgagcgggctgttgtatcctcccgaagccccagaattacaaatccgcaagatggcggatctatgttttctcgtgcaacattacgatttggcatacagctgttatcacaccgctaaaaaagactttcttaacgatcaggctatgctttatgccgcaggtgccctggagatggccgctgtatctgcgtttctgcagcccggcgccccacgcccataccctgctcattacatggacaccgccatccagacataccgcgatatttgtaagaatatggttttggccgaaagatgtgtactattaagtgcagaactgctcaagtctcagtcaaaatatagcgaggctgccgctctgctgatcaggctgaccagtgaggattcagacttacggagtgctttgctgttggagcaggccgcccattgtttcattaacatgaagtcccccatggtgcgcaagtatgcctttcacatgatcctggctggtcatagattttctaaggctgggcagaagaaacatgccctgagatgctattgccaggcaatgcaggtttacaaggggaaggggtggtctctcgcagaagatcacatcaactttacaatcggtaggcagagctacaccctgagacagctggataatgcagtttcagcctttcggcacatattaatcaacgaatctaagcaaagcgccgctcagcagggcgcttttctacgcgagtatctctacgtctacaagaatgtcagtcagctatctcctgatggccctctgccgcagttgccgcttccatatatcaactctagtgccactcgcgtcttcttcggtcatgatcggcgacccgccgatggggaaaagcaggccgctactcacgtctctctggatcaggaatatgacagcgaaagtagccaacagtggagggaactggaagaacaggtagtgtcagtggtaaataaaggtgtgataccctcgaatttccacccgactcagtactgcctcaactcctacagcgacaacagcaggttccccctggccgtagtggaggaacctatcaccgttgaagtcgccttccgcaatcctctcaaggtgctgctgctgctcaccgatttgagcttgctgtggaagtttcatccaaaggatttctccggaaaggataatgaggaggtgaaacaactggttacaagcgaacccgagatgattggggccgaggtcatatccgagtttctaatcaatggcgaggagtctaaggtcgcacggttgaagctattcccgcatcatataggcgaactccatattctgggagtggtgtataatttaggcacgatccagggatcaatgacggtggatgggattggggcactcccaggctgccataccgggaagtattcactgtctatgtccgtgagggggaaacaggaccttgaaatccagggaccgcggctaaacaacacaaaagaagagaaaaccagcgtcaaatacggcccagatcggagactcgacccaatcatcaccgaggagatgcccctcctcgaggtctttttcatccattttccaaccgggctgctgtgtggagagattcgtaaagcatatgttgagtttgtgaacgtttccaagtgccctctgactggcttgaaagtggtcagcaagcgacccgagttttttacgtttggcggcaacacagctgtgcttacaccactcagtccttccgccagcgaaaattgctctgcctacaaaaccgtggtaaccgacgccacatccgtctgcacagcgcttatttcatccgcctcctccgttgattttggtattgggaccgggtcccagccagaggtaatacccgtcccactgcccgacactgtccttctgcccggagccagcgtgcagctgccgatgtggttgcgagggcccgacgaagagggcgttcatgagatcaactttttgttctattatgaatcagtcaagaagcaacccaagatcagacatagaatcctgaggcacaccgccatcatttgtacgtctaggtctttgaatgtgagagcgaccgtgtgtcgcagcaatagtctagagaacgaagagggtcgcggaggcaacatgctcgtctttgttgacgtcgagaatactaacacatccgaggctggggtgaaagaattccacattgtgcaagtctcatcctcgtccaaacactggaagctgcagaaatctgtcaacctgtctgaaaacaaggataccaagctggcatcaagagagaagggcaaattctgcttcaaggccatccgctgcgaaaaagaggaagcggcgactcagtcttctgaaaaatacacatttgcagacataatttttggaaatgagcagatcattagctcagctagtccatgcgccgatttcttttacagaagcctatcctcagagttgaaaaagccccaggcacacctccccgttcacacagagaaacagtctacagaagacgccgtccgccttatccaaaagtgtagtgaagtggatctgaacattgtcatactgtggaaagcctacgtcgttgaagactccaagcaattgatcctggagggccagcatcacgttatactacgcaccatcggcaaggaggctttctcatatcctcagaagcaggaacctcctgaaatggaacttctaaagttctttagacccgaaaatattaccgtatcatctagaccttcagttgaacaactttcctctctgattaaaacatccttgcactatcccgagtccttcaatcaccccttccatcaaaagtctctgtgtctggtgccagtgaccttgctgttgagtaattgttctaaggccgacgtggatgtaatcgtggatttgcggcataaaacaacatccccagaagcactcgaaatacacggctcctttacttggctggggcaaactcagtacaaactgcagctgaaatcccaggagatccactcattacagctcaaggcgtgtttcgtgcataccggagtctacaacctgggaacccccagagttttcgctaaactatccgatcaggtgacggtctttgagaccagccagcagaacagtatgcccgccctgatcattattagtaacgtgtag

SEQ ID NO: 208908 - DNA, 3420 bp, synthetic construct
  misc_feature 1..3420: note = Description of Artificial Sequence: Synthetic coding sequence
  source 1..3420: mol_type = other DNA
atgagcgtgcccgactacatgcagtgcgccgaggaccaccagaccttgttggtcgttgtgcaacccgtggggattgtgagcgaggaaaacttttttcgaatatacaaaagaatctgctctgtgtcacagatcagtgtccgggattctcagcgggtgttgtacatacgttataggcaccactatccgcctgagaacaatgagtggggagattttcagactcacaggaaggttgtgggactgatcaccatcactgattgttttagtgccaaggattggcctcagacgttcgagaagttccatgtgcagaaagaaatctatgggagcaccctctatgactcacgcctatttgtgttcggtctccagggcgagattgtcgagcaacccagaaccgacgtggcattttatccaaattatgaggactgtcagaccgtcgagaaaagaatcgaagactttatcgagagtctcttcatcgttctagaaagtaagagactggatcgggccaccgacaagagcggcgacaaaatcccccttctatgtgtacccttcgagaagaaggacttcgtcgggctagacaccgactcacggcactacaaaaagcgttgtcaggggcgtatgcgaaagcacgtcggagatctgtgccttcaggccgggatgctccaggattccctggttcattatcatatgagtgtggagctgcttcgtagcgtcaacgacttcctgtggctgggggccgccctggaaggactctgctccgccagcgtgatctaccactatcccggaggaacgggcggtaaaagtggagcacgtcgcttccagggatcaactcttccagcagaagcagcgaaccgccatcggcccggagctttaacgactaacgggatcaacccggacacttcaacggagataggccgggctaaaaattgcctcagccctgaagacatcatcgataagtacaaggaagcgatcagctattactctaaatacaagaatgctggggtcatcgaactcgaagcttgtattaaggccgtgcgcgtcctggccattcagaagcgcagtatggaagctagcgagtttctgcaaaacgccgtctacatcaacctgcgccagttgagtgaggaggaaaagatccagcgttactcaatactttcggagctctacgaactgattggttttcatagaaagagcgccttctttaagcgtgtggcagctatgcaatgcgtagccccctcgatcgccgagcccgggtggcgagcttgctataagttgctcttagagaccctcccagggtatagtctgagcttggatcccaaagacttcagccggggtacacacaggggctgggccgccgtgcagatgagactattacacgaactagtatacgcgtcccgtcgaatgggcaatcctgcacttagtgtgagacacctcagtttcctgctgcagactatgctggattttctgtctgaccaagagaagaaagatgtggcccagtcattggagaactacactagcaagtgtcccggcactatggagcccattgcgctgcctggcggcctcactctgccccctgtcccgttcacaaagctgcccattgtgcgtcacgtgaagctgcttaacctgcctgccagcctgcgtccgcataaaatgaagtctcttctgggtcagaatgtatccacgaagtcccccttcatctatagtcccatcatcgcgcacaataggggagaggagcgcaacaagaaaatcgactttcagtgggtccagggtgatgtttgtgaggtccagcttatggtgtacaatcctatgccctttgagttgcgagtggagaatatgggactcctcacatcaggcgtggaattcgagtctttgcccgctgctctcagtctgcccgcggaaagtggcctttacccagtaactctggtgggtgtgccgcagaccaccgggactattaccgtgaacggttatcacacgacagtcttcggtgtcttctctgactgtctgctagataacctgcctgggattaaaacatcaggctcgacagtagaagtcataccagccctgcctagactgcagatctctacatcgcttcctcggtctgcccattccctgcagccctcttccggggatgagatctccactaacgtttcagttcagctttacaatggcgaatcccaacagctgatcatcaaactcgaaaacattggtatggagccacttgaaaagcttgaagtaacaagcaaggtgctgacaaccaaggaaaagctctatggggacttcctttcctggaaactggaggagacgctggcccaattccctttacagcctgggaaagtggctaccttcaccatcaatattaaggttaagctcgacttctcatgccaggaaaatctgcttcaggacctctcagatgatgggatctctgtgagtgggtttccgctttcctctccatttcgacaggtggtacgaccccgcgtggaggggaaacccgtgaacccaccagagtcaaataaggctggggactactcccatgtgaagacactagaagccgtgcttaatttcaagtacagcggcggacccggtcacactgaaggctattaccgcaatttgagcttaggcctgcacgtggaagtggagccatccgttttcttcacccgcgtgtctaccctgcctgcgacaagcacccgccagtgtcatttgcttctggatgtattcaattcaacagagcacgagctgaccgtcagtactcgctccagcgaagccctcattctgcacgcaggcgagtgtcagcgtatggccattcaggtggataagtttaatttcgagagcttccctgaatcaccaggggagaagggacagttcgccaaccctaaacagctggaagaggagaggcgggaggcgcgaggcctggagatccatagcaaactgggtatatgttggcgaatccccagcctgaagcgcagtggcgaagcttccgtcgaaggcctgctgaaccaactagtgctcgaacacctgcagcttgcacctctgcagtgggacgtgctggtggacggtcagccctgtgatcgcgaggccgtcgcggcttgtcaagtgggcgacccggtgcgtctggaggtgaggctaactaaccgatccccaagatcggtggggcctttcgcgctgaccgttgtacccttccaggatcatcagaatggcgttcataactacgatctccatgatactgtaagcttcgtcgggagcagtaccttctacctagatgctgtacagccatccgggcagtccgcatgcctgggggccctactctttctgtatacaggcgatttctttttgcacatcagattccatgaagattccaccagtaaggaattgcctcccagctggttttgcttgcccagcgtgcatgtgtgtgcactggaggctcaggcctag

SEQ ID NO: 208909 - DNA, 3741 bp, synthetic construct
  misc_feature 1..3741: note = Description of Artificial Sequence: Synthetic coding sequence
  source 1..3741: mol_type = other DNA
atggtgcccgccggcgaccaggaccgggccccccaccggggcaagccagcacaggctggggctagaaccagtcgggcctctcgcgctctgaggtcttggaggcggtctcaggctgctcgagccactgtgacccatccacgcggtggccacgatagaggcagccacggcggataccgggagggccacagaggttgcagacgtgacccgcagtgggcttccgccggcccgccacctctttcatttaccgaagaagttaagttcgaactgcgggcattgaaggattgggattttaaaatgtccgtacccgactacatgcagtgcgccgaggaccaccagaccctgctggtggtggtccaacccgtcgggattgtctcagaggaaaactttttcaggatatacaaaagaatttgctctgtgtcacagattagcgtgcgagacagccaaagagtgctttatatccgctacagacatcactatcctcccgaaaataacgaatggggggactttcagactcaccgtaaggtggtaggactcatcacgatcacagattgctttagcgctaaagactggcctcagacctttgagaagtttcacgtccagaaagagatttacgggagtaccttatacgatagtcgcctatttgtctttggcctgcagggtgagatcgttgagcagccccgcacagatgtagcgttttaccccaactacgaagactgtcaaacagtggagaagcgcattgaggactttatcgagagcctgtttatcgttttggagtcaaaacgcttggaccgcgcgaccgacaaatctggcgacaagatccctctcctgtgtgtcccattcgagaagaaggattttgtggggttggatacagactctagacactataaaaaacggtgccagggaagaatgcgcaaacacgtgggtgacctgtgtctgcaggccgggatgctgcaggacagtctcgtgcactaccacatgtcagtggagcttttaaggtctgtgaacgattttctttggcttggagctgctctggaaggcctgtgctctgcgagcgtgatttatcactacccggggggtactggcggcaaaagcggagcacgacgttttcaggggtccaccctgccggctgaggccgccaatcgtcacaggcctggcgcccaggaggtgcttatagaccctggcgccctaaccaccaacggtattaatccagacacctccacagagatcggtagagccaaaaactgtctttcccccgaggacattattgacaagtataaggaagctatcagctattactcaaaatacaagaacgccggagtgattgagctcgaggcctgtatcaaggcagtcagggttctggcgatccagaaaagatccatggaggcctccgagttcttgcaaaatgctgtctacataaacttgcgccagcttagcgaagaggagaaaatccagcgatacagcatactgtctgaactctatgagctgatcggtttccatcgcaagtctgcctttttcaaacgggtggcggccatgcagtgtgttgcaccttctatcgccgaaccaggctggcgggcatgttacaagctcctgcttgaaactttgcccggatactctctcagcctggaccctaaagatttcagcaggggcactcatcggggttgggcagcagtgcaaatgcgattactgcacgaactcgtgtatgcatcacgcagaatgggaaacccagcactgagtgtacggcacctgagtttcctgttgcagaccatgcttgatttcctttccgatcaggagaagaaagacgttgcacagtcactggaaaactatacttctaagtgcccaggtaccatggaaccaatcgcacttccgggtggactcactctccccccggttccattcactaagctgcccatcgtgcggcacgttaaactcttgaacctgccggcttccctacgcccacacaaaatgaagagtttgctaggacaaaacgtttctacaaagagcccattcatctattcacccattatcgctcacaaccgtggagaggaacggaacaagaagattgacttccaatgggtgcaaggagacgtgtgtgaggttcagctcatggtttacaatcctatgccgttcgaattacgcgtcgagaacatgggactgctgaccagtggcgtggaattcgagagcttgccagccgcactcagcctccccgccgaatccggactatatccagttacccttgtcggggtgccacagacgactggtaccatcaccgttaacggataccatacaacggtgtttggtgtgttcagcgactgcctgctggataatctgccggggataaaaacatctggcagtacggtggaagtgattcctgcactaccccgcttacagatcagtacctcactccctcgctccgcccattcactgcagccatcttctggtgatgaaatatccacaaatgtcagcgtccagctgtacaatggcgaaagtcagcagcttataatcaaactcgagaatatcggcatggagcctcttgagaaactcgaggtcacttccaaggtgctgacgactaaagagaagctctatggcgattttctttcctggaaactggaggagacactggcccaattccctctacagccggggaaagtggctaccttcacaatcaacattaaagtcaagttagacttttcgtgccaggagaatctgctccaggatctcagcgacgacggcatatctgtcagtggctttcctctaagcagtcctttccgccaggtagtccgcccccgggttgaaggcaagcccgtgaacccaccggaaagtaacaaggccggagattattcgcatgtaaaaactctcgaagctgtactgaacttcaagtacagcggcggccccggccacaccgaaggctattatcgtaacctgtctctgggactgcacgtcgaggttgagccctccgtgtttttcactagggtgtcaacactgccagctactagcaccagacagtgtcacctgctgctggacgtgtttaattctactgagcatgagttgactgtgagcactcgttcatctgaagccctcatcctgcacgcaggggagtgccagagaatggcaatccaggtggacaaattcaacttcgagtctttccctgagagccccggcgagaagggacagttcgctaatcctaagcagttagaagaggaaagaagagaggcccggggtctggagatccacagtaagctgggcatctgctggcggattccttctctgaaacgttctggcgaggcctcagtcgagggacttctgaatcaactggtgctggagcaccttcagttggcacccctgcagtgggatgtcttggtcgatggtcagccatgcgaccgggaggcagtggcagcctgccaagttggagaccctgtcaggcttgaggtcaggctgaccaatcgttcgcccaggagcgttggcccgtttgcgctgacggtcgtgcctttccaggaccaccagaacggggtgcacaactatgaccttcatgacacagtctcatttgtcggcagttccaccttttacctggacgcagtccagccatctggacagagcgcctgcttgggggcacttctgttcctttacacaggcgacttcttcctgcacattcggtttcatgaagactccactagcaaggagcttccaccgagctggttttgtttaccttcagtgcacgtctgtgcgctggaggcccaggcatag

SEQ ID NO: 208910 - DNA, 3447 bp, synthetic construct
  misc_feature 1..3447: note = Description of Artificial Sequence: Synthetic coding sequence
  source 1..3447: mol_type = other DNA
atgagcgtgcccgactacatgcagtgcgccgaggaccaccagaccctgctagtagtcgtccagccagtcgggatcgtgtccgaggaaaacttcttccgtatctacaagagaatctgcagcgttagccagatttccgtgagggactcccagcgtgtactgtacatccgctatcgccaccattatccacccgagaacaacgaatggggagatttccagactcaccggaaggtggtcgggctgatcactattacagactgcttttcagccaaagactggcctcaaaccttcgaaaagtttcacgtccagaaagagatttacggaagtactctgtacgatagccgattgttcgtgtttgggttgcaaggagaaattgttgaacagccacgtacagacgtggctttttaccccaattatgaggattgtcagactgtcgaaaaaagaattgaagatttcatagagtctttattcatcgtgctggagtctaaaagactggaccgcgcaaccgataaaagcggcgacaagatcccactgctgtgtgtacccttcgaaaagaaggacttcgttggccttgacactgacagcaggcactacaagaagagatgtcaaggcagaatgcgcaagcacgtcggagatctgtgtctccaggccggtatgttgcaggatagcctagtccattaccacatgtccgttgagcttctgcggtcagtgaatgacttcttgtggctgggggcagctctcgaggggctttgtagcgcttccgtgatctatcactatcccggcggtacaggcgggaagtcgggcgcgagacgtttccaagggagcactttaccagctgaggccgctaaccgccaccggccaggggcacaagaagtacttattgaccccggcgctcttaccaccaatggtattaatccagacacctctactgagatagggcgagcaaaaaactgtctgagtcccgaagatataattgacaaatacaaagaggccatctcctactatagcaaatataaaaacgctggggtgatcgagctagaggcatgcatcaaagcagttagggtgctcgccatacaaaagcgaagcatggaggccagcgaatttctgcaaaatgctgtctacattaatttacgccagctctcagaagaagagaaaatccaacgctactccatccttagcgagttatacgaactcattggcttccatcgcaagtctgcattctttaagcgcgtcgctgcaatgcagtgcgtggctccaagcattgcagagccaggctggcgggcatgctacaagcttctgctcgagaccctgcccgggtactctcttagccttgacccaaaggacttctctcgtggtactcaccgggggtgggcagcagtgcagatgcggctcctccatgaactggtgtatgcctccagacgaatggggaatccagcccttagtgtaaggcacttgagcttcctgctccagacgatgctcgacttccttagtgaccaggagaagaaggatgttgcacagtctctggagaactatactagcaaatgtccaggcacaatggagcctatcgcacttcctggcggcctgacactgcctccagtgccgttcacgaagctcccaatcgtgagacacgtgaaactcctaaacctacctgcttcgctgaggcctcacaaaatgaaaagtcttctgggacagaacgtttccactaaatctccattcatctattcacccataattgcccacaaccggggagaagaacgcaacaagaagattgactttcagtgggtccagggggacgtgtgtgaggtgcagctgatggtctataacccaatgcctttcgaacttagagtggaaaacatgggactactgacttccggcgttgagttcgaatcacttcctgctgcgctctcactacctgcggagagtggattgtacccagtgaccctcgttggcgtcccccagaccactgggactatcacggtgaacggataccacactactgttttcggtgtattcagtgactgtcttctcgacaatctgcctggcattaaaacttccggctccaccgtggaggtaattccagctctgccgaggttgcaaatttcaactagcctcccccggtcagcccactcattgcagccaagctcgggcgacgagataagtaccaacgtgtccgtgcagttgtataacggagaaagccaacaattgattattaaactggagaatatagggatggagccccttgagaaactggaagtaacaagcaaggtgttgactacaaaggaaaaattatacggtgacttcctttcgtggaagctcgaggaaacgctggcccaattcccccttcagcccggtaaagtagcaacatttaccattaacataaaggttaagctggattttagctgtcaggaaaatctgctacaggaccttagcgatgacggaataagtgtgtccggattcccactgagttctccattccgccaagtggtgagacccagagtcgaaggaaagcctgtgaacccacctgagagtaacaaggctggcgattactcgcacgtcaagacccttgaggctgtattgaatttcaagtactcgggcggccccggacacacagaaggttactatcgcaacctctcactgggtctgcatgtcgaggtcgaaccctctgttttcttcacgcgagtgagcacgcttcctgctaccagcacgagacaatgccatttactgctcgacgttttcaactctaccgagcacgaactgaccgtgtctacccgctctagcgaagctctcatcctgcatgctggcgagtgccaaagaatggcaatccaggtcgataaatttaatttcgaatcttttcccgaatcaccaggcgaaaaagggcagtttgctaacccaaagcaacttgaggaggaacgacgtgaggctaggggcctcgaaatacacagcaagctggggatctgctggcgcatacccagcttgaaacgtagcggggaagccagtgtggaggggctcttaaaccagctggttttagagcatctgcagttagcacccctccaatgggatgtcctcgttgacggtcagccttgcgatagagaggctgttgccgcgtgccaggtgggggatcccgtccgtctcgaagtccgacttacaaacagaagcccgcgcagtgtcggtcctttcgcactgaccgttgttccatttcaggaccatcagaacggagtgcacaactatgatctccacgataccgtgagttttgtcgggtcatccacgttctaccttgacgccgtgcagcccagtggtcagtccgcttgtctgggcgctttgctttttctgtatacgggcgatttcttcctccacatccggtttcacgaggactccacttcaaaggaactccctccgtcatggttctgcctacccagcgtccacgtttgcgccctggaggcacaggcatag

SEQ ID NO: 208911 - DNA, 2862 bp, synthetic construct
  misc_feature 1..2862: note = Description of Artificial Sequence: Synthetic coding sequence
  source 1..2862: mol_type = other DNA
atggccctggtgttccagttcggccagcccgtgcgggcccagcccctacccgggctttgccacggtaagctgatacgaaccaacgcttgcgacgtttgcaattcaacggatctcccagaagtcgagatcatcagtctgctcgaagaacagctcccacattacaaacttcgcgctgacacgatttacggctacgatcacgacgactggttacatacccctctgatctcgcccgatgccaatatagatttaaccaccgaacaaatcgaggagacactgaagtactttctcctgtgcgctgagcgtgtaggacagatgactaaaacttataacgatatcgacgccgtaacaaggttgctggaggagaaggagcgggatctcgagctcgccgcacgtatcggccagagcttgctgaagaaaaacaaaaccctcactgagaggaacgaactcctggaggagcaggtggagcacatcagagaggaagtttcccagctgaggcatgaactgtcaatgaaggatgagctcttgcagttttacacgtccgctgccgaagaaagtgagcccgaatcagtgtgtagcacacccctgaagaggaatgagtccagcagttctgtacagaattacttccatctggactcgctgcagaagaagctgaaagatctggaagaagagaacgtggtgctgaggtccgaggcaagccaactgaagacagagacaataacatatgaggagaaggaacaacagcttgtgaatgactgtgtgaaggagctgagagatgctaacgtgcaaatcgccagtatatcggaggagctcgccaagaaaactgaagatgccgctcgtcagcaggaggagattacccacctcctgagtcagattgtggatttacagaagaaagccaaggcctgtgcagtcgaaaacgaagagctggtgcagcacttgggagccgccaaggacgcccagaggcagttgaccgcagaactgagagagttggaagacaagtatgccgagtgcatggaaatgctacatgaggcccaagaagagcttaagaatctgcggaacaaaacaatgcccaacacaacgagcagaaggtatcactctctgggactgtttccaatggactcgcttgccgccgaaattgagggcacaatgaggaaggagctgcagctggaggaggccgagagtccagacattacgcaccaaaagagagttttcgaaacggtgaggaacatcaatcaagtagtgaaacaacgtagcctgaccccatctcccatgaacattccaggcagtaaccaaagtagtgccatgaactcactgctgagcagctgcgtttctaccccccggagctccttctatggatctgacattgggaacgtagttttagacaataagaccaactctattatcctcgagacagaggctgccgacttgggcaacgacgagagaagcaagaagcccggaactccggggactcccggttctcatgacttggagaccgccctccgccgcctgtctctccgacgagaaaattacctctcggagcggcggttctttgaggaagagcaggaaagaaagcttcaggaactggccgagaaaggggagctccgctctgggtccctcacccccacggaatctatcatgtcccttggcacgcactcacgtttctccgagtttactgggttctcaggcatgtccttttctagccggtcatacctgcctgagaagctgcagatcgtaaagcctttagagggaagtgcaacactgcaccattggcaacagctggcccagccccacctgggcggcatcctggacccaaggccaggcgtggttactaaagggtttcggaccctcgacgtcgacctggacgaggtctactgtctgaatgatttcgaggaagatgataccggagaccacatctcactaccgagacttgccacgagtacccctgttcagcaccctgagactagtgcccaccatcctgggaaatgcatgtcccaaacgaacagcaccttcacattcaccacgtgtaggattcttcatccctcagatgagctgactcgagtgacaccttctctgaattcggccccgactcccgcttgcggcagcacatcccacctgaagagcacccctgtggctactccttgcacccccaggagattgtccctcgcagagtcctttaccaacacacgggagagtactaccaccatgtctaccagcctagggctcgtgtggctgctaaaagagagaggtatctccgcagccgtgtatgatccccagtcatgggaccgggcagggaggggcagtctgctgcacagctacacacccaaaatggccgtcatcccctctaccccacctaactcccccatgcagacaccaacgtcaagtcccccttcattcgaatttaaatgtacgtcccccccatatgacaacttcctggcatccaaaccggcgagcagcatactgcgggaggtcagagaaaagaacgtgcgcagctccgagtctcagaccgatgtctctgttagcaatcttaacctcgtcgacaaagtgagaagatttggcgttgcaaaggtcgtgaatagcggcagagcgcatgtgccaactttaactgaggagcagggacctcttctttgcggacccccagggcccgcccccgccctagtgcccagaggtctggtacctgaagggttaccgctgagatgccccaccgtaacatctgccataggtggacttcaacttaactccgggattcggagaaatcggagcttcccaacaatggttggaagctctatgcagatgaaggctccagtgacccttacgtcaggcattctgatgggagccaagctgtccaagcagacttcacttcgatag

SEQ ID NO: 208912 - DNA, 2061 bp, synthetic construct
  misc_feature 1..2061: note = Description of Artificial Sequence: Synthetic coding sequence
  source 1..2061: mol_type = other DNA
atgagcctgcgggacaagggcggcgaggaggagtgcttcgagtacgactgtcaagacgaagaacgtaaacctacacaccgccagcacgatacccaggatcttcttgaagaggttttatgcgcagaaagagttggccaaatgaccaaaacttacaatgacatcgacgccgttacacggctactggaggagaaggagagagatctggagctcgcagcacgtatcggacagtctctgcttaagaagaataagaccctgaccgagcgaaatgagttactcgaagaacaagtcgaacacattagggaggaagtgagtcagctacgccatgaattgtctatgaaggatgagctgctgcagttctacacaagtgctgccgaggagtcagagcctgagtccgtgtgctccacacctctcaaacggaacgagtcttcttcaagtgttcagaactactttcacctggatagtctgcaaaagaagctgaaggacctggaagaagagaacgtggtgcttagatctgaggcgtcccagttaaagacggaaaccatcacatatgaggagaaagagcagcagcttgtcaatgactgtgtaaaagagctcagagatgccaacgtgcagatcgcctctatcagcgaagaactggcaaaaaagacagaggacgcagcgagacagcaggaagagatcacacaccttttgtcccagatcgtggacctccagaagaaagctaaggcatgcgcggtggaaaacgaggagttggtgcagcacctgggcgccgcgaaggatgcacaacgccagctcaccgctgaactgagagaattggaggacaaatatgccgagtgcatggaaatgctgcatgaagctcaggaggaacttaaaaacctgcgaaacaagacgatgcccaacacgacctctagaaggtatcactcactggggctgtttccaatggacagcttggccgctgagattgagggcacaatgcgtaaggagctgcagctggaggaggccgaatctccagatataacccatcagaagcgggtgtttgaaactgtaagaaacattaatcaggttgtgaaacagaggtctctcaccccgtcaccaatgaacattcctggcagcaatcagtccagcgccatgaactctctgttatcgtcttgtgtcagtacaccccgctcaagcttctacggctccgatatagggaatgtggtcctggacaacaagacaaacagcattatcctggaaaccgaggccgccgatctggggaacgatgaaagaagtaagaagcctgggacgcccggaacacccgggtcccatgatctcgagacggccctcaggcggctctctctccggcgcgagaattacctttctgagcggcgcttttttgaggaggagcaggaaagaaagctccaggagctggccgagaagggtgagttacgctctggcagcttgacacccactgagtcaataatgtcgctcgggacccactccaggtttagtgagttcactggcttttctggtatgtctttttcttctagatcttacttacccgaaaaactgcagattgtaaaacctttggaaggatccgctactcttcaccattggcagcagctggcccagcctcatctgggaggaatcctggatccccgtcctggggtagtcaccaaggggttccggactcttgacgtggatctggatgaggtatattgcctcaatgattttgaagaagatgacactggagaccacatcagcctgcctagactggcgacgagcactccggtacagcatcccgagacatccggggaaagaagtcaagctcgtgtgactgtgagtggatcccgcagctatccatccaggccacaagcctcacccgaggaaatgcaagagcctccggccgccacagaagaagaggaggaggaagaggaagaggaaggtagcggtgaagggactacaatttccccagtaaacctggcccctttccccgaggcagaattttgggcgatattgacttcggtgcccggaaccattcggtcagggagcctgtccgtcgcctcggcccgactgtgcggctag

SEQ ID NO: 208913 - DNA, 2688 bp, synthetic construct
  misc_feature 1..2688: note = Description of Artificial Sequence: Synthetic coding sequence
  source 1..2688: mol_type = other DNA
atgagcctgcgggacaagggcggcgaggaggagtgcttcgagtacgactgccaggatgaggaacggaaacccactcatcgccagcatgacacacaggacttattggaggaagttctctgtgcagaacgagtgggccaaatgaccaagacctacaatgatatagacgcagtgacacgtttgctggaagagaaggagcgtgacctcgaattggctgcccgaatcggccaatccctgcttaaaaaaaacaaaaccctgactgagcgaaacgagctgcttgaagagcaggtggaacacatacgcgaagaggtctcacagctgaggcacgagctgtcaatgaaagacgagttgctgcaattctacacaagtgctgcggaagagtctgaacctgaaagtgtgtgttccacacccctcaaaagaaacgaatcaagctcgagcgtgcaaaattactttcatctggattccctgcagaagaaactcaaagacctcgaagaggagaatgtcgtgctacgcagcgaggcgtctcagctcaagaccgaaaccataacatatgaggaaaaagagcagcagcttgtgaatgattgtgtcaaggaactgcgcgacgctaacgtgcaaattgccagcattagcgaggagttagctaagaagacggaagatgctgcacggcaacaggaggagataacccacctgctgtcgcaaattgtggatcttcaaaaaaaagccaaagcgtgtgccgtcgagaatgaggaattggtgcagcacctgggtgcagcaaaagacgcccagcgacaattgactgccgagctgcgcgagttggaggataagtatgctgagtgcatggagatgcttcacgaggcacaagaggaactcaaaaatttgagaaataagacaatgcctaatactacaagccgccgctaccacagcctagggctgttcccaatggactccctcgccgccgagatcgaggggactatgaggaaagagctccagctcgaagaagcagagtcacccgacatcacacatcagaagcgggtgtttgagaccgtgagaaacatcaatcaggttgtcaaacagcgttctctgacccccagcccaatgaacattccaggcagtaatcaaagctccgcaatgaattcattgttgtcgtcctgtgtttcaacccccagaagcagcttttacggatctgatattggaaacgtggttttagacaacaaaaccaacagcattatcctggagacagaggcagctgatctcggaaatgatgagcgatcgaagaagccaggtacaccaggcactccagggtcccacgacctggaaactgctcttcggcgtctgagcctgcgccgagagaattacctcagcgagcgaaggtttttcgaagaggagcaggagcggaaactgcaggagttagcagagaagggtgagttgcgcagcggctccctcactccaactgagtccataatgtcccttggaacgcacagcagattttcagagtttacaggcttttctggaatgtctttcagctctcggagctatcttcctgaaaagcttcagattgtgaaaccgcttgaagggtcagcgacattacatcactggcaacagctcgcccagccacacctcggcggcatcctggacccgagacctggagttgttaccaagggctttaggactctagacgtcgacctggacgaggtatattgcctgaatgacttcgaggaagatgacaccggggatcatatttcgctgcctcgactggctacaagcacacctgtccaacaccccgaaactagcgcacaccaccccgggaaatgtatgtctcagactaactccacatttacattcactacctgtcgtattctccatcctagtgatgagctgactagagtcactccatcattaaatagcgcacccacgccagcatgcggcagtacatctcatctgaaatctaccccagtggctacaccgtgcaccccacgacgcttgagtctggccgagtcctttacaaacacccgcgaatccacaactaccatgagcacatcgctgggtttagtctggctcctgaaagagaggggcatctctgcggccgtctacgacccccagtcatgggaccgggctggcagaggcagtctcttacattcttacacaccaaagatggccgtcattccatctaccccaccaaacagcccaatgcaaaccccgaccagtagtccacccagtttcgagttcaaatgtacttcgcccccatacgacaatttcctagcgtccaagccggccagctccattctgagagaggtccgtgagaagaacgtccgaagcagcgaaagccagaccgatgtgtccgtttccaaccttaacctcgtagacaaggtacggcggtttggcgtggccaaggtagtgaattcaggacgagcccacgttcccacacttactgaagagcagggaccgttgttatgtgggcctcccgggccggctccagctcttgtgcctcgagggctggttcctgaaggcttaccgctgcgctgccctacagtgacaagcgcaatcggcggcctccagctgaatagtggtatcaggcgtaaccgatccttccccaccatggtgggatctagtatgcaaatgaaggctcccgtgactctgaccagcggaattctgatgggagccaagctgagcaagcagacgagtttgcgatag

SEQ ID NO: 208914 - DNA, 2361 bp, synthetic construct
  misc_feature 1..2361: note = Description of Artificial Sequence: Synthetic coding sequence
  source 1..2361: mol_type = other DNA
atggccctggtgttccagttcggccagcccgtgcgggcccagcccctgcccggactttgtcacggaaaactcatccgcaccaacgcatgtgatgtgtgcaactccactgatctaccggaggtggaaattatttccctgttagaagaacaattgccccattataagctgcgggctgataccatatacgggtatgaccatgatgactggctgcacacaccgctgatcagtcctgatgctaacatagaccttacgactgagcagatcgaagaaactctaaagtattttctcctgtgcgccgaaagggtcggacaaatgacgaagacctacaacgacattgacgcagttacacggttgcttgaagaaaaggagcgagacctggaacttgcggcccgcataggacaaagtctactgaagaagaacaagaccctgactgagcgtaatgaactgctggaagagcaagtcgaacacataagagaggaggtcagtcagctgcggcatgaattgtcaatgaaggacgagctgcttcagttctatacctctgccgctgaggagagcgagccagaaagcgtgtgttccacacctttgaagcgcaatgagtcctcttcatctgtgcaaaactatttccatcttgattcacttcagaaaaagctcaaggacctcgaagaggaaaacgtggtacttaggagtgaagccagtcagctgaagaccgaaaccatcacatacgaagaaaaagagcagcagctcgtcaatgactgtgtgaaggaactcagggacgccaatgtgcagatcgcatctatttcggaggaactggcaaagaagacagaagatgctgcccgtcagcaggaggaaatcacgcatttgttaagtcaaatcgtggacctacaaaaaaaagctaaggcatgtgcagtggaaaatgaagaattagttcagcatctgggtgcggccaaggacgcacagcgccaactgaccgccgaactacgtgaactcgaggataaatacgctgagtgcatggagatgttacacgaggcccaggaggagttgaaaaacctgcgcaataagacaatgccaaacacgacttctcgccgataccactctctgggcttgttccccatggactctctcgccgccgaaatcgaaggaaccatgagaaaagagctgcagctagaggaggccgaatccccagacatcacgcaccaaaagcgagtattcgagacagtccggaacattaatcaggtggtgaagcagcgttctttgaccccctccccaatgaatattcctggctctaaccagtcctccgcaatgaactcgttactgtcctcatgtgtatccacccctcgatccagcttctacgggtccgacataggcaacgtcgtcctcgacaacaagactaactctattatcctggaaactgaggctgcagatctgggtaatgatgagagaagtaagaagccagggacccccggaacgcccggcagccacgatctcgagactgccttgaggcgactgagcctaaggcgggaaaactacttaagcgaaagaagattttttgaggaggaacaagagagaaaactgcaggagctggctgaaaagggcgagctgaggagcggctccttgacgccgactgagtccatcatgtcacttggtacacattcccggttttcggagttcaccggcttctctgggatgtctttttcctcacggtcctatttgccagagaaactacagatcgttaaacccctggaaggaagtgcaaccctgcaccattggcagcagctggctcagccccacttagggggcatcttagatcctaggcccggtgtggttaccaagggattcagaaccctcgatgtggatctcgatgaggtctactgtctgaatgactttgaggaagatgacacagcacaccatcccgggaaatgtatgtcacagacgaactcaacatttacgtttaccacctgtaggatcctgcacccctctgatgagcttacaagagtgacgcctagcctgaattctgccccaacaccagcctgcggttctactagccatttaaaatcaacccctgtcgcaacaccatgcacccctagaaggctgagcctagccgagtcctttacgaatactagggaatccaccactactatgtctacatctctaggcctggtatggctcctcaaggaacgagggatctctgccgctgtgtatgacccacagtcctgggacagagctgggcgcggctcactgttgcatagtcatgaagatgtgacatgcgcaaatcttggcgagggaggcgtcctcagtagctttctcctgaggtcaacagagaccccgaagtgtgtgttaataccctggatcgggaatcagtag

SEQ ID NO: 208915 - DNA, 2745 bp, synthetic construct
  misc_feature 1..2745: note = Description of Artificial Sequence: Synthetic coding sequence
  source 1..2745: mol_type = other DNA
atgagccagagccagaacgccatcttcaccagccccaccggcgaggagaacctcatgaactccaaccaccgcgacagtgagagtattacggatgtatgctcaaacgaggacttaccagaagtggagctcgtctcgttactggaggaacagctgcctcagtacaggctaaaagtcgacaccctgttcctctatgagaatcaggattggacacagtcccctcatcagcggcagcatgcctccgacgcactttcccccgtgctggctgaggaaacctttaggtacatgatcctgggtactgacagggtggagcagatgacaaaaacttacaacgacatcgacatggtgacgcacctcttggccgagcgtgatcgtgatctggagctggctgctcggattggccaggctctgctaaagcgtaaccacgtccttagcgaacagaacgagtccctggaagagcagttagggcaggcgttcgaccaggtcaatcaattacaacatgaactgtgtaaaaaggacgaactcttaaggattgtctctatagcctcagaggaatccgaaacagatagtagttgttccacaccgctccgtttcaacgaatccttttctctttcacaaggactgctgcagcttgagatgttgcaggaaaagctaaaggagctggaagaggaaaacatggccctgaggtccaaagcctgccatatcaaaacagaaactgtgacctacgaggaaaaagagcaacaattagtttccgactgtgtgaaggaactgagagagacaaacgcccagatgtcacgcatgacagaggagctcagcggcaagagcgacgaactcatccggtaccaggaagaactgagcagtctgctgtcacagatcgtcgatttgcagcacaaactcaaggagcacgtgattgaaaaggaggaattaaagttacacctgcaggcatccaaggacgcacagcgccaactcacaatggagttacatgagctccaggatcgcaatatggaatgcttagggatgcttcatgagtcacaggaggaaataaaggagcttcggtcccgatctggtcctactgctcacctgtattttagtcagtcatacggagcatttacaggtgaaagcttggctgcagagatagagggaaccatgaggaagaagttgtcccttgacgaggaatcctccctgtttaaacaaaaagcccagcagaaacgagtgttcgacaccgtcagaatcgccaacgataccagagggcgctctatcagttttcccgcactacttccaatacctggatcaaacagatcgtctgtgattatgacggccaagccgtttgaaagcggtttgcagcaaactgaggataagagcttgctgaatcagggtagctcttctgaggaggtggctgggtcgagccaaaaaatgggacagcctggcccttccggtgacagtgatttggcgaccgctttgcacagactcagcctcaggcgacagaactacctctcggagaaacagttttttgcggaggagtggcagcgaaaaattcaagttctggccgatcagaaggagggcgtgtccggatgtgtcacgcccaccgaatcacttgcaagtctctgtacaacccagtccgagatcaccgacctgtcgtctgccagttgcctccgaggcttcatgccagagaagctgcaaattgtcaagcccctggaggggtctcagaccctataccactggcagcagttggcccaaccgaatcttggcacaattctcgacccccggccgggcgtgattacaaaaggattcacccaactaccgggggacgccatctatcatatcagtgacctcgaggaagacgaagaggaaggcattacgttccaggttcagcagcctctggaggtggaggaaaaattgagtacatctaagcccgtcactgggatatttctgcctccgatcactagtgccggcggccccgtcactgttgccacggccaaccccggaaagtgtttgagctgtactaacagtacatttacatttactacatgccgcatccttcacccgagcgacatcacccaagtaacacccagctcgggatttccgagcctgtcctgcggaagcagtggaagttcctcctcaaacaccgccgtcaattctcccgcactcagttatcgcctctcgattggagagtctatcacaaaccggcgcgatagcactaccacgtttagctcaactatgagtcttgctaagctgctccaggagcggggcatcagtgccaaagtgtaccatagtcccatttcggagaacccattgcagcccctccccaaaagccttgctattcccagtaccccaccaaactcaccctcgcattcgccttgtccttctcctctccccttcgagccacgagtgcacctttccgaaaatttcctggcctcgcgccccgccgagactttcttacaggagatgtacggcctgagaccgtcgaggaaccccccagacgtcgggcagcttaagatgaacctggtagacagactgaaacggctgggcatcgcccgcgtcgtgaaaaatccgggtgcccaggaaaatggaaggtgtcaggaggccgaaattgggccgcagaaacccgattcagccgtgtatttaaactccgggagctctctgctggggggactgcggagaaaccagtcattacccgtaatcatggggtcattcgcagcccctgtgtgcacctcgtcacctaagatgggcgtgttaaaagaagattag

SEQ ID NO: 208916 - DNA, 936 bp, synthetic construct
  misc_feature 1..936: note = Description of Artificial Sequence: Synthetic coding sequence
  source 1..936: mol_type = other DNA
atgagccagagccagaacgccatcttcaccagccccaccggcgaggagaatcttatgaattccaaccatcgtgactctgagtctatcacagacgtttgcagtaatgaggacctgcccgaggtagaactggtgtctctgctggaagagcagcttcctcagtataggctgaaggttgatacattgttcctgtacgagaaccaagactggacccagtctcctcatcaacgacaacatgcttcggacgcgctcagccccgttctggcagaggagacttttaggtacatgatactaggcaccgatagggtggagcagatgacgaagacctacaatgacatcgacatggtgacacatctgctcgccgaaagagatagggatctcgagttggccgcacggatcggccaagcgctgttaaagcgcaatcacgtgctgtcagaacaaaacgagagcctggaggagcagttaggccaagcatttgatcaggttaatcagctgcaacacgaactgtgcaagaaggacgaactcctgagaatagtgagtattgcaagtgaagagtccgaaacagatagctcctgctcaacaccgcttagattcaatgagagcttcagcctttcacaagggctgctgcagctggagatgctccaagagaagctgaaggagctagaagaagaaaacatggccttgaggtcaaaagcctgccatataaagaccgagaccgttacatacgaagagaaagaacagcagctggtcagcgattgcgtgaaagagctccgagagaccaacgcgcaaatgagtcggatgaccgaggagctgtctgggaagagtgatgaactcattagataccaggaagagctgtcttcgttgctgagccagatcgttgacctccaacacaaactgaaagaagttggactcttcatacattcgaccgacatctgttag

SEQ ID NO: 208917 - DNA, 93 bp, synthetic construct
  misc_feature 1..93: note = Description of Artificial Sequence: Synthetic coding sequence
  source 1..93: mol_type = other DNA
atgagccagagccagaacgccatcttcaccagccccaccggcgaggagaatctgatgaatagcaaccatcgcgactcagagtctattacatag

SEQ ID NO: 208918 - DNA, 2340 bp, synthetic construct
  misc_feature 1..2340: note = Description of Artificial Sequence: Synthetic coding sequence
  source 1..2340: mol_type = other DNA
atgatcctgggcaccgaccgggtggagcagatgaccaagacctacaatgatatagacatggtgacacatctgttggctgaacgtgatagagaccttgaactggctgcccgcattggacaggccctattgaagcggaaccacgttctaagtgaacaaaatgagtcgcttgaggaacagctaggtcaggccttcgaccaagtgaaccagctgcagcacgaactctgtaaaaaggacgagctgctgagaatcgtgtccattgccagcgaggaatcagaaaccgacagctcctgctccacaccactgcgcttcaacgaaagcttttccctcagccagggcctgcttcagttggaaatgttgcaggaaaaactaaaagaactggaggaagagaacatggctcttagaagcaaggcatgccatattaaaacggaaaccgtaacctacgaagaaaaggagcagcagttagtctcagactgtgtcaaggagcttagagagaccaacgcccagatgtcaagaatgacagaggagctgtccgggaagagcgacgaactcatcagatatcaagaagaattgagcagcctcctgtctcagattgtcgatctacaacacaaactgaaggagcacgtgatcgagaaggaggaacttaagctgcatctccaagcaagcaaagacgcccagcggcagttgactatggagctgcatgagctccaggaccgcaacatggaatgcctaggaatgttacatgaaagccaggaggagatcaaagaactgcgttctcgctcgggccctactgctcacctgtacttttcacaaagttatggcgctttcactggcgaaagccttgctgccgaaatcgagggcactatgagaaaaaaactgagtctggacgaggaaagtagccttttcaaacagaaagctcaacagaagcgcgtgttcgatactgtgcgcatcgccaatgatactaggggtcgatccatctccttccccgctctgcttccgattccgggatcaaatcgcagttcagttatcatgacagcaaagcccttcgaaagcggtcttcagcagacagaggataagtctttgctaaatcaggggtcatcaagcgaggaagtagcaggatcgagtcaaaagatgggccaacccgggccatctggtgactccgatcttgccacagcgttgcatcgcctgagtttaaggaggcagaactacctgagtgaaaagcagttcttcgccgaagaatggcagagaaaaattcaggtactggccgaccagaaagagggtgtcagcggctgtgtcacccctaccgaaagcctggcttcactatgcacgacacagtctgaaattactgacctctcatccgcctcgtgcctccgaggcttcatgcctgaaaaactccagattgtcaaacctttagagggttcacaaaccttgtaccactggcagcagttggcacagcctaacttggggacaattctggacccacggcccggcgtcatcactaaaggcttcacacagttacccggtgacgcaatttaccatatcagcgatctggaagaagatgaagaggagggtattaccttccaagttcaacagcctttagaggtagaggaaaaactgagcacgtctaaacccgtcactggcatcttcctgccgcccatcacaagcgcggggggcccagtgacagtggcgaccgccaatcctgggaagtgcttgtcttgtacgaattccacattcacttttacgacatgtcgaatcttacatccaagcgatatcactcaggtgacaccctctagcgggttccctagcctgtcctgtgggagcagcgggtcttcaagttctaatactgcagttaactcacccgcattgagctatcgcctcagcatcggtgaatctattaccaatcggagggacagcacaaccacattcagttctaccatgtcgctggccaagttgctgcaggagagagggatatctgccaaggtgtatcacagccctattagcgagaatccactccaaccgctgcccaaatccctcgccatccccagcacaccacctaacagtccttcccatagcccctgtccgagccccctgccctttgagccacgcgtccacctttctgaaaattttctggcctctcgtcctgcggaaacttttctgcaggagatgtacgggttgcgtccctcccgaaatccgcctgatgtgggtcagctgaaaatgaatctggttgatcgattgaagagactggggatagctagagtcgtgaagaacccagtcccaaaaagaatggaagacgcacggcgacaaaagcttgtgctgaagaaccaaattctgctttttatctag

SEQ ID NO: 208919 - DNA, 486 bp, synthetic construct
  misc_feature 1..486: note = Description of Artificial Sequence: Synthetic coding sequence
  source 1..486: mol_type = other DNA
atggagaagcccctgaccgtgctgcgggtgagcctgtaccaccccactcttggtccgagcgcctttgccaatgtgccaccccggctgcagcacgacacctctcccctgcttctgggccgggggcaggacgcccacctgcagctgcagttgccgcgcttgtccagaagacacctctcgctggagccctatctggaaaagggctcagcccttctggccttttgtctgaaagctctctccaggaaaggctgcgtttgggtgaatgggcttaccctgcgctatctggagcaggtacctctgtccaccgtgaatcgcgtatcattcagtggaatacagatgttagtgcgagtggaagaaggcacgagcctcgaagcctttgtgtgttacttccacgtttctccatctcctctcatctataggcccgaggccgaggaaacggacgagtgggagggtatctcccaggggcagccaccgccaggctccggatag

SEQ ID NO: 208920 - DNA, 1749 bp, synthetic construct
  misc_feature 1..1749: note = Description of Artificial Sequence: Synthetic coding sequence
  source 1..1749: mol_type = other DNA
atggccgagttcctggacgaccaggagacccggctgtgcgacaactgcaaaaaggaaatccccgtgttcaactttacaatccacgaaatacattgtcagcgcaacatcgggatgtgtcccacatgtaaggagccgtttcccaagtcagatatggaaacacatatggccgcggagcactgccaagtgacctgtaaatgtaacaagaagctggagaaaaggctattgaagaaacacgaagagaccgaatgccccctccggctcgcagtatgccagcattgcgacttagaattaagcattctgaagctgaaagagcatgaagactactgtggagcaaggacagagctgtgtggaaactgcgggaggaacgttcttgtgaaggacttaaagactcatcccgaagtatgtggacgcgaaggcgaggagaaacgaaacgaagtggccatacctccaaatgcgtatgatgaatcctggggacaggatggaatttggatcgctagtcagctgctgcggcagatcgaggcattggatcctcccatgcgactgcctcgacgcccactaagagcatttgagagtgatgtgttccacaataggaccaccaatcagcgcaatatcactgcccaagtctccattcagaacaacctgtttgaagaacaggagcggcaggaaaggaaccggggccagcagcctcccaaggaagggggggaagaatctgcaaatctggacttcatgctggctctcagcctgcagaacgagggccaggctagctccgtcgccgaacaggatttttggcgcgccgtgtgcgaggctgatcagtctcacggtgggcctagatctctctccgacatcaagggagcggctgatgagatcatgctgccgtgcgagttctgcgaagaactgtacccggaggaactgctgatcgaccaccagaccagttgcaacccaagcagggctctcccgtcgctcaacactggcagcagttcccctaggggggtggaggagccggatgtgattttccaaaacttccttcagcaggcagctagtaatcagttagatagtctgatggggcttagcaattcacatccagtggaggaatcaatcattataccttgcgaattttgtggcgtccaactggaggaagaggtcctgttccaccaccaggatcaatgtgaccagcggcccgctacggccactaatcatgtgactgaggggatccctagacttgattctcaaccacaggaaacttccccagagcttccaagaagacgcgtccgacatcaaggcgacctgagctccggctacctcgacgacaccaagcaggagaccgctaatgggcctacatcttgcctgcctccctcccgccccatcaacaacatgaccgccacttacaatcaactcagtcggtccacttccggcccgagaccaggatgtcagccttcctccccatgcgttccaaagctgtcgaattctgattcccaggacatccaaggccgtaacagagactctcagaacggcgccatcgcccctggacatgtttctgtgatccgtccaccccagaatctgtatcctgaaaatatagtaccctcctttagccccggccccagcgggaggtacggtgcttccgggcgaagtgaaggcggccggaacagccgggtgacaccggccgcagcgaattataggagccgtaccgctaaggccaaacctagcaaacaacagggagccggcgacgccgaggaagaagaagaagagtag

SEQ ID NO: 208921 - DNA, 1749 bp, synthetic construct
  misc_feature 1..1749: note = Description of Artificial Sequence: Synthetic coding sequence
  source 1..1749: mol_type = other DNA
atggccgagttcctggacgaccaggagacccggctgtgcgacaactgtaagaaagaaattcccgtcttcaactttacaatccacgagatacactgtcagagaaatattggtatgtgcccaacctgcaaagagccatttcccaaatccgatatggagacacacatggccgccgagcattgccaggttacctgtaaatgtaacaagaaacttgagaagagacttcttaaaaaacatgaggagacagagtgccccctgagactcgccgtgtgtcaacattgcgatctcgagctttcaattctgaagttgaaggaacatgaagactactgtggcgcacggaccgaattgtgtggaaactgtggacgtaatgtactggtcaaggacctgaaaacccatcctgaggtgtgtggcagagagggggaggaaaaaagaaatgaagtggccatccctcctaatgcctacgacgaaagttggggacaggacggtatctggatagccagtcagctgctgcgacagatcgaagctctagatcctcccatgcggctgcctcggcggcccctaagggcatttgagagcgatgtgttccacaatagaacaaccaaccagagaaacatcaccgctcaggtgagcatacagaacaatctgttcgaggagcaagaaaggcaagagcgcaacaggggccagcagcctcccaaggaaggtggtgaggagtcagccaacttagactttatgttagccctatctctccagaacgaggggcaagctagtagtgtcgccgagcaagatttctggcgggccgtgtgcgaggccgaccagtctcacgggggacctaggtctctgagcgacatcaaaggcgctgcagacgaaattatgctgccatgcgagttctgcgaagaactctaccccgaggagctgctcatcgaccaccagacaagttgtaatccctcaagggcacttccttctctcaatacaggctctagtagcccaaggggggtggaggagccagacgttatcttccagaacttcctgcaacaggctgcgtctaatcagctagacagtctgatggggctgagcaacagtcatcccgtggaggagagcatcatcattccctgtgaattctgtggcgtgcaacttgaggaagaggtcctgttccatcaccaagatcaatgcgatcagagaccagccactgctacgaaccacgtgacagaaggtatccctagacttgactctcagccacaggagacttccccggaactgcctcggaggcgcgtaagacaccaaggcgatttgtcaagtggctacctagacgacaccaagcaggaaacagctaacgggccaactagctgcctgcccccctctaggccgattaacaatatgaccgctacgtataatcagctctcacgcagtacttcgggccctcgacctggatgtcaaccttcttccccgtgcgtccctaaactatccaactccgattcgcaggatattcagggccggaaccgggacagtcagaatggagcaatcgcacccggccatgtgtcggtgatccgacctccacaaaatctgtatccagagaacatcgtgccatcctttagccccggacccagtggaagatatggcgcttccgggcggtccgaggggggaagaaatagcagggtcacccccgccgctgccaactaccgatccagaacagcaaaggccaagccctccaagcagcagggggccggtgatgcagaggaggaggaagaggaatag

SEQ ID NO: 208922 - DNA, 408 bp, synthetic construct
  misc_feature 1..408: note = Description of Artificial Sequence: Synthetic coding sequence
  source 1..408: mol_type = other DNA
atggccgagttcctggacgaccaggagacccggctgtgcgacaactgcaagaaagaaatccccgtctttaacttcactatccacgagatacactgtcaacggaacattgggatgtgcccaacatgtaaagaaccatttccaaagagtgacatggagacacacatggcagctgagcactgtcaggttacgtgcaagtgtaacaaaaagcttgaaaagcggctgctcaaaaaacatgaggagaccgaatgtcccctccgcctcgcagtatgccagcactgcgatcttgaactcagcatcctgaagctcaaggagcatgaggattattgtggcgccaggaccgagttatgcggaaactgcggcaggaacgtccttgtaaaggacctcaagactcaccccgaggtgtgctag

SEQ ID NO: 208923 - DNA, 495 bp, synthetic construct
  misc_feature 1..495: note = Description of Artificial Sequence: Synthetic coding sequence
  source 1..495: mol_type = other DNA
atggccgagttcctggacgaccaggagacccggctgtgcgacaactgtaaaaaggaaatcccagtgttcaactttaccatccacgagattcactgccagagaaacattggaatgtgtcccacatgtaaggaaccctttcccaaatcagatatggagactcatatggccgctgaacattgtcaggtcacatgtaaatgcaataaaaagttggagaagcgacttttgaagaagcacgaagagaccgagtgtcctctaaggctggcagtatgtcaacattgtgacttggagctctctatcctcaagctgaaagaacatgaagactactgcggagcaagaacagagctgtgcggcaactgtggcagaaacgtactggtgaaagatttaaagacccatccggagctgaaaaataaacgcgggaggaagggaatcgaagccaactcacctcctaagcgcgtggtcaagcgcgtgcagacctggacctcctgctggccctag

SEQ ID NO: 208924 - DNA, 852 bp, synthetic construct
  misc_feature 1..852: note = Description of Artificial Sequence: Synthetic coding sequence
  source 1..852: mol_type = other DNA
atggccgagttcctggacgaccaggagacccggctgtgcgacaactgtaagaaggaaatacccgtgttcaactttaccatacacgaaattcactgccagcgaaatatcgggatgtgccctacatgcaaggaaccattcccgaaatcagacatggaaacccatatggcagcagaacactgccaggtaacctgcaaatgtaacaagaaactggagaagagacttctgaaaaaacatgaagaaaccgagtgtccccttaggctggccgtctgccagcattgcgaccttgaactcagtatcctgaagctgaaggagcatgaggattactgcggggcccgtactgagctctgcgggaactgtggacggaacgtactcgtgaaggatctaaagacacatccggaggtttgtggccgggagggcgaggaaaaacgaaatgaggtcgccattcctcctaatgcatacgatgagtcctggggacaggacggcatttggattgctagtcagcttctgcgccagattgaggccctggacccgccaatgagattacccaggcgacctctccgcgccttcgagtccgatgtgttccacaatcgcacgaccaaccaaagaaacattaccgctcaggtctcaatccagaacaatctgtttgaggagcaggagcggcaggaaaggaacaggggccagcaaccccccaaagaaggcggggaagagtcggcaaatctagattttatgttagcgctgagccttcagaatgaggggcaggcttcctccgtggcggagcaggacttctggagagccgtgtgtgaggctgaccagtcacacggtggcccaagaagcctcagcgacatcaagtag

SEQ ID NO: 208925 - DNA, 414 bp, synthetic construct
  misc_feature 1..414: note = Description of Artificial Sequence: Synthetic coding sequence
  source 1..414: mol_type = other DNA
atgggcgcccacctggtgcggcggtacctgggcgacgccagcgtggagcctgatcccctgcaaatgcctacatttcctcccgactatgggttccctgagcgcaaagaacgtgagatggtcgccactcagcaggaaatgatggatgcccaacttcggctccaattacgggattattgcgcccaccacttgattcgtctgctcaaatgcaagcgcgactccttccccaatttcctagcttgtaaacaggaacgacacgactgggattactgcgagcatcgcgactacgtaatgcgcatgaaagagttcgagcgcgaaaggagacttctgcagcgaaaaaaacgcagggagaaaaaagcagccgagctagctaagggccaggggccgggggaagtggaccccaaagtcgcgctttag

SEQ ID NO: 208926 - DNA, 972 bp, synthetic construct
  misc_feature 1..972: note = Description of Artificial Sequence: Synthetic coding sequence
  source 1..972: mol_type = other DNA
atgatcctgcaggagaccaaggccgcctgcggcatccccgccatcccacattgttcccgggtggagatcctggatgctaagaccagggagaaattgtgctttctggacaaagtggagccgcacgcaactatcgctgaaattaagaacctattcacaaaaacacacccacagtggtaccccgccagacaaagcctgagattggaccccaaaggcaaaagcttgaaagacgaggacgttctgcagaaactccccgtcggcactaccgcaacactatacttccgcgatctgggggcccagataagttgggttacagtctttctaaccgagtacgcgggccctctctttatttatctgctcttctatttcagagtgcctttcatttatggacacaaatacgacttcacctcaagtaggcatacagtggtgcacctggcctgtatctgccactcctttcattacattaagaggctgctggaaacgctgtttgtgcaccggttctcccacggtacgatgcccttacgcaacatcttcaagaactgtacatattactggggcttcgcagcatggatggcctactacatcaatcaccccctttatacccctcctacttacggcgcccagcaggtaaagctcgctctggcaatttttgtcatttgccagttaggcaactttagcatccatatggccctgagagacctacgccctgccggcagcaaaacaagaaagatcccataccctacgaagaaccctttcacctggctcttcctgctagtcagttgccctaactacacctatgaagtaggttcatggattggcttcgctatcatgacccagtgcctaccagtggccttgttttctctggttggcttcacccaaatgacgatctgggccaagggcaagcatagaagctacctgaaagagttccgcgactatccaccactcagaatgcctatcattccttttttactctag

SEQ ID NO: 208927 - DNA, 1014 bp, synthetic construct
  misc_feature 1..1014: note = Description of Artificial Sequence: Synthetic coding sequence
  source 1..1014: mol_type = other DNA
atgagcagcagccccgtgaagcggcagcggatggagagcgccctggaccagttaaagcaattcaccactgtcgtggctgataccggggatttccacgcaatcgacgagtataaaccgcaggacgctaccacaaaccctagcttgatcctcgccgccgctcagatgcctgcatatcaagagctggtggaggaggctatcgcatatggacgaaaactggggggcagccaggaggaccagataaaaaacgccattgataagctgtttgttttatttggagctgagatcctcaaaaagatcccaggtcgggtctctaccgaggtggatgcccggctcagtttcgacaaagacgccatggtcgcacgtgcccgcagactgattgaactgtacaaagaagctggaattagtaaagatcgcattctgataaaattgagttcaacctgggaaggcattcaggcgggtaaggagcttgaagaacagcacgggattcattgcaacatgacactcctgtttagcttcgcccaggccgtggcgtgtgcagaggccggggtcaccctgatctcaccattcgtgggaagaattttggattggcacgttgcgaatacagataagaagtcttacgagccactggaggatccgggtgttaagagcgtcacaaaaatctacaactactacaagaaatttagttataagaccattgtaatgggcgcatccttcaggaacacaggagaaatcaaagccctcgccggctgcgatttccttacaattagccccaagttactgggagaactcctgcaggacaatgccaagcttgtgcccgtgctgagtgcaaaggccgctcaggccagtgacttggagaagattcacctggacgaaaagtcctttagatggctgcacaatgaagaccagatggcagttgagaagctcagcgacggcattcggaagtttgccgccgatgcagtgaaacttgaaaggatgctcaccgagagaatgttcaatgccgagaatgggaagtag

SEQ ID NO: 208928 - DNA, 957 bp, synthetic construct
  misc_feature 1..957: note = Description of Artificial Sequence: Synthetic coding sequence
  source 1..957: mol_type = other DNA
atgagcagcagccccgtgaagcggcagcggatggagagcgccctggaccagctgaagcagtttaccacagtggtcgctgacacaggcgatttccacgcgatcgacgaatataagcctcaagacgcaacaacaaatcctagccttatattggccgcagcccagatgcccgcctatcaggagctggtagaagaagcaattgcctacggcagaaaactggggggcagtcaggaagaccagattaagaatgccatcgacaagctttttgtgctatttggcgcagagatattgaaaaagataccagggagagtgagtactgaggtggacgcacggttgagctttgataaggacgctatggtggcccgagcacggaggctgattgagctctacaaggaggctgggatctctaaggatcggatcctcattaagttgtcctcaacatgggaaggcattcaagctgggaaagagctggaagagcagcacgggattcattgcaatatgactcttcttttttctttcgcacaggccgtggcctgcgccgaggctggcgtgacccttatctccccattcgtcggccgaatcctcgattggcacgtggcaaatacagacaagaagtcatacgaacccctggaagatccgggagtgaaaagcgtgactaaaatttataattattataagaagttttcctataaaacaatcgtcatgggcgcctcctttaggaacacgggcgaaatcaaggccctggcaggctgcgatttcttaacaatctcacctaaactgctcggcgaacttctccaggacaatgcaaagctggtgccagttctttcagctaaaccgaagccagtgacttggaagaaatctacctggatgagatcattgagcgtaggttgtaccacacgcacgagatggttgtggcgctcttcgctgactggatccgcctccttaccattgatgcagtag

SEQ ID NO: 208929 - DNA, 1302 bp, synthetic construct
  misc_feature 1..1302: note = Description of Artificial Sequence: Synthetic coding sequence
  source 1..1302: mol_type = other DNA
atgcggcagagccaccagctgcccctggtgggcctgctgctgttctccttcatcccttctcaactgtgcgaaatttgcgaggtgagcgaagagaactacatacgcctgaaacctcttctaaatactatgatccaaagtaactacaatcgtggcacgagcgcggtgaatgtggttctcagcctgaaactagtggggatacagattcaaaccctgatgcagaagatgattcagcagataaagtacaatgtgaagagcaggttgtccgatgtgtcgtcaggcgagctggccctgatcatacttgccctcggagtgtgccgaaatgccgaggagaacttgatctacgactaccacctgattgacaaacttgagaacaaatttcaagccgagattgaaaatatggaggcacacaacggaactcctctgaccaattattaccagctctcattggacgtgttagcactgtgcctgtttaatggtaactatagcactgccgaagtggtcaaccacttcacccccgaaaacaaaaattattattttggctcccagtttagcgtcgataccggcgccatggcggttctcgctctgacttgtgtgaaaaaaagcctaattaacgggcagatcaaggccgacgaaggtagtctgaaaaacattagcatttataccaaaagcctcgtcgagaaaattctgagtgaaaaaaaggaaaatgggctgatagggaacacgttctctactggagaagccatgcaggccctgtttgtatctagcgactactataacgaaaatgattggaactgccagcagacactgaataccgttttaactgaaatcagtcaaggcgcttttagcaacccaaacgccgccgcacaggtgctgcccgcgctgatgggaaagacttttttggacatcaataaagatagctcttgtgtgtcagcgagcggcaacttcaatatttctgccgatgagcccattaccgtgactcctcccgattcacaaagttatataagcgttaactatagcgtccggattaacgagacctatttcactaacgtcacagtgctcaatgggtccgtgttcctctccgtgatggaaaaggcccagaagatgaatgacactatcttcggctttaccatggaagaaagaagctggggaccctacatcacctgtatccaagggctgtgtgcaaataataacgaccgcacctactgggagctgttatccgggggtgaacccctcagtcagggagccgggtcatacgtggttcgtaatggcgaaaatctggaagtccggtggagcaagtattag

SEQ ID NO: 208930 - DNA, 1083 bp, synthetic construct
  misc_feature 1..1083: note = Description of Artificial Sequence: Synthetic coding sequence
  source 1..1083: mol_type = other DNA
atggccgccgccgccgccgccggcgccggccccgagatggtgcgggggcaagtcttcgacgtcgggcctaggtacacaaacctgtcatacataggagaaggggcttatggaatggtgtgttctgcttatgacaatgtcaataaggtcagagtggccattaaaaaaatcagcccttttgagcatcagacttattgtcagcggacgctccgcgagattaagattctgctgcgttttagacatgagaacattatcgggatcaacgatatcatcagagcacccacaattgagcagatgaaggacgtatacattgtgcaggatttaatggagaccgacctgtacaaattgctgaagacccaacatttgtcaaacgaccacatctgctacttcctgtaccaaattcttcggggactgaaatatattcacagtgcaaacgtgctccaccgcgacttgaaaccatccaacctgctgctaaacacaacttgtgatcttaagatctgtgacttcggcttggctcgcgtagccgaccctgaccacgatcataccgggttcctgaccgagtatgtagccaccaggtggtacagggcacccgagattatgcttaattcgaagggttatacgaaaagcatcgacatatggtctgttggatgtattttggccgaaatgctcagcaaccggcccatcttcccagggaagcactacttggaccagttaaatcacatcctcgggatcttgggctccccttctcaggaagatctgaattgcattattaacctcaaagcaagaaattatctactgtctcttccacataaaaataaggtcccatggaacaggctcttcccgaacgccgacagcaaggccctcgatctgctcgataagatgcttacgtttaatccacataagagaattgaagtggagcaagctctggcacacccctatctggagcagtactacgacccctctgatgaacctatcgccgaagccccattcaaattcgatatggagctggatgacctccccaaggaaaagctcaaagaactaatctttgaagagaccgctcgcttccagcctggctacagatcatag

SEQ ID NO: 208931 - DNA, 1203 bp, synthetic construct
  misc_feature 1..1203: note = Description of Artificial Sequence: Synthetic coding sequence
  source 1..1203: mol_type = other DNA
atgcggcacctgggcgccttcctgttcctgctgggcgtgctgggcgctttgaccgaaatgtgtgaaatcccggaaatggatagccacttagtggagaaattgggacagcaccttttgccatggatggaccggctctccctggaacacctcaatccctcgatatatgtaggccttcgcctctcaagtctgcaggctgggactaaagaggacctgtatctgcactccctaaaactgggctaccaacaatgcctattagggagcgctttttcagaggacgacggggactgtcaaggcaaaccttccatgggtcagcttgctctttacctgttggcgttgagggcaaattggcacgaccacaagggtcacccccatacaagctattaccagtacggccttggtatcttggccctgtgcctgcaccagaagcgagtgcacgactcagtggtggataagctcctgtatgctgtcgagccctttcatcaagggcatcactccgtagataccgccgctatggcaggactggccttcacgtgtctgaagagatccaattttaacccagggcgccggcagcggataaccatggccatacgcacagtgagagaagagatcctgaaagctcaaacccctgagggacatttcggaaatgtgtactctacaccattggcgctgcagttccttatgacatctcctatgcgcggggcagagctaggcacagcatgtctgaaagctagggtcgcccttctggcttcactacaggacggggcttttcagaatgcactcatgattagccagctcctgcccgtactgaatcataagacgtacattgacctgatcttcccagactgtctcgctcctcgggtgatgttggagccagctgcagaaactattccccagacacaggaaatcatctcagtaacgctgcaagtgctcagccttctgcctccctaccgccagagcatcagtgtgctggccggcagtaccgtcgaagacgtacttaaaaaggcccatgaactgggcgggttcacatatgagacacaagcatcactgagtgggccataccttactagtgttatgggaaaagcagctggggagcgcgaattttggcagctgctccgggaccccaacacgcccctgttacagggaatcgcggactaccgacccaaggatggagaaacaatcgaattacgactcgtctcctggtag

SEQ ID NO: 208932 - DNA, 843 bp, synthetic construct
  misc_feature 1..843: note = Description of Artificial Sequence: Synthetic coding sequence
  source 1..843: mol_type = other DNA
atggaggacgaggtggtgcggttcgccaagaagatggacaagatggtgcagaagaagaacgcctctacccgcatcggcatgtcagtcaacgcgatcagaaagcagtcaactgatgaagaggtaacctcacttgccaaatcattgatcaaaagttggaagaagctcttggacggtccttctaccgagaaggatctggacgaaaaaaaaaaggaacctgcaatcaccagccagaatagccctgaagctagagaagagagtacaagctccgggaacgtcagcaacaggaaggacgaaactaacgccagagacacttacgtctcgtcctttccacgtgccccgagcaccagtgattctgtgcggctcaaatgtcgcgagatgctggcggctgcactcaggactggggatgattatatcgccattggggcggacgaagaggaactcggctctcagatcgaggaggcaatctaccaggagatacggaacacagatatgaagtataagaaccgggttcgtagcagaatctctaacctgaaggatgccaaaaatccaaacctcagaaagaacgtgctctgtggcaacatcccacccgaccttttcgcccgcatgacagcagaggaaatggcatcagacgagctcaaggagatgaggaagaacctgaccaaagaggcaatacgcgaacatcagatggctaaaacaggaggaacacaaacagatctgtttacatgtggtaagtgcaagaagaagaactgcacatatacacaggtccagacaaggtctgcagacgagcctatgactactttcgtagtctgcaatgaatgtgggaatcgctggaagttctgctag

SEQ ID NO: 208933 - DNA, 906 bp, synthetic construct
  misc_feature 1..906: note = Description of Artificial Sequence: Synthetic coding sequence
  source 1..906: mol_type = other DNA
atggaggacgaggtggtgcggttcgccaagaagatggacaagatggttcagaagaagaacgccgccggtgctctggatctgctcaaggaactcaagaacataccgatgaccttggagctgctccagtcaacgcggatcgggatgagcgtgaatgcaatccgcaaacagtccaccgatgaggaggtgacttctctggccaagtctctcattaaatcatggaagaagctgctggacggtccaagcactgagaaggatctggacgaaaagaagaaagaacctgcaatcacttctcagaacagtcccgaagcgcgagaggagagtacttcaagcggcaacgtgagtaaccggaaggatgagaccaatgcccgcgatacttacgtgtcctccttcccccgagctccttcgactagtgactcagtaagactgaaatgcagagagatgctagccgcagccctccgtactggcgatgattatatcgcaatcggagccgatgaggaggaactggggtcacaaatcgaggaggcgatttaccaggaaatccgaaatactgacatgaagtacaagaaccgtgtgcgcagtagaatcagcaatttgaaggacgcgaagaaccccaacttgcgcaaaaatgttttatgtgggaacatccctcccgacctgttcgctaggatgacagcagaagagatggcaagtgatgagctaaaagaaatgcgaaagaatcttacaaaggaggcgatacgggagcatcagatggccaagactggggggacccagaccgacctgttcacctgtgggaaatgcaagaagaagaactgcacatatacgcaggtgcaaacccgctcagcagacgaacccatgaccacctttgtcgtgtgtaatgaatgcgggaatcggtggaaattctgctag

SEQ ID NO: 208934 - DNA, 354 bp, synthetic construct
  misc_feature 1..354: note = Description of Artificial Sequence: Synthetic coding sequence
  source 1..354: mol_type = other DNA
atggaggacgaggtggtgcggttcgccaagaagatggacaagatggttcagaaaaaaaatgctgccggagctctcgatctgctcaaagagctgaaaaacatcccaatgaccctcgagctgcttcaggagatggcttccgatgagctgaaggagatgcgaaaaaaccttaccaaggaggccatacgggagcaccagatggccaagaccggggggactcagacagacctcttcacttgtggtaagtgcaagaagaaaaactgtacttatacacaggtacaaactagaagtgctgacgagcccatgacgacctttgtagtctgtaacgaatgcggaaataggtggaaattctgttag

SEQ ID NO: 208935 - DNA, 480 bp, synthetic construct
  misc_feature 1..480: note = Description of Artificial Sequence: Synthetic coding sequence
  source 1..480: mol_type = other DNA
atggacaagccccggaaggagaacgaggaggagccccagagcgcccccaaaaccgatgaggagaggcccccagtggaacattcccctgaaaagcagtcccccgaagagcagtctagtgaagagcagagcagtgaggaagagttttttcccgaggaactcctgcccgaattactgccggaaatgctgctctccgaagagagacccccccaggaaggactgtctaggaaagacctgttcgaaggcagacctccaatggagcagcccccctgtggagttggtaaacataagctggaggagggttcttttaaggagaggcttgcccgcagccgcccccagtttcggggggacatccacgggcggaacctgagtaacgaggagatgatccaggcagctgatgagcttgaggaaatgaagagggtacggaataagttgatgatcatgcattggaaagctaagcggtcccgcccctatcctatttag

SEQ ID NO: 208936 - DNA, 480 bp, synthetic construct
  misc_feature 1..480: note = Description of Artificial Sequence: Synthetic coding sequence
  source 1..480: mol_type = other DNA
atggacaagccccggaaggagaacgaggaggagccccagagcgcccccaagaccgatgaagagcgccctcccgtggagcactcaccggagaaacagagtccagaagagcaatcatcagaggagcagtcttccgaagaggaatttttcccggaagaactactcccggaactcttgcctgaaatgctcttgtccgaggaacgccctccccaggagggcctgtcccgcaaagatctcttcgaagggcgcccgcccatggaacagcctccctgtggggtcggaaagcacaaattagaggaaggttcctttaaggagcgcttagctcgtagtaggccccagttcagaggggatatccacgggcgaaacctcagtaacgaggaaatgatccaggctgccgacgagctcgaagaaatgaagcgcgtgaggaataagctgatgataatgcactggaaggccaaacgatctcgaccttatcccatctag

SEQ ID NO: 208937 - DNA, 480 bp, synthetic construct
  misc_feature 1..480: note = Description of Artificial Sequence: Synthetic coding sequence
  source 1..480: mol_type = other DNA
atggacaagccccggaaggagaacgaggaggagccccagagcgcccccaaaaccgatgaggagcgccctcccgttgagcatagccccgagaaacagagcccagaagagcagagctctgaggagcaaagttccgaagaggaattctttcctgaagaacttctgcccgaactattgcccgagatgcttctgagcgaggagaggccaccccaggaaggtctgtcccgtaaggatttattcgaagggaggcctcccatggagcagccaccttgcggagttgggaagcacaagttggaggagggtagctttaaagaacggctggcacggtcccgcccccagttccgcggtgatatacacgggaggaatttaagtaatgaagaaatgatacaggcggcagatgagttagaagagatgaaaagggtgcgaaataagttaatgatcatgcactggaaggccaaacggtcacggccttaccctatttag

SEQ ID NO: 208938 - DNA, 471 bp, synthetic construct
  misc_feature 1..471: note = Description of Artificial Sequence: Synthetic coding sequence
  source 1..471: mol_type = other DNA
atggacaagccccggaaggagaacgaggaggagccccagcggccccgaccaatgaggcggggactgaggtggtcaaccctccctaagagcagccctcctcgctcctctctgcgccgcagttcaccccgccggcgcagttcattcctgaggtcatcctgcttgtctagttgtttgagatgctcatcccggagaagcccacaggaggggctgagcagaaaagatttgttcgaggggaggcccccaatggagcaaccaccttgtggggtgggaaagcataaactagaggaggggtcctttaaggagcgcctcgcaaggtcaagacctcagtttagaggcgacattcatggccgaaacctgtctaacgaagaaatgatccaggctgccgatgaactcgaggaaatgaagcgggtgaggaacaaattgatgattatgcactggaaagctaagaggtccaggccataccctatatag

SEQ ID NO: 208939 - DNA, 303 bp, synthetic construct
  misc_feature 1..303: note = Description of Artificial Sequence: Synthetic coding sequence
  source 1..303: mol_type = other DNA
atgcagaagccctgcaaggagaacgagggcaagcccaagtgcagcgtgcccaaacgggaggaaaaacggccatacggcgagttcgaaaggcagcagacagagggcaatttcagacaacgcctgctccagtcactggaagagttcaaggaagacattgactacagacatttcaaagatgaagagatgacacgggagggagacgaaatggagcgttgtctggaggagatcagaggcttacgcaagaaatttcgggccctccattccaaccatcgccattctagagacagaccttaccctatctag

SEQ ID NO: 208940 - DNA, 303 bp, synthetic construct
  misc_feature 1..303: note = Description of Artificial Sequence: Synthetic coding sequence
  source 1..303: mol_type = other DNA
atgcagaagccctgcaaggagaacgagggcaagcccaagtgcagcgtgcccaagagggaagagaagaggccatatggcgagtttgagaggcagcagactgaaggaaatttccgacagcggcttctgcagtcccttgaagagtttaaagaagacatcgattataggcactttaaggatgaagaaatgacccgtgagggtgatgagatggaacgctgcctagaagagataagagggttgaggaaaaagtttcgcgcccttcactctaaccaccgccatagtagagacaggccgtaccccatctag

SEQ ID NO: 208941 - DNA, 291 bp, synthetic construct
  misc_feature 1..291: note = Description of Artificial Sequence: Synthetic coding sequence
  source 1..291: mol_type = other DNA
atgtacgtgaagctgatcagcagcgacggccacgagttcatcgtgaaaagagagcacgcccttaccagtgggactatcaaggcaatgttgtcgggtccaggacagttcgccgaaaatgagaccaacgaggtgaatttcagagaaatacctagccacgtgctcagtaaagtgtgtatgtatttcacttacaaagtcagatacactaattcttccacagagataccggaatttccgatagctccagagattgcacttgagctgcttatggcggccaacttcctggactgttag

SEQ ID NO: 208942 - DNA, 339 bp, synthetic construct
  misc_feature 1..339: note = Description of Artificial Sequence: Synthetic coding sequence
  source 1..339: mol_type = other DNA
atggacggcgaggagaagacctacggcggctgcgagggccccgacgctatgtacgtgaagttgattagctcagacggtcatgaatttattgtgaaacgcgagcacgcccttacatctgggaccatcaaagcgatgcttagcggaccaggccagtttgctgaaaacgagacaaatgaagtaaattttcgagagatcccatctcatgtattatctaaggtatgcatgtactttacttacaaggtccgatatacaaattcaagcactgaaatccccgagtttcccatcgctcccgagatcgcgctcgagctcctcatggctgccaactttctggattgttag

SEQ ID NO: 208943 - DNA, 339 bp, synthetic construct
  misc_feature 1..339: note = Description of Artificial Sequence: Synthetic coding sequence
  source 1..339: mol_type = other DNA
atggacggcgaggagaagacctacggcggctgcgagggccccgacgctatgtatgtgaagctgatcagcagtgacggacacgagtttattgtgaaacgagaacacgcactaacgtctggaacaatcaaggcaatgttatctgggccaggacaattcgcagaaaatgagactaatgaagtcaattttcgggaaatcccttcccacgtgctatcaaaggtgtgtatgtattttacatacaaggtgaggtacaccaattcctcaactgagatcccagagttccctatagcaccggagattgctttggagctgctgatggccgctaattttctggactgctag

SEQ ID NO: 208944 - DNA, 339 bp, synthetic construct
  misc_feature 1..339: note = Description of Artificial Sequence: Synthetic coding sequence
  source 1..339: mol_type = other DNA
atggacggcgaggagaagacctacggcggctgcgagggccccgacgctatgtacgtgaagttgatcagcagtgatggtcatgagttcattgtgaaaagggaacatgcgctgacttcaggtacaattaaggctatgctcagtggcccaggacagttcgcagaaaacgagacgaacgaagtgaactttcgggagattccaagccacgtccttagcaaggtctgcatgtattttacctataaggtccggtatacgaatagctccactgagatccctgaatttcccatcgctcctgagattgccttagaactgcttatggctgctaattttctggattgctag

SEQ ID NO: 208945 - DNA, 339 bp, synthetic construct
  misc_feature 1..339: note = Description of Artificial Sequence: Synthetic coding sequence
  source 1..339: mol_type = other DNA
atggacggcgaggagaagacctacggcggctgcgagggccccgacgccatgtatgtgaaacttatttcctcagatgggcacgaatttattgtaaagcgtgagcatgcactcaccagtgggacaattaaggccatgctgtccgggccaggacaatttgcagagaacgaaacaaacgaggtgaacttccgcgaaataccatcacacgtgctatctaaggtgtgcatgtacttcacttacaaagtcaggtacacaaatagctcgaccgagattcccgaattcccgatcgcaccagagattgccctggaattactgatggccgctaacttcctcgattgctag

SEQ ID NO: 208946 - DNA, 339 bp, synthetic construct
  misc_feature 1..339: note = Description of Artificial Sequence: Synthetic coding sequence
  source 1..339: mol_type = other DNA
atggacggcgaggagaagacctacggcggctgcgagggccccgacgctatgtatgtcaagctcatttcctccgacggacacgaattcattgttaagagagaacacgcactgacctctggcacgattaaagcaatgctttctgggcccggccagtttgcagagaatgaaacaaatgaggtgaatttcagagagatcccttcgcacgtactgtcaaaagtttgcatgtacttcacctataaggtgaggtatactaactcttcaaccgagatacccgaatttcctattgccccagagatcgcattggagttactgatggccgccaactttctagattgctag

SEQ ID NO: 208947 - DNA, 339 bp, synthetic construct
  misc_feature 1..339: note = Description of Artificial Sequence: Synthetic coding sequence
  source 1..339: mol_type = other DNA
atggacggcgaggagaagacctacggcggctgcgagggccccgacgcaatgtacgtgaaactcatatcctccgacgggcatgagtttattgtgaagcgtgagcatgcgttaactagtggtacgattaaagcaatgctctcggggcctggacagttcgctgaaaacgagacaaatgaagtaaactttagagagatccctagccacgtgttaagcaaagtgtgtatgtatttcacgtacaaggttagatacaccaatagtagcactgaaatccccgaatttccaattgcccctgagattgccctggaactactcatggctgcaaactttcttgactgctag

SEQ ID NO: 208948 - DNA, 2397 bp, synthetic construct
  misc_feature 1..2397: note = Description of Artificial Sequence: Synthetic coding sequence
  source 1..2397: mol_type = other DNA
atgcacggcggccggagctgcggcccccggacccggcgggagccctccagcggggaggaagctgctccagtgacagcaatggctgctgagagtgcccttcaggtggtggaaaaacttcaggcacggctggcagcaaatccggaccctaaaaaacttttaaaatatctgaaaaaacttagcactctgccaataaccgtggacatactcgcagaaactggggtcggaaaaactgtcaatagtcttcggaaacacgaacacgtcgggtcctttgcaagagacttggtcgctcagtggaagaaactagtgccagtagaaagaaacgccgaaccagacgaacaggatttcgaaaaaagcaattcccgtaagcgtcctcgggatgcattgcagaaagaggaagaaatggaaggggattatcaggagacctggaaagctaccggctccaggtcatactcgcccgaccacaggcaaaagaaacacagaaaattgagtgagctggaacgaccccacaaggtcagccatggccacgagaggcgagatgaacgcaagagatgtcatcggatgagccccacatactccagtgatcccgaaagttccgattatggtcacgtccagagccctccctcatgtacctctccacatcagatgtatgtcgaccactacagatccctcgaagaagatcaagagcccatcgtgtcccaccagaaacctggtaaagggcattctaatgccttccaggaccgacttggcgccagtcaggaacgtcacctgggggagccacatggcaaaggcgtcgtgagccagaacaaggaacacaaaagcagccacaaggacaaacgacctgtcgatgccaaaagcgacgaaaaggcctccgtggtcagtcgagagaaatcccataaagccctgagtaaggaggagaacaggcgcccaccctccggtgataatgcaagagagaaacccccttcctctggagtgaagaaggaaaaggatagggaagggagcagtctgaaaaaaaaatgcctcccgccatcagaagcagcttccgacaaccacctgaagaaacccaagcacagagacccagaaaaagctaagcttgacaaaagcaaacagggcctggattcctttgacacggggaaaggagcgggcgacctcctccccaaagtaaaagaaaaggggagcaataacctaaagaccccagaaggaaaggtgaaaacaaatctcgatcggaaatccctggggagccttcccaaggtcgaagagaccgacatggaggacgaatttgaacaacccaccatgagcttcgaatcttaccttagttacgatcagccccggaaaaagaaaaagaaaattgtgaagacctccgctacagccctgggggataaaggattgaaaaagaacgatagtaagtcaactggcaagaacttggactccgtacagaaactccctaaagtgaacaagacaaagtcagagaaacctgcgggtgccgatttagcgaaactgcgtaaggtgcccgatgtcctcccagttctgccagacctcccgctgcctgcaatacaagctaactatcgacctctaccctccctggaacttattagttcatttcagcctaagagaaaggcgttttcctcacctcaggaagaggaggaggctggtttcacaggccggcggatgaattctaagatgcaggtctatagtggctccaaatgcgcatacttgcctaagatgatgactcttcaccagcagtgtattcgagtgctgaaaaacaatatagacagcatctttgaggttggaggagtgccttattccgtactcgagcctgtcttggagcgctgcacgcctgatcagctctacagaatcgaggaatacaatcatgtgctgatagaggagacagaccagctgtggaaggtacactgtcaccgggacttcaaagaagaaaggcccgaagaatacgagtcttggagagagatgtacctgagactgcaggatgctcgggagcaacggctacgggtgctgacgaaaaacatccagttcgcgcatgccaacaaacccaaaggacgacaggcaaaaatggcgttcgtgaacagcgtggccaaaccgcctcgagacgtgaggaggcgccaggagaagttcgggactggaggggcagctgtccctgaaaaaattaaaatcaagcccgcgccttatcccatgggaagttcgcatgcgagcgccagctcaataagcttcaatccctcccccgaagagcctgcctacgacgggccttcaacgtcgagcgctcacttggcgcctgtagtgtcttcaaccgtgtcatatgatccccgtaagccaacagtgaaaaaaattgccccaatgatggcaaagacgatcaaagcattcaaaaaccgcttctcgcgcagatag

SEQ ID NO: 208949 - DNA, 3297 bp, synthetic construct
  misc_feature 1..3297: note = Description of Artificial Sequence: Synthetic coding sequence
  source 1..3297: mol_type = other DNA
atggccgagcggggcggcgacggcggcgagagcgagcggttcaacccaggcgagctccggatggctcagcagcaggcactgaggttccgtgggcctgcaccccccccaaatgccgtgatgcgcgggccccctcccctcatgagaccacccccccctttcgggatgatgagaggaccccccccgcctcccagaccaccttttgggagaccaccctttgatcccaacatgccaccaatgccaccaccaggcggaattccacctcctatggggcctcctcacctgcaaagacccccatttatgcctccgccgatgagctctatgccgcccccacccggcatgatgttcccacccggaatgccacccgtgaccgcccccggtaccccagcactgccccctaccgaagagatctgggtcgaaaacaaaacccccgatggcaaagtatattactataatgctagaacccgcgagtcagcttggacaaagcctgacggagtcaaggttatacagcagagtgagttaactccaatgctggccgcccaggcacaggtccaggctcaggcacaggcccaagcccaagctcaggcacaggctcaagcccaggcacaggcccaggcccaggcacaggcccaggcccaagcccaagcccaggcccaagcccaggcacaagcacaggctcaggcccaggcacaggctcaggcacaggcccaagcccaagcacaggcacaggtccaagcacaggttcaggcccaggtccaggcgcaggctgtcggtgcctctactcccaccaccagcagtccggccccagccgttagcaccagcactagctcatcaactcctagttctactacctccacaacgaccacagccacatcagtagcacaaactgtgtccactcccacaacccaggaccagacccctagttcagccgtgtctgttgcaacaccaactgtgagcgtgtcaaccccagcccctactgctactccagtacagaccgtgccccaaccacacccccaaacgctgcccccagcggtgccacattcggtgccccagcccaccaccgcgataccagcattccctcctgtgatggttcctccttttcgcgtgcctctgcccgggatgcccattcctcttcctggcgttgcaatgatgcagattgtgtcatgtccttacgtgaagaccgtggctacaaccaaaactggggtactgccaggaatggcgccaccaatcgttcctatgatccacccccaggtggccattgccgcttcaccagccaccctggccggggctacggcagtgagcgagtggactgagtacaaaacagctgacggcaagacttactactacaacaacagaacactcgaatcgacgtgggagaaacctcaggagctgaaagagaaagaaaaactggaagagaaaattaaagagcccatcaaagaaccatccgaagaaccactgccaatggagaccgaagaagaggatccaaaagaagagcccataaaagagatcaaggaggagccgaaggaggaggagatgaccgaggaggaaaaagccgctcagaaagctaagccggtggccacagctcccatccctggcacgccatggtgtgtggtgtggaccggcgacgagagggtgttcttttacaatccgactacccgcttgtctatgtgggatagacctgacgacctgatcggccgagctgacgtggataaaatcatacaggagcctccacataaaaaaggcatggaagaattgaagaaactgcggcatccaacaccaactatgctctcaatacagaagtggcagttttccatgtcagctatcaaagaggagcaggagctcatggaggaaattaacgaagatgagccggtgaaagcaaaaaagcggaaaagagatgacaacaaagatatcgatagcgagaaggaagccgctatggaggctgaaatcaaagctgctcgggaaagagctatcgttccattagaggctcgcatgaaacagttcaaggacatgttactcgagcgcggcgtgtctgctttttccacatgggagaaagagcttcacaaaatcgtttttgatccaaggtacctcctgttaaatcccaaggagcgtaagcaagtatttgatcagtatgtcaaaacccgagccgaggaggagaggagggaaaagaaaaataaaatcatgcaggcaaaggaggacttcaagaaaatgatggaagaggctaagttcaaccctcgggccacattcagcgagtttgcagcaaagcacgcaaaggacagccggttcaaggcaattgagaagatgaaggatcgggaggcactgttcaacgaattcgtcgctgcagccagaaaaaaagagaaggaggattcaaaaaccagaggagagaaaattaaaagcgacttcttcgagctactttctaatcaccatctggactctcagagccgatggagcaaagtgaaggataaggtcgagagcgacccacggtacaaggcagtggacagttcttcaatgcgggaagacctcttcaaacagtacatcgaaaagatagcaaagaacctggatagtgagaaagagaaagaacttgagcggcaagcacgtattgaggcttccctccgcgagcgggagcgggaggtgcagaaggcaaggtctgagcagactaaggagatcgacagagagcgagagcaacacaagagagaagaagccatccagaacttcaaagccttgctttccgacatggtgcggagctcagatgtctcttggagcgacacaagaaggaccttgagaaaggatcataggtgggagagcggttccttgctcgagcgagaggagaaagaaaagttgttcaatgaacacattgaggctctaacaaagaaaaagagggagcatttcaggcaactgctcgacgaaactagtgccataaccctaactagcacctggaaggaagttaaaaagattatcaaggaggacccgagatgtatcaaattctcatcatctgacagaaagaaacagcgcgagttcgaagagtacatcagagataagtatatcaccgcaaaagcagactttcgtacgctgctgaaggaaaccaagttcataacttacaggtccaagaaactgatacaggagtccgatcagcatttaaaggacgtcgagaagatactgcagaacgacaagaggtatttggtactggattgcgtaccagaggagaggcgtaagcttatagtagcctatgttgatgatttggacagacgcggcccaccaccaccgcctaccgcgagtgagccgacaagaaggagcactaagtag

SEQ ID NO: 208950 - DNA, 3234 bp, synthetic construct
  misc_feature 1..3234: note = Description of Artificial Sequence: Synthetic coding sequence
  source 1..3234: mol_type = other DNA
atggccgagcggggcggcgacggcggcgagagcgagcggttcaaccccggcgaactgcgcatggcccagcagcaggctcttcgctttagaggtcctgcaccaccccccaacgcagtgatgcggggcccaccccccctaatgcggccgccacccccctttggaatgatgcgcggaccaccaccacctccccggcccccattcggacgtcctcctttcgatcccaacatgccacctatgcctcccccagggggaatccccccacctatggggccccctcacctgcagagacctccctttatgccaccacccatgtcgtctatgccccctcctccaggcatgatgttccccccgggcatgcccccggtaaccgctcccggcacccccgcactgcctcctacagaggagatttgggtggagaacaagacacccgatggaaaggtgtactactacaacgcccgaacaagggaaagcgcctggaccaagcctgacggggtgaaagttatccagcagagtgagttaacgcctatgctggccgcgcaggctcaggtgcaggcccaggctcaggcccaagctcaggcccaggctcaagcccaggcacaggcccaggcccaagcgcaggcacaggcgcaggcccaggcccaggctcaggcgcaggcccaggcccaggcccaggctcaggcgcaggctcaagctcaggctcaggcccaggcccaagcccaggcacaggtgcaggcccaagtccaggcccaggtccaagcgcaggcggttggcgcttcgacgcctacaacttcctctccagccccagcagtttctacctcaacaagctccagtactccttcatcaactacctccaccacaaccacagctacttctgtggctcaaaccgttagcacacccaccactcaggatcagactcccagcagcgcagtctccgtcgcaacgcccacagtaagtgtttctacacccgccccgacagccactcccgtgcagacagtgcctcagccgcatcctcagacacttccacccgcagtcccccacagcgtgccgcagcccacaaccgccatccctgctttcccacctgttatggtcccacccttccgtgtaccccttcctgggatgcctatcccgcttccaggggtactccctggaatggccccacccattgtccctatgattcatccgcaggtggcaatcgccgccagtcctgccacccttgcgggcgcgaccgctgtctccgagtggacagaatacaagaccgctgacggaaagacctactactataataaccgcacgcttgagagcacttgggagaagcctcaggaactgaaggagaaggaaaaactggaggagaaaataaaagaaccgattaaggaacctagcgaggagcccctccccatggaaacagaagaggaagacccaaaggaggaaccaattaaagaaattaaagaggagcctaaggaggaagagatgacagaggaagagaaggcagctcagaaagccaagcctgtggccactgcccccatacccggcaccccatggtgtgttgtatggacaggggatgagcgcgtgttcttctataaccccactacccgcctgtctatgtgggacagacccgacgatcttatcggccgcgctgatgtggacaaaattatacaagagccccctcataagaaaggtatggaagaactgaaaaaactccggcatccaaccccaacaatgttgtctatacagaaatggcagttctccatgtccgcgatcaaggaggaacaggagctcatggaggagattaatgaagacgaacctgtgaaggccaagaaacgcaagagggatgacaataaggacatagatagcgagaaggaggccgctatggaggctgaaataaaggcggcccgcgagcgggccattgtgccccttgaggcccggatgaagcaattcaaggacatgctactggaacgcggagtgtccgctttctctacatgggaaaaggaactgcacaagattgtgtttgatccacgctatcttttgctcaatcctaaggaaagaaagcaggtcttcgatcagtacgtgaagacaagagccgaggaggagcgtcgagaaaaaaagaacaagattatgcaggctaaggaggactttaaaaagatgatggaagaggccaagttcaatccacgcgcaacattctctgagttcgctgcaaaacacgctaaggattcccgttttaaggcaattgaaaagatgaaagatagagaggctttgtttaatgaatttgtggccgctgctaggaagaaggaaaaggaagacagcaagacccgtggtgagaagattaaaagcgattttttcgagctcctcagcaatcatcatctggattcccagagccggtggagcaaagtgaaggacaaagtggagtctgatcctaggtacaaggcagttgatagctctagcatgcgtgaggatctctttaaacaatatattgagaaaatcgccaagaatcttgattctgaaaaggagaaagagctggagaggcaggctcgcatcgaggctagcctgcgagagcgagaaagggaagtccagaaggctcgaagtgaacagacaaaggagattgacagggagcgcgaacagcataagcgagaggaggctatccagaatttcaaggccctactaagcgacatggtgcgcagctccgacgtgtcttggtcagacaccagacggacattaagaaaggatcaccgctgggagtctgggtcactcctggagagagaagaaaaggagaagttattcaatgaacacattgaggcgctcaccaaaaagaagagggaacattttcgtcagctactggacgaaacttctgcaattactctgacctctacatggaaggaggtgaaaaaaatcataaaagaggaccctagatgcattaaattttcttccagtgataggaagaagcagcgggagtttgaagaatatattcgagataaatacattactgctaaggctgatttccggaccctgctgaaagagaccaagttcataacgtacaggtccaaaaaactgattcaggaatcagatcaacatctcaaggatgttgagaaaatcctgcagaacgataagcggtacctagttctcgattgcgtgcctgaagaaaggaggaaacttatcgttgcatatgtagacgacctagaccgccgtggccccccccctccccctacagcttccgagccgactcggcgcagtaccaagtag

SEQ ID NO: 208951 - DNA, 2049 bp, synthetic construct
  misc_feature 1..2049: note = Description of Artificial Sequence: Synthetic coding sequence
  source 1..2049: mol_type = other DNA
atgaacccccagcagcagcggatggccgccatcggcaccgacaaggaactgtctgatctcttggatttctctgcgatgttttcgccccccgtgaactccggtaaaacccgaccgaccacactgggcagttcccagttttcaggatccggaattgacgagcgcggcggcacgacttcatgggggacttcaggacagccctccccctcctacgactccagcagaggatttaccgattcgccccactactccgaccaccttaacgattcccggctcggggcccacgagggcctctctccaaccccctttatgaatagcaatttaatgggaaagacaagcgagaggggttctttttcactttatagcagagacactgggctccctggatgtcagagcagcctgctgcgacaagatcttggcctgggttcaccggcccagctgagctctagcggtaagcctgggactgcgtactattccttctcagcaacgtcttctagacgaaggcctctgcatgacagcgcagcactggatccactccaggccaagaaagtccggaaggtcccgccggggcttccaagtagtgtctatgcacctagccccaattctgatgatttcaaccgcgagtcacccagctatccctcccccaagccgccaacgtcaatgttcgcatctacttttttcatgcaggacggcacacataattcctctgacctttggagcagcagcaacggaatgagtcagccaggcttcgggggcatcctcggaacaagcacatcccatatgtcccagtcgtctagctacggcaatctccattctcacgatcggctgtcttatccaccacattccgttagtcccactgatatcaatacctctctcccccccatgtcttcctttcacagaggctcgacctctagtagtccatatgtggcagctagccacacacctcccattaacgggagcgactccatcctcggcacccgaggaaacgcagctggaagcagccagacaggtgacgccctgggtaaggccttggcctccatctattccccagaccacactagctccagcttcccatctaatcctagtacccctgtaggctcgccctctccactgactggcaccagtcaatggcccaggccaggaggccaagctccctccagccctagctacgaaaatagcttacactctctccagtccaggatggaagatcgacttgaccgactcgatgacgccatccatgttctgcgcaaccacgctgttggcccttccaccagcctgcccgcggggcactccgacatccactcactgctcggcccctctcataatgcccctatcgggtctctgaactccaattacggcgggagcagcctcgtggcaagtagtcggagcgcgtccatggtggggactcaccgcgaagattctgtgtccctgaatggaaatcattcggtactatcgagtaccgtgacaacctctagcacagatctaaatcataaaacccaggagaattatcgcggcggcctgcagtcccaaagcggaaccgtcgttactactgagataaaaacggaaaacaaggagaaggacgaaaacctgcacgagccccccagctctgatgatatgaaatctgacgatgaatcttcccagaaagatataaaggtgtcttctagaggaaggacctccagcactaacgaggatgaggatctgaaccctgaacagaaaatcgaaagagagaaggagagacggatggccaacaacgcacgggagcgcctcagggttagggatattaatgaagcctttaaggagctcggtcggatgtgccagctgcacctaaaatccgaaaaacctcagacaaaacttctgatcctgcatcaggcggtggctgtgatattgagtttagaacagcaggttcgtgagcggaacctgaacccgaaagccgcgtgcctgaagaggcgggaggaagagaaagtgtctgccgtgtccgctgaaccgcctaccacacttcctgggacacatcctgggttgtccgaaactacgaatcccatgggccacatgtag

SEQ ID NO: 208952 - DNA, 2121 bp, synthetic construct
  misc_feature 1..2121: note = Description of Artificial Sequence: Synthetic coding sequence
  source 1..2121: mol_type = other DNA
atgaacccccagcagcagcggatggccgccatcggcaccgacaaggaacttagcgacctccttgacttctcggccatgttcagtccaccagtcaatagcggcaagacccggccaaccaccttgggcagctcccagtttagtggcagcggaatagatgagaggggggggacaacttcctggggcaccagcgggcagccgagtccaagttatgacagttcccggggattcaccgatagccctcactactcagaccacctgaacgattcgcggctgggcgctcatgagggcctgtccccgacgccctttatgaactccaatctgatgggaaaaactagcgagcggggctcgttttcattatatagccgggacaccgggctgcctggctgtcagagcagcctcctgcgccaggatttgggacttgggagccccgctcagctgtcgagctcagggaaacccggcaccgcctattactcctttagcgctacatcatccaggaggcgccccctgcatgactctgccgcactggaccctcttcaggcgaagaaagtgagaaaggtgccacccggacttccctctagcgtctatgccccttcccctaactctgacgatttcaacagggaaagtccctcgtatcctagcccgaaaccgcctacctccatgtttgcatccacgttcttcatgcaggacggcactcacaacagtagtgatctttggtcatctagcaacggaatgtctcagccaggttttggaggcatcttagggacaagcacctcacatatgtcacagtcctcctcgtacggaaacctccatagccatgaccgtttaagttacccaccacattccgtgagtcccacggacatcaatacatcactgcctcccatgtcctctttccaccggggttctacatcctcctcaccctacgtcgcagcatcacacacaccaccaatcaacgggtcagattcaatccttggcacccgagggaatgccgcgggctcctcccaaacaggagacgctctgggaaaggctctcgcatcaatctatagccccgaccacacgtcttcttccttcccatctaatccatcaaccccagtgggctccccttccccccttaccggaactagccagtggcctcgcccaggtggccaggcgccatcctcccctagctacgagaatagccttcactccttaaaaaaccgggttgaacagcagctccatgaacacttgcaggacgccatgagcttcctaaaggacgtatgcgagcaatccagaatggaggacagactagataggttggacgatgcaatccacgtacttagaaaccacgcagtcggtcctagtactagcctacccgccggacattcagatattcattccctcctcgggccatctcacaacgctcctatcgggagtctaaatagtaactatggaggaagttccctcgtcgcatcgagcaggtcagctagtatggtgggcacacacagagaggattctgtctccctgaatggcaaccatagtgttctcagttcaactgtcaccacttctagcaccgacttgaaccacaaaacacaggagaattacagagggggtctgcagtcacagtcagggaccgtcgttaccaccgagattaaaaccgagaacaaggagaaggacgagaacctgcacgagcccccatctagcgatgatatgaagtcagatgacgaaagttctcaaaaagacataaaggtttcaagcagaggaagaaccagctcgaccaacgaagatgaggacttaaaccctgaacagaaaatcgagcgcgagaaggagcgaagaatggcgaacaacgctcgagagcgcctgagagtaagggacataaatgaggccttcaaggagttgggccgcatgtgccagttgcatctgaaatcagagaaaccccaaactaaactgttaattcttcatcaggccgtcgccgtcattctctcacttgagcagcaggttcgcgagcggaatcttaatccaaaggctgcatgccttaagcggagggaagaagagaaggtgagcgcagtcagcgctgaacctcccactacattgccagggacgcacccgggcctctctgagacaacgaacccgatgggccacatgtag

SEQ ID NO: 208953 - DNA, 2109 bp, synthetic construct
  misc_feature 1..2109: note = Description of Artificial Sequence: Synthetic coding sequence
  source 1..2109: mol_type = other DNA
atgaacccccagcagcagcggatggccgccatcggcaccgacaaggagctgtcagatctgctagatttctccgctatgttttctcccccggtgaatagtggtaagacaaggcctacaacgctcggaagctcacagttctcaggctctgggaccatccatgaaatgaaacaacttaactccaaagcaagacagaagggacaacgcatcaagggttttactgactccccccattactccgatcatttgaatgacagccgcctaggcgcccacgaggggctgtctcccaccccattcatgaattcgaatctcatggggaaaacgagtgagaggggttccttctcactctatagtcgcgataccggcctgcccggttgtcagtcaagtttgttgcgacaggacttagggttgggcagtcccgcacagctctcatctagcggtaagcccgggaccgcgtattattctttttcagcgactagctcaagacgcaggccactgcatgattccgcagccctggaccccctgcaggctaagaaagtgagaaaggtccctccaggtttaccttcatcagtgtatgctccctcccccaactccgacgacttcaacagggaatccccaagctatccaagtccgaaaccccccacttcaatgttcgcatcaacttttttcatgcaagacggcacgcacaacagttccgacctttggagcagttcaaacggaatgagtcaacccggttttggcggcattctcgggacgtccacctcccacatgagccagtcttctagctacggcaatctacattctcacgaccggctgagttatcctccacacagcgtgtcccctaccgacataaatacaagtctccctcctatgtcgagtttccaccggggtagtacatcctcaagcccatacgtagctgcctcccatactccacctatcaacggctcggattctatcctaggtacacgcggcaatgctgctggctcttcacagacaggtgacgccctcggcaaggccttagcctcaatctattcccccgatcacacttcttcgagctttccgagcaaccccagcacccctgtgggctctcccagcccactgacaggcacttcacagtggcccagacccggggggcaggcgccctcatccccctcttacgagaacagcctccacagcctgaaaaatcgggtggagcaacagctgcacgaacatctccaagacgcgatgtcattcttgaaagacgtgtgcgagcagagtaggatggaggacagactggaccgtctcgacgacgccatccacgtgctgcgcaatcatgctgtcgggccttccactagcctgcctgccggtcatagcgacatccactctcttctgggtccttctcacaacgctcccatagggtccctgaattccaattacggcgggtctagcctggttgccagctcacgaagcgcttctatggttggcacacacagggaggattcagtgagcctgaatggcaaccacagtgttttgagctctaccgtgaccacatcgtcgaccgatctgaaccacaagacccaagagaattatcgcggtggattgcagtcgcagagtggcacagttgtaactactgaaataaaaacagaaaataaagagaaggacgagaacctccacgaacccccaagctccgacgatatgaaatccgacgatgaaagctcacagaaagatattaaagtcagcagccggggacggactagtagcactaatgaggatgaagatttgaaccccgaacaaaaaatcgaacgtgagaaagaacggcgaatggccaacaacgcaagagagcgcttgcgcgttcgggatataaatgaggcattcaaggagcttggccgaatgtgccaattacaccttaaatccgagaaaccccaaaccaaactgttaattttgcaccaagctgtagcggtgatccttagcctcgagcaacaagtgagggagcgcaacctgaatccaaaagcagcctgtttaaaaagacgagaagaagaaaaggtgtctgccgtcagtgccgagcctccaaccactttgccagggacccatcctggactttccgaaactactaacccaatgggccacatgtag

SEQ ID NO: 208954 - DNA, 1341 bp, synthetic construct
  misc_feature 1..1341: note = Description of Artificial Sequence: Synthetic coding sequence
  source 1..1341: mol_type = other DNA
atgggcaagcggtacatgcaccacccccagatccagatgatcagcacggtgaacttgcttgttatacatctcctgagccatcaacccgtttgttccttggctctctccttgtgtaagtcatatcctccccatagtgtgtctccaaccgatattaatacatccctgcctcctatgtctagttttcaccgagggtcgacatcatctagcccttacgttgctgcctcacatactcctccaataaacggtagtgattcgatactcggcacgagaggaaatgcagccgggagcagtcagaccggcgatgctctcggtaaggctttggcatccatctactccccagaccacacgagctcctctttcccatccaacccttccacccccgtgggctccccgtcaccgctgacaggcacatctcagtggccgagacctggtggccaggccccctcctccccaagctatgagaattcccttcactctctacaatcgcggatggaggatcgcctggaccgcttggacgacgccatacacgtcctcagaaaccacgccgtgggcccctcaacctcactgcctgccggccactcagatatacattcattactaggtcccagtcataacgcgcctatcggctctctcaatagcaactatgggggtagctcactcgttgccagtagcaggtccgcatctatggtcggtacccatcgcgaagacagtgtgagcctgaacggcaaccacagcgttctctcatctacagtcactacctccagcacagaccttaaccacaaaactcaggagaattaccggggcggactgcagtcccagagtggtacagtggtgaccactgagattaagactgaaaacaaagagaaagatgaaaatctgcacgagcctccctcctcagatgacatgaagtcagatgacgaaagctcacagaaagacattaaggttagttcaaggggtcgaaccagctccacgaatgaagacgaggacctcaaccctgaacagaagattgagcgtgagaaagagagacgcatggcaaacaacgcgcgcgaacggctgcgtgtgcgggacattaacgaagcgtttaaagagctgggtaggatgtgccagctccacttgaagtccgagaagcctcaaaccaagttgctcatcctccatcaggcagtggccgtgatcttatccctggagcagcaggtgagagagagaaacctcaatccaaaggccgcatgccttaagagaagggaagaggaaaaagtgagtgccgtgagtgccgagccaccaacaactttgcccgggacccatcccggtttatctgaaactacgaaccctatggggcatatgtag

SEQ ID NO: 208955 - DNA, 2046 bp, synthetic construct
  misc_feature 1..2046: note = Description of Artificial Sequence: Synthetic coding sequence
  source 1..2046: mol_type = other DNA
atggccgccttcagcgtgctgcggccccgggtgcccggcagcagcgggacgtgggccgccgaccccgacgcatcaacagcggtgagcccctctttgaggtttggcgggcgcgagccagctcgccctacccggggtggtgcaacaaagtggcctaaaatgaatccccagcagcaacgaatggccgcgatcggcacagacaaggaactatctgacttactggactttagcgccatgttttccccccctgtgaacagcggaaaaaccaggcccactacactaggttcaagtcagttctctgggtcaggaattgatgaaagaggaggaaccacgagttggggtacatccggtcagccaagcccatcttatgacagcagccgagggttcacagactcaccccactacagcgatcacctgaacgattcacgcctaggcgcccatgaaggcctttcccctaccccttttatgaactctaatttaatggggaagaccagcgagagaggctcattttccctgtactcacgagatactgggttacctggctgccagtcaagtctgcttcgccaggatctgggactcgggtctccagctcaactctctagctccggtaagcctggcaccgcttattattcattcagtgctacctccagccggcgtagacccttgcatgactccgctgctctggacccactccaagccaagaaggttaggaaggtaccgccaggtctgccctcctcagtttacgctccgagccctaattccgacgacttcaatcgggaatctccgtcatacccttcaccaaagccgccgacctcaatgttcgcatctaccttctttatgcaggatggcacccataattcatcagatctgtggtctagttctaacggaatgagccagccagggtttgggggtattctgggaacgtcaacaagtcacatgtcccagtccagctcgtacgggaacttgcattcccacgatcgactgagctacccaccacactcggtgagtccaaccgatattaacacttccttgcctccaatgtcttcctttcaccgcgggtctacatctagctccccatatgttgctgcctctcacacacctcccatcaatggatcagacagcatcctagggactaggggcaacgctgctggctcatctcagactggcgacgctctaggcaaggcccttgctagcatttactcgcctgaccatacaagtagctcctttccttctaatccaagcacccccgtgggatcccccagtccccttaccggaacttcccagtggcccaggccgggggggcaggcacccagcagcccatcatatgaaaatagtttgcacagcctgcagtcacggatggaggacagactcgataggttggacgatgccatccatgtgctgcggaatcacgccgtggggccctccacttctttaccagcaggccattccgatatccactccttgctcggccctagccacaatgcacctatcggatcactgaattccaattacgggggtagcagcctggtcgcgtcttccaggtcagccagcatggtgggaacgcatagagaggacagcgtgtcactgaatggaaaccattctgtcctgagtagtaccgtcaccacatcgtctacagatcttaaccataaaacccaggaaaactacaggggaggcctgcagtctcaatccggcactgtggtcacgacagagatcaagacggagaataaggagaaagacgagaatctccacgagcccccctcctctgacgacatgaaaagtgacgacgaaagtagccaaaaggacattaaggtgtccagcaggggccgtacttcatcgactaacgaggatgaggacttgaatccagaacagaaaatcgagcgcgagaaggaacgaaggatggcaaacaatgccagggaaagactacgcgtaagggacatcaacgaagcttttaaagaactcggccgtatgtgccagttgcatctaaagtcagagaaaccgcagacaaaactgctgatcttacatcaagccgttaccactattggcccttag

SEQ ID NO: 208956 - DNA, 885 bp, synthetic construct
  misc_feature 1..885: note = Description of Artificial Sequence: Synthetic coding sequence
  source 1..885: mol_type = other DNA
atgagcttcctgaaggacgtgtgcgagcagagccggatggaggacaggctggacaggcttgatgacgccattcacgttttgcgaaatcacgctgtggggccaagcacgtctttgcccgctggccatagtgacatacattctctgttagggccttcgcataacgctcccatcggatctctgaatagcaactatggcgggtctagcctggttgcgagctctcgatcagcctccatggtgggcactcaccgcgaggactcggtgagcttgaatgggaatcactcagttctctcatccacggtgactacttcaagcacagatttgaatcataaaacacaggaaaactaccggggtggccttcagtctcagagcggcaccgtcgtgaccacagagattaagactgagaacaaagagaaagatgagaaccttcatgagcctccatcttccgacgacatgaagagtgacgacgagagctcccagaaagatataaaggtttcttccaggggtagaacctcgaccaatgaagacgaagacctaaacccagagcagaagattgagagggaaaaggaacggcgaatggcgaacaatgctagggaacgactaagagtgagagatattaacgaggccttcaaggagctaggccgcatgtgccagctgcatctgaagtcggagaagccgcagactaaactgctcatcctgcatcaggccgttgcggtaatactgagcctcgaacagcaggtgcgggagaggaaccttaatccaaaggcagcatgcttaaagaggcgggaagaagagaaagtcagtgctgtttctgcagaacctcctactaccttgcccgggacgcaccccgggcttagtgaaacgacgaatcccatgggtcacatgtag

SEQ ID NO: 208957 - DNA, 1611 bp, synthetic construct
  misc_feature 1..1611: note = Description of Artificial Sequence: Synthetic coding sequence
  source 1..1611: mol_type = other DNA
atgtactgcgcctaccccgtgcccggcatgggcagcaacagcctgatgtactactataatggaaaaaccgtgtacgcgcccagcccaaactccgatgatttcaatcgggaatcaccctcttaccctagcccaaagccgcctaccagcatgtttgctagcacgttttttatgcaagacggaacacacaattcgtccgacctgtggtcctctagcaacggaatgtcccagccaggattcggggggattctcggcaccagcacaagccacatgagccaaagttcatcttatggcaacctacactcccacgaccgcctttcctaccctccgcatagtgtgtcccccactgacataaacacgtcactgcctcctatgagctccttccacaggggatctacctctagctccccctacgtcgcagcgagccacaccccacccatcaatggctcagattctatcctcggcaccagaggcaatgcagcagggagcagccagaccggagacgccctgggaaaagccctggcctccatctacagtcccgaccacacaagcagtagctttcccagcaacccatccactccggttggatccccttcccctttaacagggaccagccagtggcctcgaccaggaggccaggcccccagctctcccagttacgaaaacagtctgcattctcttaaaaaccgtgtggaacagcagctgcatgagcacctgcaggatgctatgtcctttctcaaagatgtgtgtgagcagagccggatggaggatagattggacagattggacgacgccatccacgttttacgtaatcatgccgttggtccatcaactagtcttcctgccggccatagcgatattcatagtctcctgggccctagccacaacgctcctatcggttctctcaactctaattatggcggtagcagcttagtcgctagtagccggagtgccagcatggtcggcacacatagggaagattccgtgtcgctgaatggaaatcacagcgtccttagtagtacagtcacgacgtcgtctactgacctcaaccacaagacacaagaaaactacaggggaggtctacagagccagagtggaacagtggtaacaaccgagataaagacagagaataaggaaaaggacgagaacctgcacgagccgccctcatctgacgatatgaaaagtgacgacgagtcgtcccaaaaagacatcaaggtgtcctccagggggcgtacgagttctacaaatgaagacgaggacttgaatccggaacagaaaatcgaacgtgagaaggagcgtagaatggcaaacaacgcccgggagagattgagagtgcgagacatcaacgaggcctttaaagagcttggtcggatgtgtcaactccatctcaagtccgagaagcctcagaccaagttgcttatcctgcatcaggctgtcgcggttatactttctctcgaacaacaggtgagagagaggaacctcaacccaaaagccgcttgcctaaagaggcgcgaggaagaaaaggtctcggccgtcagcgcagaaccacctaccacactcccaggaacacacccaggtctctctgagaccacaaatcccatgggacatatgtag

SEQ ID NO: 208958 - DNA, 2049 bp, synthetic construct
  misc_feature 1..2049: note = Description of Artificial Sequence: Synthetic coding sequence
  source 1..2049: mol_type = other DNA
atgaacccccagcagcagcggatggccgccatcggcaccgacaaggagctgtctgacctgttggacttttcagctatgttttcccccccagtgaactcaggcaaaacgagaccgactacactcggctcctcccagttttccggtagcggcatcgacgagagaggaggaaccaccagctgggggactagcgggcagccctcacctagctacgattccagtcgcggattcacagatagtccccactactctgaccacctgaatgatagtaggctcggggcccacgagggactgtccccgaccccatttatgaactccaacctaatgggtaagactagcgaacgaggatcattcagcctttattcaagagacacaggcttacccggctgtcagagctccctgcttcggcaggacttaggcctggggagccctgcccagctgagctcttctggaaaaccaggtacagcctactacagctttagcgccaccagcagcaggcgacgaccgctgcatgactccgccgcattggaccctttacaggctaaaaaggtccggaaagtccccccaggcctgccgtcctcagtctatgcacctagcccaaacagcgatgattttaatagagaatcaccatcatatcctagccccaaaccacctacttccatgttcgcttccaccttcttcatgcaagacggtacccacaacagctcggacctttggtctagcagtaacggtatgtcacagcctggtttcggtggaatccttggaaccagcacttcacacatgtctcaatcttcatcttatggcaacttgcattcgcacgaccggctgtcctaccctcctcatagtgtatctcccactgacatcaatacctccctacctcccatgtcaagtttccacagaggctcgacaagcagttccccctacgtggccgcctctcataccccaccaatcaatggatccgatagcatcctgggcacacggggaaatgctgccgggagtagtcagacgggagacgccctgggaaaggcgctggcgagcatttacagtcctgatcatacaagctccagtttcccttccaacccttctacacctgttgggtcgccatcacccttgacaggtactagccagtggccccgacctggcggccaagctccaagcagcccaagctacgaaaattcgctgcatagcctgcaatctcggatggaagatcgactggatagattggacgatgccatccatgtcctgcggaatcacgccgtcggtccctccaccagcctgccagccgggcattccgacattcacagtctgctcggacccagtcacaacgctccaataggcagtctaaactctaactacggaggaagttcgctcgtcgcatccagtcggtccgcctccatggtggggacgcacagagaggattcagtgagccttaatggaaatcactctgtgctttcatccactgtcactacttcctcgacagacctgaaccacaagacacaggaaaattatagaggtgggttgcaatcacagtctggcacggtagttactacagaaattaaaaccgaaaataaagagaaagatgagaatttgcacgagccaccttccagtgacgatatgaagagcgacgacgagtccagccaaaaggacattaaagtgtcttcccgagggcggacttctagcaccaacgaggacgaggatctgaaccctgaacagaaaatcgagcgggagaaagaaagaaggatggcaaataatgccagggaacgcctccgcgtgagggatatcaatgaggcattcaaagagctggggcggatgtgccagctgcacctcaagtcggagaagccacagactaagttacttatactgcaccaggctgttgctgtcattctgtcactggagcagcaggtaagagaacgtaatcttaaccccaaggctgcttgcctgaagagacgggaagaagaaaaagtttccgcagtatccgctgaacctcctacgaccctgcctggcacacaccccgggctaagcgaaaccaccaaccctatgggtcacatgtag

SEQ ID NO: 208959 - DNA, 1020 bp, synthetic construct
  misc_feature 1..1020: note = Description of Artificial Sequence: Synthetic coding sequence
  source 1..1020: mol_type = other DNA
atgagcagcaacagcagcaccagccagtggccccggcccggcggccaggcaccttcctcaccctcctatgagaactctctgcactccttaaagaatcgcgttgagcagcagctccacgaacatctgcaggacgccatgagttttctgaaagatgtatgtgaacagagcagaatggaagaccggctggataggctcgacgatgccatccatgtactacggaatcacgccgttggacctagtacaagcctccccgccggccactcagacattcactctctgctgggaccaagccacaacgcgcccattggctcacttaattctaactacggaggcagcagcctggtggcatctagccgctcggcctccatggtcggtacacacagagaagatagcgtatctctcaatggtaaccatagcgtgctgtcctccaccgtgaccaccagctccactgacttaaaccataagacccaggagaattatcgcggcggtctccagtcccaaagcggcacagtcgtgacaacagaaataaaaaccgaaaataaggagaaggacgaaaatttgcacgagcctccttcctccgatgacatgaagtcggatgatgaatcatcccagaaagatatcaaggtatcatctcggggcaggacaagcacgaatgaggacgaggatctgaatccggagcagaagatagagagagaaaaggagaggcggatggccaataacgcaagagagcgtctacgcgtccgcgatataaacgaggccttcaaagagctggggcgcatgtgccagcttcacctgaaatcagagaaaccacagacaaagctgctcatcctgcaccaagcagttgctgtcatcctgtcactggaacagcaggtgcgagagcgcaacctgaatccaaaggcagcttgtctcaagagacgcgaggaggaaaaggtgagcgccgtaagcgctgagcctccaacaaccttacccggcacacaccccggattatccgagacaaccaatcccatggggcacatgtag

SEQ ID NO: 208960 - DNA, 1341 bp, synthetic construct
  misc_feature 1..1341: note = Description of Artificial Sequence: Synthetic coding sequence
  source 1..1341: mol_type = other DNA
atgggcaagcggtacatgcaccacccccagatccagatgatcagcaccgtaaacctgctggttatccatcttctgtcacaccagccagtgtgctcattggccctgagcctgtgtaagtcttatccaccacatagcgtcagtccgaccgacatcaatacatcccttccaccaatgagcagcttccaccgcggttctacctcttctagcccttacgttgctgcctcccacaccccaccaatcaatggcagtgactccattttgggtacacggggcaatgccgcgggctcctctcaaactggagatgcattgggcaaagcacttgcctcaatctatagccctgaccacactagcagtagctttccttccaatccgtccacccccgtgggctctcccagccccctgactggaacttcacagtggccacggccaggtggccaggcaccaagctctccctcatacgagaatagccttcactccttacagtcacgcatggaggacaggctggaccggttggatgacgcaatccatgtcctacgtaatcacgccgtggggccgtcaacttccctccctgctggccattcagacatacattccctgctcgggcctagccataatgctcctattgggtccctgaactcgaattacggcggtagcagcctggtcgcttcatcccgatccgctagtatggtgggaacccaccgggaagacagcgtttcactgaacggtaatcattctgttctgagttccactgttacaacctctagtactgatctgaatcacaaaacgcaggagaattaccgcggcgggcttcaatcgcagtctggaacggttgtcactactgagataaaaacggaaaataaggagaaggatgagaatttacatgagcctccaagctctgacgatatgaaatctgatgacgagtcgtcccagaaagatatcaaggtgtcctccagaggtaggacaagttcaaccaacgaagacgaggacttgaaccccgaacagaagatcgaacgggaaaaagagcgccgaatggccaacaatgcccgggaaagactcagagtcagggatattaacgaggcctttaaagaactaggccgcatgtgccagctacatctcaagtccgagaagccacagacaaagctgctgattttgcatcaggccgtggctgttatcctgtctctcgagcagcaggtgcgtgagaggaatctcaaccccaaagctgcctgtttgaaaagacgagaggaagaaaaagtatccgccgtgtcagccgaaccccccactactcttcccggcactcacccggggttgagtgagacgacaaaccctatgggacacatgtag

SEQ ID NO: 208961 - DNA, 1539 bp, synthetic construct
  misc_feature 1..1539: note = Description of Artificial Sequence: Synthetic coding sequence
  source 1..1539: mol_type = other DNA
atgtactgcgcctaccccgtgcccggcatgggcagcaacagcctgatgtattattacaatggaaaaaccgtgtatgcacctagccccaactctgacgatttcaacagggaatcaccatcctacccttccccaaagcccccaacttctatgttcgcttccaccttctttatgcaggacggaacccacaacagtagtgacctgtggtcatctagcaacggaatgagtcagccgggcttcgggggaatactgggcacctctacctctcacatgtcccagagcagcagctatggcaatctgcacagtcacgaccggctgagttatccccctcatagcgtctcacctactgacattaacacttctctcccccctatgagtagctttcatcgtggatccactagcagttccccatacgtggctgcgtcccatactcccccaataaatggctccgatagcatcttgggtacaagaggaaatgcagcgggaagctcacagaccggggatgcattaggaaaggctttggcgtctatctacagccctgaccacaccagcagcagcttcccgtcaaatccatccacacccgtggggagtccatcgcccctaactggcacctctcagtggcctcgcccaggtgggcaggcgccatcctctccttcatatgagaattctctgcattcactgcagagcagaatggaggatcgtctcgaccgcctcgacgacgccatacacgtgctgcgtaaccatgcagtaggaccgagcacctctttgcctgccggtcattcagatatacacagcttgctgggtcccagccacaacgctccaatcggtagtcttaacagcaactacggggggagtagcctggtcgcttcctctcgaagcgcctcaatggttggcacccacagagaggattccgttagccttaatggaaaccactcagttcttagctctacagtcactacctcgtcaacagacctgaatcacaaaacacaggaaaattacaggggagggctgcagtcgcagtctggaactgtggttaccacagaaattaagactgaaaacaaagaaaaagatgaaaacctgcacgaacccccgagctccgacgatatgaagagcgatgacgagtcctcacagaaggatattaaggtctcttcaaggggtcgcacgtccagcacaaatgaagacgaggatctgaatcctgaacagaaaattgagagagaaaaggagaggagaatggcaaataatgccagggaacggcttagggtcagggatatcaatgaggccttcaaagaattaggcagaatgtgccagttacatctgaaatccgaaaagcctcagacgaagctccttatcctgcatcaagctgtggcggtgattcttagcctagaacagcaggtgcgtgagaggaacctcaacccaaaggctgcctgcctgaaacggcgcgaggaagaaaaagtgagcgccgtgtccgccgagccccccacaaccctccctggcacccaccctggcctgtcagagactaccaatcctatgggccatatgtag

SEQ ID NO: 208962 - DNA, 600 bp, synthetic construct
  misc_feature 1..600: note = Description of Artificial Sequence: Synthetic coding sequence
  source 1..600: mol_type = other DNA
atggccttcgccctgctgcggcccgtgggcgcccacgtgctgtacccggacgtccgtctgttgtctgaggatgaagaaaatagatctgagagtgatgcctccgatcagtccttcggatgctgcgaaggacccgaggccgcacgccgaggccctgggcctggcgggggaaggcgagctggaggtggcggcggcgcaggaccagtcgtggtggtgcggcagcgccaggccgcgaacgctcgcgagagggatagaacccagagtgtgaacaccgcctttactgctctgaggacacttatccccacggagcccgttgaccgaaagctgtctaaaatcgagaccgtgcgactggccagctcctacattgcccatctcgccaacgtgcttctccttggggattcagccgacgatggccaaccgtgtttccgagccgcaggaagcgctaagggcgctgttccagccgctgctgatggggggcggcagcctcggtcaatctgtaccttctgcttgtctaatcagcggaaagggggagggcggagagatctggggggaagctgccttaaagtcaggggagtcgcccccctccgtggtcctagaaggtag

SEQ ID NO: 208963 - DNA, 1038 bp, synthetic construct
  misc_feature 1..1038: note = Description of Artificial Sequence: Synthetic coding sequence
  source 1..1038: mol_type = other DNA
atgctgccctgcttccagctgctgcggatcggcggcggccggggcggggacctgtatacctttcaccctccggcaggagccgggtgtacttacaggctgggacacagggccgacttatgcgatgtagctctccgcccccagcaggagcccggattaatcagtggaatccacgccgagcttcacgcagagccacggggcgacgactggcgggtttcactggaggaccactcttcccagggcaccctggtcaacaacgtgcgtctcccccgagggcaccggctcgagctctctgacggggatttgctgaccttcggaccagagggaccacccggcactagcccaagcgaattctattttatgtttcaacaggtgagggttaaaccccaggactttgcagccataaccattcctagatccagaggcgaagcaagagtgggagctgggtttcgcccaatgctaccctctcagggtgcgccccagaggccgctgtctacgtttagtccagctccaaaagctactctgatactgaacagtatcggctccctatctaagttgaggccccagccacttacattcagccccagttgggggggccctaagtctctgccagtacctgcgcctcccggcgaaatgggaaccaccccatccgcccccccgcaaaggaaccggcggaaaagcgtgcaccgagtcctggctgaactggacgacgagagcgagcccccggagaatccccctccagtgctgatggagccccgaaaaaagctccgcgtggataaggcccctctgacaccaaccggaaataggagggggagacccagaaaatacccagtctctgccccaatggcgccccctgcagtgggagggggcgaaccttgtgccgctccatgctgttgcttaccccaggaggaaacagtcgcgtgggttcagtgcgacgggtgcgacgtctggtttcatgtggcgtgcgtggggtgttccatccaggcagccagggaggccgatttccgctgccctggatgtcgcgctgggatacagacatag

SEQ ID NO: 208964 - DNA, 1038 bp, synthetic construct
  misc_feature 1..1038: note = Description of Artificial Sequence: Synthetic coding sequence
  source 1..1038: mol_type = other DNA
atgctgccctgcttccagctgctgcggatcggcggcggccggggcggagacctgtacacgtttcatcccccggcgggggctgggtgcacatatagactgggccatagagcagacttgtgtgatgtggccctgcgcccccagcaagagcccggtctaatctctggcattcatgccgaactccacgccgagcccaggggcgatgattggagagttagtttagaagaccattcctcgcagggaacactagtgaacaacgttcggctgccccgaggccatagactggagctgagtgacggtgatctgctgacgttcggaccggaagggcctcccggcaccagtccttcagagttctacttcatgttccagcaggtcagggtcaaaccccaagatttcgcggccattacaataccccggtctcggggcgaagctagagtaggcgcggggttcaggccaatgctcccttcgcaaggggctcctcagcgccctctgtcgacgttctcacctgcaccgaaggccaccttgattctcaatagcattggctcccttagcaaattacggccacagcctctcacgtttagcccttcatggggaggaccgaagtctttacccgtccctgccccgcccggcgaaatgggtacaacacctagtgctccccctcagcgcaacagaaggaagtccgttcatagagtgctcgcggagcttgacgacgagagcgaacctcccgagaacccaccacctgtgctcatggagcctcggaagaagctgcgtgtggataaagccccattgactcccactggcaaccgacggggcagacctagaaaatatccagtttctgcccctatggctccacctgccgtcgggggcggcgaaccttgtgctgctccgtgttgttgcctcccacaagaggagacagtggcatgggtgcaatgcgacggatgcgacgtatggttccacgtggcatgcgtggggtgcagcattcaagctgcccgcgaagctgacttccgctgccccgggtgtcgcgcaggtattcaaacatag

SEQ ID NO: 208965 - DNA, 1038 bp, synthetic construct
  misc_feature 1..1038: note = Description of Artificial Sequence: Synthetic coding sequence
  source 1..1038: mol_type = other DNA
atgctgccctgcttccagctgctgcggatcggcggcggccggggcggcgacttgtacacgtttcatcctcctgccggggcgggttgcacatataggcttgggcaccgagcagatctgtgtgacgttgccttaaggccacagcaggagcccggcctgatcagtggtatccatgcagagcttcacgctgagccccgcggcgatgactggagagtgtccctggaggatcactcatcccaggggaccttggtgaacaatgtgcggcttcctaggggacatagactcgagttgagtgatggggacctgttaacgttcgggcccgagggccctccggggacaagcccctcggaattctattttatgttccagcaggtgagagtcaaaccacaggactttgcagcgattacaattcccagatcccggggcgaagccagagtgggcgccggctttcgaccaatgctccccagtcaaggcgctccccaaagacccctcagtactttttcccccgcaccaaaggcaaccctgattctgaactctataggcagcctgtctaaattgaggccccaacctctcacctttagcccaagctggggcgggcctaaatcactgcctgtgccagccccacccggagaggtcggtacaacaccctcagccccaccccaaaggaatcggcggaagtctgtacaccgggttctagctgagttagatgacgagtccgaacctcccgagaaccctcctcctgttctgatggaacctaggaaaaaactgcgagtagacaaggccccactcactccgactgggaaccgaagaggcagaccgcgaaaatatcctgtgtctgcccctatggcacctcccgctgttggcggaggcgagccttgcgcagcaccttgctgttgcctcccacaagaggaaaccgtggcttgggtacagtgcgacggatgcgacgtgtggttccatgtcgcatgtgtgggctgctcaatacaagctgcccgagaagccgacttcagatgtccaggatgccgggctgggatccagacctag

SEQ ID NO: 208966 - DNA, 1038 bp, synthetic construct
  misc_feature 1..1038: note = Description of Artificial Sequence: Synthetic coding sequence
  source 1..1038: mol_type = other DNA
atgctgccctgcttccagctgctgcggatcggcggcggccggggcggtgacctgtatacttttcatccaccagccggcgctggctgcacctatcgccttggtcatcgcgcagatctatgcgatgtggcacttcgcccacaacaggaacccggccttatctcagggatccacgcagagttacacgccgagccacgcggcgacgattggagagtgtcactggaggatcattctagccagggaacccttgtgaataatgtgaggctgccgaggggtcatcgtctggagctttctgatggcgacttactgacatttggtcccgagggacccccgggaacatcacccagcgaattctatttcatgtttcagcaggtgcgcgttaaaccccaggattttgctgccattaccatcccacgcagtagaggcgaggctagggtgggagctggcttcagacctatgcttccgtcacaaggggcaccccaacgccccttgagcaccttttcacctgctcccaaggcaacactaatcctgaactctatcggttccctttccaaactgcgaccacagcctctgacttttagtccctcttggggcggccccaagtcactgcctgttcccgcaccccctggcgaagtcggcacaactcctagtgcgccaccacagaggaaccgccggaaatctgtgcatcgggtcctcgcagaactggacgacgaaagcgaacccccggagaatcccccacccgtactgatggagcctcggaaaaagctccgcgtggataaggccccactcacccccaccggaaaccggcgaggacgccctcgtaaataccctgtgtctgcccccatggctcctcctgcggtgggggggggcgagccatgtgcagccccctgctgctgcctgccacaagaggaaaccgtcgcctgggtacagtgtgatgggtgtgatgtttggttccacgttgcctgcgtggggtgctcaattcaggctgccagagaagcagatttccgttgccccggttgccgcgcaggcatccaaacctag

SEQ ID NO: 208967 - DNA, 1038 bp, synthetic construct
  misc_feature 1..1038: note = Description of Artificial Sequence: Synthetic coding sequence
  source 1..1038: mol_type = other DNA
atgctgccctgcttccagctgctgcggatcggcggcggccggggcggagacctctacacatttcatcccccagctggagccggttgtacctaccgcctgggtcatcgggctgacttgtgcgacgtggccttacgcccacaacaagaacctggactcatcagcggtattcatgcagagttgcatgccgaacctcgcggggatgattggcgtgtgtccctggaggatcacagtagtcaaggcacgctcgtgaataatgtgaggctgccacgtggccaccggttggaactatctgatggcgacctcctaacctttggtcccgagggcccgccaggcaccagtccctcggagttctactttatgttccagcaggtgcgcgtgaagcctcaggattttgctgcgataacaatccctagatcccgaggcgaggcgcgcgttggcgctggtttcaggcctatgctcccttcccagggagctcctcagaggcccctctctacctttagtcccgccccaaaggctaccctcatcctcaactccatagggtcgctgagcaagctacggccgcagcctctgactttcagtccttcttggggagggcctaagtcacttccagtgcccgccccgcccggagaggtgggcaccaccccctctgctccaccccaaaggaatagacgaaaaagtgtgcatagagtgttggctgagctggatgacgaaagtgaaccacccgaaaaccccccccctgtcttgatggagccgcggaaaaagctcagagtggataaggccccgctgaccccaacgggcaacagaaggggacgacctcggaaatatcccgtctccgcgcctatggcacctcccgccgtgggcggaggtgagccctgtgccgctccttgctgctgtctacctcaggaagagacggtggcatgggttcagtgtgatggctgtgacgtatggttccatgtggcctgtgtcgggtgttctatacaagcagccagagaggccgactttcggtgtcctggctgcagagcaggcatccagacctag

SEQ ID NO: 208968 - DNA, 1038 bp, synthetic construct
  misc_feature 1..1038: note = Description of Artificial Sequence: Synthetic coding sequence
  source 1..1038: mol_type = other DNA
atgctgccctgcttccagctgctgcggatcggcggcggccggggcggcgacctgtacacctttcatccccctgccggcgcgggctgcacgtataggctggggcacagggccgatttatgtgacgttgcgctgcgtccacagcaggaaccaggcctgatcagtgggattcatgctgaattacacgccgagcccaggggagatgattggcgcgtgtctctggaagatcatagcagtcagggaacactggtgaacaatgtccgcctgcccagagggcatagactcgagctctccgatggagatttgctgacctttggtcctgagggcccgcctgggaccagtccttccgagttctactttatgtttcagcaggtgcgcgtaaagccgcaggatttcgccgctattaccataccccgttccaggggtgaggccagggttggcgcaggcttcaggccaatgctgccatcccagggggcacctcaacgcccgctctctactttcagcccagccccaaaagcaactttaattctcaatagcataggatcattgtccaagctgcggccccagccgctgacctttagcccttcatggggtggccccaaaagtttgccggtgccagctccaccaggtgaagtcggcactacccctagtgcccctcctcagaggaatcggagaaagagcgtgcaccgggtcctggccgagctagatgatgagtcggagcctccagagaacccgccaccagttctgatggagcccagaaagaagctcagggtggacaaggccccactgacacccaccggcaaccgccggggacggccgcggaagtatcccgtgtccgccccaatggccccccccgctgtgggagggggcgagccctgtgcagcaccatgctgttgcctccctcaagaggagaccgttgcgtgggtgcagtgtgatggatgtgatgtgtggtttcacgtcgcgtgcgtaggctgctcaatccaggctgcccgggaggccgattttcgttgccctggctgcagagcaggaatccaaacttag

SEQ ID NO: 208969 - DNA, 1038 bp, synthetic construct
  misc_feature 1..1038: note = Description of Artificial Sequence: Synthetic coding sequence
  source 1..1038: mol_type = other DNA
atgctgccctgcttccagctgctgcggatcggcggcggccggggcggggacctctatacttttcaccctcccgcgggtgcaggatgcacataccgcctgggacatcgcgcagacctgtgcgacgtggccttgcgcccccaacaggaacctgggctgatcagtggtatccacgccgagctgcatgcagaaccccgtggcgacgattggagagtatcgctggaagatcattcttctcaaggtaccttagtcaacaatgtccgcttgccgaggggccaccgtttagagctatctgacggcgatctgctcacattcgggccagagggacccccaggaacatcccccagtgagttctactttatgtttcagcaggtgagagtcaaaccacaggatttcgccgccattacaatacctcgcagccgcggcgaagcaagggtgggcgcaggatttcggccgatgctgccttctcagggtgctccccaaaggcctctctccactttctcaccagcacccaaggcgaccctcatcctcaactctataggtagcctaagtaagctgcggccccaaccactgacattttcacctagctgggggggaccgaagtctctgcctgtccctgcgcctccaggcgaagttggaaccactccgtcggcaccaccgcagaggaatcgacgcaagtcagttcatcgggtcctggctgaactggacgatgaatccgagccaccagagaatcctcctcctgtgttgatggagcctagaaaaaagctgagagtcgacaaggcgccccttacgccaaccggcaacagacgtggcaggcctcgcaagtatcctgtgtctgcacccatggccccaccagctgtcggcgggggcgagccatgtgcagcaccctgttgctgtcttccccaggaggaaactgtggcatgggtccagtgcgatggttgtgatgtgtggtttcacgtcgcttgtgtggggtgttctatacaggcggcccgggaggcagacttcaggtgtcccggttgtcgagccggcatccagacctag

SEQ ID NO: 208970 - DNA, 1038 bp, synthetic construct
  misc_feature 1..1038: note = Description of Artificial Sequence: Synthetic coding sequence
  source 1..1038: mol_type = other DNA
atgctgccctgcttccagctgctgcggatcggcggcggccggggcggggacctttacacatttcaccccccagccggagctggttgtacgtatcgtctggggcacagggctgatctctgcgatgtcgccttgcgcccccagcaggaacccggactgatttccggaattcacgccgagcttcatgcagaaccacgaggggatgactggagggtttcactggaagatcacagcagccaggggactcttgtgaacaacgtgcgcctgcctaggggacatagacttgagctctctgacggcgatctgctaacctttggccccgagggctccccgggtacctctcccagcgagttctactttatgtttcagcaagtgcgggtgaagccacaggatttcgcagccattacaattcccagatctagaggagaggctcgcgtgggtgctgggttcagacctatgctgccatcccagggagcgccccagcgacctctgagcacatttagtccagcacctaaggctacactgattcttaactcgattggctcgctgagtaagttgcgaccacagcctctgactttttctccatcttgggggggccctaagtccctccccgtgccggccccgccaggcgaggtaggcaccactccctccgcaccgccccagcgaaatcgaagaaaaagcgtgcatagagttctggccgaactggatgacgagtcggagcctcctgagaaccctccgccggttctgatggagcctcggaagaagctccgtgtagacaaggcacctcttacccccacaggcaatagacgtggaaggcctaggaagtatccagtgtccgcccctatggctccacccgctgttggtggcggcgagccctgtgccgccccttgctgctgtttgcctcaggaggagactgttgcctgggtccaatgcgatgggtgtgacgtttggtttcacgttgcgtgcgtgggatgtagcatacaggcagctcgggaggcagacttccggtgtccaggctgtagggcaggtatacaaacctag

SEQ ID NO: 208971 - DNA, 1038 bp, synthetic construct
  misc_feature 1..1038: note = Description of Artificial Sequence: Synthetic coding sequence
  source 1..1038: mol_type = other DNA
atgctgccctgcttccagctgctgcggatcggcggcggccggggcggtgatctgtatactttccatccaccagcaggcgctggctgcacttaccgcctcggacatagagctgacctttgcgatgtcgcactccgcccccagcaggaaccgggcctcatcagtggcatccatgcagagcttcatgcggaacctaggggggacgactggcgtgtgtctctcgaggaccactcctcacagggcaccctggtcaacaacgtgagactacctcgaggtcatagattagagctgtcggatggcgacctattgacattcggccccgagggcccccctgggacatctccttccgaattctacttcatgtttcagcaggtccgagtgaagccacaagatttcgccgctataaccattcctagatctcgcggcgaagcgcgggttggcgccggatttcgacctatgctgccctctcaaggagctcctcagaggcccctgtccactttttctccagcgcccaaggctacgctgatccttaacagcatcggctccctttccaagctacggcctcagccgcttacattcagccctagctggggagggcctaagtcactgccagttcccgcaccaccgggagaagtggggacaaccccttctgcccctcctcagaggaaccggcgaaaaagcgtacaccgcgttttggctgaattagacgacgagtcagagcccccagagaatcctccccccgtcttgatggagccccgaaagaagctgagggtggataaggcccccctcacccccacggggaaccggcggggacgccctaggaaatacccggtctccgcccctatggcacctccagccgtgggtggaggtgagccatgtgccgcgccatgttgctgtctcccccaggaggaaaccgtggcctgggtgcaatgcgacgggtgcgacgtgtggttccatgttgcctgtgtgggctgctctattcaggccgctagagaggcagacttccgctgtcctgggtgtagagctgggatccagacttag

SEQ ID NO: 208972 - DNA, 1038 bp, synthetic construct
  misc_feature 1..1038: note = Description of Artificial Sequence: Synthetic coding sequence
  source 1..1038: mol_type = other DNA
atgctgccctgcttccagctgctgcggatcggcggcggccggggcggagatctgtatacctttcacccaccggccggtgctggatgtacctatcgactgggccatcgtgcagatttgtgcgatgtggccctccgcccacagcaagaacccggcctcatttccggaatacacgccgagcttcacgccgaacccagaggcgacgattggagggtgtcgctggaggatcacagctcccaggggactctggttaataacgtcagactgccacgcggccacaggcttgagctcagtgatggcgacttgctgacattcggtccagaaggaccccctggcaccagccctagcgaattttattttatgttccagcaggtcagggtgaagccccaggacttcgcagccattaccatccccagaagccgtggtgaagctagagtgggcgcaggttttcgacctatgctgccctctcagggggctcctcagagaccactctccactttctcacctgctccaaaagccaccctgattctcaatagcatcggctccctgagcaaactgagacctcagcctctgacattctccccttcatggggcggtcctaagagtcttcctgttcctgcccctccgggagaggtggggacgacaccatctgctccccctcagcggaaccggcgcaaaagcgtacatcgcgtgctggcagagcttgacgatgaatccgaaccccccgagaatccgcctccagtgctgatggaacctcggaaaaagctgcgcgtggacaaggcacctctcaccccaacagggaacaggagaggacgccctcgcaaatatcctgtgtctgccccaatggcccccccagcagtcggaggcggggagccctgtgctgcgccatgctgttgtttgccccaggaggaaacggtggcttgggtccagtgtgatggctgcgatgtgtggtttcacgtggcctgtgtgggatgttcaattcaagccgcaagggaagccgacttcagatgcccaggctgccgcgcaggcattcagacctag

SEQ ID NO: 208973 - DNA, 1038 bp, synthetic construct
  misc_feature 1..1038: note = Description of Artificial Sequence: Synthetic coding sequence
  source 1..1038: mol_type = other DNA
atgctgccctgcttccagctgctgcggatcggcggcggccggggcggtgatttgtacactttccatccacccgccggcgcaggatgtacatatcggctgggccatagagccgatctctgtgatgttgccctgcggccccagcaggagcctggcctgatctccggtatccacgctgagctccatgctgagccaagaggggatgactggagggtctccctggaggatcactcatcccaggggacattggttaataacgtgaggttgcctcgcgggcacagactggagctgtccgatggtgatctcctgacctttggccctgagggacctccaggtacttccccctcagagttctattttatgttccagcaagtcagggttaaaccccaggatttcgctgcaataacaattcccagaagtcggggagaggcgagggtcggggcaggctttcggccgatgctgcccagtcaaggagctccccagcgcccactcagcacattttccccagctccgaaggctaccctgatcttgaattccatcggctctttgagtaaattacgaccccagcctctgacctttagcccgtcctggggagggccgaagtctctgcccgttcccgccccaccaggcgaagtaggaacaaccccttctgcacccccccagaggaaccgtcggaaatcagttcatagggtgctagcagaactggacgacgagagcgaacctcctgagaacccgccgccagtactgatggagcccagaaaaaaattaagagtcgacaaggcaccgctgaccccgaccggcaatagacggggccgccctagaaagtacccagtgagtgcccctatggccccaccagccgtaggaggcggggagccctgcgctgccccttgttgctgtcttccccaggaggagactgtggcctgggtgcagtgcgacggctgcgatgtgtggtttcatgttgcttgtgtcggctgctctattcaagccgcccgggaagccgatttccgctgtcctggttgtagggctggcatccagacttag

SEQ ID NO: 208974 - DNA, 1038 bp, synthetic construct
  misc_feature 1..1038: note = Description of Artificial Sequence: Synthetic coding sequence
  source 1..1038: mol_type = other DNA
atgctgccctgcttccagctgctgcggatcggcggcggccggggcggggacctatacaccttccatccccccgccggggcgggatgtacctacagacttgggcatcgagcagacttgtgtgatgtagcactgcgtccacaacaggagcctggtctcatctctggaatacatgccgagctgcacgccgagccccgcggagatgactggcgagtgagccttgaggatcattccagtcaaggcaccctcgtgaacaatgtgcggctcccacggggacatcgactcgaactgtcagacggagatcttttgactttcgggccagaggggccaccaggtacaagtccaagtgagttctacttcatgtttcagcaggtgagggtgaagccgcaggactttgcagcaatcactattccaagatcacgcggagaagcccgggtcggcgcagggtttcggccaatgctgccaagccaaggagccccccagcgaccattgagcacatttagccctgcccctaaggcaacactgatcctgaactcaatcggtagtttatccaaacttagaccccagcccctgactttttctccctcttggggcggcccaaaatccctgccagtccccgccccgcctggtgaggtgggcacaactccttctgctcccccccagaggaataggaggaaatctgtgcaccgtgtactcgctgaactcgatgacgagtctgaacctcccgaaaaccctcctcctgttctgatggagcctcgcaagaaattaagggtggacaaggcaccactgaccccaactggcaaccgcagggggcgcccgcgcaagtacccagtgtccgccccaatggcaccccctgcagtgggaggaggggagccatgcgctgccccttgctgttgtctgccccaggaggagacagttgcatgggtgcaatgtgacggttgcgacgtctggtttcacgtggcttgcgtggggtgcagcatccaggcagctcgtgaggccgatttccgctgccccgggtgtcgcgccggcattcagacctag

SEQ ID NO: 208975 - DNA, 1038 bp, synthetic construct
  misc_feature 1..1038: note = Description of Artificial Sequence: Synthetic coding sequence
  source 1..1038: mol_type = other DNA
atgctgccctgcttccagctgctgcggatcggcggcggccggggcggcgacctgtacacctttcacccgccagcgggcgccggctgtacgtacaggctgggacaccgcgcagacctgtgtgacgtagctctaagaccacagcaggagccaggacttatctccggaatccatgccgagctgcatgccgagccccgcggagacgattggagggtcagcctggaagaccacagctctcaaggaacattagttaacaatgtgcgcctgcccagggggcaccgactagaactttcagatggagacctactcacgtttggtcctgaaggtcctccgggaacttcaccaagtgaattttattttatgtttcagcaggtcagagtcaaaccccaagatttcgcagccatcaccatcccccggagccgaggtgaggccagagtcggcgcaggctttagacccatgctgccttcccagggggctccccaacggcccctgtctactttctcaccggcacctaaagccacgctaattcttaactccattggatccctcagtaaactaagaccacagcctctaactttttccccctcatggggtggccccaagtctctgccagtacccgctccccctggcgaggttgggactacccctagcgccccgccacagcggaacaggagaaagtctgtacatagggtattggcagagctggatgatgagagtgaaccccctgaaaatcctcctccagtcctgatggagcctaggaaaaagcttcgcgtggacaaggcccctctgacgccaactgggaaccgaagggggaggcctcggaagtatcccgtctcagctcccatggctccccccgccgtgggaggcggggaaccatgtgccgcaccctgctgctgtttgccacaggaggagacagtagcatgggtgcaatgtgacggctgtgatgtgtggttccatgtggcttgtgtgggctgctcgatacaagctgcccgcgaggcagacttcaggtgccccgggtgcagagccggaatacagacctag

SEQ ID NO: 208976 - DNA, 1038 bp, synthetic construct
  misc_feature 1..1038: note = Description of Artificial Sequence: Synthetic coding sequence
  source 1..1038: mol_type = other DNA
atgctgccctgcttccagctgctgcggatcggcggcggccggggcggagatttgtatacctttcatccacctgccggggcgggttgcacataccggcttggacaccgggccgacctgtgcgacgtggcactgagaccacaacaggagcccggcttgatttccggtattcacgccgaactccatgctgaacctcgtggggacgattggagggtcagtctagaggatcactcttctcaggggaccctggtcaataatgtccgcttaccccggggtcatagacttgagttgagtgacggcgatttgcttacattcggaccagaaggctccccagggacatcgccatccgagttctacttcatgttccagcaggtgcgcgttaaaccccaggacttcgcagcaattacaataccgagaagtaggggagaggctcgggtgggagctggcttcaggcctatgcttcctagccagggcgccccccagcgacccctgtcgacattctctcccgcccctaaagcaacattgatcctgaatagcattgggtccctcagcaagctgcgccctcaacctttgacattttctccttcatggggcggcccgaaaagcttgccggttcccgccccccccggtgaggtagggacgacccctagtgctcccccccagcgcaatcgccgcaaaagcgttcatagagtcctagccgagttggacgatgagagcgagccacctgagaaccctcctccagtgctgatggaacccaggaagaaactgcgcgtggacaaagctcctttgacaccaactggaaatcggcgcgggcgccctcggaagtacccggtaagcgctccaatggctcccccggccgtgggtggtggggagccctgcgctgccccttgctgctgcctccctcaagaagaaactgttgcctgggtccagtgtgacgggtgcgacgtctggttccatgttgcatgtgtgggatgtagcattcaggccgcacgagaagctgactttaggtgcccaggctgtcgggctggaattcagacctag

SEQ ID NO: 208977 - DNA, 654 bp, synthetic construct
  misc_feature 1..654: note = Description of Artificial Sequence: Synthetic coding sequence
  source 1..654: mol_type = other DNA
accctggtgaacaacgtgcggctgccccggggccaccggctggagctgtcagatggagacctcctgaccttcggacccgagggcccccccggcacatcaccctctgagttttactttatgtttcagcaggttagggtgaaacctcaggatttcgctgccatcactatccctagatcaagaggcgaggccagagtgggcgcaggcttccgtccgatgttgccgtctcagggggcgcctcagcgtcccctgagcaccttctcacctgccccaaaagccacactcatactgaactcaatagggagtctctcaaagctgaggccacagccactgactttttccccttcttggggtggtccaaaatccctgcctgttccagctccacctggagaaatgggtactactcctagcgctcctccccagcgaaaccgcagaaagagcgtccatagggtgctggccgaactggatgatgagtcagagccacccgaaaatcctccacctgtcctgatggaaccaaggaaaaagctccgcgttgacaaggccccccttactccaactggtaattggcacattcaagggatgcaatccatagtgaagggtcagaaggagagaccctggccacgcgaacacttgtccggttacgaggaggccagctag

SEQ ID NO: 208978 - DNA, 645 bp, synthetic construct
  misc_feature 1..645: note = Description of Artificial Sequence: Synthetic coding sequence
  source 1..645: mol_type = other DNA
atgagccagcggaaggcccggggcccccccgccatgcccggcgtgggtcattctcaaacccaggccaaggcccgactgttaccaggcgctgataggaaacggtccagactcagccgaaccagacaggacccttgggaagagcgtagctggtccaatcaaaggtggagcagagcaactccaggccctagaggaaccagggccgggggcctcgcacttggcaggtctgaggccagccctgagaacgctgctcgagaacggagtcgagtcaggacccttaggcaagctttcctggccttgcaggccgccttacccgccgtgcctcctgacacaaaactgtcaaaattggatgttctggtgttggcagcctcgtacatagcccacctcacgcggaccctgggacatgagctgcctgggccagcctggcccccattcttgagggggcttcgatacctgcacccgctgaagaaatggcctatgagatcccgtctgtacgccgggggtctagggtactctgacctggactccacaaccgctagcacacccagccagcgaacaagggacgctgaggtcggcagccaggtcccaggggaagcagacgctctcctttctacgaccccactgagtccagccttaggagacaagtag

SEQ ID NO: 208979 - DNA, 2031 bp, synthetic construct
  misc_feature 1..2031: note = Description of Artificial Sequence: Synthetic coding sequence
  source 1..2031: mol_type = other DNA
atgagccggcgggccctgcggcggctgcggggcgagcagcggggccaggaaccccttggcccaggcgccctgcattttgacctacgggacgacgacgatgccgaggaagaaggacccaagagagagctgggggtgcggcgacccgggggggctggaaaagaaggtgtgcgagtaaacaacagatttgagctgatcaacatagacgacctggaagacgacccagtggtcaatggcgagaggagtggctgcgcactgactgatgctgtcgccccagggaacaagggtcgaggtcagcgcggaaataccgaatccaagacagacggggatgacacagagacagtgccatctgagcagtctcacgccagtggaaagttacgcaaaaaaaagaaaaaacagaaaaacaagaagagttccactggtgaagcttccgagaacgggcttgaagatatcgaccggatcctggagcggattgaagattctaccggactgaataggccaggaccagctcctctctcctccaggaaacacgtactttatgtggagcatcgacacctgaacccggacaccgaactaaagcggtactttggcgcccgggcaatattgggggagcagaggcctcgtcagcgacaaagagtctaccctaaatgcacctggctaaccacgccaaagtctacctggccccggtactccaagcccggactgagcatgaggctgttggagtctaagaagggactgtcatttttcgcttttgagcatagcgaagagtatcagcaggctcaacacaagttcctggtcgctgtggaatcgatggagccaaataatattgtggtcctcttgcagaccagcccctatcacgtggattcgctgctgcagctcagcgatgcatgccgcttccaagaagatcaggagatggcacgggatctcgtggagcgagcactttactctatggagtgtgccttccaccctttgttctccctgacttccggcgcctgtcgcttggattaccggagacctgagaatcgctctttctaccttgctctgtacaaacagatgagtttccttgaaaagaggggatgtcctcgaacagctcttgagtactgtaaattaatcctcagcctggagcctgacgaggaccctctgtgcatgttactgcttatcgaccacttggccttacgcgcccggaattatgagtaccttatccggctgtttcaggaatgggaagcccaccgtaatttgtcccagctccctaacttcgccttttcagtgcccttagcttatttcctgctgagtcagcagaccgaccttccagaatgcgaacagagctctgcgaggcagaaagcttccttactcatccagcaggctctaacgatgttccctggcgtgctattgccactgttggaaagctgcagcgtgcgcccagacgcctctgtgtcttctcatcgatttttcggacctaatgcagagataagccaaccccccgctctgtctcaattagtcaatctgtacttgggtcgaagccattttctatggaaggagccggcaaccatgtcatggcttgaggagaacgtgcatgaggttttgcaagccgtcgacgcaggcgaccctgcagtggaggcttgtgagaaccgcaggaaagttctgtatcagcgagccccccgcaacatccaccggcacgtcatcctcagtgagataaaagaagccgtggccgctcttccaccggacgtgacgacgcagagtgtgatggggttcgacccactacctccgtccgataccatttattcttacgtgaggcctgaacgattaagccccataagccacgggaacacaatcgctttgttcttcagatctctgttgcctaactacacaatggagggagaacgcccagaggagggagtcgccggaggtttgaatcgaaaccaaggactgaaccggctcatgctcgcagtcagagacatgatggctaactttcatctgaacgacctggaagctcctcatgaggacgacgcagaaggggagggcgagtgggattag

SEQ ID NO: 208980 - DNA, 1422 bp, synthetic construct
  misc_feature 1..1422: note = Description of Artificial Sequence: Synthetic coding sequence
  source 1..1422: mol_type = other DNA
atgcggctgctggagagcaagaagggcctgagcttcttcgccttcgaacactcggaggaatatcagcaggcacagcataagtttctggtggccgtggagagcatggaaccaaacaatatcgtcgtgttacttcagacttcgccatatcacgttgatagtctactccagctgagtgacgcatgccgatttcaggaagaccaggagatggcaagggatctggtggaaagagcgctttatagcatggagtgtgccttccatcccctcttttcattaacgtctggagcttgtcgcttagattaccggcgccctgagaaccggtccttttacctcgctttgtataagcagatgagcttcttggagaagcgcgggtgtccgcgcaccgccctggagtattgcaagttgatcctaagcttggaaccagatgaagacccgttgtgcatgctcctcttaattgatcacctcgccttaagagcacggaattatgagtatctgatccgtctctttcaagaatgggaagcacatcggaatctgtctcagcttcctaattttgcctttagtgttccactcgcgtattttttgctttcacagcagacagatctgccagagtgtgagcaaagcagtgcgagacagaaagcttcccttctgatccagcaggcactcactatgttcccgggcgtcctgttacctctcttagagtcttgttccgtccgaccagatgcatcagtgtcatcacaccgcttttttgggccgaatgcggagattagccagccacccgctcttagtcagctcgtgaacctgtacttgggccgaagtcacttcttgtggaaagaacccgctacaatgagttggcttgaagaaaacgtgcacgaggtgttgcaagccgtggacgcaggagaccccgctgtggaagcctgcgagaatcggagaaaagtgctgtatcaacgcgctcctagaaatattcacaggcatgtgattctgagcgaaatcaaggaggctgtcgctgcattgccacctgatgtaaccactcagtcagtgatgggatttgacccactgccgccatccgatacaatatattcttatgtcagacctgagcgcaagggggaggaagagagaaactcagtcatctggggttcacagctgtgcgtgtgtcggccgaggtcttttccctcaccgccaaacgtccaggctctggcttgtagacccctgtggcaggcaaaaagctaccaaccttggaagcaccactgctctcttctccctgtcactgtggcgaagttatatcacggcgggggtgaagcccgcgggagaagcggttggggctctgaaccccagcccgggccagagcaggctgatgcaggctgcgcgcgacatgacggccagcttcccccgcagagaccagggggggccgcccgcgggaggaggtag

SEQ ID NO: 208981 - DNA, 651 bp, synthetic construct
  misc_feature 1..651: note = Description of Artificial Sequence: Synthetic coding sequence
  source 1..651: mol_type = other DNA
atgagccggcgggccctgcggcggctgcggggcgagcagcggggccaggaacccctcggacctggtgctctgcacttcgacctacgggatgacgacgatgctgaggaggaagggccaaagagggagctcggagtccgacggcccggtggagcaggtaaagagggcgtgagggtgaacaaccggtttgagctgattaatatagacgatctggaggatgatcccgttgtgaacggagagaggtccggatgtgccctgacagacgctgtcgcacccggcaacaagggaagagggcagaggggcaatacagagagcaagacagacggcgatgacacagagacagtcccatccgaacagagccatgcctctggcaaactcaggaagaaaaagaagaagcagaagaacaagaaaagttctactggcgaagccagtgaaaatggtctggaagacatcgatagaatcctggaacgcatcgaagattctaccggactgaaccgtccgggtcccgcccccttgagttcccggaaacacgtcctctacgtggagcatcgccacctgaatccagacaccgagctcaagcggtatttcggagctcgcgccattctcggtgaacaaagagatcgagtactgctgggctgccccgtttggttttag

SEQ ID NO: 208982 - DNA, 624 bp, synthetic construct
  misc_feature 1..624: note = Description of Artificial Sequence: Synthetic coding sequence
  source 1..624: mol_type = other DNA
ctgaccgtgaacgccagcatgagccggttccccccccacatggtgcccccacatcacacattacacacgacaggcatcccccacccagcaattgtaacacccaccgtgaaacaagaatcttcccagtccgacgttgggagcctgcactcctccaagcaccaggacagcaaaaaggaagaagagaaaaagaaacctcacattaagaagcccttaaatgccttcatgctgtatatgaaggagatgcgggccaaagttgtcgccgagtgtaccttgaaggagtccgccgcaataaaccaaatcttgggtcgacgatggcacgctctcagtagggaggagcaggcaaaatattacgagctggccaggaaggagagacagctgcacatgcagctgtacccaggatggagcgccagagacaactacggcaagaaaaaaaaaagaaaacgcgataagcagcccggggagacgaacgatctcagtgcaccaaagaaatgcagggccagattcggccttgaccaacagaacaattggtgtggcccatgtcgccgcaaaaagaaatgtgttagatacattcagggagagggctcatgtctttcacctccctcgtctgatgggtctttgttatag

SEQ ID NO: 208983 - DNA, 669 bp, synthetic construct
  misc_feature 1..669: note = Description of Artificial Sequence: Synthetic coding sequence
  source 1..669: mol_type = other DNA
accaaccagaacagcagcagcgacagcgaggccgagcggcggcccccaccaagatccgagagctttagagacaagagcagggagtccctggaagaagctgctaaacgccaggatggcgggctgtttaaaggaccaccataccctggatatccctttattatgatcccagatctcaccagtccctacctccccaacggatcattgagccccactgcccgtactctgcactttcagtccggatcaacacactattccgcatacaaaactatcgaacatcagatcgctgtgcagtatctgcaaatgaaatggcctctgcttgatgttcaggcagggtctctgcagtcccgccaagctctgaaagatgctaggagcccaagccccgcccacattgtaagtcctcttccctgttgcacccaaggtcacgactgccagcatttttatccaccttcagactttacggtgtccactcaggtattcagagatatgaaacggtcccactcacttcagaaagtgggcgagccttggtgcatcgaatccaacaaagtccccgtggtgcagcaccctcatcatgtacaccctctgaccccactcataacttacagcaacgaacacttcactcctggcaatcctcccccccacttgcctgccgacgtcgatcccaagacctag

SEQ ID NO: 208984 - DNA, 867 bp, synthetic construct
  misc_feature 1..867: note = Description of Artificial Sequence: Synthetic coding sequence
  source 1..867: mol_type = other DNA
atgccccagctgaacggcggcggcggcgacgacctgggcgccaacgatgaactcatatctttcaaagacgagggcgaacaggaagaaaaatcgtcggagaattcaagcgccgagcgggacctggcagacgtcaagtcttcgttagttaatgagagtgagacaaaccagaatagctccagcgattcagaagcagaacggagacctcccccacgaagcgagagttttcgggataaatctcgagagtccctggaagaggccgcgaagcgccaggatggcggattatttaaggggcctccatacccagggtacccattcataatgattcctgatctcacttcaccctacctgcccaacggtagcttgagcccaacagcccggactctgcatttccagagcgggtctactcactacagtgcctataagacgattgaacaccagattgctgtgcagtacctgcagatgaagtggcccctgctggatgtacaggccggatctctgcagtctaggcaggcgctcaaagacgctagatcaccctcccctgctcatatcgtatctaataaggttcccgtggtgcagcatccacatcatgtgcatcctctcactccccttattacatactcaaacgagcacttcacgcccggcaatcctccacctcacctgcccgccgacgttgatcctaagacagggatccccaggccgcctcaccccccggacatttccccatactatcctttgagtcctgggaccgtgggacagatacctcacccactggggtggcagggacagcctgtatatcctatcaccaccggcggtttcagacacccgtaccctacagctctgacagtgaacgcttctatgagtcgatag

SEQ ID NO: 208985 - DNA, 1380 bp, synthetic construct
  misc_feature 1..1380: note = Description of Artificial Sequence: Synthetic coding sequence
  source 1..1380: mol_type = other DNA
atgccccagctgaacggcggcggcggcgacgacctgggcgccaacgacgaactcatctcatttaaggacgaaggcgagcaggaggagaaaagctctgaaaatagctctgcagagcgcgacttggccgacgtcaagtcctcgcttgttaacgagtctgagaccaaccagaatagctcctccgatagtgaagccgagagaagacccccccctcgatccgaatctttccgggataagtcaagagaatcactagaagaggcagcaaaaagacaggacggcgggctcttcaaaggccccccttatccaggctacccatttatcatgataccagaccttaccagcccttacctccctaacggaagtctgagcccaacagcaaggacatatctccagatgaaatggccattgctggacgtgcaagcaggatctttgcagtccaggcaggccctgaaggatgcccgttcccctagtccagcccatatcgtgtcaaataaggtgcctgtcgtccagcatccccaccatgtgcacccacttacccccttaataacctactcaaatgagcatttcaccccaggcaatcctcctccccacctaccggcggacgttgatcccaagacggggattcctcggcctccgcatcccccggacattagcccctattaccctctttcgccaggtacggtgggacagatcccacatccactgggctggctggttccccagcagggccagccagtttatcctattactacaggggggtttcgacatccctatccaaccgcccttacggtgaacgcgtcaatgagcaggttccccccgcacatggtgcctccccatcatactctgcacacaaccggaattcctcatccagctattgtgacacccacggttaaacaggagtctagtcagagcgatgtcggcagcctgcacagtagcaaacaccaggactcaaaaaaggaggaggaaaaaaagaagccccacattaaaaagccacttaacgcatttatgctttacatgaaggagatgagggcgaaggtggtggccgaatgtacattgaaggaaagcgctgcaatcaaccagatcctggggaggcgttggcatgctcttagcagagaggaacaggccaaatattatgaactggcacgtaaggaaagacaactgcatatgcagctataccccggctggtccgcccgtgataactatggcaaaaaaaaaaagaggaagagggacaagcagccgggtgaaacgaacgaacacagcgagtgcttcctcaatccttgtctgtcccttccgcctatcaccgacctctctgcccccaaaaagtgccgtgctagattcgggttggatcagcagaataattggtgtggcccttgttctctctag

SEQ ID NO: 208986 - DNA, 1470 bp, synthetic construct
  misc_feature 1..1470: note = Description of Artificial Sequence: Synthetic coding sequence
  source 1..1470: mol_type = other DNA
atgccccagctgaacggcggcggcggcgacgacctgggcgccaacgatgagctgatatctttcaaagatgagggtgaacaggaggagaagagctctgaaaatagcagcgctgaacgggatctggccgacgtgaaatcttccttagtgaacgaatcagaaactaaccaaaactcctcctccgattcagaagcagaacgccgtcctcctccccgttctgagtcatttcgggataagtccagggagtctctggaagaggccgccaaacgccaggatggcggtctgttcaagggcccgccttacccaggataccccttcatcatgattcctgacctgacctctccttatctgccaaacggttccctctcacctaccgcacgtacctacctccaaatgaagtggcctcttctggatgttcaagcaggaagtctgcagtcccgacaggccctaaaggacgccagaagcccctcgcccgcccacatcgtgtctccgcttccttgctgcacgcaaggccacgattgccagcacttctatcctcctagcgattttacagtgagcactcaagtcttcagggacatgaagaggagtcactcgctgcagaaggtcggcgagccttggtgtatagagtctaacaaggtgcctgtggtacaacaccctcaccatgtgcacccgctcaccccgttaattacttactcaaacgaacacttcactcccggtaatccacccccgcatctgccagcggatgtcgaccctaaaactgggattccacggcctccccatccacccgacattagtccatattacccactcagccctggaactgtcggccagattccacaccccctcggctggcttgtcccgcagcaggggcaacctgtgtacccaataacgaccgggggtttccgacacccatacccaacagctttaacggtgaacgccagcatgtctagattccctccgcacatggtgcccccacaccataccctgcacacaacgggtatccctcaccccgcgatcgtgacgcccaccgtgaaacaggagtcatcgcagagcgacgtcggctcccttcacagttccaagcaccaggactctaaaaaggaagaagaaaagaaaaaacctcacattaaaaaacctctgaatgccttcatgttgtacatgaaggaaatgagagccaaggtcgtggctgagtgtacccttaaggagtccgctgccattaatcagatactgggtcggagatggcacgctttgtcccgcgaggagcaggccaagtactatgagctggcgcggaaagagagacagctgcacatgcagttgtacccaggctggagtgcaagggataactacggaaagaagaaaaagcggaagcgcgacaagcagcctggcgagactaacggcgagaaaaagagcgcctttgcaacctacaaggtgaaagcggccgcctctgcccatccactgcaaatggaggcttattag

SEQ ID NO: 208987 - DNA, 1860 bp, synthetic construct
  misc_feature 1..1860: note = Description of Artificial Sequence: Synthetic coding sequence
  source 1..1860: mol_type = other DNA
atgccccagctgaacggcggcggcggcgacgacctgggcgccaacgatgagctaatctccttcaaggatgagggtgaacaagaggagaaatcatccgagaactccagtgccgagagagacctggccgatgtcaaatcatcactggtgaacgagtccgagaccaaccaaaactcctcatcagatagtgaggctgaacggcgccctcctcctcggagcgaaagtttccgggataaatcaagagagtcactagaagaagccgcgaaaaggcaggatgggggactgttcaagggtcccccgtatcctgggtatccatttattatgatccccgatctgaccagcccgtatttaccaaacgggtctctctcacccacagccagaacactccatttccagtccgggtctactcactactcagcttataagacgatcgagcatcagatcgccgtccagtatctgcagatgaagtggcccctgttagatgtccaggccggatctctacagagccgacaggcactcaaggacgctcggtccccatctccagcacacatcgttagcaataaggttccggtagtccagcacccacatcatgtgcatcctctgacccccctgatcacttattcaaatgaacattttactccaggcaacccacctcctcatctcccagccgacgtggatccaaagaccggaatccccagacccccacatccacctgatatatctccctattaccctctgagtcccggcactgtaggtcagatcccccatcccctggggtggttagtcccccagcagggacagcccgtgtatcctataacaaccgggggctttcggcatccttacccgactgccttaaccgtgaacgccagtatgtccagatttccaccgcatatggtcccaccgcaccacacactgcacacgacaggcattccacaccccgctattgtgaccccaactgtgaagcaggaaagtagccagagcgatgtggggagtctccatagctcaaaacaccaggatagcaaaaaggaggaagagaagaaaaagccgcatatcaagaagccactcaatgcattcatgctatacatgaaggagatgagagccaaagtggttgcagagtgtacattgaaagagtccgccgccataaaccagatcctgggacggcgctggcacgccctatctagggaagagcaggccaagtattatgagctcgcgcgcaaagaaagacaattacacatgcaactttaccctggatggtccgcgagagacaattatggtaagaagaaaaagcgaaagcgcgataagcaacctggagagacgaacgagcattccgaatgctttctgaatccctgtctgtcgctgcccccaataacagacctaagtgcacctaagaaatgtcgagctcgattcggcttggaccagcagaataactggtgcggcccttgtaggcgcaagaaaaaatgtgttaggtacatacagggcgagggctcttgtctatcgccaccatccagcgacggatccctgctagactccccaccgccctctcctaacctcctgggctctcccccccgtgatgcaaagtcccagactgaacagacccagcccctgagtctgtcccttaagcctgaccctctcgcccatttgagtatgatgcccccgccccctgcattgctgcttgcagaggcgactcacaaggcttccgctctttgtccaaatggggctctcgacctcccccctgctgcccttcagccagccgcgccgagctcttccatcgctcagccaagcacctcctctctgcacagccacagttccttggccgggactcaaccccaacctctgtccctggtcacaaagtccctcgagtag

SEQ ID NO: 208988 - DNA, 363 bp, synthetic construct
  misc_feature 1..363: note = Description of Artificial Sequence: Synthetic coding sequence
  source 1..363: mol_type = other DNA
atgctgtacatgaaggagatgcgggccaaggtggtggccgagtgcaccttgaaagagtctgctgccatcaatcagatacttggcaggaggtggcacgcactctctcgggaggagcaggctaagtactatgagcttgctagaaaggagagacaattgcatatgcagctgtatccaggatggtctgcccgggataattacggaaagaaaaagaagagaaaacgcgataagcagcccggagagaccaacgatctcagcgcccccaaaaagtgccgagctcggttcggtctggatcaacagaataattggtgcggaccttgcaggtgcaaatactcgaaggaagtttcaggcacagtgcgtgcttag

SEQ ID NO: 208989 - DNA, 531 bp, synthetic construct
  misc_feature 1..531: note = Description of Artificial Sequence: Synthetic coding sequence
  source 1..531: mol_type = other DNA
atgagccggttccccccccacatggtgcccccccaccacaccctgcacaccactgggataccccatcccgccatagtgaccccaaccgtgaagcaggagtcctcacagagtgacgttggctcactacatagctccaagcaccaggactcgaagaaggaagaagagaagaaaaagccgcacattaagaagcccctgaacgcctttatgctctacatgaaagagatgcgcgcaaaagtggttgcggagtgtacgcttaaggagagcgccgccatcaatcagattctgggtcgccgctggcatgctttgagtagagaagaacaagcaaaatactacgagttagcgagaaaagaacgccagctccatatgcagctgtacccagggtggtccgcacgtgataactatggcaagaaaaagaaacgaaagcgtgacaaacaaccaggcgaaacgaacggtgaaaagaagtccgccttcgctacatacaaggtgaaagctgcggcgtcagcccacccactacagatggaggcttactag

SEQ ID NO: 208990 - DNA, 954 bp, synthetic construct
  misc_feature 1..954: note = Description of Artificial Sequence: Synthetic coding sequence
  source 1..954: mol_type = other DNA
atgccccagctgaacggcggcggcggcgacgacctgggcgccaacgacgagctgatctctttcaaggacgagggggaacaggaggaaaagtcctcggaaaattcctctgccgagagggaccttgccgacgttaagtcctcactggtgaatgaaagcgaaactaatcaaaactcttcaagtgatagcgaggcagagaggcgacccccccctcgcagcgaaagctttagagacaaaagccgcgagtcgctggaagaggcagccaagagacaggatggaggactattcaaaggtcccccctatccaggatacccattcatcatgattcccgaccttacatctccgtatctcccaaatggatcattatcacccactgccaggacttatttacagatgaaatggcccctacttgatgtccaggcaggatcccttcagagtcgccaggcgcttaaagacgcaagatcgcctagtcccgcacacatagtgcagtcaccgttaccttgctgtacacaggggcacgactgtcagcatttttacccgccgtctgattttaccgtgagcactcaggtgttccgagatatgaaaagaagccatagtctccaaaaagttggcgagccctggtgtatagagtctaacaaagtgcccgtcgtgcagcatcctcaccatgtgcacccactgacaccactgataacctactctaatgagcactttacacccggaaaccctcccccacacctccccgccgatgtagatccaaaaaccggaataccgagaccaccacaccctccagatatttcaccctactatcctttaagtcctggaaccgtggggcaaataccccaccctctcggatggctagttccacagcagggacagccagtgtatccaataactacaggaggctttagacatccgtacccaacagcgctgactgtaaacgcctctatgtcccgctag

SEQ ID NO: 208991 - DNA, 1791 bp, synthetic construct
  misc_feature 1..1791: note = Description of Artificial Sequence: Synthetic coding sequence
  source 1..1791: mol_type = other DNA
atgccccagctgaacggcggcggcggcgacgacctgggcgccaacgacgagctgataagttttaaggacgagggggaacaagaggagaaatcctcagaaaattcttctgcagaaagggacctggctgatgtgaagtcaagcctggttaatgagtccgaaacaaaccaaaattcgagctctgattcagaggccgaaagacggccacccccaaggagcgagtcatttcgcgataagtcacgtgaatctcttgaggaagccgcaaaacgacaggacgggggcctttttaaaggtccaccataccccgggtatcccttcattatgattccagacttaaccagtccctatttacccaacgggagcctgagtccaacggcccggacttacctgcagatgaaatggcccttgcttgatgtccaagcagggtccctccagagtagacaggcgctgaaggacgcccggtccccctcaccagcccacatcgtctccaataaagtgcccgttgtccagcatcctcatcacgtgcatcctctcaccccacttatcacttatagcaatgaacactttactccaggaaatccaccacctcatcttccagcagacgtggaccccaagaccgggattcccaggcctccccatccacccgatatctccccctattatcctttaagtccaggtactgttggccagatcccccacccattagggtggctggtgccccagcagggacagccggtgtacccaatcacgacgggcggcttcagacatccttatcccactgcactaactgtgaacgcatccatgtctaggttcccaccccatatggtgccccctcatcacactctccacactacgggcatccctcacccagccattgttactcccactgtaaagcaggaaagttctcaatcagacgtagggagcctacactcaagcaaacaccaagacagtaaaaaggaggaggagaagaaaaaaccccatatcaagaagccgctgaacgcctttatgctctacatgaaggagatgcgtgcaaaggtcgtggcagaatgcaccctgaaggaatctgcagctattaaccaaatcctgggaaggagatggcacgctctgtcccgcgaagagcaggctaagtactacgagttagccagaaaagaaaggcagttgcatatgcagctgtacccaggctggtctgcacgggataattatggaaagaagaaaaagagaaaaagagataaacagccgggcgagacaaatgagcacagcgagtgcttcctgaacccctgcctttccctgccccctattacggatctctccgctccaaaaaaatgccgagcacggtttggacttgatcaacagaataattggtgtggcccttgtagaagaaaaaagaaatgtgttcgttatattcagggagagggatcttgtctttcccctccatcctccgacggtagcctccttgacagtcctccccccagtcccaacctcctcgggagccctcctagggatgctaaatctcagaccgaacagacccaacccttatcgctctctctcaaacctgacccattagcccacttgtcaatgatgcccccgccacctgctctactcctcgctgaagcaacccataaggctagtgcgctgtgtccgaacggtgcgttggacttaccaccagcagcgctgcagccagctgccccttcatcctccattgcccaaccttctacatcaagtctgcattctcactcttccctggccggaacgcagccacagccgttgtccctggtgactaagtctctggaatag

SEQ ID NO: 208992 - DNA, 1485 bp, synthetic construct
  misc_feature 1..1485: note = Description of Artificial Sequence: Synthetic coding sequence
  source 1..1485: mol_type = other DNA
atgccccagctgaacggcggcggcggcgacgacctgggcgccaacgacgagctcatatcctttaaggacgagggagaacaagaggaaaaaagctcagaaaatagctccgcagagagggacctcgctgatgtgaagtcatctctcgttaacgagagtgaaacgaaccaaaattcatcaagtgactcagaggccgaaaggcgacccccgccacgctccgaaagcttcagggacaagagtagggagtccctcgaggaagctgcaaagcggcaagacggagggctgtttaaaggaccgccttatcccggctatccctttatcatgattccagacctaacaagtccctatctacccaacggctccctcagcccaacggcccgcaccctgcatttccaatccggctctacccattactccgcttataaaaccatagagcaccagatcgcagtccaatatcttcagatgaagtggcccctgctggatgtacaagccggcagtctgcaaagccgacaagcacttaaggacgcccggtctccttccccggcccatatcgtgtcaaacaaggtcccagtggtgcagcatccccaccatgtgcatcccctgacgcctctgatcacgtattcaaatgaacattttacgccaggtaaccctccaccacacctccctgcagacgtcgaccccaaaacgggaatacctcggcctccccatcctccagatatcagtccttactatcccctgtcacctggaaccgtgggccagatcccgcatcccttgggctggctggttcctcagcaaggacagccggtctaccctatcacgactggtgggttcaggcatccataccctactgccttgacagtaaacgcctcaatgagcagattccccccacacatggtgcccccacaccacacattgcatacaacgggaattccccaccccgccatcgtcactcccacagtcaagcaggagtccagtcaatccgatgtaggatcgctccattcctcgaaacatcaagattcaaaaaaggaggaggagaaaaaaaaaccacatataaaaaaaccattaaacgctttcatgctgtatatgaaagaaatgagagctaaggtcgtggctgaatgtacactaaaagaaagcgctgctatcaatcagatactcggccggaggtggcacgccctgtccagagaagaacaggcgaagtactacgagctggccagaaaggaacgacagctgcacatgcagctgtaccccggatggagcgcacgggacaactacggaaaaaagaaaaagagaaagagggataagcaacccggcgagaccaacgaacactcagagtgcttcctcaacccttgcttatccctcccaccgatcacggatctgagcgctcctaaaaagtgtcgggcccggtttggcctagatcagcagaacaattggtgcggcccctgccgctgcaagtactctaaagaggtgtctggaaccgttcgggcctag

SEQ ID NO: 208993 - DNA, 1809 bp, synthetic construct
  misc_feature 1..1809: note = Description of Artificial Sequence: Synthetic coding sequence
  source 1..1809: mol_type = other DNA
atgccccagctgaacggcggcggcggcgacgacctgggcgccaacgacgagctgatcagctttaaagatgagggagagcaggaagagaaatcttcggaaaacagttcagctgaacgtgatcttgctgatgtcaagagcagcctcgtaaacgagagcgagaccaaccagaattcttcttctgattcagaggcggagcgccgtcccccccctcgttcagaaagctttagggacaaatctcgcgagtccctggaagaagccgcaaagaggcaggatggtggcttgttcaaaggaccgccctacccggggtatccgtttataatgatcccagatctgacctctccataccttcctaacggatcactgtcaccaaccgccaggacactacatttccagagcggatccacccactatagcgcctataaaacaatcgagcaccagattgccgtgcagtacctgcaaatgaagtggcccttactcgatgttcaggcagggtccctccagtcacgccaagcccttaaggatgccaggtcacccagccctgcacatattgtcagcaacaaagtgccggttgtgcaacacccccaccacgttcaccccctgactccacttattacctatagcaatgagcattttacccccggtaaccctccaccccatttgcccgccgacgtggaccccaagaccgggatacctcgccccccgcaccctccagacatttctccttactaccccctctcgccagggaccgtgggccagattccacaccctctggggtggctggtcccccagcagggccaaccagtgtacccaatcacgacaggcggctttcgacatccctacccgacggcactgactgtaaacgcttctatgagtcggttcccccctcacatggttcctccccatcacactctccacacaaccggcatccctcatccagcaattgtgactccaaccgtaaaacaggagagctcccagagtgatgtgggtagtctgcattcctccaagcaccaggacagcaaaaaggaagaagaaaaaaagaaaccccacattaaaaaaccattaaacgcgttcatgctatacatgaaagaaatgcgcgcaaaggtggtggccgaatgtaccttaaaagagtctgccgctattaaccagattctggggagacgctggcatgcactttctcgagaagagcaggccaagtattatgaactggccagaaaggaacgacaactgcatatgcagttatatcccggatggtctgccagagataactatggtaagaagaagaaacggaagcgggataagcaaccgggtgaaaccaacgaccttagtgcacccaagaaatgcagggctagattcggcttggaccaacagaataattggtgtggcccctgcagaaggaagaagaagtgtgtgaggtatatccagggggagggtagttgcctatcaccgccatcctccgatggaagcttgctagatagtcctcctccttcacccaaccttctcggcagtcccccaagagatgccaagtcacagactgagcagacacagccgttgagcctctctctgaaacccgatccactggcccacttatcaatgatgccccccccccccgccctcctacttgccgaggccacacataaggctagtgccctctgcccgaatggagctctcgatttgccgccagccgccctccagcctgcagcgccgagttcatccatcgcgcagccaagcacctcgtctctacattcgcattcctccctcgccggaacgcagcctcaaccactgagccttgtgactaaaagcctggaatag

SEQ ID NO: 208994 - DNA, 1449 bp, synthetic construct
  misc_feature 1..1449: note = Description of Artificial Sequence: Synthetic coding sequence
  source 1..1449: mol_type = other DNA
atgccccagctgaacggcggcggcggcgacgacctgggcgccaacgatgaactgatcagctttaaagacgagggcgagcaggaagagaaatccagcgaaaactcctccgctgagagggatctagccgatgtcaagtctagcttagttaacgagagtgagacaaaccagaactcctctagcgattcggaagcagaaagacgccctcctcctcggtctgagtccttcagggacaaaagccgagagagcctagaggaagccgccaagcggcaggacggagggttatttaagggacccccttacccaggctacccctttattatgatccctgatctcaccagtccttacctgcctaatggttcactttccccaacagctcgaacattacacttccaatccggcagtacacactactcggcatacaagactatcgaacaccaaattgccgttcagtacctgcaaatgaaatggccccttctcgacgtccaggccgggtcacttcagtctagacaggccttgaaggatgctcgcagtcccagtccggcacacatagtgtcaaataaggtgccagtggtccagcacccccaccacgttcaccctctgacacctctgataacctactctaacgaacacttcacacccgggaacccccctccgcacttgcccgcagatgtggaccctaagacaggaataccaaggccgcctcatccaccagatatctctccctactacccactctcacccggaacagtcggtcagatcccgcacccgctcggttggcttgttccacagcagggccagcctgtgtatccaattacgacaggtgggttcagacacccataccctacagcacttaccgtgaatgcttccatgagcagattcccccctcacatggtaccaccacaccatacactgcacaccaccggcattccccacccagcaatcgtaacgcctaccgtcaagcaggagtccagtcaatccgacgtgggctcattgcacagctctaagcaccaggatagtaagaaagaggaagagaagaagaagccacacattaagaagcccctgaacgccttcatgctttatatgaaggaaatgcgcgccaaggtagtagccgaatgtaccttgaaggagtcagccgcaatcaatcagatcctgggcaggcgctggcacgccctgtcaagggaggagcaagccaagtattacgaattagccaggaaagagaggcaactgcatatgcagttgtacccaggatggtcggccagagataactacggaaagaaaaaaaaaaggaagagagataaacagcccggagaaaccaacgaacattccgagtgtttccttaacccatgtctgagcctacctccgatcaccggtgagaaaaagtccgcattcgcgacatataaggtaaaggctgctgcaagtgcgcaccccctgcagatggaagcatactag

SEQ ID NO: 208995 - DNA, 1008 bp, synthetic construct
  misc_feature 1..1008: note = Description of Artificial Sequence: Synthetic coding sequence
  source 1..1008: mol_type = other DNA
atgagcagcttcctgagcagccggttccccccccacatggtgcccccacatcacaccttgcataccacaggaattcctcatccagctattgttacacccactgtgaaacaggagtcaagtcagtccgacgtcggtagcctgcactcttctaaacaccaggattcaaaaaaggaggaagagaaaaagaaacctcatattaagaagcccctgaacgcatttatgctgtacatgaaagagatgcgcgctaaggtggttgcagaatgtaccctaaaagaatctgccgcaatcaaccaaatattaggacgtcgctggcacgcactgtcacgcgaggagcaggccaagtactacgagctagcgagaaaagaaagacagcttcatatgcagctgtacccggggtggtccgccagagacaattacggcaagaagaaaaagcggaaacgcgataagcagcccggcgagaccaacgagcattcagaatgttttctcaatccgtgcctgtcattgccaccgattacagacctgtcggctcctaagaaatgtagggctcggttcggcctggaccagcagaacaattggtgcggaccctgcagaagaaaaaagaaatgcgtgagatacattcagggcgaaggttcatgtctgagcccccccagcagcgacggcagtctcctcgactcgcctcctcccagtccaaacctattaggatcccctcctagagatgcaaaatctcagacggagcagacgcagccactttccctttccttgaaaccagacccacttgcacatctgagcatgatgccccccccccccgctctgctgttagctgaagcaactcataaagcctctgcactgtgtccaaacggcgctctcgatctaccacccgctgctctgcagccagccgctccctcttcatctatagctcagccatctactagttctctccacagtcactcgtctttagcaggaactcaaccacagccactttcactggtaacaaaatcactggaatag

SEQ ID NO: 208996 - DNA, 1809 bp, synthetic construct
  misc_feature 1..1809: note = Description of Artificial Sequence: Synthetic coding sequence
  source 1..1809: mol_type = other DNA
atgccccagctgaacggcggcggcggcgacgacctgggcgccaacgacgagctgatttcattcaaagacgagggtgagcaggaagagaaatcaagtgagaattcaagcgccgagcgcgatctcgctgacgtgaaatccagtctcgtgaatgaaagcgagacaaatcaaaacagtagctcggacagcgaagcagagcggcggcctccaccacggtccgagagttttcgggataaatcccgggaatctctcgaggaagccgctaaacgacaggacggcggactattcaaggggcccccttaccccggatacccttttatcatgatccctgatctgacttcaccttatcttccaaatggctccctcagtcctacagcccgcacactgcatttccagagcggttccactcactattcggcctacaaaacgatcgaacatcagatcgccgtccaatacctacagatgaagtggcccttactcgatgtgcaggccggaagcctacaatccaggcaggccctcaaggacgcccgatctccatctccagctcatatcgtgagcaacaaggtgccagtggtgcagcatccacatcatgttcaccccttaacacctctgatcacctattccaacgagcactttactcccggaaacccccctccacacctccctgccgacgtggatccgaaaacaggcattcccagaccaccacatccacctgacattagcccttattacccactgtcccctggtaccgtgggacagattcctcacccactgggctggctggtgcctcaacagggacagcccgtctatccaattacgactggcggcttcaggcacccatacccaaccgcccttacggtgaatgcatccatgtccaggttcccaccgcacatggttccaccccaccataccctgcatactactggcattccccacccagccattgttacaccaaccgtgaagcaggaaagttcacagtccgacgtggggagcctgcacagttctaagcatcaggattctaaaaaagaggaggaaaagaagaaacctcacataaaaaagccattgaacgcctttatgctgtatatgaaggagatgagagccaaggttgttgccgaatgcacgcttaaagaatcagctgcaattaatcagatcttgggtaggcgctggcacgccctctcacgtgaggaacaggccaagtattacgagctcgcacggaaggagcgtcagctccacatgcagctgtatccgggctggtcagcccgtgataactatggcaagaagaagaagaggaaacgggataagcagccaggtgagacaaacgatgccaacactccgaagaaatgcagagccctgtttggtctcgatcgccaaaccctatggtgtaagccctgccggcggaagaaaaagtgtgttagatacattcaaggtgaaggcagttgcttgagtcccccctcctcagatggcagtctgctcgactcacctcctcccagcccaaatctccttggaagccccccacgcgatgcaaagagccagacagaacagacccaaccgctctccctatctctgaaacccgatcctctcgcacacctgtccatgatgcccccacccccggccctattattggccgaggccacacataaagccagcgctctgtgccctaacggagcccttgatctgcccccagccgcgctacagccggctgctcccagctcttcgattgcgcagccctcaaccagttctctgcatagtcattcttccctggcaggcacacaaccccaacctttgagtctagttacaaaatccctggagtag

SEQ ID NO: 208997 - DNA, 1860 bp, synthetic construct
  misc_feature 1..1860: note = Description of Artificial Sequence: Synthetic coding sequence
  source 1..1860: mol_type = other DNA
atgccccagctgaacggcggcggcggcgacgacctgggcgccaacgatgaactgattagtttcaaggatgaaggcgaacaggaagaaaaatcttccgaaaacagctccgcagagagggacttggccgacgtcaaatcaagtctggtgaatgaatccgaaacaaaccagaatagttctagcgactctgaggctgagagaaggccaccaccgcgatcggagtcttttcgggacaaaagtagagaatcactagaagaagctgccaagagacaggacggcggcctcttcaagggcccaccttaccctggctaccctttcatcatgattcccgatttaacaagcccgtacctgcctaacggttccctgtcccccaccgctaggacgctccacttccagtctgggagtacccactatagtgcgtataaaacaattgaacaccaaattgcggttcagtacctgcagatgaaatggcctcttctcgacgtccaggccggtagcctccagtccaggcaggcactcaaagacgcacggagcccaagccccgctcatatcgtaagtaacaaagtgccggtggttcaacacccgcaccacgtgcacccgttaacccctttgattacatattctaatgaacatttcacgcctggaaacccgcctccgcatcttccagccgatgtagatcccaagaccgggattccccgcccgcctcaccctccagacattagcccttattatcccttaagtcctggcaccgttggacagattcctcacccgttgggatggttggtgccacagcagggccaaccagtttaccctataaccacagggggcttcagacatccatacccgaccgcactcactgtgaacgcgtctatgagcagatttccacctcatatggttcccccacaccacacactgcacacaacaggaattccacatccagccatagtcacccccacagtaaagcaggagagcagccaatcagatgtggggagtctccactccagtaagcatcaggactcaaaaaaggaagaagaaaagaaaaaacctcatataaagaagccactgaatgcatttatgttgtatatgaaagagatgcgcgcaaaggtggttgctgagtgtacgcttaaagaaagcgccgctattaatcagatcttaggacgccggtggcacgccctgagtcgcgaagaacaagccaaatactacgaattggctcgcaaagagcggcagctccatatgcagctttatccagggtggtccgcacgagacaactacgggaaaaagaagaaaagaaagcgcgacaagcagccaggggagactaatgaacattctgagtgttttctcaacccgtgcctgtcccttcctccaatcactgatgctaacacgcccaagaagtgtcgagctctgttcggcttagaccggcagactttatggtgcaagccatgccgccgcaaaaagaagtgtgtgcggtatatccagggtgaaggatcatgtctgagccccccatcctctgacgggtccctattagactctccccccccttcacctaatttgttgggctccccgcctcgtgatgccaagagccaaacagaacagactcagcccctgagcttgtctcttaaaccggaccctctggcccacttgtccatgatgccacctccaccagctttgctgcttgctgaggctactcataaggccagcgcactgtgtcctaacggggcgctcgacttgccccctgcagctctccagccggccgctccaagctcgtctatagcacaaccgtcaacatcgagcctccactctcactccagccttgccggaacccagccacagccgctctctctggtcacgaaatcactcgagtag

SEQ ID NO: 208998 - DNA, 645 bp, synthetic construct
  misc_feature 1..645: note = Description of Artificial Sequence: Synthetic coding sequence
  source 1..645: mol_type = other DNA
atggccttcctgcggagcatgtggggcgtgctgagcgccctgggccgctccggagcggagctgtgtacgggatgtgggtcaagactgcggagtcctttctccttcgtctacctgcctaggtggttctcctccgtgctcgcgagttgtcccaagaaaccagtcagtagttaccttagattttccaaagaacagctgccaatttttaaggcccagaaccccgacgccaaaaccaccgaactgattcgacggattgcgcagcgatggcgcgagcttcccgactcgaagaagaagatctaccaggacgcataccgcgcagagtggcaggtgtataaggaggagatatcccggtttaaggagcagctgacgccttcgcagattatgagtctggagaaggagataatggataagcatctgaaacggaaagccatgacgaaaaagaaagaaaaactgaaaaccgtgaaagaaaactggaaaaacctgtcagactccgagaaggaactgtacatacagcacgcaaaggaggacgagactaggtaccacaatgaaatgaaaagctgggaagaacagatgattgaagtggggcgcaaggacctcctgcggcgaacgatcaagaagcagaggaagtatggagctgaggagtgttag

SEQ ID NO: 208999 - DNA, 660 bp, synthetic construct
  misc_feature 1..660: note = Description of Artificial Sequence: Synthetic coding sequence
  source 1..660: mol_type = other DNA
tgagagctgtgcaccggctgcggcagccggctgcggagccccttcagctttgtctatctcccacggtggtttagctcagtgcttgccagctgccccaagaagccagtctcaagctacttacggttctcaaaggagcagctcccgatctttaaggcgcaaaatcccgatgccaaaacaacagaactcatcaggagaatcgctcagcgttggagggagctgccagatagcaagaaaaaaatctaccaggacgcatatagggccgagtggcaggtatacaaagaggaaataagtcggtttaaggagcagcttacacctagccagatcatgtcacttgaaaaggagattatggacaagcacctcaagcggaaggccatgacaaagaagaaggaactgaccctgctgggaaagcctaagcggccgcgctctgcttataacgtttacgtggctgaacgattccaggaggccaaaggcgacagccctcaggagaagttaaaaactgtcaaagagaattggaagaaccttagtgacagtgagaaagaggtttcgatcacagtggtgagtctcaaatgcctgctgcggatcagcgtgagagagtgcataagagcaagattagacagctgtgaggacaacctggtgctgctgatcatacaagtgttctag

SEQ ID NO: 209000 - DNA, 741 bp, synthetic construct
  misc_feature 1..741: note = Description of Artificial Sequence: Synthetic coding sequence
  source 1..741: mol_type = other DNA
atggccttcctgcggagcatgtggggcgtgctgagcgccctgggccgctcaggagctgagttgtgcaccggctgcggctcacggctgaggagtccattctcctttgtttacttaccacggtggttctcgtcagtcctggcatcttgcccgaagaaacccgtgtcttcgtatctgagattcagcaaagagcaattacccatattcaaggctcagaatccggacgccaaaaccaccgaactcattcgcaggattgctcagcgatggagagagctgccggattccaaaaagaagatttaccaggacgcatacagggctgaatggcaagtatataaggaggagatcagccgctttaaagaacagctgacaccctctcagatcatgtccttggaaaaggagattatggacaagcatctgaagaggaaggcaatgacgaaaaagaaagagttaacattgctcggtaagccaaaacgcccaaggagtgcatataatgtgtacgtggccgaacgttttcaagaggcaaaaggtgatagcccccaagagaaactcaaaacagtcaaagagaattggaagaatcttagcgatagcgaaaaggagctctatattcagcacgccaaggaagatgagactagatatcacaacgagatgaagagttgggaggagcagatgatcgaggttggccgaaaggatctccttagacggaccattaaaaaacaacggaagtatggtgctgaggagtgctag

SEQ ID NO: 209001 - DNA, 1302 bp, synthetic construct
  misc_feature 1..1302: note = Description of Artificial Sequence: Synthetic coding sequence
  source 1..1302: mol_type = other DNA
atgagcatcctggccaagatgggcgactggcaggaccggcacgacggaacatctaatggcacagctagactccctcagctgggaacagtcggtcagagtccctatacctcagctccccccttgtcacacacgcccaacgccgatttccaaccaccatactttccccccccttatcaacctatttatccacagtcccaggacccatattcacacgttaatgatccttactccttgaaccccctccacgctcagcctcagccacagcatccaggctggccggggcagcgccagagccaggagtctgggctgctccatacccacagaggcctccctcaccagctgtccggcctggacccccgaagggattaccgccgtcatgaggacctgttgcacggacctcatgctcttagttctggtcttggggatctgtctattcattcactcccccacgctatcgaagaggtgccacacgtagaagatcccggaatcaatatccccgaccaaacagtgattaagaaagggcctgtgagcttgagcaaaagcaactctaatgcggtatccgcaatccccatcaacaaagataatctcttcgggggcgttgttaatcccaacgaggtattttgctctgttccaggccggttgtcgctgctcagctctacctccaagtacaaagtgaccgtggcagaggtgcaacgccgcctgagtcctcctgagtgtctgaatgcctcccttcttggcggtgtactaaggagagcaaaatctaagaacggggggcgctcacttcgggagaagctcgacaaaattgggcttaaccttccggccgggaggcggaaagccgcgaatgtgactctactgacaagtttggttgagggcgaggctgttcatctggcacgcgatttcggctatgtctgcgagaccgagtttccagctaaggccgttgcagagtttctgaaccgccagcactccgaccccaatgagcaggtcaccaggaagaatatgctgctggccaccaagcagatctgtaaagaattcactgacctcttggcccaggatagaagcccattgggtaattcccggccgaatcctatcctggaacctggcattcaatcctgtctaacgcactttaacttaatatcccatggatttggttcacctgctgtttgtgctgctgtgactgctctgcagaactatctcactgaagctcttaaggccatggataaaatgtacttaagtaacaacccgaacagtcatacggataacaatgcaaaatctagtgataaagaggagaagcatagaaaatag

SEQ ID NO: 209002 - DNA, 1314 bp, synthetic construct
  misc_feature 1..1314: note = Description of Artificial Sequence: Synthetic coding sequence
  source 1..1314: mol_type = other DNA
atgctgtggaagctgaccgacaacatcaagtacgaggactgcgaggatcgacacgatggtactagtaacggaaccgcgagacttccccagctcggcaccgtgggacaaagtccttacacctctgctccaccactgagccacaccccgaatgcagatttccaacctccttacttcccccccccttaccagccaatctatccccagtctcaagacccgtactcccacgtgaacgacccctacagcttaaatcctctccacgcccaacctcagccgcaacaccctgggtggcccggccagcgtcagtcccaggaatcaggtctactccacacccacagaggcttgccccatcaactcagtggactggaccctcggagagattacaggcgacatgaggatctccttcatggtccgcacgccctctcctcaggcctaggggacttgtccattcattctctgccccacgccatcgaagaagttccccatgttgaagatccaggtattaatattcctgatcagacggtcattaagaagggacctgtgtccctttcaaagtcgaatagcaatgccgtctcagccatacctataaataaagacaatctgtttggaggtgtcgtgaatcccaacgaggtattctgctccgtccctggaagattgtctttgctgtcgagtacctccaagtacaaagtcaccgttgcagaggtgcagcgcagactgtcccctccagagtgccttaatgcctcgcttctgggcggcgtactgagaagagccaagtctaaaaacggaggacggagtctccgcgagaagctcgataaaattgggcttaacttgcctgctggccgacgaaaagccgcgaacgtgacactgctgacatcattggtggagggcgaggccgtccacttggcaagggactttgggtatgtgtgtgaaactgaattccccgccaaggccgtcgcagaatttttgaaccggcagcactccgaccctaatgaacaggtgacacgaaagaacatgctgttggctacaaagcagatatgcaaggagtttaccgacctcctggctcaggataggtcgccgctaggcaacagcagaccaaatcccatccttgaacctgggatacaaagctgtctgacccattttaatctgatttcacacggtttcggttctcctgctgtttgcgcagccgtgaccgctcttcaaaattatcttactgaggctttaaaagcgatggacaagatgtatttgtctaataacccgaatagccacaccgacaataacgctaagtcttccgacaaagaagaaaagcatcgcaagtag

SEQ ID NO: 209003 - DNA, 1296 bp, synthetic construct
  misc_feature 1..1296: note = Description of Artificial Sequence: Synthetic coding sequence
  source 1..1296: mol_type = other DNA
atgctggtgcacagcttcagcgccatggaccggcacgacggcacctccaacggaacagctcgactgcctcagctaggcaccgtcggccaatcaccgtatacctccgcacctccccttagccacacacctaacgctgattttcaacctccctattttcccccaccgtatcaacctatttatcctcagtcgcaagacccctacagccacgtgaacgatccttactccttaaatccacttcacgcccagcctcagcctcagcatcctggctggcctggtcagcgacagagtcaggaatccggcctgttacacactcatcgaggtctaccccatcaactcagtggcctagatcctcgtcgggattatcgacgccacgaggatctcctgcacggaccccacgcactttctagcggactgggcgatctgagtatccatagcctgcctcacgcaattgaggaagtgccgcatgttgaggacccaggcataaacattcccgatcagactgtgatcaagaaggggccagttagcctgtccaagtctaattctaatgccgtgtcagcaatccccataaataaggacaatctcttcggtggggtagtaaacccaaacgaagtcttttgctctgtcccaggtcggctcagtctcctctcatccacatccaaatacaaagtaacagtcgccgaggtccagcgccggttgagcccgcctgagtgtctcaatgcttctctgttgggcggcgttcttaggcgagctaagtccaaaaatgggggccggagccttagggaaaaactggacaagatcgggttaaatttgccggcggggaggaggaaggccgcaaatgttactctgctcacaagcctggtggagggagaggctgtgcatttggcaagagattttgggtatgtgtgtgagaccgaattccctgctaaggcagtcgcggagttcctgaacagacagcacagcgaccctaacgaacaggtgacacgcaaaaacatgctgctcgccacgaagcagatttgtaaagagtttactgacctactggcccaggacaggagccctctgggcaattcccgtcctaatccgattttagaacctggtattcagtcgtgcctgacccactttaacctcatctcacacggctttgggagccctgccgtgtgcgctgctgttactgccctccagaactacctgactgaagctctcaaagccatggataagatgtatctatcaaataatcctaatagtcatactgacaataacgccaagagctcagacaaagaggaaaagcataggaagtag

SEQ ID NO: 209004 - DNA, 1320 bp, synthetic construct
  misc_feature 1..1320: note = Description of Artificial Sequence: Synthetic coding sequence
  source 1..1320: mol_type = other DNA
atgaagatgctgtggaagctgaccgacaacatcaagtacgaggactgtgaggatcggcacgatggcacaagcaacggcacggccaggctgcctcagctgggaaccgtcgggcagagtccctacacctccgcccccccattatctcacactcctaacgccgattttcagccgccttatttcccccccccatatcagcctatttatccccagtcacaggatccttacagccatgtgaatgacccatactctctcaatcccttgcatgctcaaccacagccccagcacccagggtggcctggacagcgccagagtcaagagagcggccttctgcacacccacaggggcctcccgcatcagctgtccggtttggacccaaggcgagactaccgtaggcacgaggatctcctgcacgggccacacgccctgagctccggtctaggggacctctcgatccactcactccctcacgctattgaggaagtccctcacgtcgaggatcctggtatcaacatacccgaccagacagtgatcaagaaaggacccgttagcttgtccaaatccaacagtaacgccgtcagcgcaattcctatcaacaaagacaatctgttcgggggggttgtgaatcccaacgaagtcttttgcagcgtaccggggagattatccctgctaagcagcacaagcaagtataaggtcaccgtcgctgaggttcagagaaggttaagcccacccgagtgccttaatgcgagcttactaggaggtgtgctccggcgcgccaagtcaaagaacggcgggcgtagcctaagagagaagctcgataagattggtctaaatcttccagctggccggcggaaggcagcaaatgtgactcttctcacttccctggtggaaggtgaggccgtccacctggccagagatttcgggtacgtctgcgaaacagagttcccggcaaaggccgtggcagaattcctgaatcggcagcatagcgaccccaacgaacaggtcacccgaaaaaatatgctgctcgctaccaagcagatctgtaaagaattcaccgatctgctggcacaggataggtctcctttagggaacagcagacccaaccctatcctcgagccaggaatccagagttgcctgactcactttaacctgatatcccacggtttcggatctccggccgtctgtgctgcagtaaccgccctgcagaactatctgacagaggcactcaaggctatggataagatgtacctgtcgaacaatcctaattctcataccgacaataatgcaaagagttctgacaaggaagagaaacatcgcaagtag

SEQ ID NO: 209005 - DNA, 987 bp, synthetic construct
  misc_feature 1..987: note = Description of Artificial Sequence: Synthetic coding sequence
  source 1..987: mol_type = other DNA
atgctgtggaagctgaccgacaacatcaagtacgaggactgcgaggaccggcatgacggaactagtaacggaacggctaggttaccacagctgggtaccgttggtcaatcgccatatacttcagcccctccgctaagtcatacgcccaatgcggatttccagcctccctacttcccgcctccttaccagcccatttatcctcagtcccaggacccatactcacacgtgaacgatccttactcccttaatccactccacgcacaaccacagccgcagcacccagggtggccagggcagaggcagtctcaggagtccggcctcctgcacactcatcggggcctcccacaccaattgtcaggtctggacccaagacgagattatcgtcgccacgaggacctgctacacggcccacacgccctgagcagcggcctgggggatctctctatccactcccttcctcacgcaattgaagaagttccccatgtggaggatcctggtattaacatcccagatcagaccgtgatcaagaaaggccccgtaagtctgagcaaatctaacagcaatgctgtgagcgccattcccatcaacaaagataacttattcggaggcgtcgtgaaccccaatgaggtcttctgttctgtgccaggtcgcctaagcttgttaagctccacctccaaatataaagtgacggtggccgaagtgcagcgcagactctccccccctgaatgccttaatgctagcctgttggggggagtgcttcggcgcgctaaatctaagaacggtggacgcagcctccgagaaaaactggataaaataggcctcaatttacctgcgggaaggcgtaaagccgcaaatgtcactcttcttacgagcctggtggaagaccgctacgcgaaaagttctcctacctgctggctgagaactgatctgccctggggcactcatggccctacgccctcctggtcgcccgcctcacgggctgcctag

SEQ ID NO: 209006 - DNA, 1314 bp, synthetic construct
  misc_feature 1..1314: note = Description of Artificial Sequence: Synthetic coding sequence
  source 1..1314: mol_type = other DNA
atgctgtggaagctgaccgacaacatcaagtacgaggactgcgaggatcggcacgatggcacgtctaatgggacagcaaggctgcctcaattaggcacagtcggccaatccccctacacgagcgctccccctctgagccatacacccaacgcagattttcagcctccctacttcccgccaccctaccagcctatttatcctcagtctcaggatccctactctcacgtgaacgacccgtacagcctgaatcccctgcacgcccaaccccaaccacaacaccctgggtggccaggccagaggcagtcccaggagagcggattgcttcacacccaccgcgggctgcctcaccagctcagcggtttagacccccggcgtgattatcgtcggcatgaagacctgctgcacgggccgcacgctttgagctcgggtttaggtgatctgagcattcatagccttccccacgcaattgaggaggtcccacatgtggaggatcccggaattaatattcccgaccagacggtgatcaagaaagggccggtctctctctccaagtccaattccaacgcggtgtccgcgattccaatcaataaggacaatcttttcggaggagtcgtaaatccaaacgaggtgttctgttcagtcccggggcggctgagcctcctgtcttcaactagcaagtacaaggtaaccgtggccgaggtccaacgccgcctgagtcctcccgagtgtctgaatgcttcacttttagggggggtcctcaggagagcgaaatctaagaacggcggcagatctttgagagagaaactcgataagatcggcctcaacctgcctgccgggaggcggaaagcagccaatgtgactctgctgaccagtctagtggagggcgaggctgttcatcttgccagagactttggctacgtgtgcgagaccgagttccctgccaaagcagtggcagaattcctgaaccgacagcactccgatcccaatgaacaggtcacaaggaagaacatgctgctggcgaccaaacagatttgcaaagagtttaccgatctcttggcgcaggaccgatccccccttgggaacagcagacccaatcccatcctagagccaggcatacagtcttgccttacccactttaatttgatttcacacggattcggttccccggcggtctgtgctgctgttacagccttgcaaaactaccttactgaggcactcaaggctatggacaagatgtatctttccaacaatcctaatagccacacagacaataatgctaaatcatctgacaaggaggagaaacaccggaaatag

SEQ ID NO: 209007 - DNA, 1410 bp, synthetic construct
  misc_feature 1..1410: note = Description of Artificial Sequence: Synthetic coding sequence
  source 1..1410: mol_type = other DNA
atgcacagccccccccgggaccaggccgccatcatgctgtggaagctggtcgaaaacgtaaagtacgaagatatctacgaaatgttggtgcacacgtactcatctatggatcgtcatgacggcgtccccagtcactccagccggttaagtcagctgggtagtgtgagtcaagggccctattcatccgcccctccactgtctcataccccttccagtgatttccagcctccatactttcccccaccataccagcctctgccttatcaccagagtcaggacccctacagtcatgttaacgacccgtactccctgaatccgctgcaccagccacaacagcacccttgggggcaaagacagcgacaagaggtcggaagcgaggctggctccctccttcctcagccgcgtgctgccctgccccagttgtccgggctcgaccccagacgcgattaccactctgtccggcgcccagatgtgctcttgcattctgcacaccacggacttgacgccggaatgggggattcccttagtctgcacggactgggtcatcccggaatggaggatgtccagtcagtcgaagacgcaaataacagcggaatgaatctccttgatcagtctgttatcaaaaaggtacccgtgccgccaaaaagcgttaccagtcttatgatgaataaggacggtttcctggggggtatgtctgtcaataccggggaggttttttgctcagtgcctggacggctctccctgctgtcaagtacatccaagtacaaggtgaccgttggtgaggtgcagcgtcggttaagcccgcccgagtgtttgaatgctagcctcttgggcggagtcctgcgaagagctaaaagcaagaacggcgggcgatccctccgggaacgtctcgaaaagatcggactgaatctacctgcaggccgccggaaggcggcaaatgttacactgcttacgagtctggtcgaaggggaagcagtgcacctggcccgcgacttcgggtacatctgtgagactgaattccccgccaaagcagtgagtgagtatctcaataggcaacacactgacccgagcgacctgcactcccgaaagaacatgttactggccaccaagcagctgtgtaaagagtttaccgatttgttagcccaggacagaaccccaatcgggaactcaagacccagtcccattctcgaaccaggaatccaatcatgtctgacccacttctctcttatcactcacggattcggcgcccccgctatttgtgccgctttaacagctctccagaattacctcaccgaagccctcaaagggatggataagatgttcctcaacaatacaaccacaaataggcacactagtggtgaaggcccgggctccaagaccggtgataaagaggagaagcacagaaagtag

SEQ ID NO: 209008 - DNA, 597 bp, synthetic construct
  misc_feature 1..597: note = Description of Artificial Sequence: Synthetic coding sequence
  source 1..597: mol_type = other DNA
atgctgtggaagctggtggagaacgtgaagtacgaggacatctacgaaatgctcgtgcacacgtattcttccatggaccgccacgatggagtaccatcccactctagtcgtttatctcaacttggtagcgtctcgcagggtccatattcctcagcaccaccacttagccacacccctagctccgattttcagccgccctactttcctcctccataccaaccactcccgtaccaccagtctcaggatccctactcacatgtgaacgacccatacagtttaaaccccctgcatcaaccccaacaacacccttggggacagcggcagcgccaggaggtgggaagtgaggctgggagcctcctgccacagcccagagctgctctcccacaactgtctggcctggacccaagacgggactaccacagcgtcagacgcccggatgtcctcttgcatagcgctcaccacggcctagatgctggtatgggcgacagtttgtccctgcatgggctcggacaccctgggatggaggacgtgcagtcggtcgaggacgccaataatagcggtatgaatttattggaccaatcagtgattaaaaaatag

SEQ ID NO: 209009 - DNA, 1383 bp, synthetic construct
  misc_feature 1..1383: note = Description of Artificial Sequence: Synthetic coding sequence
  source 1..1383: mol_type = other DNA
atgcacagccccccccgggaccaggccgccatcatgctgtggaagctagtggagaatgtaaaatacgaggatatctatgaagaccggcatgacggagtgccaagtcacagcagccgactttcccagctgggaagcgtttcccaggggccttatagtagcgcaccaccactatctcacacaccctccagcgatttccagccaccatactttccaccaccttaccagccgctcccctatcatcagtcacaggacccctattcccatgtgaatgacccttattcgctgaaccccctccatcagcctcaacagcacccctggggacaaagacagagacaggaagtgggctcagaggctggctcactgctgccacagccccgcgccgcactgccccagttgagcgggcttgatccaaggagagattatcacagcgtgcgaaggcccgatgttctgctgcacagtgcccaccatggtttggatgccggcatgggggactctttgtccttacacgggctcggacatccaggaatggaagatgtgcaaagcgtggaagacgccaacaactcaggtatgaacttgttggatcagtcggttatcaagaaggtgcccgtaccaccaaagtctgtaaccagcttgatgatgaataaagacggatttctcggtggaatgtccgtcaacactggggaagtgttctgttccgtgcctggccgcttgtcactgctgtcatcaacatcgaaatacaaagtcacagtgggggaagtccagcgccggctatccccgcctgagtgtttgaatgcctcacttctcgggggagtattgagaagagccaaatctaagaatggaggcagatctttacgcgagcgcctggagaagatcgggttaaacttgcctgctggcagacgaaaagcagccaatgtgaccctcttaacatcactcgtggaaggagaagctgtccacctcgctcgcgacttcgggtacatatgtgaaacagagtttcctgctaaggcggtgtctgaatacctcaatagacaacacaccgacccaagtgacctccatagccgaaagaatatgctgttagcgactaaacaactgtgcaaggagttcacagatttattagcccaagacagaacccctatcggcaatagcagaccaagcccaattttggaaccggggatccaatcctgtcttactcatttcagtctgattacgcacggattcggcgcccctgcaatttgtgccgccctgacagcacttcaaaactatttgaccgaagccctcaagggtatggacaagatgttcctgaataacactaccactaaccggcacacatctggcgagggccctggaagcaaaactggggacaaggaagagaaacacaggaagtag

SEQ ID NO: 209010 - DNA, 1359 bp, synthetic construct
  misc_feature 1..1359: note = Description of Artificial Sequence: Synthetic coding sequence
  source 1..1359: mol_type = other DNA
atgagcaccaccttccccggcctggtgcacgacgccgagatccggcacgatggtagcaactcctacaggctgatgcagttgggctgccttgagtctgtcgcgaactctactgtagcctactccagcagctctcctctcacatattccactaccggcaccgaattcgcgtcgccatatttctcaactaaccatcaatacactccactccaccaccagtctttccactacgagttccagcactcccatccagcggtcacacctgatgcttatagtctgaatagtctgcatcattcccagcagtattatcaacagatccaccacggggaacctacagactttattaacctgcacaacgcccgcgctctgaaaagttcatgcctggatgaacagaggagagagctcggctgtctagatgcttataggcgtcatgatctgtccttgatgagtcacggcagtcagtacggcatgcatcctgaccagagactgctgcccggccctagccttggcctggccgcagctggagccgatgatctacaaggcagcgtggaagcccaatgcggcttagtcttaaacggccagggaggggtcatccggcgcgggggcacctgcgtggtgaaccccactgaccttttctgtagtgtgccaggtcgactgtctctcctgtcaagtacttctaaatataaagtcactattgccgaggtaaagcgacggctctcaccaccagagtgcctcaatgctagtttactgggaggcatcctgcggcgcgcaaagagcaagaacgggggacggtgtctgagagagaaacttgatcggctcggccttaaccttccagccggtcgtcgaaaagctgcaaacgtaacgctactgaccagtctcgtcgaaggagaagcgctccatctcgcaagagattttggatatacttgcgaaacagagtttccagccaaagcggtgggcgagcacctagcaaggcagcacatggagcagaaagaacaaaccgcgcgcaagaaaatgattttagcgaccaagcagatttgtaaagaattccaggatctcctgtcccaggaccggagccctctcggaagctctcgacctacgccgatcttagatctggatatccagcgccatctgactcacttttcccttattacgcatggtttcggaacccctgcgatctgtgcagcgttgagtacttttcagaccgtcctgtctgagatgttaaattatcttgagaagcatacgacccataaaaatggcggtgccgccgacagtggccagggccacgcgaactcagagaaagcacctcttcggaagacgtccgaagccgccgtcaaggaggggaagaccgaaaagacagattag

SEQ ID NO: 209011 - DNA, 1329 bp, synthetic construct
  misc_feature 1..1329: note = Description of Artificial Sequence: Synthetic coding sequence
  source 1..1329: mol_type = other DNA
atgctggtgcacacctacagcgccatggagcggcccgacggcctgggagcggctgccgggggtgcgcgtctgtccagcttaccccaagcagcctatgggcctgcaccccctctgtgccatacgcctgcggccactgctgctgcagaatttcagcccccctactttccccccccatatccccagccacccttgccttatggtcaggccccggatgccgccgcggcctttcctcaccttgctggagacccttacgggggattggctcctctggcacagcctcagccacctcaggcggcctgggccgcgcctcgtgctgccgcacgcgcacacgaggaaccaccaggcttgctcgccccccctgcgcgggccctaggcctggatccccgacgagactacgctaccgctgtcccccggcttcttcacggtctggctgatggagcccacgggctcgccgatgctcctctgggcctgccaggactggcagctgctccaggcctggaggacttgcaggccatggacgaaccgggaatgtccctgctcgaccagtccgtaatcaagaaagtgcccattcctagcaaagctagtagcctctcagctttatcactggccaaggacagcttagtgggcgggattaccaaccctggcgaagttttttgctcggtccccgggcgacttagcctgctgagttccaccagtaagtacaaagtaacagtaggtgaggttcaaagacgcctgtccccgccggagtgtctgaacgcctccctcctggggggcgtgctgcgcagagcgaaaagtaagaacggaggaaggtgccttagagaacggctggagaaaattggcttgaacctgccggccgggaggcgcaaagcggcaaacgtgactctgcttacttccctagtggagggtgaggccgtgcacttggccagggacttcggctacgtatgtgagacagagttccctgcaaaggcagccgctgaatacctgtgtcggcagcacgctgatcccggcgagttgcactctagaaagtctatgcttctggctgctaagcagatttgtaaagagttcgctgatctcatggctcaggacaggtcgccactggggaattcgcgcccagccctaattcttgagcctggcgtccagtcttgtttgacccatttctccctaatcacacacggattcggaggccccgccatatgtgctgcccttactgccttccagaattatctcctggagtccttaaaaggtctggacaaaatgtttctctcttccgtggggagtggccacggggagacaaaggcttccgagaaggacgccaagcatcgcaaatag

SEQ ID NO: 209012 - DNA, 1353 bp, synthetic construct
  misc_feature 1..1353: note = Description of Artificial Sequence: Synthetic coding sequence
  source 1..1353: mol_type = other DNA
atgctgtggaagatcaccgacaacgtgaagtacgaggaggactgcgaggataggcatgatggatcctctaatggcaaccccagagtcccccacctgagttcggccggacagcacctttactcccctgccccaccattatctcatactggggtcgccgaatatcaaccaccaccctactttcctcccccgtatcagcagctggcttatagtcagtccgccgatccctactctcacctcggggaagcctacgcagccgcaatcaaccccctgcatcagcccgcaccaactggatcccagcagcaggcttggcccggtaggcagtctcaggaaggagccgggcttcctagccatcatgggcgccccgccggccttctcccacacctctccggactagaggctggagccgtatccgctcgtcgagacgcataccgacgttccgacctgctgttaccccacgcacatgcgttggatgctgcaggtctcgctgagaacctgggactccatgacatgccccaccagatggacgaagtgcagaatgtcgacgaccagcacctcttgttgcacgaccagaccgttatccgcaagggacctatttccatgacaaagaaccccttaaatcttccttgccagaaagaattggtcggagctgtcatgaatccaaccgaagttttctgtagcgtgcccggaagactgtctttgctgagctcgaccagcaagtataaagttacggtcgcagaagtgcagcggaggctctcaccgccggaatgcctgaacgcgagcctcttagggggggtattacgccgggctaagtccaagaatgggggaagatcgctgagagaaaagctggacaagattggcctcaacctccctgcaggcagacgcaaagctgctcacgttacacttctcacgagtctggtggaaggggaagcagtacaccttgcacgggacttcgcctatgtctgtgaagcggagttccccagcaagccagtggcagagtatcttacaaggcctcatttaggaggcaggaatgaaatggctgcaaggaagaatatgctgttggcggcccagcagttgtgtaaggaatttacagagctgctgtctcaggatcggacaccccacggaacttctcgccttgcccccgtactggagaccaacatacagaattgcctcagtcacttcagcctaattacccacgggtttggctcccaggctatttgtgctgcggtcagtgctctccaaaattacataaaagaagccttaattgtgatagataagtcttacatgaatcccggagaccagagcccagctgactcaaataaaactctggagaagatggagaaacacagaaaatag

SEQ ID NO: 209013 - DNA, 357 bp, synthetic construct
  misc_feature 1..357: note = Description of Artificial Sequence: Synthetic coding sequence
  source 1..357: mol_type = other DNA
atgttcctgcaggaccggcacgacggcagcagcaacggcaacccccgggtacctcatttgagctctgcagggcagcatctgtactctcccgccccaccactctcacatacaggcgttgctgagtaccaacccccaccctacttcccccccccttatcagcagcttgcctactcccagagtgccgacccctactctcatctgggcgaggcttatgctgccgcaatcaacccgttacaccagccagccccgaccgggtctcagcagcaggcttggcccggtaggcagtcacaggagggtgctgggctccctagccatcacggccggcctgctggcctcctgccacatctgagcggatag

SEQ ID NO: 209014 - DNA, 846 bp, synthetic construct
  misc_feature 1..846: note = Description of Artificial Sequence: Synthetic coding sequence
  source 1..846: mol_type = other DNA
atgccccaccagatggacgaggtgcagaacgtggacgaccagcacttgctcttgcacgaccagaccgtgatcaggaagggaccgattagtatgactaagaaccccctgaatctgccttgccagaaggaattggtgggggctgtgatgaaccctacggaagtcttctgttccgtgcctggaagactgtctctgctgtcctccacgtctaaatacaaggtaactgtggccgaggttcagagaagactctcaccccctgagtgtctgaatgccagcttgctgggaggagtgctccggcgcgcaaagagcaaaaatgggggccgatccctcagagaaaagctggacaaaatcgggctgaacctgccagcgggaaggcggaaggcagcccacgtgacactgctaacatcgctggtggaaggcgaggcagtgcacctggcaagagatttcgcatacgtgtgtgaggccgagtttccgtccaagccagttgccgaatacctaacaagaccccacctcggtggccgcaatgagatggctgcccgtaagaacatgctcctagccgcacagcaactttgcaaggagtttacagaactcctgagtcaggacaggacaccccatggcacgagtagactcgcgcctgtgctcgagactaatatccagaattgcctgtcacatttttctctgatcacccatggcttcggatcacaagctatttgcgcggccgtaagcgccttacagaattatattaaagaggccctgatcgtgatcgataaaagttacatgaaccccggagatcagagtcctgctgactccaataagaccctcgaaaaaatggagaagcaccggaagtag

SEQ ID NO: 209015 - DNA, 1041 bp, synthetic construct
  misc_feature 1..1041: note = Description of Artificial Sequence: Synthetic coding sequence
  source 1..1041: mol_type = other DNA
atggccgccagcggcaagctgagcacctgccggctgccccccctgcccaccataagggaaattatcaagctcctgaggctgcaagcagccaaacagctaagccaaaacttccttctcgacttgaggctgaccgacaagatcgtgaggaaggcaggaaacctaaccaatgcatacgtatatgaagtgggccccgggcccggaggtataacacgatccatcttgaatgcagatgtggccgaacttcttgtggtggaaaaggatacccgtttcatccctgggctacaaatgctcagcgacgccgcccccgggaagctgaggattgtgcatggtgatgtactgaccttcaaagtagagaaagcctttagtgaatcgctcaagcgaccttgggaggacgatccaccaaatgtccatataataggcaacctgcctttttccgtctctacacccctcatcatcaaatggctggagaatatttcctgtagagatgggccgtttgtttacggccgaactcagatgaccctgactttccagaaggaggtagcagaaagattagcggccaacacagggagtaagcagagatcacggcttagtgtcatggctcagtacttgtgcaatgtaaggcacatctttacaatccctgggcaggcttttgtgcccaaacccgaagttgatgtgggcgttgtccactttacaccattaattcagccaaagatcgaacagcccttcaagctggtggaaaaggttgtgcaaaacgtgttccaatttcgaagaaaatattgccatagaggcttgaggatgctgtttcctgaggcacaacgcttagaatccactgggcggcttctggagctggctgatattgatcccactctgcgcccaagacagctcagcatatcacatttcaagtctctttgtgacgtgtataggaagatgtgcgatgaagatccacaactgttcgcttacaatttccgggaagagttgaaaaggaggaagtcaaagaatgaagagaaggaggaggatgatgccgagaattatagattgtag

SEQ ID NO: 209016 - DNA, 1728 bp, synthetic construct
  misc_feature 1..1728: note = Description of Artificial Sequence: Synthetic coding sequence
  source 1..1728: mol_type = other DNA
atgagccacgccgccgagcccgcccgggacggcgtggaggccagcgccgaaggccccagagccgtctttgtacttctggaggaaaggcggcccgcagactcagcccagctactgagcttgaattccctgctccctgagtctgggatcgttgctgacattgagctcgaaaatgttctggatcccgattctttttatgaattgaagagccaacccttaccactccgctcgtcacttccaatatcactgcaagccacacctgctacaccggctacactaagtgccagctcgtcggccggcggaagcaggacgcctgcgatgtcctcttctagctcttcaagagtgttgctgcggcagcaactaatgagagctcaagcccaggaacaggaaagaagagagcggagagagcaagcggcggcagccccattcccaagcccagctcccgctagcccagctatctccgtggtgggggtttctgcagggggacataccttgagccgccccccaccggctcaagtgccccgagaagtattgaaggtccagacccaccttgagaaccccacaagatatcacttacaacaggctcgtagacaacaagttaaacagtatttgtctacaacactgggcccgaaattagcctcacaagcccttaccccaccgcctggacccgcatccgctcaaccgctgcctgcccccgaggcagcgcataccacaggtcctactggcagcgctcctaattctcctatggccttgctaaccattggctcaagtagcgaaaaggaaatcgacgacgtgatcgacgaaataatctctctggaatcttcctataatgacgagatgctgtcgtatcttccaggagggacaaccggcctccagctcccaagcactctgcctgtgagtggcaacctgcttgatgtgtacagctctcagggcgtggccactcccgccattacagtgtccaactcttgtcccgctgaattgcctaatatcaaaagggaaatctcagagacagaagctaaagctctgctcaaggagagacagaaaaaagacaaccataacctgatagagagaaggcgccgcttcaacattaatgacagaattaaggagcttggaaccctgatccccaaatcttcagacccagagatgaggtggaacaaagggacaattctcaaagcttcagttgactacataagaaagctacagaaggagcagcagcgatcaaaggatcttgagagccggcagcgcagcctggagcaggctaaccgatccctacaattaagaattcaggaactggagctccaggcccagatccacggactcccagtcccgccaacccccggcctgctctccctggctacgaccagtgcctcagactctttgaagcccgagcaacttgacatcgaggaggagggccgacccggagctgccacattccatgtcggaggaggtcccgctcaaaacgccccccaccaacagcccccggcccccccttccgacgctctgttggatttgcactttcccagcgaccatctgggggatctgggggacccctttcatctgggactggaggacattctgatggaggaagaagagggtgttgtaggaggccttagtggaggtgccctttctcccctgagagcagcctccgatcccctcctgtcctcggtgagtcctgccgtgtccaaagcctcttctcgaaggtcatccttctcaatggaggaggaatcatag

SEQ ID NO: 209017 - DNA, 1509 bp, synthetic construct
  misc_feature 1..1509: note = Description of Artificial Sequence: Synthetic coding sequence
  source 1..1509: mol_type = other DNA
atggcctgggccctgaagctgcccctggccgacgaggtgatcgagtccggactggtgcaagatttcgacgcaagtctgtcagggatcggccaagagctcggcgccggcgcttatagtatgtccgacgtccttgccttgcctatttttaagcaggaagagtccagccttccgccagataatgaaaataaaattctccccttccagtacgttctttgcgccgcaacctcaccggctgtgaaactgcacgacgagacactgacgtatctgaaccagggccagagttatgagatccgcatgctggacaacagaaagctcggcgaactcccggagataaatggaaaactggtgaagagcatctttcgggtcgtgtttcacgaccggaggctgcaatataccgaacatcagcagttggaggggtggcgttggaaccgccccggcgaccgtatcctggacatcgacattccgatgtccgtgggtatcatcgacccaagggccaacccgacacagctgaataccgttgagtttctgtgggatccggccaagcggacctccgtgttcatccaggttcattgcatatccacagagttcaccatgcgcaagcatggaggggaaaagggggtcccatttcgggttcaaatcgatactttcaaagagaatgaaaatggggagtacacagagcatctgcacagcgcctcctgtcagattaaagttttcaagcctaagggggcagatcgcaaacaaaagaccgacagggagaagatggaaaagaggacacctcatgaaaaagagaaataccaaccctcctatgagactaccatcctgaccgaatgcagcccctggcccgaaatcacctatgtcaacaacagtcccagccccggctttaacagctcccactctagcttcagcctgggcgagggaaacggaagcccaaatcaccagccagaacctccaccacctgtaactgacaatttgctgccaaccaccacccctcaggaggcacagcagtggctccataggaaccgattttccacattcactcgcctgttcaccaatttcagcggggccgatctactgaaactcacgagggatgatgtcatccagatttgcgggcccgccgacggcattcgactcttcaatgctcttaaaggcagaatggtgcgcccacgcctaactatttatgtatgccaggagagcctccagctccgggagcagcagcagcagcaacagcaacaacagcagaaacacgaagatggagactcaaacggcactttctttgtttatcacgccatttacctagaggaattgacagcggtggaactgaccgagaagattgcccagctctttagcatcagcccttgccagatcagtcagatttataagcaaggcccgactggcatccacgtgttgattagtgatgagatgatacagaactttcaagaggaggcctgcttcatacttgatacaatgaaagccgaaactaacgacagttatcatatcatactgaagtag

SEQ ID NO: 209018 - DNA, 1356 bp, synthetic construct
  misc_feature 1..1356: note = Description of Artificial Sequence: Synthetic coding sequence
  source 1..1356: mol_type = other DNA
atggcctgggccctgaagctgcccctggccgacgaggtgatcgagtcaggccttgtgcaggattttgatgcttccttaagtggcataggccaggaacttggtgccggtgcctactccatgtccgacgttttagctctgccaattttcaagcaagaagaatcttccctcccaccggacaatgagaataaaatcttgccctttcaatatgtcttgtgcgccgctaccagccccgctgtaaagctccacgacgagacactaacctatctgaaccaagggcaatcctacgagatccggatgctcgataatagaaaattgggcgaattgccagaaataaatggaaaattggtgaaatccatctttcgcgtagtcttccacgaccgccggctgcaatacacggaacatcagcagctggagggatggcgatggaaccgaccaggtgatcgaattcttgatatagacattcccatgagcgttggtatcatcgaccctcgagccaatcccactcagcttaacactgtcgagttcctctgggatcccgcgaagcgaacatctgttttcattcagccaaagggagctgacagaaaacagaagactgatagagagaaaatggagaagagaacaccacatgagaaggaaaagtaccagccgtcctacgagactacaatactgaccgagtgtagcccatggcccgagataacgtacgtgaataattctccaagtcctggctttaacagctctcactcttcattttcattgggagagggaaacggatcaccaaatcaccagcccgagccgccaccacctgtgacggacaatctactacctactactactccgcaggaagcacagcaatggctccatcgcaatcgcttctcaacatttacacgattgttcaccaatttttccggcgcggacttgttgaaactgactcgggatgacgtgatccagatctgtgggcccgccgatggaatcaggctgttcaatgcactgaaggggcgaatggtaaggccaagactgacaatctacgtgtgccaggaatctttgcagctccgagagcagcagcagcagcagcaacagcagcagcagaaacatgaagatggtgactcgaacggcacattctttgtgtatcacgcgatctatctcgaggagcttacagccgtcgagctgactgaaaaaattgctcagttatttagcatcagtccctgtcaaattagccagatatacaaacagggaccgactggcatccacgttcttatatccgacgaaatgatacagaatttccaggaagaggcctgcttcatactggataccatgaaggctgagacaaacgatagctaccacataatcctaaaatag

SEQ ID NO: 209019 - DNA, 1353 bp, synthetic construct
  misc_feature 1..1353: note = Description of Artificial Sequence: Synthetic coding sequence
  source 1..1353: mol_type = other DNA
atggcctgggccctgaagctgcccctggccgacgaggtgatcgagtcaggactcgtccaggacttcgacgcctctctgtccggcattggccaggagcttggcgcgggcgcttacagtatgtcagacgtacttgctctcccgatcttcaagcaggaggagagcagtctccctcctgataatgagaataagattctgcccttccagtacgtgctatgcgcagctacatcccctgccgtgaaactccatgatgagaccctgacgtatttgaatcagggtcagagttatgaaattagaatgctcgacaaccgcaagcttggggaattaccagagattaatggtaagctcgttaaaagcattttcagggtggtgtttcacgacagaagattgcagtacacggaacaccagcagttagagggatggcgatggaatcggcctggagaccggattttggacattgatattcctatgtctgtaggaattattgatccgcgcgcaaacccaactcagctaaatactgttgagttcctgtgggatcctgctaaacgaacttctgtgttcatacagcctaagggtgcggacagaaaacagaaaacggaccgcgagaagatggaaaaacgcactccacacgaaaaagaaaagtaccagccttcgtatgagacaaccattcttactgagtgctcgccttggcccgaaattacttatgtgaataactccccaagccctggcttcaatagctcacattcaagcttttctttaggggaggggaacggaagccctaatcatcagcctgagcctcctccaccagtgaccgataacctgctgcctaccaccacgcctcaggaagcacagcagtggctgcacaggaaccgcttcagtacattcaccaggttatttaccaacttctctggtgctgatctccttaagctgacacgggatgatgttattcagatttgcggccccgcagacggcattaggctgttcaacgcattaaaaggccggatggtgcggccacggttgaccatttatgtgtgtcaggaatcactgcaactgcgcgaacagcagcagcagcagcagcaacagcagcagaaacacgaagatggtgattccaacggcactttctttgtgtaccacgctatctacctggaagagttgacagcggtcgagctaacagagaaaatcgctcagctgttttccatctcgccatgccagataagccagatttacaaacagggtcccactggaattcatgtcttgatcagcgatgagatgatccagaactttcaagaggaagcatgttttattcttgacaccatgaaagagaccaatgattcttaccatataatacttaaatag

SEQ ID NO: 209020 - DNA, 1440 bp, synthetic construct
  misc_feature 1..1440: note = Description of Artificial Sequence: Synthetic coding sequence
  source 1..1440: mol_type = other DNA
atgctgttctggcacacccagcccgagcactacaaccagcacaactccggcagctatctccgcgatgttttggctcttccaatatttaagcaggaggaaccccagctgtcacccgagaacgaagcccggcttcctcctttgcagtacgttctctgtgcagccacatctcctgctgtgaagttgcatgaggagacactcacttacctgaatcagggacagtcatatgagatacgactgctagagaatagaaaacttggtgacttccaggatctgaacaccaaatacgtcaaatcaataattagggtggtgtttcacgacaggagactccagtatacagagcaccaacaactggaaggatggagatggtccaggccaggtgaccggattctggacatcgacatacccctgtctgtcggcatccttgacccaagggcttcccctactcagttaaatgctgtcgaatttctttgggatccagccaagagagcttcagcgttcatccaggtccactgtatctccacagagtttacaccccgaaagcacgggggtgaaaagggcgttccattccgagttcagatagacacattcaagcagaacgagaacggagaatataccgagcacctccactctgcttcctgccagatcaaagtgttcaagccgaaaggagccgaccgcaagcagaagacagaccgggagaagatggagaaacggaccgcccaggagaaggaaaagtaccaaccatcgtacgaaaccaccattctgactgagtgctcaccctggccagacgtcgcataccaggttaactctgcaccgtccccttcttacaacggcagccctaattccttcgggctaggtgagggcaatgcatctcccacacatccagtcgaagctctgccagtcggttccgatcatctgttaccctccgcatctatccaggatgctcagcagtggttgcaccgaaaccggttctctcagttctgtaggctgttcgcaagttttagcggagccgatcttctgaagatgagccgggatgatctggtgcagatatgcggtcctgcggacggcatcagactcttcaacgccataaaaggacgtaacgtcagacctaaaatgactatctatgtgtgccaagagctagagcagaatcgcgtgcccctccagcaaaaacgagatggttcaggcgactcaaatttgagtgtgtaccacgccatatttctagaggaactgacaacactggagttgatcgagaaaattgctaacctctacagcatttctccccaacatattcaccgagtgtatcggcagggaccaaccggtattcacgtggtggtcagtaatgaaatggtgcaaaattttcaagacgagtcttgctttgtgctgtccaccattaaggccgagagcaatgacggttatcacatcatccttaagtgcggcctgtag

SEQ ID NO: 209021 - DNA, 99 bp, synthetic construct
  misc_feature 1..99: note = Description of Artificial Sequence: Synthetic coding sequence
  source 1..99: mol_type = other DNA
atggtgcagaacttccaggacgagagctgcttcgtgctgagcaccatcaaagctgaatctaacgacggttatcacataatcctcaaatgcggcctctag

SEQ ID NO: 209022 - DNA, 1218 bp, synthetic construct
  misc_feature 1..1218: note = Description of Artificial Sequence: Synthetic coding sequence
  source 1..1218: mol_type = other DNA
atggccaagtacgtgagcctgaccgaggccaacgaggagctgaaggtactgatggacgagaaccagacctccagaccagtggcagtgcatacctcgacagttaatccactgggaaagcaactgttacccaagaccttcggtcagtccagcgtgaatattgatcagcaggtggttatcgggatgccacagcggccagctgctagcaacattcctgtggtggggtctcccaacccaccctcaactcatttcgcatcccagaatcagcactcctacagtagtcccccgtgggcaggccaacacaatcggaaaggagaaaaaaatggtatgggtctgtgccgcctctccatgaaagtttgggaaacagtccagcgaaagggaaccacgagctgtcaggaggtcgttggcgagctcgtggcaaaattccgcgcagcgagtaatcacgccagtcccaacgaatcggcttatgacgtgaagaacataaaacggcggacctacgatgctctcaatgttctgatggccatgaatattataagtagagaaaaaaagaaaatcaaatggattggactgactaccaacagcgcacagaactgtcaaaatcttcgcgttgaaagacaaaagcggctggaaaggataaaacagaagcagtccgagctgcagcagctgattttgcagcagattgctttcaaaaaccttgtcctgagaaaccagtatgtggaggagcaggtgagtcaaaggccattgcctaacagtgtaatccatgtaccatttattatcatatcctcgagcaagaaaacagtgatcaattgctccatcagtgacgacaaatctgagtacctgttcaaattcaactctagttttgaaattcatgatgatacagaggtgttgatgtggatgggaatgacatttggcctagaatcggggagctgcagtgccgaagatctgaaaatggcgcggaacttggtgcctaaggcactcgaaccatatgtgaccgagatggcccagggaaccttcggtggagtatttactaccgcaggatcaaggtcaaatggcacttggctttctgcctcagatcttacaaacatagcaataggtatgctcgcaacctcctcaggggggagccagtactctggaagtcgggtagaaacgcctgctgtggaggaggaagaggaggaagataataacgatgatgacctgagtgaaaacgatgaggacgattag

SEQ ID NO: 209023 - DNA, 2649 bp, synthetic construct
  misc_feature 1..2649: note = Description of Artificial Sequence: Synthetic coding sequence
  source 1..2649: mol_type = other DNA
atggagggcgagagcagccggttcgagatccacacccccgtgagcgataagaaaaaaaaaaaatgtagtatacacaaggaacgtccccagaagcactcacatgagatttttagagattcctcgctggtgaacgagcaatctcagattaccaggaggaaaaaacggaaaaaagactttcaacacttgatctcttccccgctaaagaaaagccggatctgcgatgaaacagctaatgcaacaagcacacttaagaaacgtaagaagcgcagatattccgccctggaggtggatgaggaggcaggcgtcaccgttgtactagtggataaagagaacatcaataacacacctaaacatttccgtaaggacgttgacgttgtctgtgttgacatgtctattgaacagaaactgcctcggaagcccaaaacagacaaattccaggtgttagcgaagagccacgcacacaaatccgaagctttgcactctaaggtcagagaaaaaaaaaataaaaagcatcagagaaaagcagcttcttgggagagccagcgcgccagggacactctcccacaatccgaatcccaccaagaagagagctggctctctgttggaccggggggtgagataacagagctgccagcctctgcccacaagaataaatccaagaagaaaaagaagaagagtagcaacagggagtatgagaccttagccatgcctgagggatcccaggctggacgggaggctggtaccgatatgcaggagtcccagccaaccgtgggactggacgacgaaacgccgcagctcctaggccccacacataagaaaaagtccaaaaaaaagaagaaaaaaaagtctaaccaccaagagttcgaagccctcgcgatgcccgaaggctcccaggtgggtagcgaggtgggagccgacatgcaggagtctcgccctgcggtgggactccatggtgagactgccggaatcccagcgcccgcttacaagaacaagagcaagaagaaaaaaaaaaaatcaaatcatcaggaatttgaggcggttgcaatgcctgaatctctggagtcggcctatcctgagggttcacaggtgggcagcgaggtgggcacagtagagggatccacggcactcaagggttttaaggagagtaatagcacaaagaagaaatctaagaagagaaagttaaccagcgtgaagagggctagagtgagcggagatgatttttctgtgccttccaagaatagcgaatctaccctcttcgactccgtggagggagacggtgctatgatggaggaaggagttaaatctagaccccggcagaaaaaaacccaggcgtgcctcgcttcgaagcacgtccaggaagccccacgactggaaccagccaacgaggagcacaacgtcgaaaccgctgaagactccgaaataagatatttgtctgccgattcaggcgacgctgatgactccgacgccgatttgggatcagcggtgaaacagctgcaggaattcatccccaacataaaagaccgggccacgtctaccatcaaaagaatgtatcgagatgacctcgaacggtttaaagagtttaaggctcaaggggtcgcaatcaaattcgggaaatttagcgttaaagagaataagcagctggagaagaacgtcgaggatttcctggccctaaccggaatcgagtctgcagataaactgttgtatacagataggtaccccgaggagaagagtgttatcacgaacctcaagcggcgctattcctttcggctgcatattggacggaatattgccaggccctggaagctgatttattacagggcaaaaaaaatgtttgacgtcaacaactacaagggacggtatagcgagggtgacacagaaaaactgaagatgtatcactccctgctaggcaatgactggaagaccatcggagaaatggttgccaggtcatcactctctgttgccctgaagttcagccagatatccagccagaggaataggggggcctggtcaaagagcgaaacaaggaagctcatcaaagctgtagaggaggtgatccttaaaaagatgtctccccaggagcttaaggaggtagactctaaattacaggagaatcctgaatcttgccttagtatagtgcgggaaaagttatacaaaggcattagctgggtcgaagtagaggcaaaggtgcagacccggaattggatgcagtgcaagtcaaaatggacagaaattctcacaaagcgcatgaccaatggccgaaggatttactatgggatgaatgcccttagagcgaaggtgagtctgatagaacgcctgtatgaaattaatgtcgaggacacaaatgaaattgattgggaagacctggctagcgctattggcgacgtcccgccatcatatgttcagactaaatttagcaggctcaaggcagtctatgtgcccttctggcagaagaaaacttttcccgaaatcattgactacttgtatgagacgacactgccactactgaaggaaaagcttgaaaagatgatggagaagaagggtactaagatccaaactcctgcggcccctaaacaagtttttccattccgagacatattttattatgaggacgactcggagggcggtcacaggaaacggaagcggcgctag

SEQ ID NO: 209024 - DNA, 2718 bp, synthetic construct
  misc_feature 1..2718: note = Description of Artificial Sequence: Synthetic coding sequence
  source 1..2718: mol_type = other DNA
atggagggcgagagcagccggttcgagatccacacccccgtgagcgacaaaaagaagaagaagtgttcaatacataaggaacgtccccagaagcacagccacgaaatttttagagattcttcactcgttaatgagcagtctcagatcactcgcaggaagaaacgtaaaaaggactttcagcatttaatttcttcgcccctgaaaaagagccggatttgcgatgaaaccgccaacgcgaccagcactcttaagaagcgtaagaagagaaggtacagcgctcttgaggtcgacgaggaggccggagtgacagtggttctggtggacaaagagaacatcaataacactcctaagcactttcgaaaggatgtggacgttgtgtgcgtggacatgtctatcgagcaaaagctcccgagaaagccaaaaacagacaagttccaggtcctcgcaaagtcacatgcacataagtctgaggccctgcatagtaaggtacgagagaagaaaaacaagaagcatcagcggaaagcggcctcatgggagtctcagagagccagggatactttgccacagtctgagtcccatcaggaggaatcgtggctgtcggtgggacctggcggcgagattactgaactccctgccagcgctcacaagaacaaaagcaaaaaaaagaagaagaaatccagtaacagggaatacgagactctggccatgcctgaaggaagccaagctggccgtgaggccggcacagatatgcaggagagtcagcctacagtggggttagatgacgagacaccccagctcctcggccccacccacaagaagaaaagcaagaagaaaaagaagaagaagagcaaccatcaagagttcgaagctctcgctatgcctgagggctctcaagtgggatccgaagtgggcgcggatatgcaagaaagccgacccgcagtggggctccatggcgagacggcaggcatccccgcacctgcttacaaaaataaaagcaagaagaagaagaaaaagagcaatcaccaggaatttgaggccgtggctatgcctgaatcacttgagagtgcataccctgaaggcagccaggtaggcagcgaggtcggaacagtggaaggcagcaccgcccttaaaggctttaaggagtctaattccactaagaaaaaatctaaaaagcgcaaactgacctctgtaaaaagagcccgtgtcagtggtgacgatttttccgtgccgtcaaagaattcagagtccacactcttcgatagtgtggagggggatggagcaatgatggaggagggcgtgaaatccaggcctcgccaaaaaaagacacaggcttgtctagccagcaaacatgtgcaggaggccccacggcttgagccggctaacgaagaacataatgtggagactgccgaggacagcgaaatcaggtatctaagtgcggatagcggcgatgctgatgactctgatgcagaccttggaagcgcagtcaaacaacttcaggagttcataccaaatattaaggatagggcaacctccactattaagagaatgtatagggacgatctggagcgtttcaaggagtttaaggcacaaggggttgccattaagtttgggaaattctcagtcaaagaaaataagcagctcgaaaaaaacgtggaggatttcttggcgctaacaggaattgaaagcgccgacaaactgctctatactgataggtacccagaagagaaatcagtaatcaccaatcttaagagacggtactcttttcgactacatatcgggagaaatatcgcaaggccatggaaattaatttattaccgggccaagaagatgtttgacgtgaataactataagggtaggtactccgagggcgacacagagaaactcaagatgtaccactctttgctgggcaacgactggaagactatcggcgaaatggtggctagaagcagtctgtccgtagctctcaagttcagccaaatcagttctcaaagaaatcggggtgcctggtcaaaaagcgagactcgcaaattgattaaggccgtagaggaggttatattgaagaagatgtctccccaagagcttaaggaggtcgactcaaaactgcaggagaaccccgaatcatgcctttccatcgtgcgggagaagctgtataagggtatatcttgggtagaggtggaagctaaggtgcagacacgtaactggatgcagtgtaaatctaaatggacagaaattctcaccaaaaggatgaccaatggcagaagaatctattatggtatgaatgcactgcgcgcgaaggtaagcctgatcgagcgactgtacgagatcaatgtcgaagataccaatgagatcgattgggaagacctggcttcggctattggtgacgttccccctagttacgttcaaaccaaattcagcaggcttaaggcagtatatgtgccattctggcagaagaaaacgttccctgagatcatcgactatctatatgagactacgctaccattattaaaggagaaactggagaaaatgatggagaagaagggtactaaaatacaaactcccgcagctcccaagcaggtgtttccgttcagagacatcttttattacgaagacgatagcgagggtgaggacatcgagaaggaaagtgaaggccaagccccttgtatggcccacgcttgtaactcatcaactttggggggacaggggcgatggataatttag

SEQ ID NO: 209025 - DNA, 3489 bp, synthetic construct
  misc_feature 1..3489: note = Description of Artificial Sequence: Synthetic coding sequence
  source 1..3489: mol_type = other DNA
atggaggaggtgcggtgccccgagcacggcaccttctgcttcctgaaaaccggggtccgggacggacccaataaaggaaaatcattctacgtgtgtcgtgctgatacttgctcattcgtcagggctaccgatattcccgtttcccattgcctgctgcacgaggacttcgtggtcgagttgcagggcctgctgttacctcaagataaaaaggagtatcggctgttctttcgctgtattcgcagtaaagccgaagggaaaaggtggtgcggctctataccgtggcaagaccctgattccaaggagcatagtgtgagtaataaatcccagcacgcttctgaaacgtttcatcactcttctaactggctgcggaacccattcaaagtgctggataagaaccaggaaccagcactctggaagcagttaatcaagggggagggcgaggaaaaaaaagcagacaagaaacagagggagaaaggcgatcaactgttcgaccagaaaaaagaacagaagcccgaaatgatggaaaaggacctatcatccggcctggtgcccaaaaaaaagcagtcagtcgttcaagaaaagaaacaggaagaaggggctgaaatccagtgtgaggctgaaaccggcggcacacacaagcgggatttctcagaaatcaagtcacagcagtgtcaggggaatgagctgacacgaccatcagcatcttcacaggagaagtcatccgggaaaagccaggacgtgcagcgtgaaagcgagcccctgagagagaaagtcacacagctgttgccccagaatgtacattcgcacaattcaatatctaagcctcaaaagggcggccctttgaacaaagagtacacgaattgggaggcaaaggagacaaaggctaaggacggaccttctattcaagctacacagaaatccctgcctcagggacatttccaggagcgtccggagacccacagcgtgccagcccccggaggtccagcagcccaggcagccccagctgccccaggcttgagtcttggggaagggcgagaggccgccacttcgagtgacgatgaggaggaagatgatgttgttttcgtgtccagtaaaccaggctctccgctcctgtttgacagcacactagatctggagacgaaggagaacctgcagtttcctgatcggtctgtgcagcggaaggtgtcacccgcttcaggcgtgtccaagaaggtggaaccatccgatcctgtcgctcgaagggtttacttgacaacacagctgaaacaaaagaagagtacactcgcgtcagtgaacattcaggctttgccagacaagggacaaaaactgattaagcaaatccaagagctggaagaagttttgtctgggctgactctctctcctgagcagggcacaaacgaaaaatccaatagtcaagtgccccaacagagtcacttcaccaaaacgaccaccggccccccccatctcgtgcctcctcagccactcccgcggcgcggcactcagcccgttggttccctggaattgaaatctgcctgtcaggtcacagcaggtggatcgtcccaatgttatcgtggccacaccaaccaggaccacgtccacgctgtttggaaaattacatcagaggccattggacagctgcaccgctccttggaatcgtgtccaggtgagacggtggtggccgaagatcctgcaggactgaaagttcctcttttactgcaccagaagcaggctctcgcctggcttttatggagggagtctcagaagccccagggtggcattctggcagatgatatgggtctcggcaaaacactgacaatgatagccctgattcttactcagaagaaccaagagaagaaagaggagaaagagaaaagcacagcactgacttggctaagcaaagacgatagctgcgacttcactagtcacggtaccttgataatctgtccagcgtctctgatccaccactggaagaatgaggtggaaaaaagggtgaatagtaacaaactccgagtgtacctttatcacgggccaaaccgggactccagagctagagtgctgtccacttatgatatcgtgattacaacatacagcctggtcgcaaaggaaattcctacaaataagcaagaagccgagattccgggagcaaaccttaatgtcgagggcacgagtacacccctgttgcgtatagcttgggccaggatcattctggatgaggcccacaacgtgaagaacccacgcgtgcaaacgagtatagctgtgtgtaaactccaggcttgcgcacgatgggctgtgaccggaacccctattcaaaacaacctgctcgacatgtattcccttctgaagtttctccgctgctccccctttgacgaatttaacctgtggcggtctcaggtggacaacggtagtaaaaaggggggcgagaggctttcaattctgactaaatctctcttactgagaaggacgaaagaccagctggattcgacaggcaggcctctggttattctgccccaacgcaaatttcagctccatcatttgaaactctcggaggacgaggagacggtgtacaacgtgttttttgcacggtcccgctccgctttgcaaagctacctcaaaaggcacgagtcccggggtaaccagagcggcaggagccctaacaatcctttctctcgggtagccctggagtttggctcggaggagcctaggcacagtgaagcagccgattccccccgtagctctacagttcacatccttagccagctgctcagactgcgccagtgttgttgtcatctcagcttgcttaaatcagccctcgatcccatggagctcaagggagagggcctcgtgctttccctggaagaacagctgtccgccctgacactgagcgaattacgggactcagagccatcttcgaccgtgtcactaaacggcaccttctttaagatggaactcttcgaaggcatgcgtgaatcaactaagatctcaagtctactggccgagctcgaggctattcagaggaattcagcatcgcagaaatctgtcattgtgagccagtggacaaacatgctgaaggttgtggcacttcaccttaaaaaacacggtctgacctacgcaactatcgacggcagtgtgaatcccaagcagagaatggatctagttgaggcatttaatcactccagaggaccacaagtcatgctcatcagcctgctcgctggcggcgtggggctgaacctgacgggcgggaaccacttgttcctgctcgatatgcattggaatcctagcctggaagaccaggcctgcgataggatttaccgggtcgggcagcagaaagatgtcgtaattcaccgctttgtctgtgagggcactgtggaggaaaagatcttacaattacaggagaaaaagaaagacctggctaaacaggtccttagcggttctggcgagagcgtgactaagttaaccttagcagacttgagagtgctgttcggtatctag

SEQ ID NO: 209026 - DNA, 432 bp, synthetic construct
  misc_feature 1..432: note = Description of Artificial Sequence: Synthetic coding sequence
  source 1..432: mol_type = other DNA
aacatgctgaaggtggtggccctgcacctgaagaagcacggcctgacttatgccactatcgacgggagcgtgaaccccaagcagagaatggacctcgtcgaagctttcaatcacagcagaggccctcaggtgatgctcatcagtctgctggcagggggcgtggggctgaatctgacggggggcaaccacctcttcttgttggacatgcattggaacccctccctagaggaccaggcgtgtgacaggatatatcgtgttggacagcagaaagatgtggtgattcatcgttttgtctgcgaggggactgtggaggagaagatactgcaactgcaagagaagaaaaaagacctcgcaaaacaagttctgtctggttcgggcgagagtgtgactaagttgacacttgctgacctaagggttctatttggtatttag

SEQ ID NO: 209027 - DNA, 1263 bp, synthetic construct
  misc_feature 1..1263: note = Description of Artificial Sequence: Synthetic coding sequence
  source 1..1263: mol_type = other DNA
atggccgagctgggcaagaagtactgcgtgtactgcctggccgaggtgtcacctctgcgcttcaggtgtacagagtgtcaggacatcgagctgtgcccagaatgttttagcgcaggagccgagatcggacatcatcgtcggtatcacgggtaccagctggtggacgggggcaggttcacactgtggggaccagaagctgagggaggctggaccagccgagaggagcagttacttctggatgcaatcgagcagttcgggttcgggaattgggaggacatggccgcacatgtaggcgcttcccgaacgccccaggaagttatggagcactatgtttcaatgtatatacatggcaatctcggcaaggcatgtatcccggacacaatcccaaatcgggtcactgatcatacctgccccagcggcggcccgctgagtcccagtttaaccacaccactgccccctctcgacatatccgtggccgagcagcagcagctgggctacatgcctctgcgcgatgactatgaaattgaatacgatcaggatgccgagaccctaattagtggtctgtcagtgaactacgatgacgacgatgtggagatcgagctcaagagggctcatgtggacatgtacgttcgtaagttaaaagagaggcagcgcaggaagaatattgcccgtgactacaacttggtcccagcctttctgggaaaagacaaaaaagagaaggagaaggctcttaaaaggaagataaccaaggaagagaaagagcttagactcaagttacgcccgttgtaccagtttatgtcctgtaaggaattcgatgacttatttgagaacatgcacaaggagaaaatgctcagagcgaagattcgcgagctgcaacgctatcgtcgcaatggtatcaccaagatggaagaatccgccgagtacgaggcagccagacataaaagagaaaagcgtaaggagaataaaaatttggccggctcaaagcggggaaaggaggacggaaaggactccgagttcgcagcaatagaaaatctgcctggtttcgagctcctgagcgatagagaaaaggtcctctgctcctctcttaatctcagccccgcccgttatgtgaccgtcaaaaccattatcatcaaagaccatctgcagaagcgacagggcatcccttccaagtcgcggctgccctcttatctggataaggtcttgaagaaacggatattgaacttcctaaccgaatccggctggatctcccgcgacgcatcctag

SEQ ID NO: 209028 - DNA, 366 bp, synthetic construct
  misc_feature 1..366: note = Description of Artificial Sequence: Synthetic coding sequence
  source 1..366: mol_type = other DNA
atggccgcccacgtgggcgccagccggaccccccaggaggtgatggagcactacgtcagcatgtatatccatggaaatctgggtaaggcctgcatcccagatactattccaaatagggtgactgatcatacatgcccatccggaggcccactgtctccaagcttaaccacacccctaccacctctcgacatctctgtggctgaacagcagcagctcggatacatgcccctccgggacgactacgagattgagtacgaccaagacgcagaaacattgatatctggcctcagtgtgaattatgacgatgacgatgtagagatagaattgaagagagctcacgttgatatgtatgtcaggaaactgtag

SEQ ID NO: 209029 - DNA, 390 bp, synthetic construct
  misc_feature 1..390: note = Description of Artificial Sequence: Synthetic coding sequence
  source 1..390: mol_type = other DNA
atggccgcccacgtgggcgccagccggaccccccaggaggtgatggagcactacgtgtcaatgtatattcatgggaacttgggaaaagcatgcattcccgataccatccccaatagggtgaccgaccatacatgcccgtcaggtggccccctcagcccttcactgacgacccctctgccccctctggacatctcagtggccgagcagcagcagctgggctatatgcctttgagggacgattacgaaatagagtatgaccaggacgctgaaacgctgatctccggtctcagcgtgaattacgacgacgatgacgtggagattgagctgaaaagagcacacgtggatatgtatgttcggaagctgaaagagaggcaacgacggaagaactag

SEQ ID NO: 209030 - DNA, 1038 bp, synthetic construct
  misc_feature 1..1038: note = Description of Artificial Sequence: Synthetic coding sequence
  source 1..1038: mol_type = other DNA
atggccgagctgggcaagaagtactgcgtgtactgcctggccgaggaagatatggctgcccatgtgggagctagccggacccctcaggaggtgatggagcactacgtaagcatgtacatacatggtaacctagggaaagcctgcatccctgataccattccaaatagggttactgatcatacttgtccatccggagggccactgagtccctctctgactacgccgctgccccccctcgacatctctgtcgctgagcaacaacagctgggctacatgcctctccgggacgattacgagatcgagtacgaccaggatgcagaaactttaatttctggcctttcagtgaattatgacgacgatgacgtggaaattgagttgaagcgagcacatgtggacatgtacgtgcggaaattgaaggagcggcagagacgaaagaacatcgcacgcgattataatctggtccccgccttcctaggcaaggataaaaaagaaaaggaaaaagcgttgaagcggaaaataacaaaggaagaaaaagagttaagacttaaactgcgacccctgtaccagttcatgtcttgcaaggagtttgatgaccttttcgagaatatgcacaaagaaaagatgctccgagcaaaaatccgcgaattgcagcgctaccggagaaatgggataactaaaatggaggaaagcgcagaatacgaggctgcacgccacaaacgggagaagcgtaaagaaaacaagaaccttgcgggttccaaacgcggcaaggaggacgggaaggactccgaatttgcagctattgaaaacctgccggggttcgagctgctgagcgacagagaaaaggtgctgtgctccagcctcaatttatctcccgcacggtatgtcactgtgaagacaatcataatcaaagatcacctccagaaaaggcaagggatcccctctaagtcccgacttcccagctatctggacaaggttctgaaaaaaagaatactgaactttttaacggagtccggatggatttcacgtgatgcctcttag

SEQ ID NO: 209031 - DNA, 987 bp, synthetic construct
  misc_feature 1..987: note = Description of Artificial Sequence: Synthetic coding sequence
  source 1..987: mol_type = other DNA
atggccgcccacgtgggcgccagccggaccccccaggaggtgatggagcattacgttagtatgtacatccatggcaacctggggaaggcttgcatccctgacacaattcctaaccgcgtgaccgatcacacctgtccctcggggggccccctgagtccgtctcttactacaccccttccccccctggacattagcgtagccgagcagcagcagcttggctacatgcctttaagggatgactatgagatagaatacgatcaggatgccgaaaccctcatctcagggctcagcgtcaattacgatgacgatgacgttgaaatcgagctgaaacgcgcacatgtggacatgtacgtgaggaagctgaaggagcgccagcgccggaagaatatcgcgcgggactacaatctagtcccagcctttctgggcaaggataaaaaggaaaaagagaaagctttgaaaagaaaaataactaaggaagagaaggagctacgcctcaagctccggcccctttatcagttcatgagctgtaaggagtttgacgacctgttcgaaaacatgcacaaggaaaagatgctcagagctaaaatacgcgagctgcagaggtatcgacgcaatggcataacaaagatggaggagagcgcagagtacgaagccgccaggcacaaacgagaaaaacggaaggaaaataagaatctcgcagggtcgaaaaggggcaaagaggatgggaaggatagcgagttcgcggctatagaaaaccttccaggatttgagctgttgagtgatagggagaaagtgctgtgctcgtctctgaacctgtctcccgcgcgctacgtgacggtgaaaacaatcattataaaagaccacctacagaaacgtcagggaataccatctaaaagcaggctcccatcctacttagataaggtcctgaagaaacgcatcctgaatttccttacagaatctggatggatttctagggacgcgtcttag

SEQ ID NO: 209032 - DNA, 1299 bp, synthetic construct
  misc_feature 1..1299: note = Description of Artificial Sequence: Synthetic coding sequence
  source 1..1299: mol_type = other DNA
atgagcgagctgaaggactgccccctgcagttccacgacttcaagtctgtggaccatttaaaagtgtgcccgaggtataccgccgtcttggcaagaagtgaagatgatggaatcggaatagaagaactggacaccttacagctggagctggagacacttctgtcatctgcatcccgtcggctgcgagtcctggaggccgagacccagatcctgaccgattggcaggataaaaaaggggatcggcgcttcttaaagttaggaagggatcatgagctgggggctcccccgaagcatggtaaacccaagaagcagaaacttgagggcaaagcaggccacggtccaggcccgggccccggcaggcctaaatcaaaaaatcttcagcctaagattcaggaatatgaattcacggacgatccgattgacgtgccgagaattcccaagaacgatgcccccaacaggttttgggcttccgtggagccctattgcgcagatataaccagcgaagaagtgagaaccttggaggagctgctgaaaccaccagaggatgaagccgaacactataaaatccctcccctaggcaagcactactctcagcgatgggcccaggaggacttgttagaggagcagaaagatggggctcgagccgcagccgttgctgacaagaaaaaaggcttaatgggacctctaaccgaactggacaccaaagacgtggacgctctcctgaagaagtcagaggcccagcatgagcagcctgaggatgggtgtcccttcggagctttgacccagagactgcttcaagccctggtggaagagaacattatttccccaatggaggattctccgattccggatatgtcgggtaaggagagtggcgctgatggggcctccactagtccccgtaaccagaacaagccctttagtgttcctcatacgaagagtttggagagtagaattaaggaagagttgatcgcacagggcctgcttgagagcgaggatcgccccgctgaggatagtgaggatgaggtcctcgccgagctccggaagagacaggcagaactgaaagcccttagcgctcacaacaggaccaaaaagcacgacttactacgcctcgccaaagaagaagtgtctaggcaggagttgcgtcagcgggttcggatggcagacaacgaagtgatggatgccttcaggaagattatggccgcccgccagaagaaacgaactcctacaaagaaggaaaaggaccaagcatggaagactttgaaagagcgagaaagtatacttaaactcctggacgggtag

SEQ ID NO: 209033 - DNA, 1110 bp, synthetic construct
  misc_feature 1..1110: note = Description of Artificial Sequence: Synthetic coding sequence
  source 1..1110: mol_type = other DNA
atgagcgagctgaaggactgccccctgcagttccacgacttcaagtctgtggaccacttaaaagtctgcccccgttacacagccgtcctcgcacggtccgaagacgacggcatcgggattgaggagctcgacactttgcagcttgaacttgagacgttgctgtcctcagcctctcgacgcctgcgggttcttgaggcggagactcagatcctaaccgattggcaggacaaaaaaggggatcgccgatttctgaagctcggtcgtgatcacgaactaggggctcccccaaagcatggtaaaccgaagaagcagaagctagagggaaaagccggtcacggccccgggcctggccctggaagacctaaatccaaaaatctccagcccaagatacaggagtacgagttcactgacgatcctattgatgtgcctcggattcccaagaatgatgctcccaacagattttgggcctccgtcgagccctactgcgcggatattacatctgaagaggtgcgcacactggaggagctgctcaagccgcctgaagatgaggcagaacactacaagatcccgcccctcggaaaacactactctcagcggtgggcccaagaagatttactggaggaacagaaggatggggcgagggcagctgctgtcgccgataagaagaaaggtctgatggggccgctgacagagctagacaccaaggacgtggacgcactgctcaaaaaatccgaggcgcaacatgagcaaccagaggacggatgtccgtttggcgctctgactcaacgtttgctacaagcattggtagaggagaatattatctcacccatggaggattcccctatccctgacatgtctggtaaagaatctggtgccgatggtgcaagtaccagtccccggaaccagaacaagccgttctctgtcccccatactaagtcactcgagtcaaggattaaggaggagctcatagcccagggcctactggaatcggaggacagaccagcggaggattcagaggacgaggttctggcagagctacgaaagcgccaggccgaactcaaggctctgtctgcacacaaccgcacaaagaagcacgacctgttaagatag

SEQ ID NO: 209034 - DNA, 288 bp, synthetic construct
  misc_feature 1..288: note = Description of Artificial Sequence: Synthetic coding sequence
  source 1..288: mol_type = other DNA
atgagcgagctgaaggactgccccctgcagttccacgacttcaagagcgtggatcacctgaaagtctgcccacgctacacagcagtcctggccagaagtgaggacgacggcattggaatcgaggaacttgataccttacaactagagctcgagacacttctgagctcagcaagccgccgcctccgagttctggaggctgagacacagatcttaacggattggcaggataagaaaggcgatcggaggtttttaaaacttggacgagatcacgaactcggtgccccgtag

SEQ ID NO: 209035 - DNA, 1299 bp, synthetic construct
  misc_feature 1..1299: note = Description of Artificial Sequence: Synthetic coding sequence
  source 1..1299: mol_type = other DNA
atgagcgagctgaaggactgccccctgcagttccacgacttcaagtccgtagaccacctcaaagtatgtccgcgctacaccgcggttctagcccgtagtgaagatgacggcatcgggatcgaggagctggacacgctgcagctcgagctggaaactctacttagcagcgcatccaggcggctgcgggtgctagaggccgaaacacagatcctgaccgattggcaggacaagaaaggagaccgcagatttctgaaactgggccgcgaccacgagctgggagccccgcccaaacatggtaagcctaagaaacagaagctcgaaggcaaggccggtcacgggcccgggcccgggccgggacggcccaagagcaagaacttgcagcctaaaattcaagagtacgagtttacagatgatcccattgacgtgcctcgaatcccgaaaaatgatgctccaaatcggttttgggcgtcagtggagccctactgtgctgatataacctctgaggaggtccgaacattggaagaactgctgaagccccccgaggacgaagctgagcattacaagattcctccattgggaaaacattactcacagaggtgggcacaggaagatctgcttgaagagcagaaagacggggcaagagccgccgccgttgcagataaaaagaaaggactgatgggaccactgacggaactcgacactaaggatgtggacgctcttttgaagaagtctgaggctcagcacgaacaaccagaagatggttgccctttcggggctctgacccagaggctgctccaggccctggtcgaggaaaatatcatttctcccatggaggattctcctatcccggatatgtcaggaaaagaaagcggcgctgatggagcctctacctcccctagaaatcagaacaaaccattctccgtgcctcatactaaaagtctcgagagtcggattaaggaggagctgattgcacaaggactgttggaaagcgaagaccgtcctgccgaggatagcgaggatgaggtgctggccgagctgagaaagaggcaagccgaactgaaggctctatccgcacataaccgcacaaagaaacacgacctgctcaggctggcgaaagaagaggtctccaggcaggagctgcggcagcgcgtgcgcatggcggacaacgaagtgatggacgccttccgcaaaataatggctgctcgccagaaaaagagaaccccaaccaagaaagagaaagaccaggcctggaagacccttaaggagagagaaagtattctcaagctgctggacggatag

SEQ ID NO: 209036 - DNA, 1038 bp, synthetic construct
  misc_feature 1..1038: note = Description of Artificial Sequence: Synthetic coding sequence
  source 1..1038: mol_type = other DNA
atgcagctggagatccaggtggccctgaacttcatcatcagctacctttacaataagctgcctcgaaggagggtgaacatctttggcgaggaattagaacgattgctcaagaagaagtatgaggggcattggtatcctgaaaaaccatataaaggcagtggatttcggtgcattcacattggcgaaaaggtggatcccgtaattgagcaggcatccaaagaatccgggcttgatatcgatgacgtgcggggaaatcttccccaagacttgtctgtctggatagacccgtttgaagtgtcttaccagatcggggagaaaggcccagtgaaggtgttatacgtggacgacaacaacgagaatggttgtgagctagataaggaaattaaaaacagcttcaatccggaggcccaggtctttatgcccatctctgaccctgcttcctccgtgtcctctagtccttcaccaccttttggacacagcgccgcagtgagtccaacttttatgcctagaagtacacagcctctgacctttacaacggcaacattcgcggccaccaagtttggctcaactaaaatgaagaactccggtcggtccaacaaggtcgcacgaacttctcctatcaatcttgggttgaatgtgaatgacctgcttaaacagaaggctattagttcatccatgcactctctctacggcctaggcctgggctcacagcaacagcctcagcagcagcagcagccggctcaaccacctccacccccaccaccccctcagcaacagcagcagcagaagacgtcggctctgtcaccgaatgccaaagagttcatcttcccaaatatgcagggacaggggtctagcactaacgggatgttccctggagattctcccctgaacctgagccccctgcagtacagcaacgcttttgacgtctttgctgcctatggcggcctgaatgaaaagagtttcgtcgatggactgaatttctccttaaataatatgcagtatagtaatcagcagtttcagccagtgatggcaaactag

SEQ ID NO: 209037 - DNA, 1038 bp, synthetic construct
  misc_feature 1..1038: note = Description of Artificial Sequence: Synthetic coding sequence
  source 1..1038: mol_type = other DNA
atgcagctggagatccaggtggccctgaacttcatcatcagctacctttataacaaactgccacgaagacgcgtgaacatcttcggagaggaattagagcggctgctcaagaagaaatacgaaggccactggtacccagagaaaccttacaagggcagtgggtttaggtgtattcatatcggggagaaagtcgatcccgttattgagcaggcctctaaggagtcaggacttgacattgacgatgtgcgaggaaatctgccccaagatctctccgtctggatagacccttttgaagtgtcataccagatcggcgaaaaaggaccagtcaaagttctttatgtcgacgataacaatgagaacggctgtgagttagacaaggagattaagaacagcttcaacccagaagcccaggtgttcatgcctatttcggaccctgccagtagtgtgagttctagccctagccctcctttcggccacagtgccgccgtgtcacctacgttcatgccaaggtcaactcagcccctgaccttcaccaccgctacattcgctgccaccaagttcgggagcacgaaaatgaagaactctgggcgctctaataaggttgcgagaacctctcccatcaaccttggattgaatgtcaatgatctgcttaaacagaaggccatatcttcaagcatgcacagcctctatgggctgggtctgggatcccaacaacaaccccaacagcagcagcagcccgcgcagcctcctcctcctcccccaccaccacagcagcagcagcaacagaagacttccgctctgagcccaaatgcaaaagagtttatcttccccaacatgcagggccaaggttcctcaaccaacggaatgttccctggcgactcccctctcaatctgtcaccactgcaatactccaacgcgttcgacgtctttgctgcctacggcggactcaatgagaaaagctttgtggacggcctcaatttttctctcaataacatgcagtattccaatcagcagtttcaaccagtgatggcaaactag

SEQ ID NO: 209038 - DNA, 1035 bp, synthetic construct
  misc_feature 1..1035: note = Description of Artificial Sequence: Synthetic coding sequence
  source 1..1035: mol_type = other DNA
atgcagctggagatcaaggtggccctgaacttcatcatcagctacctgtacaataaactcccgagacgcagggctgacttatttggcgaagagctagagcgcttgctgaaaaagaagtacgagggacactggtatccagagaagccactgaagggaagcggctttcgctgtgttcacatcggtgagatggttgatcccgtagtcgagctggccgctaaacgctccggtctcgccgttgaggatgtgcgcgctaatgtccctgaggaactgagtgtctggattgatccgttcgaagttagctaccaaataggggagaaaggagccgtgaaggttctgtacctggacgattccgaaggctgcggtgctcctgagctcgacaaggaaataaagagttcattcaacccggatgcccaggtatttgtgccaatcggctctcaggatagcagcctgagtaacagcccttctcccagcttcggccagagcccatcccccactttcatcccacgctctgcacagcccattactttcactacagcctcctttgctgccaccaaattcgggagcactaagatgaaaaaaggaggcggggcagcctcgggggggggtgtggcctcctcaggggctggcggccagcagccaccacagcagccgagaatggctcggagtcccacaaactcactgcttaagcacaaatcactgagtctttccatgcactccctcaactttatcaccgccaaccccgcacctcagagtcagctgagccctaatgccaaagaattcgtatacaatggcggaggctcacccagcttgtttttcgacgcagcagatggccagggaagtgggacaccaggtccattcggtggttcaggagccggtacatgcaacagctcaagctttgacatggctcaggtcttcggagggggggcaaatagcctgtttctggagaagacacccttcgtagagggcctctcctacaacttgaacacaatgcaatatccttcgcaacagttccagccagtggtattagctaactag

SEQ ID NO: 209039 - DNA, 306 bp, synthetic construct
  misc_feature 1..306: note = Description of Artificial Sequence: Synthetic coding sequence
  source 1..306: mol_type = other DNA
atgcagctggagatcaaggtggccctgaacttcatcatcagctacctgtacaataagctgcctagaaggagggcggatctgtttggtgaggaattggaaaggctgctgaagaagaaatatgagggacattggtacccagaaaagcccttaaaaggttctggctttagatgcgtccatatcggggagatggtggatccagtggttgagctcgccgcaaagcgatcaggactggccgtggaagacgtgagggctaatgtgcccgaagagctctctgtctggatcgatccctttgaggtgagttattag

SEQ ID NO: 209040 - DNA, 1569 bp, synthetic construct
  misc_feature 1..1569: note = Description of Artificial Sequence: Synthetic coding sequence
  source 1..1569: mol_type = other DNA
atgagcatcaccagcgacgaggtgaacttcctggtgtaccggtacctccaggaaagcgggtttagccatagcgccttcactttcgggatcgaatcacacataagccagtcaaacatcaacgggactttggtgccccctagcgcactgatcagcatattgcagaagggtctccagtatgttgaagctgaaatctcgattaataaggatgggacagtatttgactctcgaccaatagagagtctctctctcatcgtcgccgttatacctgacgtggttcagatgcggcaacaggcctttggtgagaaactgacacagcagcaggcatctgctgccgccacagaagcttccgcgatggccaaggctgctacaatgactccagctgccattagtcaacagaatcctcccaaaaaccgagaagccaccgtcaacggggaggagaacggcgcccatgagattaataatcactctaaacccatggagatcgatggcgacgtggagatcccgccaaataaggcaactgttctgcgcgggcatgagagtgaggtctttatttgcgcatggaaccctgtgtctgatctgctcgctagtggatcaggcgattccacggcccggatctggaatctgaatgagaactccaacggcggctcgacccaacttgtcctcagacactgtatccgcgaaggtggtcatgatgtgccttcaaataaagatgtgacatctctggattggaactctgacggcacgctgctggcgatgggctcatacgacggatttgcccggatttggactgaaaacggaaatctcgctagtacgctgggtcagcataaaggcccaatattcgccctgaaatggaacaagaagggaaattacgtgctgtccgctggagtggataaaacaacgattatatgggatgcccataccggtgaggcaaaacagcaatttccattccattcagcaccagctctagatgtcgactggcagaataacatgacgttcgcaagttgcagcacagacatgtgtattcacgtgtgccgacttggctgcgaccacccggtcaaaaccttccaggggcataccaacgaggttaatgccataaaatgggatcccagtggtatgctgctggccagctgcagcgatgatatgacgcttaaaatttggtcgatgaagcaggacgcatgtgtgcatgacttgcaggcacactctaaagaaatctacaccatcaagtggtcccctactggtccagcaacctccaaccctaacagcagcatcatgcttgcatccgcgtcttttgattccaccgtgcggctttgggatgtggaacagggggtctgtacacacaccttgatgaagcatcaggaaccagtttacagcgtggcatttagccctgacggaaagtacttagcttcaggctcttttgacaagtacgttcacatatggaatacccagagtggttccctcgttcattcatatcagggcactgggggcatcttcgaggtctgctggaacgccagaggtgacaaggtgggggcctcggcatctgacggatctgtgtgtgttctggatttgtag

SEQ ID NO: 209041 - DNA, 1569 bp, synthetic construct
  misc_feature 1..1569: note = Description of Artificial Sequence: Synthetic coding sequence
  source 1..1569: mol_type = other DNA
atgagcatcaccagcgacgaggtgaacttcctggtgtaccggtaccttcaagagagtggcttcagccactccgctttcacttttgggatcgaaagccatatttcacaatccaacattaatggcactctagttcccccctcagctctgattagcattctgcagaagggattacaatatgttgaggctgagattagcatcaacaaagacggcactgtgtttgatagtcgacccatcgagtcgttgagcctgattgtggctgtgatacccgatgtcgtccagatgaggcaacaggcatttggggagaaactgacccagcaacaggctagcgcagcggccactgaggccagtgcgatggctaaggccgctacaatgacccctgccgcgatatcgcagcagaatcctccgaagaacagagaagccacagtcaacggagaggaaaatggggctcacgaaatcaataaccactccaaacctatggaaatcgacggggatgtcgagatcccccctaacaaagccaccgtcttacggggccacgagtctgaagtgttcatctgcgcctggaacccagtatctgatcttcttgctagtggtagtggcgactctaccgctagaatctggaatctgaatgaaaacagcaacggcggatccactcagctagtcctgcggcactgtatccgcgagggcggccacgacgtgcccagtaataaagacgtcacgagcttggattggaatagcgatggaacgttactcgctatgggctcctacgacggcttcgccagaatctggactgaaaacggcaatctggcctcaaccctgggacaacataaggggcctatatttgcgctaaagtggaataagaaaggcaattatgtcctttccgctggagttgacaagactaccattatttgggatgctcacactggggaggccaagcagcagttcccgttccactctgcgcccgctctggatgttgattggcagaacaacatgacatttgcttcctgcagtaccgacatgtgcatccatgtgtgccggctaggatgcgatcatcctgttaagacgtttcagggacatacgaatgaagttaatgctattaaatgggatcctagcgggatgcttctggcgtcgtgttcagatgacatgaccctgaagatatggtcaatgaagcaagacgcttgcgtccatgaccttcaagcacactccaaggaaatctacacgattaaatggagccccactggccctgccacctctaaccccaacagctccatcatgctggcgagcgccagcttcgactccactgtgcgtctgtgggacgtggaacagggggtgtgcactcacaccctaatgaagcaccaagaaccagtgtatagcgtggcgttcagcccagatggcaagtatctggcctccggttcctttgacaaatacgtccacatttggaatactcaaagcgggtccttagtccattcctaccagggaacagggggtatcttcgaggtatgctggaacgctcgcggcgacaaggtgggcgcaagtgcctccgatggatcagtctgcgtgttggatttatag

SEQ ID NO: 209042 - DNA, 1569 bp, synthetic construct
  misc_feature 1..1569: note = Description of Artificial Sequence: Synthetic coding sequence
  source 1..1569: mol_type = other DNA
atgagcatcaccagcgacgaggtgaacttcctggtgtaccggtaccttcaggaaagcggattctctcattctgcctttactttcggtattgagtcccatatcagccagagtaatatcaatggcacactggttccccccagtgctctgatctcaatactgcagaaaggtcttcagtatgttgaagccgaaatcagcatcaacaaggatggtacggtgttcgactctagacctatcgaaagtctctctctcattgtggccgtgataccggatgttgtccagatgcggcagcaggccttcggcgagaagctgacccagcaacaggcttccgccgcagccactgaagccagtgccatggccaaagccgctacaatgacccctgccgccataagccagcagaaccctcccaagaacagggaggcgactgtcaacggcgaggagaatggcgctcacgagatcaacaatcatagtaaacctatggagatcgacggagacgttgaaatacccccgaataaagcgaccgtgctcagaggacacgaatctgaagtattcatctgcgcatggaatcctgtgagtgacctcctagcctccggaagcggagattccaccgcaaggatctggaaccttaatgagaactcgaatggcggctctacccagctcgtgctgagacattgtattagagaggggggccacgacgtacctagtaataaagatgttacgtcactggattggaacagcgatgggacattgttagcaatgggatcttatgacggatttgctcgcatttggaccgaaaatggcaacctagcttctacacttggacagcataaaggacctatcttcgcactgaagtggaacaagaaagggaactatgtgctgtcggctggagttgacaagactacgattatctgggacgcccatactggcgaggcaaagcagcaattcccctttcactcagcgccagccctggatgtcgactggcagaataacatgacatttgccagctgctcaacggatatgtgcattcatgtgtgtcggctggggtgcgatcatcctgtgaagacatttcagggtcacaccaacgaggtgaatgcaataaaatgggacccctccgggatgctattggcctcatgtagcgatgacatgacactgaagatctggtcaatgaagcaggacgcgtgcgtgcacgacctccaagcccatagtaaggagatttataccatcaagtggtctcctaccggaccagccacctccaatccaaacagcagcataatgctggctagcgcaagcttcgactccacagtgcgtctgtgggatgtagagcagggagtgtgtacacatacattgatgaagcaccaggagcctgtttattctgtggccttttcaccagatggcaaatacctcgcaagcggcagttttgataagtatgtgcatatatggaatactcaatcgggatccctggttcactcttatcaggggacaggcggcatttttgaggtgtgctggaacgctagaggcgacaaagtcggagcaagcgcatcagatggatcagtatgcgtactcgacttgtag

SEQ ID NO: 209043 - DNA, 1095 bp, synthetic construct
  misc_feature 1..1095: note = Description of Artificial Sequence: Synthetic coding sequence
  source 1..1095: mol_type = other DNA
atggagatcgacggcgacgtggagatcccccccaacaaggccaccgtcctccgcgggcacgagagtgaggtgtttatttgcgcatggaaccctgtgagcgatttgctggcatccggatccggcgacagtacagcaagaatctggaaccttaatgagaattccaatggggggtcgacgcagcttgtgctgaggcattgcatcagggaaggggggcatgatgtgccatctaataaggacgtgacctctctggactggaactctgatgggacactgctggccatggggagctacgacggcttcgccagaatctggaccgagaacgggaacctggctagtaccttggggcagcataagggaccaatttttgccttgaaatggaataagaaggggaattatgtgctgagtgctggagtggacaagactacaatcatctgggacgcccacaccggggaggctaaacaacaatttccttttcattccgcccccgctctcgacgtggattggcagaacaatatgaccttcgcttcttgcagtacggacatgtgcattcacgtttgtcgcctgggatgcgatcaccctgtgaagaccttccagggccacaccaatgaggtcaatgcgatcaaatgggatccatcagggatgctcttagcttcatgttctgatgatatgacattgaagatctggtcaatgaaacaagatgcctgtgtgcacgacttgcaggcccactcaaaagaaatctacactattaaatggtcgcccacgggtccggcaacaagtaatcctaattccagcataatgctcgccagtgccagctttgactccaccgtgcgcttgtgggacgtggagcagggggtatgcactcacacgcttatgaagcatcaggagcccgtttactcagttgcattcagtccagacggtaagtatctcgccagtggatcatttgataaatatgtacacatctggaacactcagtcaggttcacttgttcattcctatcagggtaccggggggatttttgaagtgtgctggaacgcccgaggcgacaaagtcggtgcctcagccagcgacggttccgtgtgtgttctggatttatag

SEQ ID NO: 209044 - DNA, 1752 bp, synthetic construct
  misc_feature 1..1752: note = Description of Artificial Sequence: Synthetic coding sequence
  source 1..1752: mol_type = other DNA
atgcccctgcggaagatgaagatccccttcctgctgctgttcttcctctgggaggcagagtctcatgctgcctcgcggcctaatattattctggtgatggctgacgatttgggaattggagatcctggatgctatggaaacaagactattcgcaccccgaacatcgatagattggcctccggcggagtgaagctgactcagcatctcgcagctagccctctttgtacaccttcccgggccgcttttatgacaggccggtacccggttcgatcaggtatggcctcttggtcacggacgggggtgttcttgttcactgcttcttccggtggactgccgaccgacgaaattacgttcgcaaagctgctgaaggatcaaggctatagcacagctctgatcgggaaatggcatcttgggatgagttgccatagtaagactgatttctgccatcatccactgcaccatggattcaattacttctatggaattagtttgaccaatttgagggactgcaagccaggggaagggagcgtgtttacaaccggtttcaagcgattagttttcctgcccctacagatcgtgggtgtgaccctgttgacgttagctgcgctgaactgcctgggattattgcacgtccctctgggcgtctttttcagcctgctgtttctggccgcgctgatcctgacactgttcctgggttttctgcactattttagaccccttaattgcttcatgatgaggaattacgagatcatccagcaaccaatgtcttatgataatctgactcagaggctaacggtcgaggcggcacagtttatccaacggaatactgagaccccattcctgttagtgctgtcttatcttcatgtgcacaccgctctattcagcagcaaggacttcgcaggcaagagtcagcatggggtgtacggagatgcggttgaggagatggactggagcgtcggacagattctgaatctcctcgacgagctgcggcttgcaaatgatacattgatctattttacgtctgatcaaggcgcccacgtggaggaagtaagtagcaaaggggaaatccatggaggatcaaatgggatatataaggggggtaaagcaaacaactgggaggggggaattagggttcccggcattctgcggtggccccgggtgatacaggcaggtcagaagatcgacgagcctaccagcaatatggatatattcccaacggttgctaagcttgctggggccccactcccagaagataggataatcgatggccgcgacttgatgccactcctggaggggaagagtcagcggagcgaccacgagttcctgtttcactactgcaacgcttatctgaacgctgtaagatggcatcctcaaaatagcacgtcgatctggaaagccttcttctttacacctaatttcaatcctgtggggagtaacggctgtttcgctacccacgtgtgcttttgttttgggagctatgttacacaccacgaccctcccctgcttttcgatattagtaaagatcctagggagaggaatccactgacccctgcaagcgagccccgcttctacgagatcctgaaggttatgcaagaagccgctgatcgccacactcagaccttgcccgaagttccggatcagtttagttggaataatttcctttggaaaccgtggctgcagctttgctgccccagcaccggactatcatgtcagtgcgacagagaaaaacaggataagaggctgtcccggtag

SEQ ID NO: 209045 - DNA, 1581 bp, synthetic construct
  misc_feature 1..1581: note = Description of Artificial Sequence: Synthetic coding sequence
  source 1..1581: mol_type = other DNA
atgagcatcaccagcgacgaggtgaacttcctggtgtaccggtaccttcaggagtccgggttcagccattctgcttttacctttggcatcgaatcccatatctcacaaagtaacatcaacggcactttggttcctccagccgcccttatctctattctgcaaaaaggcctacagtatgtggaggccgagatcagcatcaacgaagacgggacagtcttcgacgggagaccgattgagagtctgagcctgatcgacgctgttatgcccgatgtggtccagacaagacaacaggcatttcgggaaaagctcgcccagcagcaggcctctgcagccgccgccgctgctgcggccacagccgcagcaactgcagcgacaacaacttcggccggcgtatcacatcagaaccccagtaagaaccgggaagccaccgttaatggagaagaaaaccgagcacacagtgtgaataatcacgcaaagcctatggagatagatggcgaagttgagatcccctcatcaaaagctactgtactccgcgggcacgaatcggaagtgttcatctgcgcctggaatccagtgtccgatctgttagcgagcgggagcggagactccacggcccggatctggaaccttaacgagaatagcaacgggggctccacccagcttgtactgagacattgcatcagagaggggggccatgatgttccgtctaataaggatgtgactagcctcgattggaatacaaacggcactctcctggcgactggatcttatgacggctttgcccgaatttggactgaggatgggaacctggcttccactctggggcaacataaaggccccatattcgcactcaagtggaatcgcaaggggaattatattctctcagccggcgtggataaaactactattatatgggatgctcatacaggtgaggcaaagcagcagttccctttccattcggccccagctctggacgtagattggcagaataacaccacatttgctagctgcagtacagatatgtgcatacacgtgtgtcgtttgggctgtgaccgccccgttaagacttttcagggtcacacaaatgaagtcaatgctattaagtgggacccctcaggcatgttactggcatcctgctctgatgacatgactctgaagatctggtcaatgaaacaggaagtttgcatccacgatctccaagctcacaacaaggaaatatatacaatcaagtggagtcccaccggtcccgccacttcaaatccgaattcgaacattatgttggcttctgcctcattcgactccaccgtccgattgtgggatatcgaaagaggagtctgcacacacactctgactaagcatcaggaacctgtctattcagtggcattcagcccagacggtaaatacctcgccagcggatcatttgacaagtgcgtccacatttggaatactcagagcgggaacttagttcactcctataggggtaccggtggcatatttgaggtgtgttggaatgctagaggcgataaagtgggcgcttccgcaagcgacggatcagtgtgtgtgctggatttacggaagtag

SEQ ID NO: 209046 - DNA, 1734 bp, synthetic construct
  misc_feature 1..1734: note = Description of Artificial Sequence: Synthetic coding sequence
  source 1..1734: mol_type = other DNA
atgaccgagctggccggcgccagcagcagctgctgccaccggcccgccgggcgcggagccatgcagtctgtcctgcaccatttccaaaggctgagggggcgtgagggaggcagtcattttatcaatacctcatcccctaggggggaggccaaaatgtctataacgtcagatgaggtgaacttcttagtgtacaggtatctgcaagaaagtggtttcagtcactctgctttcacattcggcattgagagccatatttcccagtcaaacatcaatggcacattggtccctccagctgcgcttatttcaattttgcagaagggactgcagtacgtggaagctgagatctcaataaacgaagatggtaccgtcttcgatggccgccctatcgaatcgctgtccctaatcgatgccgtaatgcccgatgtggtccagacacgacagcaggctttcagagagaagcttgctcagcagcaggccagtgctgccgctgccgccgccgctgcaaccgccgctgcaactgccgccactacaacttcagccggcgtgtcccaccagaatccctccaagaatcgcgaggctacggtgaacggagaggagaacagggcccatagcgttaacaatcacgcaaagccaatggagatcgatggggaggtggaaatcccctccagcaaggccaccgtgctcagagggcacgaaagcgaagttttcatctgtgcctggaaccccgtttccgatctcctggcttccgggtctggggatagcacagcccggatttggaatctcaacgaaaatagtaatgggggaagcacacaactcgtgctcaggcactgcatcagggagggaggacacgacgtgccgagcaataaagacgtgactagcctggattggaacacaaacggcacactgctggcgacaggtagctacgatggatttgccaggatttggaccgaagatggcaatcttgcaagtacactcggccaacacaaagggcccatcttcgcgctgaagtggaataggaagggcaactacattctttcagcaggggtggacaagactaccatcatctgggacgcccacactggtgaggccaagcaacaatttccattccactccgctcctgcgctggacgtcgattggcagaacaacacaacctttgcctcctgctccactgatatgtgtattcatgtgtgccgactggggtgcgacagacccgttaaaacgtttcaagggcacacaaatgaagttaacgccattaagtgggatccttcaggaatgctgcttgcgagctgtagtgatgatatgacactcaaaatttggagcatgaagcaggaagtgtgtatccacgacctgcaggcacataataaagaaatatatactataaaatggtcgccgactgggcccgcaacgagcaatcccaactcaaacattatgctcgcctcagcctcatttgactctacagtgcgactctgggacatagagcgaggcgtctgtacccacaccctgactaaacaccaagagccggtatatagcgtggccttcagccctgatggcaaatatctggcatccggctctttcgacaagtgcgtccatatctggaatactcagagcggtaatctggttcattcttatcgaggcacggggggcatcttcgaagtctgctggaacgccagaggtgacaaagttggcgctagcgctagtgatggatccgtgtgcgtgctcgacctgagaaaatag

SEQ ID NO: 209047 - DNA, 228 bp, synthetic construct
  misc_feature 1..228: note = Description of Artificial Sequence: Synthetic coding sequence
  source 1..228: mol_type = other DNA
atgagcatcaccagcgacgaggtgaacttcctggtgtaccggtaccttcaggagtctgggttctctcactcagctttcaccttcgggatcgagtctcacatctcacagagcaacattaacggcacactggtcccgcctgctgcgttgatttcgatcctgcagaaaggcctacagtatgtggaggcagagataagtatcaacgaggatggtaccgtgttcgatggctag

SEQ ID NO: 209048 - DNA, 138 bp, synthetic construct
  misc_feature 1..138: note = Description of Artificial Sequence: Synthetic coding sequence
  source 1..138: mol_type = other DNA
atgagcatcaccagcgacgaggtgaacttcctggtgtaccggtacctgcaagagagcggattttcacactctgctttcacattcggcatcgaatcgcacatcagccagagcaacataaacggaaccctggtcccgtag

SEQ ID NO: 209049 - DNA, 1581 bp, synthetic construct
  misc_feature 1..1581: note = Description of Artificial Sequence: Synthetic coding sequence
  source 1..1581: mol_type = other DNA
atgagcatcaccagcgacgaggtgaacttcctggtgtaccggtacctgcaggaatccgggtttagccacagcgcttttactttcgggatcgaaagccacatctcccagagcaatattaatggaacacttgtcccaccagcagccttgataagcatactgcagaaaggactgcagtacgtggaggcagagattagcatcaacgaggatggtacggtgtttgacggtcgacccatagaaagcttgagtcttatcgatgcggtcatgccggacgtcgtccagactcgtcaacaggcattccgtgagaaattggcacagcagcaggccagtgcggccgctgccgccgctgccgctacagcggctgccactgcagcgacaacaaccagcgctggggtgtcccaccagaatccctcaaaaaatcgggaggccaccgtcaatggcgaagagaaccgggctcactctgttaacaatcatgctaagcccatggaaatcgatggagaggtggaaatccccagctccaaggccacagtgctgcgtgggcacgagagtgaagtgtttatatgtgcatggaatcccgtaagcgatctcttggcatccgggagcggagactctacagcgcgaatctggaatctgaacgagaattccaacggggggtccacacagctggtattacggcattgcatacgggaaggtggacacgatgtgccctctaataaagatgtcactagcttagactggaatactaatggaacactgctggccaccggtagctacgacggctttgcacgcatttggaccgaagacggaaatcttgcttccaccctcgggcagcacaagggtcctatttttgccctgaagtggaataggaagggcaactacattctgtcggcaggcgtggacaagacaacaatcatctgggacgcccatactggcgaagcaaagcagcagtttccatttcacagcgcgccagctttagatgtcgattggcagaacaacaccacattcgctagttgcagcactgacatgtgtatccacgtatgcagattgggatgtgatcgacctgtgaagacttttcagggacatacaaacgaagttaacgccattaagtgggatccatcaggcatgttacttgcatcctgtagtgacgatatgactcttaagatctggagcatgaaacaagaggtctgtatacatgacctgcaagctcacaacaaggagatttacaccattaagtggagccccactggccccgctacttctaatccaaattccaacattatgctcgcttccgcatcatttgactctactgttaggctttgggacatcgaacggggcgtatgcacgcacacgctgaccaaacatcaggagccggtgtatagcgtcgcattctcccccgatggcaaatatctcgctagcggtagctttgacaagtgtgtgcatatttggaatacgcagtccggaaacctggtgcactcttatcggggcaccggtggaatattcgaggtgtgctggaacgcacgcggcgataaggttggggcctcagcctcagacggcagcgtgtgcgttctcgacctccgaaaatag

SEQ ID NO: 209050 - DNA, 180 bp, synthetic construct
  misc_feature 1..180: note = Description of Artificial Sequence: Synthetic coding sequence
  source 1..180: mol_type = other DNA
atgaccgagctggccggcgccagcagcagctgctgccaccggcccgctggtcgcggtgcaatgcagtctgttttacatcatttccaacggctcagagggagggaaggcgggagtcatttcattaacacaagcagcccccgcggcgaagctaaaatgtccattacgtctgacgaggtctag

SEQ ID NO: 209051 - DNA, 243 bp, synthetic construct
  misc_feature 1..243: note = Description of Artificial Sequence: Synthetic coding sequence
  source 1..243: mol_type = other DNA
atgaccgagctggccggcgccagcagcagctgctgccaccggcccgctggccgcggcgctatgcagtccgttctgcaccatttccagcggcttagaggccgggaagggggatcccactttattaatacctccagccctcggggtgaagcaaaaatgtccatcacttcagacgaagtgaacttcttggtgtatcgatacttgcaggagtcaggcttctctcattccgccttcactttcggctag

SEQ ID NO: 209052 - DNA, 1581 bp, synthetic construct
  misc_feature 1..1581: note = Description of Artificial Sequence: Synthetic coding sequence
  source 1..1581: mol_type = other DNA
atgagcatcaccagcgacgaggtgaacttcctggtgtaccggtacctgcaggagtctggctttagccacagcgcttttactttcggaatcgaatcacacatatctcaatcaaatataaatgggaccctggtccccccagccgccctgattagcatcctgcagaagggactccagtatgtcgaagcggaaatctctattaatgaggatggaaccgtgttcgatggcaggcctatcgagagtctctcactgatagacgctgtgatgcccgatgtggtgcaaactaggcagcaagcattcagagagaaactcgcacagcagcaggccagcgccgccgctgccgccgccgctgcaacagctgctgcaacggctgccaccacaacatccgctggcgtttcccatcaaaaccccagtaagaaccgggaagcaacagtcaatggggaggagaatcgcgctcatagcgtgaacaaccacgccaagccaatggaaatcgacggcgaggtggagatcccaagtagcaaggcaaccgtcttgcgagggcacgaatccgaagtgttcatatgtgcttggaacccagtgtctgacctattagcttccggcagcggggattcaactgcacgaatatggaatttaaatgaaaattccaatggagggagcacgcagctggtcctgaggcattgcattcgggaagggggccatgacgtgccatccaataaggacgttacttccttagattggaacacaaacggcacactgctcgctactggatcatatgacggcttcgccaggatttggacagaggatggcaacctggctagcaccctgggacagcacaagggtccgattttcgccctgaaatggaatcgaaaaggcaattatatcctgtcagccggcgttgacaagaccactatcatatgggatgcccatactggggaggcaaaacagcagttccctttccacagcgcccccgcactggacgtcgactggcagaataatactactttcgctagctgttcgactgacatgtgcatacacgtgtgtcgtcttggatgcgaccggcctgtgaagacatttcagggccacaccaatgaggttaatgcaatcaagtgggacccctctggcatgctcctggccagttgctccgatgacatgaccctgaagatctggagtatgaaacaggaggtctgtatccacgacctacaggcccataacaaagagatttacacgataaaatggagcccaactggcccagccactagtaacccaaactcaaacattatgcttgcctccgccagttttgacagtacagtccgcctgtgggatatcgaaaggggagtctgtacgcatacattgactaagcaccaggaacccgtctacagcgtggccttcagccccgatggaaagtatttggccagcgggagcttcgacaagtgcgttcatatctggaatacacagtcaggaaatctcgtgcattcataccgtgggaccggcggaatctttgaggtgtgctggaacgccaggggagacaaggtgggagcatcagcgtcagacgggtctgtatgcgtgctggatcttagaaaatag

SEQ ID NO: 209053 - DNA, 1344 bp, synthetic construct
  misc_feature 1..1344: note = Description of Artificial Sequence: Synthetic coding sequence
  source 1..1344: mol_type = other DNA
atggagctgagccagatgagcgagctgatgggcctgagcgtgctgctgggcctgcttgcacttatggctactgccgcagtcgcacgaggctggctgcgggccggagaggagcgctccggaaggcccgcctgtcagaaagccaacggctttcccccagataagagctcggggtccaaaaagcaaaagcagtaccagagaatccgtaaggaaaagcctcagcagcacaattttactcacaggctgctggctgcagcacttaaatcacattccggtaatatttcctgtatggactttagctcaaatggaaagtacctagccacctgcgctgatgatcgaaccatacgcatatggagcaccaaggactttctgcaacgagagcatagaagcatgagagccaacgttgagctggatcatgcgactctcgtcaggttctccccagactgcagagcttttatagtgtggcttgcgaacggagacaccctgcgcgtgttcaagatgactaagagagaggatggcggctacacctttactgcgactcctgaagactttccaaagaagcacaaggccccagtgatcgacatcggcatcgccaacactggcaaattcatcatgaccgcgtcatccgataccaccgttcttatctggagtctcaaagggcaggtactctcaacaatcaacaccaaccaaatgaacaacactcacgccgccgtctccccatgcggccgtttcgtggcttcctgcgggtttacccccgatgtgaaagtgtgggaagtgtgcttcgggaaaaaaggcgaatttcaggaagtcgtccgcgctttcgaactcaagggtcactctgcagcagtccactcattcgccttttccaacgatagccgaaggatggctagcgtgtctaaagatggtacatggaagctatgggataccgacgttgagtataaaaagaaacaagacccatacctgctgaaaacagggagatttgaagaagccgccggggccgctccctgcaggctcgctctgagcccaaatgcacaggtgcttgccctggccagtggaagttccatccatctgtacaatacccgacgaggcgagaaggaagagtgctttgagcgcgtgcacggagaatgcattgctaatctgtccttcgatatcacaggtagattcctggcctcctgcggagaccgagcagtccggttgttccacaacactcctggtcatagggcgatggttgaggagatgcaaggccacctaaaaagggcctcgaatgaaagtactagacagagactacaacagcagcttacccaggcacaagaaaccctcaagagcttgggcgcccttaaaaagtag

SEQ ID NO: 209054 - DNA, 1341 bp, synthetic construct
  misc_feature 1..1341: note = Description of Artificial Sequence: Synthetic coding sequence
  source 1..1341: mol_type = other DNA
atggagctgagccagatgagcgagctgatgggcctgagcgtgctgctcggtctcctggcacttatggctactgcagccgtcgccagagggtggcttcgggctggtgaagaacgaagtggtaggccagcctgccagaaggccaatgggtttcctccggataagtcaagcgggtccaagaaacagaagcagtaccagagaattcgaaaggagaaacctcagcagcacaacttcacccaccgcttacttgccgcggcactcaagtctcacagcggcaatatcagttgtatggacttttcctcaaatgggaagtatcttgcaacatgcgccgacgatcggacaattcgaatttggagcacaaaggattttcttcagcgcgaacacaggagcatgcgggccaacgtggaacttgatcatgccaccttggtgcgattttccccagactgtagagccttcatagtgtggttggccaacggggatacactgagagtcttcaagatgaccaaaagggaggacggaggctatacgttcactgcaactccggaagatttccctaagaaacataaagctccagtgattgacatagggattgctaacactggcaaatttattatgacggcgagctctgacacaacagtgctgatctggagcctcaaaggccaggtcctaagcactattaacacaaaccagatgaataacacgcatgctgcagtgtctccttgcggaaggttcgttgcctcctgcgggttcacgccagacgtgaaggtctgggaggtttgcttcggcaagaaaggcgagtttcaggaagtcgtgcgcgcattcgaacttaaagggcattctgcggcagtgcactcattcgccttttccaatgacagcagaagaatggcctcagtgagtaaggatggcacctggaagctatgggatacggacgtggaatacaaaaagaaacaggatccgtacctgctaaagacggggaggttcgaggaggctgctggggcagctccctgccggttggctctctctcctaacgcacaggtgttggccctggcctcaggctcttccatccatctgtataatacccgacggggagagaaagaggagtgcttcgaacgggtgcatggtgagtgtatcgcaaacctatcattcgatatcaccgggagatttcttgctagctgcggggacagggcggtgcgcttgttccacaataccccagggcatagggcaatggttgaggagatgcagggacatctgaagcgggcttcaaacgagtccactcgccaacggctgcagcagcagttgacccaggcccaagtgacactgggcggccctggtgcggaagactag

SEQ ID NO: 209055 - DNA, 2427 bp, synthetic construct
  misc_feature 1..2427: note = Description of Artificial Sequence: Synthetic coding sequence
  source 1..2427: mol_type = other DNA
atggccgagaccgccgccggcgtgggccggttcaagaccaactacgcagtggaacggaagatcgaacctttctacaagggcggaaaagcccagctagaccaaactggtcagcatctgttctgtgtatgtgggactcgggtgaacattctggaggtggcatcgggcgccgtgctaaggagtctggagcaggaagatcaggaagatatcactgctttcgacctgtcacccgacaacgaagtactggtaactgcatcccgcgccttgttactggcacagtgggcttggcaagaggggtctgtgacacgcttgtggaaagctatccacaccgccccagtggcaacgatggcgttcgaccctacgtctacactgttggctactggcgggtgtgatggggccgtaagggtttgggacatcgtgaggcactacggcacacatcactttcgggggagcccgggagtcgtccatcttgtggccttccatccggatccaaccagactgttgttgttttcttcagccaccgacgcagcgatccgcgtatggagcctacaagatcgctcctgtcttgctgtcctaaccgctcattattccgctgtgacctcactggcattctcggcagacggccacactatgttatcttctggaagagacaaaatttgtatcatatgggacttgcagtcctgccaggccaccagaaccgtcccagtatttgagagcgtcgaggccgcggtgctgctccccgaagagccagtatcccagcttggcgtaaagtcaccaggactgtactttcttaccgctggcgaccagggaacattgagagtgtgggaggccgcgtccggacagtgtgtgtacactcaagctcagccccccgggcctgggcaggagttgacacactgcactcttgctcatacggcaggggtagtcttgaccgcgactgcagaccacaacctgctcctttatgaggcccgcagcttacgtctgcagaagcagtttgctggttatagcgaggaagtgctggatgtgcgctttttggggcctgaagatagccatgtggtcgtggcatcaaacagtccttgtctgaaagtgttcgaactgcagaccagcgcttgccaaatactccacggtcacacggatatcgtgttggcgcttgacgtgttccgcaaagggtggctctttgccagctgcgcaaaggaccagtccgtgaggatctggcggatgaacaaagccgggcaggtgatgtgtgtagcccaagggtcaggccacacccattccgtaggcaccgtgtgttgttccagactcaaggaatcttttttggtaaccggcagccaagattgcactgtgaagctctggccactccccaaggcgctgctcagtaagaacaccgcaccagataatggccccatattgctgcaagcccagacgacgcagcggtgtcacgacaaggacatcaactccgtggccattgcccctaacgataaacttctggccacaggctcgcaggacaggacagcgaagctctgggcgcttccgcagtgtcaactcctgggcgtcttctcaggtcatagacggggcctgtggtgcgtgcaattctccccaatggatcaagtgcttgccactgcatctgcagacggaactataaaactctgggcacttcaggacttctcctgtctcaagacattcgaggggcatgacgcaagcgtgctgaaggttgcgttcgtgagcaggggtacccagctgttaagcagtggatctgacggtctagtgaaactgtggactatcaagaacaacgaatgtgtccgcactcttgacgcccatgaagacaaagtatggggtttgcactgctcccggctagatgatcacgctctgacaggcgcatcagactctagagtgatcctttggaaggacgtaaccgaagctgagcaggcagaggagcaggctcgacaggaagagcaagtcgtgagacagcaggagttggacaatttgcttcatgagaaacgttatctgagagccctgggcctggctatcagcctagaccggccgcacacagtccttacagtgattcaggccatcaggagggatccagaggcctgcgagaaactggaagccactatgctacgtctgaggcgagatcagaaggaggctctgcttagattttgcgttacttggaacaccaacagcagacattgccatgaagcccaagctgtgcttggggtgctgctgcgacgggaagcgccagaggagttgctggcatacgagggcgtccgcgctgctctcgaggctctccttccatacactgagcggcacttccagcgactgtcaaggaccttacaggccgccgcctttctcgactttctctggcacaatatgaaactccccgttccagctgcagccccaactccatgggagacacataagggggccttgccctag

SEQ ID NO: 209056 - DNA, 2427 bp, synthetic construct
  misc_feature 1..2427: note = Description of Artificial Sequence: Synthetic coding sequence
  source 1..2427: mol_type = other DNA
atggccgagaccgccgccggcgtgggccggttcaagaccaactacgccgtggagcgcaagattgaacccttctacaaaggcgggaaagctcaattggaccaaactggtcagcaccttttctgcgtgtgcgggacacgggtgaatatcctggaagtagccagtggtgccgtcctgcgttcactggagcaggaggatcaggaagacatcactgccttcgatctctccccagataacgaggtcctagtaacagcaagtcgggcgttactcctcgctcagtgggcatggcaggaaggatcggttacccgcctctggaaggctatacacaccgccccagtcgcaacgatggcttttgaccctacatcaaccttgttggcgacaggcggttgtgacggggctgtgcgcgtatgggatatagtgcgccattacggcacccaccattttcgcggtagcccaggcgtggtgcatctcgtggcgtttcaccccgaccccacgcggttgctacttttcagctccgcaacagacgcagcaatacgcgtttggagtcttcaggaccggtcttgcctggccgtgctgacagctcactatagtgccgtgacgagtttggccttcagtgcagacgggcacacaatgctgagtagcggtcgcgataaaatctgtatcatctgggatctgcaatcttgtcaggccacacgtactgtcccagtctttgaatcagttgaggcagcggttttactgcccgaagagccggtgtcccaactgggcgtgaaaagccccggactctactttttaactgcaggcgatcaggggacgctgagggtctgggaggcggcctctggacagtgtgtgtacacccaggcccagcctccaggacccggtcaggagctgacacactgcacattggcacatactgccggtgtggtacttactgcaacagctgatcataatcttctgctgtatgaggccaggtccctcagattgcagaaacagtttgctgggtactccgaagaggtccttgatgtgaggttcctggggcccgaagattctcatgttgtcgtggcttcaaattctccctgtctcaaggtctttgaactccagacatcggcctgtcagatcctccatggtcacaccgacatagtactggccctcgacgtattcaggaagggctggctgttcgccagctgcgccaaggaccagtctgtacggatatggagaatgaacaaagctggacaagtgatgtgtgtggcgcaaggctctgggcatactcatagtgtcggcactgtatgttgctcccgcctgaaggagagcttcctggtgacgggctctcaggactgtaccgtgaagctgtggcctctgcctaaagccttgttgagcaagaacaccgcacccgacaacggcccaatcctgctgcaggcccaaacaactcagcggtgtcacgataaagatattaatagtgtagctattgcgcccaacgataaactgttggccacgggctctcaagatcgcaccgcaaaactgtgggcactccctcaatgccaattgctgggtgtgttctcaggacaccgacggggactctggtgcgtgcagttcagcccaatggatcaggtgctggcaaccgcctccgctgacggcaccatcaagttgtgggccctgcaggatttcagctgcctgaaaactttcgagggccatgatgcaagtgtcctcaaagtggcgttcgtctctaggggtacgcagttgctgagctctggatcagacgggctagtgaagttatggacgatcaaaaacaatgaatgcgtgagaacgctcgacgcccacgaggataaagtctggggtcttcactgctcacgcctggatgaccacgcactgaccggagcatcggacagccgtgtgattctgtggaaagatgttacagaggcagagcaggctgaggaacaggcaaggcaggaggagcaggtggtcagacagcaagaattggacaatcttctacatgaaaagcggtatctgcgcgccttggggttggcaatttccctggatcggcctcacaccgtcctcacagtcattcaggctattcgaagggaccctgaagcttgcgagaagctggaggctacgatgctgagactgcgacgggatcagaaagaggcgctattgagattctgtgtaacttggaacactaactctcggcactgccatgaggcacaggccgtgctaggcgtgctcctgagacgcgaagcccctgaagagttactggcatacgaaggggttagggccgcactggaggcactgcttccatataccgagcgccacttccagcggttatcgagaactctacaggctgcagctttcctggatttcctctggcataatatgaagctgccagtgcccgcagccgcaccaaccccctgggaaacacataaaggcgccctcccttag

SEQ ID NO: 209057 - DNA, 729 bp, synthetic construct
  misc_feature 1..729: note = Description of Artificial Sequence: Synthetic coding sequence
  source 1..729: mol_type = other DNA
atgttcccccagagccggcaccccaccccccaccaggccgccggccagccattcaaatttaccatccccgaatctctggatagaatcaaggaggaatttcagtttttacaagctcaatatcactccctcaaactggaatgcgaaaagttggcttccgaaaagacagaaatgcagcgccactatgtcatgtactacgagatgtcatatggactgaacattgagatgcataagcagacagaaatcgcgaaaagactgaataccatttgtgcgcaagtgattccttttctgtcccaggagcaccagcagcaggtggcccaggctgtcgaaagagccaagcaggtaaccatggccgaattgaatgcaattataggggtgcgaggcctgcccggactccctcctacgcagcagcagctccaggcccaacacctgagccacggccacggtcctccggtaccacttactcctcacccatctgggttgcaacccccaggtatccccccactaggcggctccgcagggctgcttgctctatctagtgccttgtcgggtcaatcgcacctggctataaaagatgacaagaagcaccacgacgccgaacatcaccgcggcgagcgcccagggaagtccaacagtttactcgtgcccgacagcctcagagggactgacaagcggcgcaatggccccgaatttagcaacgacatcaagaaaaggaaggttgacgacaagtag

SEQ ID NO: 209058 - DNA, 435 bp, synthetic construct
  misc_feature 1..435: note = Description of Artificial Sequence: Synthetic coding sequence
  source 1..435: mol_type = other DNA
atgcagcggcactacgtgatgtactacgagatgagctacggcctgaatatcgagatgcataagcagacggagattgccaagagactgaacactatatgcgcacaggtgatcccattcctgtctcaggaacaccagcaacaggtggcccaggctgttgagcgggccaagcaagtaacaatggctgaactgaacgccataataggccagcaacagttacaagcccagcacctaagccacgggcacggcccaccggttcctcttaccccccacccctcaggcctccagccacctggaataccccccctgggggggagcgcaggacttttagccctgtcttccgcgttgtctggccagtcacatcttgccatcaaagacgataagaagcaccatgacgccgagcaccatcggggggagcgacctggcaagcctgattag

SEQ ID NO: 209059 - DNA, 384 bp, synthetic construct
  misc_feature 1..384: note = Description of Artificial Sequence: Synthetic coding sequence
  source 1..384: mol_type = other DNA
atgcccacccccggcaccagcgccacccccggcctgcggcccggcctaggaaaaccaccagccattgatccacttgttaatcaggccgcggccgggctgcgaacccccctggcagtgccaggcccataccccgctccctttggaatggtgccccacgctggcatgaatggcgaactgacaagccctggtgcggcgtacgcgtcgctccacaacatgagcccccagatgtccgccgccgccgctgcagccgcagtggtggcctacggtcgctcgcctatggtgggattcgatcccccaccccacatgcgggtgccaactataccgccaaacttggccggaatccctggcggcaagccgagccttgttccggctcctgcccattag

SEQ ID NO: 209060 - DNA, 384 bp, synthetic construct
  misc_feature 1..384: note = Description of Artificial Sequence: Synthetic coding sequence
  source 1..384: mol_type = other DNA
atgcccacccccggcaccagcgccacccccggcctgcggcccggcctgggaaaaccccccgcaattgaccctcttgtgaatcaggccgccgccgggctccgaacaccgctggcagtgcctggtccatacccagcaccattcggcatggtgcctcacgctggcatgaatggggaactcacctcccctggtgctgcctacgccagtctccataatatgtcccctcagatgtccgctgcagccgcagcggctgctgtcgtggcttacgggaggagtcctatggtcggttttgatccacccccacatatgcgggtccccacaatcccccccaatctggcaggaattcctgggggaaagccaagcttagtgccagcacctgcccattag

SEQ ID NO: 209061 - DNA, 2313 bp, synthetic construct
  misc_feature 1..2313: note = Description of Artificial Sequence: Synthetic coding sequence
  source 1..2313: mol_type = other DNA
atgttcccccagagccggcaccccaccccccaccaggccgccggccagccctttaagttcacgattccagagtccctagaccggatcaaggaagagttccagttcctccaggcacagtatcactcattgaagctcgagtgtgaaaaattggcaagtgagaaaaccgagatgcagcggcactatgtcatgtattacgaaatgagttacggactgaatattgagatgcataaacagaccgaaatcgctaagcgcttgaacaccatctgtgctcaggttatccctttcctctcccaggagcaccagcagcaggtggcccaggctgtggaacgcgctaagcaggtcacaatggctgaattgaatgccataatcggccagcagcaacttcaggcacagcatctcagtcacgggcacggccccccagtgccactgaccccgcaccctagcggtttgcagccaccgggaatccctcccctcggaggcagtgctggacttcttgctttgagcagcgccttgagcggccagtctcatttggcaatcaaagatgacaagaagcaccacgatgcagagcaccaccgagatcgagaacctggcacgtctaatagcttattagttcccgactctctgcggggtactgataagaggcgcaatggacccgaattttcaaatgacattaaaaaacggaaagtggacgacaaggactctagccattacgattctgacggggataaatcagatgacaatttggtagtcgacgtcagtaatgaggatccaagttcaccaagagcgtctcccgcccatagtcctcgcgaaaacgggatagataagaacagactcctgaagaaggatgcctcttcgagtcccgcgtcgacagcctctagtgctagctccacctctctgaagagtaaggagatgagcctgcacgagaaggcatccacccccgtgctcaaaagctctacacctactcccaggtcagacatgcctacccccggcacaagtgcaaccccggggctcaggccagggctgggcaaaccccctgcaatagatccccttgtgaatcaggccgccgcgggcttacggacaccacttgccgttcccggaccttacccagctcccttcggcatggtgcctcatgccggaatgaacggagaactgacctcccctggcgcagcctacgcctccctgcacaatatgtccccacagatgtcagccgccgcggcagctgctgctgtggtggcatacgggcgatccccaatggtggggtttgaccccccccctcacatgcgcgtgccgacaataccgcctaacttggcagggatacccggtggaaagccagcctacagtttccatgtcaccgcggatggccagatgcaaccagtgcccttcccacccgatgccttgatcgggccaggcataccgcgacatgcgcgccagatcaacacccttaatcacggcgaagtagtgtgtgccgtgactatctcaaaccctacccgccacgtttacacgggaggaaaagggtgtgtaaaagtgtgggatatctcgcatccagggaacaagagtcctgtgtcacaactggattgtctgaacagggacaattatatccgctcgtgcaaactcctacctgatgggtgtacactgattgtgggtggagaagccagtaccctcagcatatgggacttggcagctcctacccctaggataaaggctgagctgacatccagcgctcccgcgtgttatgcgcttgcgatttcccccgactccaaggtctgcttcagttgctgcagcgacggtaatattgcagtgtgggatctgcataaccagacactcgtgaggcaattccagggacacacagacggggcaagctgcatagatatttctaacgatggcacaaaattatggaccgggggcctggacaacaccgttagatcttgggacctgagggaagggcgtcaactccagcaacacgatttcacctcacaaattttttcattgggctattgtcccactggcgagtggctggcagttggtatggaatcatccaatgtagaggtcttgcacgtcaacaagcctgacaaataccaactccatctgcatgaaagttgcgtcctttccctgaagtttgcttattgtggaaagtggttcgtctccaccggaaaggataatttactgaacgcctggaggacaccctacggggcatctatctttcaatcgaaagaaagctcctccgtgctgtcgtgcgacataagcgtggatgataagtatatagtgactggcagcggggacaagaaagcgacagtttacgaggtcatttactag

SEQ ID NO: 209062 - DNA, 729 bp, synthetic construct
  misc_feature 1..729: note = Description of Artificial Sequence: Synthetic coding sequence
  source 1..729: mol_type = other DNA
atgttcccccagagccggcaccccaccccccaccaggccgccggccaacctttcaaatttacgattccagagagcctggatcgcatcaaagaggaatttcaatttctgcaggcccagtaccacagtctgaaactggaatgcgaaaaacttgcttctgaaaagacagagatgcagcggcattatgtgatgtactatgagatgtcctacggcctaaacattgagatgcataagcagactgaaatcgcaaaaagactcaacactatctgcgctcaggtcatcccgttcctctctcaggaacaccagcagcaggtggctcaggcagttgagcgagccaaacaggtcacgatggctgagctgaatgccataatcggggtccgcggcttgcctggacttccccctacacagcagcagctccaggcacagcacctgagtcatggacacggacctccagtgcccttaaccccccacccaagtggtctgcagcctcctggtataccccccctgggcggatcagcaggcctgcttgcactgagctctgccctgagcgggcagtcacacctggcgattaaggacgataaaaaacatcacgacgccgagcaccacagggacagagagcccgggacatccaactcgctgcttgtgccagactccctgcggggcaccgacaagaggagaaacggtcccgagttctccaacgacattaaaaaaaggaaggtcgatgataaatag

SEQ ID NO: 209063 - DNA, 2121 bp, synthetic construct
  misc_feature 1..2121: note = Description of Artificial Sequence: Synthetic coding sequence
  source 1..2121: mol_type = other DNA
atggtgcagagccggctgaccgccaccagcgccagccaggacagccccgcatcaggcctgcagacccctctccagagtgggcagcccttcaagtttagtatcctcgagatttgtgacaggattaaagaagaatttcagttcctgcaagctcagtaccattcactgaagctggagtgtgagaagctcgccagtgagaagaccgaaatgcaacggcactacgtcatgtactacgaaatgagctacggactcaatatcgaaatgcacaagcaggccgagattgtgaaaagactgagcggtatctgcgctcagattatcccgttcctcactcaggagcaccagcaacaggtgcttcaggcagtcgagagggcaaagcaagtcacggttggagaacttaatagtctgattggccagcagcaactccagcctttatcgcaccacgcacccccagtcccactcactccacgacccgctggcctggtcgggggtagcgctactggactcttggccctgtcaggcgcactggctgcccaggcccaactggccgctgccgtgaaagaggaccgagccggcgttgaagccgagggctcgcgcgttgaacgggccccctcgaggtctgccagtccttctccaccggagagcctagtggaagaagaaagacccagcggacctgggggaggggggaagcagagggctgatgagaaggaaccaagtggtccttatgagagtgatgaagataaaagcgactacaatctcgtcgtggacgaggatcagccatcagagccaccctcccccgccaccacgccatgcggaaaggtcccgatttgcatccccgctaggcgggacttggtggattctccggcgtccctcgccagctcgctcggatctcctcttccccgggcaaaggaactgatcctgaacgatctgccagctagtactcccgccagtaagtcatgtgacagctctcccccacaagatgcctcgactccaggcccaagctccgcctctcacctttgccagctggccgcaaaaccagccccatcaactgactctgtagccttacgcagtcccctgacactgtccagtccctttacgacatcattttcactgggaagccacagcaccctgaatggtgatctcagcgttccttcttcttatgtttcacttcatctgtcacctcaggtctcctcttcagtggtctatggacggtctccagtgatggcctttgagtctcatcctcacctccgaggaagctccgtgagctcaagcctgcccagcatcccggggggcaaaccagcttattcttttcacgtatctgccgacggtcaaatgcagcccgtgcccttccccagcgatgcattagttggcgccgggattccccgacatgctcgccagctgcatacactggcccacggagaagttgtgtgtgcggtgacaatctctggcagtacccaacatgtgtacaccgggggaaaagggtgtgtgaaggtttgggacgtcgggcagcctggtgccaagactccagtggcccaactggattgtctgaaccgcgataattatatcagatcttgcaagctgcttcccgatggacgctcgttgattgtgggaggggaagcttccaccctgtccatctgggatctggcagctccaacaccaaggattaaagcggagctaactagtagcgcccccgcgtgctacgctctggccgtttcccccgatgcaaaggtgtgttttagttgctgcagtgatggaaacattgtcgtgtgggacctgcagaaccagaccatggttagacagttccagggacacactgacggcgcctcatgcatagacataagtgattacgggacaagactttggaccggcggcctggataatacagtgaggtgttgggatctgcgagaaggtcgccaactacaacagcacgatttctcctcacaaatcttttctttagggcactgtccaaaccaggactggctggccgtcgggatggagtcgagtaatgttgagatccttcacgttaggaaaccagagaaataccagctgcacttgcacgagagctgcgttctcagccttaaattcgcttcatgcgtccagggtgtcgtgctttcccccgaactctag

SEQ ID NO: 209064 - DNA, 2232 bp, synthetic construct
  misc_feature 1..2232: note = Description of Artificial Sequence: Synthetic coding sequence
  source 1..2232: mol_type = other DNA
atgtacccccagggccggcaccccacccccctgcagagcggccagccctttaagttctctattctggaaatctgcgatcgcattaaggaagaattccagttccttcaggcccagtatcattcacttaagctcgaatgtgagaagttggcctcagagaaaacggagatgcagcgtcattacgtgatgtactacgaaatgtcttatggattgaatatagagatgcataaacaggcggaaattgtaaaaagactcagtggtatttgcgctcagattattccctttctgactcaggagcaccagcaacaggttctgcaagcggtggagcgggctaagcaggtgacagtgggggagttgaattccttgatcgggcaacaactgcaaccgttgtcacaccacgccccccccgtgcctctgacacctcgccctgctgggttggtgggtggatctgcaaccgggctcctggccctgtcaggcgctctcgccgctcaggctcaactggcagcagctgtgaaagaagatagggctggtgtggaggctgagggctcccgcgtggagcgtgccccctcacgtagcgctagcccaagccctcctgaatcacttgtggaggaagagaggccttcagggcccggaggggggggaaaacagagagcggatgagaaagagccctccggaccttatgaatcagatgaggacaagagtgactacaacctagtcgttgatgaggaccagccctccgagccccctagtcccgccactaccccatgcggcaaagtgccgatctgtattccagccagacgcgacttagttgacagtccagcctctttagcatcaagcctgggcagtcctctacctagagcaaaagaattgatcctgaatgatctacctgcatctacgcccgccagcaaatcgtgtgatagtagtcccccgcaagatgcttctactccaggcccctctagtgcctcccacctgtgtcagcttgccgcaaaaccggcccctagcaccgactccgtggccctccggtccccactgacgctctcttccccattcacaacttccttttccctgggttcccatagcaccctgaatggggacctgtcggtgccaagcagctacgtgtctctgcacctcagcccacaagtctcaagctccgtagtgtacggcaggtccccagttatggcgtttgagagtcacccacacctgagggggagttccgtcagctcaagcctcccatccataccagggggcaaacccgcctatagttttcatgtgtccgccgacggccaaatgcagccagtgccctttccgtcagatgctctggtgggtgccggaataccgcgtcacgcccgtcaacttcacacactggcacatggcgaagttgtctgcgctgtgaccatcagtggatcgacacagcacgtgtatacagggggaaagggctgcgtgaaagtttgggatgtggggcagcccggtgctaagactcccgtcgcccaattagactgtctgaacagggacaattatatccgctcatgcaagctactccctgacgggcgtagtcttatcgtgggcggggaagcctctaccctgtccatttgggatctggccgctccgacaccacgtattaaggctgaattaacatcctccgcacctgcatgttacgcattggcagtcagtcccgatgcgaaagtgtgtttcagctgttgcagcgatgggaatattgtggtatgggatcttcagaaccagacgatggtcaggcaattccagggccataccgacggtgcctcctgcattgacatcagcgactatgggacacgcctgtggacagggggcttagacaataccgtgagatgttgggacttgcgcgaaggtcgccaacttcagcagcatgacttcagttcacagatcttcagtttgggacattgcccgaaccaggactggctggctgtcggcatggagtccagcaacgtggagattctgcacgttcggaagcctgagaagtatcaactccatctgcatgaatcatgtgttttgagcctgaagtttgcctcttgcggacgttggtttgtctccactggcaaggataacttgctgaacgcctggcgtactccatatggcgctagcatattccagtcaaaggagagctcgtccgtcctctcgtgtgatattagtcgcaataacaagtatattgtgacaggctccggagacaagaaggctaccgtttacgaagtggtatactag

SEQ ID NO: 209065 - DNA, 879 bp, synthetic construct
  misc_feature 1..879: note = Description of Artificial Sequence: Synthetic coding sequence
  source 1..879: mol_type = other DNA
ctggcccacggcgaggtggtgtgcgccgtgaccatcagcggcagcacgcagcacgtatatactgggggcaagggctgtgtcaaggtctgggatgtggatggtgctgtgtttgccggccagcgaggcggtgcacatcagcctatcagaaatagggacaactatatacgaagctgcaaacttctgccagacggacgttcactcatcgtgggcggggaggcttctaccctgagcatctgggaccttgccgctcccacgcccaggataaaagctgagctgacctcctccgcgcccgcctgttacgcactggccgtatcaccagatgcaaaggtatgtttcagttgttgtagcgacggtaatatcgtagtgtgggacttgcaaaaccagactatggtcaggcagtttcaagggcataccgacggagcttcctgcattgatatttcggattacggcacaaggctctggactgggggcttggataatacagtgcggtgttgggacctgcgggagggtcgtcaactgcaacagcatgacttctcatcacagattttctccctgggtcactgtcccaatcaggattggctggccgtgggaatggaaagcagcaacgttgaaatcttacatgttcgtaagcctgagaaataccagctccacctgcatgagtcttgcgtgctctctctgaaattcgcttcttgcggtaggtggttcgtgagcaccggcaaagacaacctcctaaatgcgtggagaacaccctacggcgcaagcatttttcagagcaaagaatcatcctcagtcctttcatgcgacataagtagaaacaataagtacattgtgaccgggagcggcgataagaaggcaactgtgtacgaggtggtctattag

SEQ ID NO: 209066 - DNA, 2121 bp, synthetic construct
  misc_feature 1..2121: note = Description of Artificial Sequence: Synthetic coding sequence
  source 1..2121: mol_type = other DNA
atggtgcagagccggctgaccgccaccagcgccagccaggacagccccgcatcgggcctgcaaacacccctgcagtccgggcagccttttaagttcagcatactggaaatatgcgacagaataaaggaggaatttcagtttctgcaggcgcagtaccatagcctgaagctcgaatgtgaaaaactggcttcggaaaagactgaaatgcaaagacactatgttatgtactatgagatgagttatggactgaatatcgaaatgcacaagcaggctgagatcgtgaagcgcctgtctggcatttgtgctcaaataattcctttcctgactcaggaacaccagcaacaagtgctgcaggctgtggagcgtgctaagcaggtgacagtcggggagctgaatagtctaatagggcagcaacagttgcagcctctctcacaccacgcgccccccgtgccgctcactccaaggcccgcagggctggttggcggctctgcaaccgggttattggccctcagtggcgcactggccgctcaggctcagctggcagccgcagttaaggaagaccgggctggggtcgaggccgagggctcaagagtcgaaagggctccttcccggagcgctagtcccagtccaccagagtctctcgtggaagaggaacgaccctcggggcctgggggtgggggaaagcagagggccgacgagaaggaacccagcggaccatatgagtcggacgaagataaatccgactataacctggtggtagacgaagaccagcccagtgagccaccatcccctgcaaccacaccgtgcgggaaagttcctatttgcatcccagctcgtcgagatcttgtcgatagccctgcctctcttgcttcctctctgggctcccctcttccgagagctaaagaactcatcctgaatgatctgcccgctagtacacccgcctcgaagagttgcgatagttctcccccccaggacgcttctacacctggcccgagttctgcttcacacctatgccaactagcagctaagccagctcccagtactgatagtgtggcactacgcagccccctcacactgagctctcccttcaccacttccttctccctgggatcacatagcacattaaacggagacttgagtgtaccatccagttacgtgtcccttcacttatccccacaggtgagttctagtgtggtgtacggaagaagccccgtgatggcatttgagtctcatcctcatctgcggggctcgagcgtgagttcctcactaccttcaattcctgggggcaaacccgcttattctttccatgtcagcgcagacgggcaaatgcagcctgtccctttcccatccgacgcactcgtgggggcaggcataccacgccatgcccgacaattgcacactttggcccatggagaggtggtttgtgccgtaaccatctcaggtagcacccaacatgtctacaccggtggcaaaggctgcgtgaaggtttgggacgtggggcagccaggcgcgaagacgccggtcgctcagttggactgcttgaaccgcgacaattacatccgatcttgtaagctactgccagatggcagaagcctgattgtgggcggcgaggcttcaaccctgtcgatttgggacctggccgcccctacacctagaattaaggctgagctcacaagcagcgcacctgcgtgttacgcattggctgtgtcacctgatgcaaaggtctgtttcagttgctgttctgacgggaatattgtggtgtgggatttacagaatcagacgatggtgagacagtttcaggggcatactgacggagccagttgcattgacatcagcgactatggcacacgactgtggaccggaggactggataatacagtgaggtgctgggatctaagggagggcagacagctacagcagcatgatttttctagccagattttttcattgggtcactgccctaatcaggactggctggcagtcggcatggaaagcagtaacgttgagatactgcacgtccgcaagccggaaaagtatcagctgcatctgcacgagagctgcgtgctatcgttgaagttcgcctcttgcgtccagggagtggtcctgtcccctgagctgtag

SEQ ID NO: 209067 - DNA, 1083 bp, synthetic construct
  misc_feature 1..1083: note = Description of Artificial Sequence: Synthetic coding sequence
  source 1..1083: mol_type = other DNA
atgtacccccagggccggcaccccacccccctgcagagcggccagcccttcaagtttagtattctggagatttgcgataggattaaagaggaatttcagtttctgcaggcccaataccattcactgaaactggaatgtgaaaaactggcatccgagaaaaccgagatgcaacggcactacgtgatgtattacgaaatgagttatggcctcaatatcgaaatgcataagcaggctgaaatcgttaaacgattatctggtatttgcgcacagatcatcccttttttgactcaggagtcagcaagcccgagtccccccgagtccctggttgaagaagagcggccatcagggccgggaggaggcgggaaacagagggccgacgaaaaagagccttctggcccctacgaaagtgacgaggataagagtgactataacctggtcgtggacgaggaccaaccctcagaacctccaagcccagctactaccccctgcggcaaggtgcccatctgtatacctgcccggcgggacctagtcgacagccctgccagcctggccagtagcctggggtctccactgccacgcgccaaagagctgatcctcaatgatctcccggcatccacaccagcttcgaagtcatgtgattcctcgccacctcaggatgcctctaccccaggcccgtcttcagcctcacacctgtgtcaattggccgccaagcccgctccttcgaccgactccgttgcgctccgctctcccctgaccctgtctagcccattcacgactagcttctctcttggatcgcacagcacccttaacggggacctgtccgtgccaagctcttatgtgagcctccatctgagccctcaggtatcttcctcagttgtgtatggtaggagccctgttatggcatttgagagccacccccacttaaggggaagctctgtatcctccagtctgccgtctataccagggggaaaacccgcgtattcctttcatgtgagcgccgatggacagatgcagcctgtgcccttccctagtgacgctttggttggtgctggtattcctccttggccttcatccactgcttag

SEQ ID NO: 209068 - DNA, 1866 bp, synthetic construct
  misc_feature 1..1866: note = Description of Artificial Sequence: Synthetic coding sequence
  source 1..1866: mol_type = other DNA
atgcagcggcactacgtgatgtactacgagatgagctacggcctgaatattgaaatgcataagcaagccgaaattgttaaaagattaagcggcatttgcgcgcagatcattccatttctgacacaggaacaccagcaacaggtcctgcaagcggttgagagggccaagcaggtgacagtgggtgagcttaattcattgattgggagcgcctccccaagtccgcccgagagtctggtggaggaggaacgtccttctggccccggcggagggggaaagcagagagccgatgaaaaagagcctagtgggccatatgaaagcgacgaggataaatccgattacaatcttgtggtagatgaggaccaaccgtccgagccaccttcccctgccactacaccctgtggcaaggtgcccatatgtatccctgcccgccgcgaccttgtcgacagccctgccagcttggctagttcgcttgggtccccactcccacgagccaaggagttgatactgaacgatcttccggcttctactcccgctagcaagagctgtgatagctcacccccacaggacgcgagcacccccggaccaagcagcgcatcacacctctgccagcttgctgcgaagccggccccttctacggatagcgtggccctgcgtagcccgctcaccctctcgtccccattcaccacctctttcagtctcggttctcacagcacccttaacggagatttgtcagtcccctcctcctacgtgagtcttcacctgtcacctcaggtgtcaagcagcgtggtctatgggcgaagccctgtcatggcattcgaaagccacccccatcttaggggtagtagcgtcagcagtagtctgccatccataccaggcggtaaaccagcttactcgtttcatgtgtctgccgacgggcagatgcaaccagtgcctttcccctccgacgctcttgtaggggctggcatccctaggcacgcccgtcaactgcatactctcgcacacggcgaagttgtttgtgccgtaaccatctctgggtcaacccaacacgtatacaccggcggcaagggatgcgtaaaggtgtgggatgtcgggcaaccaggggcaaaaactccagtggcacagctggactgtctgaatagggacaattatattagaagctgtaagctgctgcccgacggtcgctccctgattgttggcggagaggcaagcactctgtcgatctgggacttggcggccccgacgcctcgcatcaaagccgagctgactagttccgctcctgcttgttatgccctcgccgtgtccccagacgcgaaggtgtgttttagctgctgctccgatgggaacattgttgtatgggatctgcagaaccagaccatggtccggcagtttcaaggccatactgacggggcatcctgtatcgacatttcagactacggtacgaggctatggactggcggtcttgataacacagtcaggtgctgggacctgagagaagggcggcaactccagcagcatgatttttcttcacaaatcttttccctagggcactgtcccaatcaagactggctagcagtggggatggaatcaagcaacgtcgaaattctgcacgtgaggaaacctgaaaagtaccagcttcacctccatgaaagctgcgtgctgtccttaaaatttgcgagttgtggccgctggtttgtatcaaccggaaaggataacctgcttaacgcgtggcggactccatacggggccagtatcttccagagtaaggagtcttcctccgtgctgtcatgcgatatttctagaaataacaaatacatagtcaccggctcgggtgataaaaaagcaacagtgtacgaggtggtatattag

SEQ ID NO: 209069 - DNA, 1233 bp, synthetic construct
  misc_feature 1..1233: note = Description of Artificial Sequence: Synthetic coding sequence
  source 1..1233: mol_type = other DNA
atgaccttcccccccgccctgctgccccccaaccccgtgacccccccccggcctcgcacgctgcctcccccgggccctgcacggcccgtaacaagcgcttccttattaccaagtcagcacctcccacgaacagctagtgtgtcatcatctgtcgtgtatgggcgctcccccgttatggcctttgagtcacatcctcatctgcgtggctcgtctgtatctagcagcctacctagcatcccaggcgggaagcccgcctatagctttcacgtgtccgcagatggccagatgcagccggttccatttcctagtgatgcgctggtgggtgctggcattcctagacacgctcgccagctgcataccctagcccatggtgaagtggtctgtgcagtcactatttcagggagcactcagcatgtctacaccggaggcaaaggctgtgttaaggtttgggacgtgggacaacctggtgccaagaccccagtggcccagctggactgcttgaatcgggacaactacatcaggagctgcaagttgcttcccgacggccggagtctaatcgtgggcggcgaggccagcactctgagcatttgggacctggcagccccaacaccgcgcatcaaggcagaattgactagctcagcccccgcctgttacgctctggccgtgagccccgatgcaaaggtctgcttcagctgctgttctgacggcaatattgtggtgtgggacttgcagaaccagactatggtgagacaatttcaggggcacaccgatggcgccagctgcatcgacatttctgattacggaacccgactgtggacaggaggacttgacaacacagttcgatgctgggatctcagagaagggaggcaactacagcagcacgatttctccagccagatattttctctaggacattgtcctaaccaggattggctcgccgtgggtatggaatccagcaacgtagaaattttgcacgtgcggaaacccgagaagtatcagctgcacttacacgagtcttgcgtcctgagtctgaaattcgccagctgtgggaggtggttcgtctctacaggtaaggacaacctcctgaacgcctggagaacaccttatggggcttcaatctttcagagcaaagaatcaagctccgtgctgagttgcgatattagccggaataataagtacattgtcacaggttctggtgataagaaagccacagtatacgaggtggtctattag

SEQ ID NO: 209070 - DNA, 2061 bp, synthetic construct
  misc_feature 1..2061: note = Description of Artificial Sequence: Synthetic coding sequence
  source 1..2061: mol_type = other DNA
cagacccccctgcagagcggccagcccttcaagttcagcatcctggaaatctgcgaccggattaaagaggagttccagttcttgcaggctcagtatcatagccttaaattggaatgcgaaaaactggcttctgagaagacagaaatgcaacgtcattacgtcatgtactacgagatgtcttatggactgaacatcgaaatgcacaaacaggccgaaatcgttaagcgcctttcaggcatatgcgcccagataattcctttcttgacccaggaacatcagcagcaggtcctccaggctgttgagagggcgaagcaggtcaccgtgggagagctgaatagtctgattggacagcagcagttacagcccctgagccatcacgctccccccgtgcctctgactcccaggcctgcaggcctggtcggaggtagcgcaactgggttacttgctctcagtggcgccctcgctgctcaggcccagcttgcagctgcggtgaaggaggatagagctggcgtggaagccgagggttcacgggtcgagagggctccatcacggagcgccagtccttctccaccagagagcctggtggaggaggagcgcccttcagggcccggcggcggcggtaagcagcgtgccgacgagaaggaaccttcaggcccctacgagtcagatgaggataaatcagattataacctggttgtggatgaagaccaacctagcgaacctcctagcccagccactactccatgcggcaaagtccccatctgtatccctgctaggagggatctggtcgattcgccagcctcccttgccagttcgttaggttctccactccccagagctaaggagctgatcttaaacgatcttcctgcgagtaccccagcctccaagtcctgtgactcctctccgccacaggatgctagtacccctggcccctcctccgcttctcatctttgccagttagcagccaaacccgccccgtctaccgatagcgtggcattgaggagcccactgaccttgtcttctccatttactacaagctttagccttggatcccactctacactgaatggcgacttatccgtgcccagtagctatgtgagcttgcatctgtcccctcaggtgtcatcctcagtcgtgtacggccgcagcccggttatggcattcgaaagtcatcctcatttacgcggaagctcagtgtcctcctctctgcccagtattcctgggggaaaacccgcttattctttccatgtgagcgccgatggtcaaatgcagcctgtgccattcccctccgacgctctggtaggcgctgggatcccacgtcacgccaggcagctccacacactcgcccacggggaggtggtttgcgcagtaaccatatccggcagcacacaacatgtgtatacagggggaaagggctgcgttaaggtgtgggacgtgggccagcctggggccaaaaccccagttgcacaactcgactgcctgaatcgcgacaattacatccgcagttgcaagctactcccagacggtcggtctctgattgtgggtggagaggccagcactcttagcatctgggatctcgctgctcccactccgagaattaaggcggaactcactagctccgctcctgcctgctacgcactcgccgtctcccccgacgctaaggtgtgttttagctgttgttccgatggcaacatcgtagtatgggacttgcagaatcaaacaatggtgcgtcagtttcagggccataccgacggggcaagctgcatcgatatcagcgactatggcactcggctgtggaccggcggcctcgataatacggttcgttgctgggacctgcgggaaggtcggcaactgcaacagcatgatttctccagccaaattttctccctcggacactgtccaaaccaggactggctggccgttggcatggaatcaagcaacgtcgagatattgcacgtccgcaagcctgaaaagtatcagctgcatctccacgaatcctgcgttttaagtctgaaatttgccagttgtgtccaaggcgtggtactctcccccgaactgtag

SEQ ID NO: 209071 - DNA, 1866 bp, synthetic construct
  misc_feature 1..1866: note = Description of Artificial Sequence: Synthetic coding sequence
  source 1..1866: mol_type = other DNA
atgcagcggcactacgtgatgtactacgagatgagctacggcctgaacatcgagatgcataaacaggcagaaatcgtgaagcgcctaagtggaatttgtgctcaaatcatcccattcttaactcaggagcatcaacaacaggtcctccaggcagtcgagcgggccaaacaggtcaccgtgggggagttgaatagcctgattggcagcgctagcccttccccaccggaaagcctcgtagaggaagaaagaccaagcgggcctgggggggggggaaaacaaagggccgacgagaaggagcccagtggtccttacgagtcagatgaggataagtctgattacaatcttgtggtggatgaagaccagcctagcgagccaccctctccagccacgactccgtgtggaaaagttcccatctgcatccctgctcggcgagacctagttgatagccctgccagcttggctagcagcctcggctcacctctgccccgagccaaggagcttattctgaacgacctgccggccagtacaccagcgtctaagagttgcgattctagcccgccacaggacgcatctactccaggacccagctctgccagtcacctgtgtcagctagccgctaaaccagctccatccaccgattctgtcgctctcaggtctccacttacccttagctctccttttacaacctctttctctctgggctctcacagtactctgaatggagacctgtcagtgccgtcttcatacgtgagtctccacctctccccacaggtctcaagctcggtagtgtatggccgcagtcctgtgatggcctttgaaagtcatccacatttgagaggctcatctgtgtcttcgtctctcccatccattccagggggaaaacctgcctattctttccatgtttcagccgatggtcagatgcagcctgtgccttttccgtccgacgcgctcgtcggcgctggcattccccgccacgcccgccagttgcacaccctggcgcacggcgaggtggtctgtgccgtgacaatttcagggagcacccagcacgtctatacaggaggcaagggatgcgtcaaagtgtgggatgtggggcaacccggcgccaagacacccgtcgcacagctggactgccttaatagagataactatatccgcagctgtaagctgcttcctgatgggcgctctctgatcgtcggcggtgaagcatcgactctctccatttgggacctcgccgcccccacacctcgcatcaaagcggagcttacaagctccgccccagcttgctacgccctggcagtttcccctgatgctaaagtgtgttttagttgctgttccgatggaaacattgttgtatgggacctgcagaatcagactatggtgagacagtttcaggggcacaccgatggggcctcgtgcatagatataagcgattacgggacccggctgtggacgggcggcttggacaacactgttcgttgttgggatctgagagaaggaagacagctccagcagcacgacttctcatctcaaatattctcccttggccactgccccaaccaagactggcttgccgtcggtatggaatcgtcgaacgttgaaatcttgcacgtgcgcaaacccgagaaataccagttacacctgcacgaatcctgtgtcctgtccctgaaattcgctagctgcggtagatggttcgtatccacaggaaaagacaatctgcttaacgcctggaggacaccttacggcgctagcatatttcagtcaaaagaatccagctccgtactcagctgcgacatttcccgcaataacaagtatattgtgaccgggtcgggggacaaaaaggccacagtctacgaggtggtttactag

SEQ ID NO: 209072 - DNA, 2283 bp, synthetic construct
  misc_feature 1..2283: note = Description of Artificial Sequence: Synthetic coding sequence
  source 1..2283: mol_type = other DNA
atgtacccccagggccggcaccccgccccccaccagcccggccagccagggttcaaattcaccgtggctgaatcctgcgacaggatcaaggatgaattccagtttctccaagcgcagtaccacagtctgaaagtcgaatatgacaagctggccaacgagaagactgaaatgcaaaggcattatgttatgtattacgagatgtcttatgggttgaatattgagatgcacaagcaaaccgaaatcgcaaaacggctgaacacaatccttgcccaaatcatgccatttctaagccaggagcaccaacagcaggtggcccaggccgtggagcgcgctaagcaagttaccatgactgagctgaacgctataataggacagcaacaactgcaggcccagcacttgagccatgccacgcatggccctcctgttcagctgcctcctcacccgtcgggactccagccacccggcatcccccctgttacgggcagctcctctggactcctggcactgggagcacttggcagccaggcccaccttaccgtgaaggatgaaaaaaaccatcatgagttagaccatagggagcgtgagtcaagcgcgaataattcggtttcccctagtgagtctctccgagccagtgagaagcaccggggtagcgccgattatagtatggaggccaaaaagcgcaaggccgaggagaaggactcactatcgcgatatgattccgatggcgacaaatctgacgatctggtggtggacgtctctaatgaagatcccgctactcctcgggtgtccccagcacattcccctcccgaaaacggccttgataaagcacgctcactgaaaaaggatgctcctacttcccctgcgagcgtggcctcctccagctccacaccaagtagtaaaacgaaagacctagggcataatgataagtcctcaacgccaggcctcaaatccaatacgcccactcccagaaacgatgcgcccacacctggaaccagtacaacacctggactgaggtccatgccggccagcgctctgaggacccccatctcgattacgagctcttacgccgcgccatttgcaatgatgagccatcacgagatgaatggctcgcttacatcccctggcgcttatgccggactgcacaatatcccccctcaaatgtcggccgcggccgcggccgcggccgcagcttacggtagatccccgatggtgtcctttggcgcagtgggctttgacccccatccacccatgcgagccacaggcttgcccagctccctggcatccatccccggaggcaagcccgcatacagcttccatgtgagtgccgatggccaaatgcagccggtgcctttcccacacgatgcacttgcaggccccggaattcctaggcacgcaaggcagatcaacacactgtcccacggggaagttgtgtgcgccgtgacaatatccaatcctacccgtcatgtctataccgggggaaaaggttgcgtgaaaatctgggatatatcgcagccgggatctaaatcacccatttctcaactggactgcctgaatagagacaattacattagaagttgtaagcttctccccgatgggcggaccctgatcgtcggtggcgaggcttctaccttaactatatgggacttggcaagccccacccccagaatcaaagccgagcttaccagcagtgcccccgcatgctacgccctggctatatcccccgacgcaaaggtctgtttctcttgctgttccgacgggaacatcgcagtgtgggacttacataatcagacgttagtccgacagttccaggggcacacagatggagccagctgcatcgacatcagccacgatggaacgaaactctggacaggcggtctggacaatactgtgagaagctgggacctccgcgagggaagacaactccaacagcatgacttcacctcacagatttttagcctcggctactgccctaccggggagtggctcgcggtgggcatggaatcctcgaacgtggaagtcctgcatcataccaagcccgataaataccagcttcatcttcacgagtcttgtgtgctcagccttaagtttgcctactgcggtaagtggtttgttagtacaggtaaagataatctgctcaacgcttggcgcactccatatggcgcatcaatcttccaaagcaaggaaagctccagcgtgctgagttgtgatatatccgccgacgacaagtatatcgtaactgggtctggcgataagaaagctactgtctacgaagtcatttactag

SEQ ID NO: 209073 - DNA, 2289 bp, synthetic construct
  misc_feature 1..2289: note = Description of Artificial Sequence: Synthetic coding sequence
  source 1..2289: mol_type = other DNA
atggccccccaccagcccggccagcccggcttcaagttcaccgtggcagagtcttgtgacagaatcaaagatgagtttcaatttctgcaggcccagtatcattcactcaaggtggaatatgacaaactggccaacgaaaaaacagaaatgcaacggcactatgtcatgtactacgagatgtcctacggcctgaatatagagatgcacaaacaaactgaaatcgccaagcgcctcaatacaatcctggcgcagatcatgcccttcctttctcaagaacatcaacaacaggtcgcgcaagcggtggaaagggccaagcaggtcaccatgaccgagttaaatgccataattgggcagcagcagttacaggctcagcatctgagccacgcaacccacggcccaccggtccagctgcctccacacccctccgggctacagccgccgggaatcccccctgtgaccggatccagctccggactgctcgctctgggcgctttaggtagccaagcgcatcttactgtgaaagatgagaagaaccatcacgaactcgaccacagagagagggagtcttctgccaataactcagtcagcccaagtgaatcactgcgggctagtgaaaagcatcggggtagcgctgactactcaatggaggccaaaaagcggaaggctgaagagaaggacagcctgtcacgctatgattccgacggtgataaatcagatgacctggtggttgatgtgagcaacgaggacccagctacgcccagagtctctccagctcacagccctccggaaaatggtctcgacaaagccaggagtcttaagaaggacgccccgactagccccgcgtccgtggcttctagtagttccacacctagctccaaaacaaaggacctgggtcataacgataagtctagcacccccggactgaagtcaaacacccctaccccgcgcaacgatgcacccactcccggaacaagcaccacgccaggattgcggtcaatgccggggaagcctcccggtatggacccgatagcaagcgccttgcggacacctataagcatcaccagttcctatgcggccccctttgctatgatgtcacaccatgagatgaacgggagtcttacttccccaggagcctatgccggtctgcataatattccaccgcagatgagcgcagccgcagcagccgcagcagcggcctatggtcgcagcccaatggtgtcttttggagccgtcgggttcgatccacatccacccatgcgcgctacaggcctgccatcaagcttggccagtatccccggagggaagccagcctactcctttcacgtctccgccgacggtcagatgcaaccagtcccgtttccgcacgacgctctggcggggccaggcattccacgccatgcaaggcaaatcaacacactttcacatggtgaggtcgtctgtgccgtcactatatcaaaccctactcggcatgtgtataccgggggcaaagggtgtgttaagatctgggacatctcccagccaggctcgaagtcgcctataagccaattagactgcctgaacagggacaactacatcagatcgtgcaagctgcttcccgatggacggacactcatcgtgggcggggaagcatctactctgacaatatgggaccttgcttctcccacccccaggatcaaggctgagcttacatcatcggctcccgcatgctacgcactcgccattagccccgatgcaaaggtgtgtttcagctgctgctccgacggcaacatcgcggtttgggaccttcataaccagacccttgtccgccagttccagggccacactgacggcgcctcgtgcatagatatctcgcacgatggcactaagctgtggacaggcggcttagataatacggtgcgatcttgggatcttagagagggcagacagctgcagcagcatgattttacatcccagatcttcagtttagggtattgccctaccggggaatggttagctgtgggaatggaaagctctaacgtggaggtgctccaccatacgaaacccgataagtaccagctgcatttgcacgaaagttgcgtgttgtccctgaagttcgcttactgtggaaagtggttcgtctccaccggtaaggataatctcctgaacgcctggcggaccccgtatggagccagcatttttcaaagcaaagagtcatcaagcgtccttagctgtgacatcagtgctgatgacaaatatattgttacagggtcaggagacaagaaggctactgtgtatgaggttatttactag

SEQ ID NO: 209074 - DNA, 2295 bp, synthetic construct
  misc_feature 1..2295: note = Description of Artificial Sequence: Synthetic coding sequence
  source 1..2295: mol_type = other DNA
atgtacccccagggccggcaccccgccccccaccagcccggccagccaggctttaaattcaccgtcgctgagagctgcgaccgtataaaagacgaattccagttcctgcaggcacagtatcatagtcttaaggttgagtacgataagttagcgaatgaaaagacagagatgcagaggcactacgtgatgtattacgagatgagctatggcttgaacatcgagatgcataaacagaccgagatagctaagagactgaataccatattggcccagattatgccatttttgagtcaggagcatcagcagcaagtagctcaggctgtggagagagcgaagcaggtgaccatgacggagttaaatgcaatcatcggtcaacaacagctacaggcacagcaccttagtcacgctacacatgggccccccgtgcagttgcccccccacccttcgggtttacaaccaccaggcattcctcccgttacaggcagctcgtcagggttgctcgctctgggcgcgctggggtcccaagcacacctgactgtgaaggacgagaagaatcaccacgaacttgatcaccgggaacgtagctcagcctccaataactcagtttcgccttctgagagcctgagggctagcgagaagcatagggggtctgccgattactcgatggaggctaaaaagcgtaaagcagaggagaaggatagtctgtcacgctacgatagcgacggggataaatcagacgacctggtggtcgacgtatccaatgaggacccagctacaccaagagtttcccctgcacattcccctcccgagaatgggcttgacaaggctcggtctttgaagaaagatgcacctacatcacctgcctctgtggcttctagcagctctacaccatcctcaaaaacgaaggatttgggacataacgataaaagtagcactccagggctgaaaagcaacacaccaacccctcggaatgatgcccccactccgggaacatccaccactcccgggcttagaagcatgccgggcaagcctccagggatggatcctatagcaagcgccctgcggacacccatctctatcactagctcctacgcagccccttttgcgatgatgtcgcaccacgaaatgaatggctcgcttactagccccggcgcatacgccggcctgcataatatcccgccgcagatgagcgccgctgccgccgcggcagccgcggcatacggacggtcaccaatggtggggttcgatccacatccgcctatgcgggctactgggctgccgtcaagtctcgcctctattcccggtggaaagccggcatattctttccacgtctccgctgatggacagatgcagccagttccttttcctcatgatgccttagcagggcccggaataccccgccacgcaagacagattaacacactgagtcacggagaggtggtctgcgctgttaccatcagtaacccaacaaggcacgtttacaccggcgggaagggctgtgtgaagatctgggacatcagtcaaccagggtccaagagccctatcagtcagcttgattgtctgaaccgtgacaactacattagatcctgtaaactgctgccagatgggcggaccctgattgtggggggcgaggcatccactttaaccatctgggacctggcgagtcctacaccacgaattaaggccgagttgacgtcgtccgcccccgcctgttatgcattggcaattagccccgacgccaaggtttgcttttcttgctgctccgacggaaacatcgcagtgtgggacctacataatcagacgctggtccgccagtttcagggtcataccgacggagctagttgtatcgatattagccatgacggcactaagctgtggacaggaggactcgataatactgtccgtagttgggatctccgagagggccggcaactccaacagcatgactttactagccagattttctcattgggatattgcccgaccggcgagtggctcgccgtgggcatggagtctagtaacgtagaggtcctgcatcacactaaacccgataaatatcaactgcacctgcatgagtcctgcgtattgagtctcaaattcgcctattgcgggaaatggttcgtaagtacaggcaaggacaacctgctgaatgcgtggaggactccatacggagcttccattttccagtccaaagaaagttcctcggtgctgagctgtgacatctccgctgatgacaaatatattgtaacaggttccggcgataagaaagccacagtgtacgaagtgatttactag

SEQ ID NO: 209075 - DNA, 2310 bp, synthetic construct
  misc_feature 1..2310: note = Description of Artificial Sequence: Synthetic coding sequence
  source 1..2310: mol_type = other DNA
atgtacccccagggccggcaccccgccccccaccagcccggccagcccggctttaagttcactgtagcagagtcctgtgaccgtatcaaagacgagttccagttcctccaagctcagtaccacagcctgaaagtggaatatgacaaactagctaacgaaaagaccgagatgcagaggcattacgttatgtattacgaaatgtcctacggtctgaacattgagatgcacaaacaaaccgagatcgctaaacgacttaatacgattttggctcaaattatgcccttcctgtcccaggaacaccaacagcaagtggctcaagccgttgaacgagccaaacaggtgaccatgaccgaactcaacgccattataggtcagcagcaactccaggctcagcatttatctcacgccacacatggccctcctgttcaactgcctcctcacccatcagggcttcagccacccgggatcccgcccgtcacaggtagttcaagcggtctacttgccttgggggctctcggttcgcaggcccacctcacggtgaaagatgaaaaaaatcatcacgaactggaccatagggagcgtgaaagcagcgcaaacaactcagtctcaccctccgagtcactccgtgccagcgagaagcatagaggatccgctgattacagtatggaagctaaaaagcggaaggcagaggaaaaggattccttatccagatatgattccgacggagacaagagcgacgatttagtggtggatgtgagtaacgaagatcctgccaccccacgggtgtctcctgcccactcaccccccgaaaatggcctagataaggcacggagtcttaagaaagacgctcctaccagcccagcaagtgtcgcttcttcatcgagcacaccctcgagcaaaaccaaggacctcggtcataacgacaagtcttctacgcctggcctcaagtcgaacacacctacaccaaggaacgacgcgccaactcccggtacatccaccacaccgggactcaggagcatgcccggaaagccgcccggtatggacccaatcgcatctgctctccgcactcccatctcgatcacttcgtcctatgcggctccctttgccatgatgtcgcatcacgagatgaacggctccttgacctcccctggtgcctacgccggattacacaacattcccccgcagatgtctgccgcagcagcagccgccgccgccgcctacggacgtagccctatggtgtccttcggtgcagtgggtttcgatcctcaccctccgatgagggccactggcttgccatcctccctcgcttctatccccgggggaaaacctgcttatagttttcatgtctcagccgatggacagatgcagcctgtacctttcccgcatgacgcattagcaggcccgggcatacctcgtcacgcccgccagatcaacaccctgagtcacggagaagttgtgtgcgctgtgaccatcagcaacccaacacggcatgtgtacacggggggaaaaggctgtgtgaagatttgggacattagccaacctgggtccaaatccccaatttctcagttggattgcctgaaccgtgataactatatacgaagctgcaaactgctgcccgatggccgaacactcatcgtgggaggggaggcgagtactctgaccatttgggacctggcatcccctacccccaggatcaaggctgagctcacttcttctgcccctgcctgttacgccctcgcaatctctccagatgctaaagtgtgtttttcttgttgttcagacggcaacatcgccgtgtgggacctacacaaccagaccttggtgaggcagttccaaggacataccgatggggcatcctgtatcgacatcagtcatgatggcactaaactgtggaccgggggcctggacaatactgtgcgcagctgggatcttcgagagggaaggcagctgcaacagcacgactttacttcccagatctttagcctcgggtactgccccactggggagtggctggcagtggggatggaatcttcaaatgtggaagtgctgcaccacacgaaacctgataagtatcagcttcatttgcacgagtcatgcgttctgtcattaaaatttgcttactgcggcaagtggttcgtgtcaaccggcaaggacaatctactgaatgcctggaggaccccttatggcgcaagtatattccagtccaaagaaagttcttcggttttgtcttgcgatatatcggcggacgataagtatatagtgacaggaagcggagacaagaaagctaccgtatacgaagtgatttattag

SEQ ID NO: 209076 - DNA, 2295 bp, synthetic construct
  misc_feature 1..2295: note = Description of Artificial Sequence: Synthetic coding sequence
  source 1..2295: mol_type = other DNA
atgtacccccagggccggcaccccgccccccaccagcccggccagcccggctttaagttcacagttgctgagtcttgcgatcgcatcaaggacgaatttcaatttctgcaggctcagtaccatagcttgaaggttgaatacgacaaacttgctaacgagaagacagagatgcagcgtcactacgtaatgtactacgagatgagctacggactgaacatagaaatgcataaacagactgaaatcgctaagagactgaacactattcttgcccagattatgccattcctaagccaggagcatcagcagcaagtcgcccaggccgtcgagcgggccaaacaggttaccatgacagagttgaacgcaatcatcgggcagcaacagcttcaagcgcagcatttatcacacgctacacatggacctccggttcaactcccacctcatccctccggcctgcaacctcctggtattccccccgtaaccggtagttcgagcggattgctggccctcggcgcccttgggagccaagcccatctcacagtgaaagatgaaaaaaaccaccacgagctggaccatagggaacgcgaatcctccgctaataacagtgtgagcccttcagagtctctcagggcatctgagaagcaccgcggctccgctgactactccatggaggccaagaagcgtaaggctgaggaaaaggattctctgagccgttatgattccgacggggataagtccgacgatctcgtggtggatgtgtcaaacgaggaccccgccacccccagagtttcccccgctcattcccctcccgagaacggacttgacaaagctaggtccttgaagaaagacgccccaacctcacccgcctcagtcgcctcttcttcttccactccgtcttcaaaaacgaaggatctgggtcacaacgataagagtagcacacccggattgaaaagcaatacccccacaccaagaaacgatgctcctacacccgggacatctacaacaccaggattaagaagcatgccgggtaagcccccaggcatggatcctatcgcgagtgccctccgaaccccaatcagtataacctctagttacgccgcacctttcgccatgatgtcacatcatgagatgaacggttctctgacgagtccaggcgcctacgcaggcctgcacaacattccaccacagatgagtgcagccgccgcagcagctgcggccgcgtacgggcgttctcccatggttggcttcgatccccatcctcctatgagagcaacgggcctgccttcttcactcgcgagcatacccggcggaaaaccggcctatagctttcacgtgagcgcggacgggcagatgcagcccgtgcctttcccccatgacgcgttggcgggccccgggatccccaggcatgcccgacagatcaatacattatctcacggggaagtcgtttgtgctgtgactatctccaaccccacaaggcatgtgtacaccggaggtaaggggtgcgtgaagatttgggacattagtcagccaggctcaaaatccccaatctcccagctcgattgcttgaatcgggacaattatatcagatcttgtaagcttctgccggacggtcggactctgatcgttggaggtgaagcaagcacactgactatttgggatctggctagcccaaccccgcggatcaaggcagagcttaccagttccgccccggcgtgctacgccctcgccatttctccggatgctaaagtgtgcttttcttgttgtagcgatggaaacattgccgtgtgggacctgcacaaccaaactttagtgcggcagttccaggggcatacagatggcgcctcatgcatcgacatctctcatgacggaacgaaactctggactggggggctcgacaatacggttcgctcctgggacctgcgagagggcagacagctgcagcagcatgatttcacctcccagatcttttctctgggatattgccctacaggagagtggcttgctgtggggatggagagttcgaacgtggaggtattgcaccacaccaaacctgataagtatcagttgcatctccatgaatcttgtgtgctgtccctgaagttcgcatactgcgggaagtggttcgtaagcactgggaaagacaacctcctgaacgcatggagaactccatacggcgccagcatattccagtccaaagaatcctcttccgttctctcctgcgacatctcagcagacgacaagtatatcgttacaggctccggggataagaaagccaccgtttatgaggttatttactag

SEQ ID NO: 209077 - DNA, 2319 bp, synthetic construct
  misc_feature 1..2319: note = Description of Artificial Sequence: Synthetic coding sequence
  source 1..2319: mol_type = other DNA
atgtacccccagggccggcaccccgccccccaccagcccggccagcccgggttcaagttcactgtggcggaaagctgcgaccgaattaaagatgagttccagttcctgcaggcacagtatcactccctgaaggtggagtacgacaagctggccaatgaaaagacagaaatgcagaggcactatgtgatgtattacgaaatgagctacggactgaacattgagatgcataagcaaactgagatcgcaaagcgcctgaacacaatccttgcccagattatgccttttctttctcaagagcaccagcagcaggtcgctcaggccgtggaacgggcaaagcaggtgacaatgactgaactcaatgctatcattgggcaacagcaacttcaagcacagcacctcagtcatgctactcatggaccacccgtccaactgcccccccatccaagcggtcttcagcctcccggaatcccgcctgtcacaggatcgagtagcggcctactggcactaggggccctggggagtcaagcacacctcactgtcaaagatgaaaagaaccaccatgagctggatcaccgagagcgggagtcctccgctaacaattcagtgtctccgagtgaatctttacgagcttccgagaaacacagagggagtgctgactactcaatggaggctaagaaacggaaagcagaggagaaggacagcctatctcgttacgactccgacggtgacaagagcgacgacctggtcgtggatgtgtctaatgaagacccagctacaccccgcgtaagtcccgcacattctccgccagagaacggtctagacaaggcaagaagcctgaagaaagatgccccgacaagtcctgcctctgtggcctcatcctcctctactccctcatcaaagaccaaagacttaggacacaatgacaagtcctctacacctgggttgaagtctaataccccaacaccacgtaacgacgctcctactccaggcacgagtacaactcctggattgcgcagcatgcctggtaagcctcctggaatggatcctattggtatcatggcctctgcactgagaacacctatctctattacctccagttatgctgcaccctttgcgatgatgtctcatcatgaaatgaatggctccctgacgagcccaggcgcttacgctgggctgcataatatcccacctcagatgtccgcagccgccgccgcagctgcagcagcttatggtcgatctcctatggtatctttcggagccgtggggtttgacccacatccccccatgcgagcaacagggttgccatcttctctggcctcaatccctggtgggaagcctgcttatagcttccatgtaagcgcagacggccagatgcagccggttccatttccacatgatgcccttgccggtcccggaattcctcggcatgccagacagatcaatacgttatctcacggcgaggtcgtttgcgccgtcaccatttccaaccccacaagacacgtctacacgggaggtaaaggctgcgtgaagatctgggatatcagccagccgggttccaaatccccaatctctcagcttgattgtcttaacagagataactatatacgttcttgtaaacttctgcccgatggtaggacattgatcgtgggcggcgaggcctcaacgttaacgatctgggacctcgccagtcccactccgcgaatcaaggcggaactgacaagttcggcaccggcttgctatgcgctggctataagcccagacgctaaagtctgtttcagctgctgttcagatggtaacattgccgtctgggatctgcataatcagacactggtcagacagtttcaaggacacacggacggggcatcctgcatagacatttcccacgatgggactaagctgtggacgggggggctggataatacagtccgatcttgggatttgcgcgaaggcagacagctgcagcagcacgattttactagccagattttttccctcggctactgtcccacaggggagtggctagcagtaggcatggaatcaagcaacgtggaagtactccatcatactaaaccagacaagtaccaattacacctacatgagagctgcgtcctcagtctgaaatttgcgtactgcggcaaatggttcgttagcacgggcaaggacaatcttttgaacgcgtggcgcaccccctacggagccagtatcttccagtccaaggaatctagctctgtgctgagttgtgacatctccgccgatgacaaatatattgttaccggctctggggataaaaaggcgacagtgtatgaagttatctactag

SEQ ID NO: 209078 - DNA, 2319 bp, synthetic construct
  misc_feature 1..2319: note = Description of Artificial Sequence: Synthetic coding sequence
  source 1..2319: mol_type = other DNA
atgcccccccccccccccctgagctgcctgcggggcctgcaggccccccatcagcccggccaacccggcttcaagttcacagtggcagagtcttgtgaccgaatcaaagacgaatttcaatttttacaggcccagtatcactcgctgaaagtggagtacgacaaacttgctaacgaaaagaccgaaatgcagagacactacgtgatgtattacgaaatgagttacgggcttaatatcgagatgcacaaacaaacagaaatcgctaagcgccttaacaccattcttgctcaaattatgccattcctctcccaagaacaccagcagcaagtcgcccaggccgtagaacgggccaagcaggtgaccatgacggaactgaatgccatcatcggacagcaactccaagcccagcacctgtcccacgcgacccacggcccaccagtgcagcttccgcctcatcccagcggccttcagcccccagggattccgccagtgaccgggtccagcagtgggctgctggcacttggcgctctgggtagtcaggcccatttgacagtcaaagatgaaaagaaccatcatgagctggaccaccgcgaaagagagagcagtgccaacaattccgtttcacccagcgagtctcttcgcgccagcgaaaaacacagagggtccgctgactatagcatggaggccaaaaaaagaaaagccgaagaaaaggatagcctctcacggtatgatagcgacggcgacaagagcgatgatcttgttgtggatgtcagcaatgaggatccagctacacccagagtaagccccgctcattccccccccgagaatggattggacaaggctaggagtctaaagaaggatgccccaaccagtccagcgagcgtagcatcctctagctcaacaccttcaagtaaaactaaggatcttggccataatgacaaaagttcaacgcccgggctgaaatctaacactccaacaccaagaaatgacgctcctacccctgggacctccaccacacccggcctgagaagtatgcccggaaaacccccgggaatggacccaattgggatcatggcaagcgccctcaggacccccatatccatcacaagctcttatgcggctcccttcgcaatgatgtcgcatcacgaaatgaatggttctttgacctcgccaggggcatacgcaggcctgcacaatataccacctcagatgagcgcagcagccgccgccgcggctgctgcatatgggcggagcccgatggtggggttcgatccacacccacctatgcgggcaacgggcctacccagcagcctcgcctctattcctgggggtaagcccgcctatagcttccacgttagtgctgacggacagatgcaaccggtgccatttccacacgatgccctagctgggcccggaattcctcgccatgctcgtcagataaataccctcagccacggagaagtggtatgcgccgtgacaatttccaatccaacgagacatgtgtacaccgggggaaaggggtgcgtcaaaatctgggacataagccagcctggtagtaaatcacctatcagccaattagactgtctaaaccgcgataactatattcgctcctgcaaactgctgccagacggcagaacactgattgtgggcggggaggccagtacactaaccatctgggatctcgcctctcccacgccaagaataaaggcagagctgacaagctctgcccccgcatgttacgcactggcgatctcaccggacgcaaaggtgtgttttagctgttgcagtgacggtaacattgccgtctgggatctgcacaatcagaccctggtaaggcaatttcaaggccatacagatggtgccagctgtatcgatatctcacacgatgggaccaagctgtggactggcggcttagacaatacagttcgctcatgggaccttcgtgaaggcagacagctacagcagcacgactttacttcacagatcttcagtctgggctactgtcctactggcgagtggctggcagtaggtatggaatccagtaatgtggaggtcctccaccacacgaagccggacaaataccagctgcatttgcacgagtcttgtgtgctgagtctgaaattcgcatactgcgggaagtggtttgtgagcacgggaaaggacaatctgcttaatgcatggcgtaccccctacggggcatccatatttcagtctaaggagagtagcagcgtcctgtcctgcgacataagcgccgacgataaatacatcgtgactggcagcggcgataagaaggccactgtgtatgaggtgatatactag

SEQ ID NO: 209079 - DNA, 2325 bp, synthetic construct
  misc_feature 1..2325: note = Description of Artificial Sequence: Synthetic coding sequence
  source 1..2325: mol_type = other DNA
atgcccccccccccccccctgagctgcctgcggggcctgcaggccccacaccaacctgggcagccagggttcaaatttacagtggctgagagttgcgaccggattaaagacgagttccagttccttcaggctcaatatcatagtctcaaagtggaatacgacaagctcgctaatgagaagaccgagatgcagagacactatgtgatgtactacgagatgagttacgggttaaacattgagatgcataagcaaactgagatcgccaagcggctcaacaccattctggctcagattatgccattcctgtcccaggagcatcagcagcaggtggctcaggctgtggagcgagctaagcaggtcactatgactgagctcaacgccattatcgggcagcaactgcaagcccagcatctgtcgcacgccacccatggaccaccagtccagcttccccctcacccaagcggactccaaccgcctggcatacccccagtaacggggagtagtagcgggctcctagcactgggggccctgggttctcaggcgcatctcacagtgaaggacgaaaagaaccaccatgaactggaccacagggagagggaatcaagcgcaaacaattctgtctcccctagcgagtcgctgcgtgcaagcgaaaagcaccgcgggtctgcagattattccatggaagcgaaaaaacgaaaagctgaggagaaggactctctctccagatatgatagtgacggcgacaaatctgatgatttggtcgtggatgttagcaatgaggaccccgcgacacccagggtcagccccgcacactcacctccggaaaacgggctcgacaaggcaaggagtctgaagaaagatgccccaacgtctccagcctcagtggccagcagcagtagtaccccgagctctaagaccaaagaccttggccacaacgataaatcctccaccccgggtttgaaatctaacactcccacccctcgtaatgatgcacctacaccaggaacctcaacaacccccgggttacggtccatgccaggaaagccccccggaatggaccctatcgcaagcgcactgcgcacccccatctccattacctccagctacgcggctccattcgccatgatgtcccatcatgagatgaatggctccctaacgtctcccggcgcatatgccggtctgcacaacatcccaccacagatgtcagctgctgccgcagccgccgcagctgcttatgggcggtcacctatggtgtcctttggtgccgtcgggttcgaccctcacccccccatgcgggccaccggacttccctctagccttgcctcgatccctggtgggaaaccagcctattcattccatgtcagtgccgacgggcagatgcagccggtgccattcccccatgatgcactggcaggacctggaatccctcgccacgctcgccagatcaatacgttgtcacatggtgaggtggtctgtgcagtgactatttctaaccccacacgtcacgtctataccggcggaaaagggtgtgtgaaaatctgggatatatcgcagccagggtccaaatcccctataagccagttagactgcttaaaccgggataattatattcggtcttgcaaactgcttccagatggccggactctcatcgtcggcggcgaagcatccactctaaccatttgggacctcgcttccccaacaccccgtatcaaagcagaactaacgtcaagcgcccctgcatgctatgctttagcgatttcgccagacgccaaggtgtgcttctcttgctgctctgatggaaacatcgccgtgtgggacctgcacaatcagacactggtccgccagttccagggtcatactgacggtgccagttgcattgacatctcacatgacgggactaagctctggacaggtggacttgataacactgtccgcagttgggaccttagggagggtcggcagttacagcagcacgacttcacatctcagatcttttccctcggatattgtcctacaggggaatggctagccgtcggaatggagtcgtctaacgtggaggtactgcatcacaccaagcctgacaagtaccagctgcatttgcacgagtcatgtgtactaagcctcaaatttgcgtattgcggaaaatggtttgtgtcaacgggaaaagacaacctcttgaatgcatggagaacaccttatggcgcttccattttccaatccaaagaatcctcttctgtgcttagctgcgatattagcgccgatgacaagtacattgtgaccgggtctggggacaaaaaagccaccgtctatgaggtcatctattag

SEQ ID NO: 209080 - DNA, 1719 bp, synthetic construct
  misc_feature 1..1719: note = Description of Artificial Sequence: Synthetic coding sequence
  source 1..1719: mol_type = other DNA
atgaccagccgggaccagccccggcccaagggcccccccaagagcacaagtccgtgccccgggatttcaaatagcgaaagttcaccaaccctgaactatcaaggcatcctcaaccgtctgaagcagttccctagattctctccacacttcgcagctgaactcgagtctatttattatagcctgcacaagattcaacaggatgtggcggaacaccacaaacaaatcggaaatgtcctgcagatagttgaatcttgcagtcaactgcaaggatttcagtctgaagaagtgtctccagccgagcctgcatcacctggcactccacagcaggtgaaggataaaacgctccaggagtcttcatttgaggacatcatggccacccgcagttctgactggctgagacgtcctctgggcgaagataaccagcccgaaacccagctattctgggataaggagccatggttctggcacgatactctcaccgagcagctgtggcgaatcttcgccggtgtgcacgacgaaaaggccaagcctcgggacaggcagcaggccccaggcctggggcaggaaagcaaggctcccggatcgtgtgatcccggtaccgatccttgccctgaggatgcttccactccaaggccccccgaggccagcagttcccctcctgagggttcccaggatagaaacacgtcctggggggtggtgcaggagcctccaggccgggctagccggttcttgcagagcatatcatgggatccagaggatttcgaggatgcttggaagcgcccagacgcactccctgggcaaagcaaaagacttgccgttccttgtaaactggaaaaaatgaggatcttggcccacggtgaactcgtgcttgctaccgcaatctccagcttcacaagacacgtgtttacatgtggacggaggggaattaaggtttggagccttacgggccaggtcgctgaagaccggttcccagagtcacacttgcctatccagacacctggggctttcctgaggacatgtcttctaagtagcaactcaagatctctgctgaccggcggatacaatctcgctagcgtgtccgtctgggacctcgccgccccttcactccatgtaaaggagcaactcccatgtgccggccttaattgccaagcactcgatgccaatctggacgccaacttggcctttgcgagttttacctctggcgtcgtgcggatatgggatctgcgggatcaaagcgtcgtgcgtgatctcaaaggttacccagatggcgtgaagagcatcgtggttaaggggtataacatctggacaggcggccctgacgcgtgcctgcgttgttgggaccagcgtactatcatgaagcccctggagtatcaattcaagagccagattatgagcctgtctcattcgcctcaggaggactgggtgctccttggaatggcaaacggacagcagtggctgcagagtacttcaggttctcaaagacatatggttggccagaaggactcggtaatcttgagtgttaagttcagcccgttcggccagtggtgggctagcgtaggaatggacgactttctaggcgtctactctatgcccgccgggactaaggtcttcgaagttcctgagatgagcccagtgacctgctgtgatgtgtcctccaataataggttagttgtaactggctccggcgaacatgcttccgtataccagattacttattag

SEQ ID NO: 209081 - DNA, 1251 bp, synthetic construct
  misc_feature 1..1251: note = Description of Artificial Sequence: Synthetic coding sequence
  source 1..1251: mol_type = other DNA
atggccacccggagcagcgactggctgcggcggcccctgggcgaggataatcagccagagactcagctcttctgggacaaagagccatggttttggcatgatacactgaccgaacagctgtggaggattttcgccggtgtgcatgatgaaaaagcaaagcctagagatcgacagcaagcacctgggctcggacaggaatctaaggcacccggaagctgcgatccaggaacggatccctgcccggaggatgcctctacccctcgccctcctgaggcctcttcctccccccccgaagggtcccaggatcggaacacatcttggggtgtggtccaggagcccccaggtcgcgcctcacgcttcttgcagagtatcagttgggaccctgaagattttgaggacgcgtggaagcgacccgatgccttgcccggccagtccaaaagactggctgtaccttgtaaacttgaaaagatgaggatcttggcccatggtgaactcgtgctggctacagccattagttctttcacaagacacgtctttacttgcggaagacgcgggattaaggtgtggagcctcacaggccaggtcgccgaagaccggttccctgaatctcatctccccatacagacccccggtgcattcctgcgtacatgcctgttgtcttctaattcaagatcccttttgactggcgggtacaacttggctagtgtttccgtgtgggatctggccgcgccgagtcttcacgttaaggagcagttgccatgcgccgggctgaattgccaggccctcgatgcaaatttggatgcaaatttagccttcgcctcgtttaccagcggcgtcgtgaggatctgggacctgcgggaccagagtgtggtaagagacctcaagggctaccccgatggggtaaagtccattgtcgtcaaaggttataacatctggactggaggccccgatgcatgtctccgatgctgggatcagcgaaccatcatgaaaccactggagtaccagtttaaatcccagattatgtcgctgtcccatagtccgcaggaggactgggtgcttcttggcatggcaaacgggcagcagtggctgcagtcgacgtctgggtctcaaagacatatggtagggcaaagacagagacaccccgagagacaggttctccccctgtggcctgtggtcggcaaaagatggaacggcaggcttccttggcgccttcagcatgctgggggggacaaaagcgtgagaggcgcctag

SEQ ID NO: 209082 - DNA, 1719 bp, synthetic construct
  misc_feature 1..1719: note = Description of Artificial Sequence: Synthetic coding sequence
  source 1..1719: mol_type = other DNA
atgaccagccgggaccagccccggcccaagggcccccccaagagcactagcccctgccccggcatctccaactcagagagctcccctacgctcaattaccaggggatcctaaaccgccttaaacagttccctcggttctctccacactttgcagcagaactcgagtcaatttattattccctacataaaattcagcaggatgttgcggagcatcacaaacagatagggaacgttcttcaaatcgtggaatcctgttcccagctccaggggttccaatccgaagaagtttcaccagctgagccggccagtccagggacgccacagcaggttaaagacaaaacgttacaagaatcttctttcgaagacatcatggctacccgctccagtgattggctgagaagaccactgggagaagataaccaaccggaaacacagctgttttgggataaggagccttggttctggcatgacactctgactgagcaattatggagaattttcgccggcgtacacgatgagaaggcgaagcccagagatcggcattttagcatttttcagggacaagagagtaaggcgcctggatcgtgtgacccaggcacagacccctgtcccgaggacgccagcacgcccaggcctccagaagctagcagcagtcccccggaaggaagccaggacagaaatacatcatggggtgtcgtccaggagccaccagggagggcctctcgcttcctccaatccatttcttgggaccccgaggacttcgaggacgcttggaagcgaccagacgccctgccaggccagtccaaacggctcgcagttccctgcaagctggagaagatgcgaattttggcccatggagaactcgttttagcaacggcaatctcttcattcacccgacatgtgttcacctgcggccgccgtggcataaaagtttggtctctcacaggccaagtggccgaagaccgatttccagagtcccacctgcccattcaaacccctggcgcttttcttcggacctgtttgctgtcatcaaacagtagatcacttctcactggcggatataatctagcatccgtgagcgtttgggacttggccgctccatctctgcatgtcaaagagcagcttccatgtgcaggcctgaattgtcaggccttggacgcaaacctggatgcaaatctcgcatttgcctccttcacctccggggttgtcaggatctgggatctccgcgaccagagcgtggttcgggacctgaagggttatcctgatggcgtgaagagtatagtagtgaagggttacaacatatggacaggaggccctgacgcatgcttgcgatgctgggatcagcgtactataatgaagcctctggagtaccagttcaaaagtcagataatgtctctctcccacagtccacaggaagactgggtcctgttagggatggctaacggccagcagtggctgcagtctacctccgggtcccaacggcacatggtgggccagaaggactcagtaattctgtccgtgaaattttccccattcggtcagtggtgggcttctgtcggcatggacgacttcctcggggtgtattctatgcctgcagggacgaaggtgttcgaagtgccagaaatgagccctgtgacatgttgcgatgtgtcttcaaataaccgccttgtggtgaccgggtctggcgaacacgcttccgtataccagattacgtattag

SEQ ID NO: 209083 - DNA, 1350 bp, synthetic construct
  misc_feature 1..1350: note = Description of Artificial Sequence: Synthetic coding sequence
  source 1..1350: mol_type = other DNA
atggccacccggagcagcgactggctgcggcggcccctgggcgaggacaaccagcccgagacgcagctgttttgggacaaagagccctggttctggcatgacacactgaccgaacagctgtggcggatctttgcaggagtgcacgacgaaaaagcaaagccccgggatcggcagcaggcgcccggccttggacaagaatcgaaggcccccggaagctgtgaccctggtaccgatccctgtcccgaggacgcctctaccccccggcctcctgaagccagttctagccccccagagggttctcaggaccgcaatacgtcttggggagtcgtgcaggagccccccggcagagcgtccagatttctgcagtcgatcagttgggatcctgaagattttgaggacgcctggaagcggcccgacgccctgcccggacagagcaagcgactcgccgttccatgtaaactggaaaagatgagaattctggcccacggagagctagtccttgccaccgcaatcagttccttcacccggcacgtatttacctgcgggagacggggaatcaaggtttggtctctaaccggccaggtggccgaggaccgctttccagagagtcaccttccgattcagactcctggagcttttttgcgaacttgcctactgtcttctaacagcaggtccctcctgactggtggctacaacctcgccagtgtatccgtgtgggatttggctgcccctagcctacacgtaaaagagcagctgccctgcgccggtttgaactgccaggccctggatgccaatctggatgccaatctcgctttcgcttcctttaccagcggtgtggtgaggatttgggacctgcgagaccaatccgtggttagagacctgaagggctaccccgacggggtgaaaagtatcgtagtcaagggctacaatatttggaccgggggccccgacgcttgcctgcgttgctgggaccagagaacaattatgaagccattagaatatcaattcaagagccagattatgtcactgagccacagtccacaggaggattgggtgctcctcggcatggctaatggccaacagtggctgcaaagcacatccggctcgcagcgacatatggtggggcagaaagacagtgtcatcctatctgtgaaattcagcccgttcggtcagtggtgggctagcgtcgggatggacgatttcctgggggtgtatagtatgccagcaggaaccaaggtcttcgaggtgcctgagatgagtccggtgacatgctgtgacgtctcatccaataacagactggtagtcacggggtccggcgagcatgcttctgtttaccagatcacttattag

SEQ ID NO: 209084 - DNA, 1716 bp, synthetic construct
  misc_feature 1..1716: note = Description of Artificial Sequence: Synthetic coding sequence
  source 1..1716: mol_type = other DNA
atgaaccagctgcggggcaagaagagctgccacaccggcctgggccggagcgctggttggaacatccctatcgggctgctctattgcgatctacccgaacctaggaaaccccttgaaaaggccgtggctaacttcttttcaggctcgtgcgccccatgcgctgatggaacagacttcccacagctttgccagctgtgccccggttgcggctgttccacgctgaatcagtattttgggtatagcggggcttttaagtgtctgaaggatggcgccggggacgtcgcatttgtgaaacattctaccattttcgagaatctggccaataaggcagatcgcgatcagtacgagctgctttgccttgataatactcgaaaaccagttgacgaatacaaggactgccacttggctcaggtccccagccatacagtcgtggccaggtctatgggtgggaaggaagacctgatctgggagctgctgaaccaagcccaggaacacttcggcaaggacaagtctaaggagttccagctatttagttcaccacacgggaaagacttgttattcaaggactctgcccacggcttcctgaaggttccgccgcgcatggatgccaagatgtacttaggatatgagtacgtgaccgccattaggaatctccgggaaggcacttgcccagaagcccccaccgacgaatgtaagcccgtgaagtggtgtgccctgtcccaccacgaacgcctcaagtgcgacgaatggtctgtaaattccgtagggaagattgaatgcgtctctgccgaaacgacggaagactgcatagcgaagattatgaatggtgaagctgatgccatgagtttggatgggggtttcgtctatatcgctggcaagtgcggactcgtgccagtattagccgagaactacaataagagcgacaattgcgaagacacccccgaggccggctattttgctatagctgttgtgaaaaaatccgcctcagacctcacatgggataatctgaaaggcaaaaagtcttgtcacacagcagttgggcggacagctggatggaatattcctatgggtttgttgtataacaagatcaaccactgccgcttcgacgaatttttcagtgaaggttgtgctcccggctccaaaaaagatagctccctctgcaagctgtgcatggggtcaggtctgaacctgtgcgagccaaacaacaaggaaggttattacggctatacaggagcattccggtgcctggtggagaagggcgacgtggcttttgtgaaacaccagacagtgccccagaacactggcggtaaaaatccagacccgtgggccaagaatctgaacgaaaaagattacgagctgctgtgccttgacggaacccgcaagcctgtggaagagtacgctaactgccacttggcccgagcgccaaatcacgcggttgtgacccgcaaggacaaggaggcctgtgtccacaagatccttcggcaacaacaacacctgttcgggtccaatgtgaccgactgttctggcaacttctgcctgttccgttctgagacaaaggatctgctctttagagatgacactgtgtgtctggcaaagcttcatgatcgcaatacctatgagaaatatctcggggaggagtatgttaaagccgtgggaaacctacggaaatgtagcacctcaagtctccttgaagcttgcacgttcagacggccgtag

SEQ ID NO: 209085 - DNA, 2097 bp, synthetic construct
  misc_feature 1..2097: note = Description of Artificial Sequence: Synthetic coding sequence
  source 1..2097: mol_type = other DNA
atgcggctggccgtgggcgccctgctggtgtgcgccgtgctgggcctgtgccttgccgtgccagacaaaacagtccgctggtgtgcagtgtccgagcacgaggccacaaaatgccaaagttttagagaccacatgaaatccgtgataccttcagatgggccatccgttgcctgcgtgaagaaggcatcatacctggattgtatccgcgccattgctgcgaatgaagccgacgcagtgacactggacgccggacttgtgtatgacgcctacctggcccccaataaccttaagccggtcgtggctgagttttacggcagtaaagaggacccccagaccttctactacgccgttgccgtagttaaaaaggactccgggtttcagatgaatcagctgcggggtaagaaaagctgccacacagggctcggaagatccgcaggctggaacattcctatagggttactctattgcgatctgcccgaacctcggaagcccctggaaaaagccgtggccaatttcttttcgggatcttgtgccccctgtgcagacggaacagatttcccacagctgtgtcagttatgtcccgggtgcggctgctctaccctcaatcaatacttcggctattcgggcgccttcaagtgccttaaggacggggccggcgacgtggcctttgttaagcactctaccatcttcgagaacctcgcaaacaaagcggaccgggatcagtacgagctcttgtgccttgacaacacccgcaagccagtcgacgagtacaaagattgccatctggcacaggtgccatcccacaccgtggtcgcccgctctatgggcggtaaggaggatctcatctgggagctgctgaaccaggcccaagagcatttcggcaaagataagtcaaaagaattccagcttttcagcagcccacatggcaaggacctactgttcaaggactccgcacatggattcttaaaggttcccccacggatggacgctaaaatgtatctgggatacgaatacgtcacagccatacgcaacctcagagaaggaacgtgtcctgaggcccctacagatgaatgtaagcctgtgaagtggtgcgctctgagtcaccacgagagattgaagtgcgatgagtggagcgtaaacagtgtcggaaagatagagtgtgtaagcgctgagaccacggaagactgtatcgcaaagatcatgaatggtgaggccgacgccatgagcttggatggaggatttgtatacatagccgggaagtgcggtctcgtgccagtcctggctgaaaactataataaatccgacaactgcgaagacacacccgaagccggttatttcgccattgccgtggttaaaaaatctgcgagtgatcttacttgggacaacctgaagggaaagaagagctgccataccgccgttggccgaactgccgggtggaatatccccatgggcttactgtataacaagattaatcattgtcggttcgacgaattcttcagtgaaggatgcgcccctggttccaagaaagacagtagcctctgcaagctgtgtatggggagtggacttaacctatgcgaaccgaacaataaagaaggctactacggctacacaggtgccttcaggtgcctggtcgaaaaaggggacgttgccttcgtgaagcatcagaccgtgccacaaaatacgggcggcaaaaaccccgatccatgggccaagaatttgaacgagaaggactacgaactcctgtgcctggacggcacaaggaagccagtcgaggaatatgcaaattgccacctagctagggcacccaatcatgctgtggtcacgagaaaagacaaggaggcttgtgtgcacaagatcctcagacagcagcagcatcttttcgggtccaacgtaaccgactgcagtgggaatttctgcctgtttagaagcgaaacaaaagacctcctgtttagggatgacaccgtgtgcttggcaaagctgcatgaccggaacacgtacgagaagtacttaggcgaagaatatgtgaaggcggtgggaaatctcaggaaatgctctactagctcccttttagaagcgtgtactttcaggcgaccttag

SEQ ID NO: 209086 - DNA, 2283 bp, synthetic construct
  misc_feature 1..2283: note = Description of Artificial Sequence: Synthetic coding sequence
  source 1..2283: mol_type = other DNA
atgatggaccaggcccggagcgccttcagcaacctgttcggcggcgagcccctgtcttacacacggttctccttggccaggcaggttgacggagataacagccacgtcgagatgaaattagccgtggatgaggaggaaaatgcagacaataataccaaggccaatgtgacaaagcccaagcggtgtagtggcagcatctgctatggcactatcgcagtgatcgtattcttcttgattgggttcatgatcggatacctcggctactgtaaaggggtcgaacccaagaccgagtgtgagaggctggcgggcactgagtctccagttagagaagagcctggggaggattttcccgctgcaaggaggctttattgggatgacctaaagcgcaaactatctgaaaagttggattccaccgacttcactggaacgataaagctgctgaacgagaactcttatgtgcccagagaagccggctctcaaaaagatgaaaatctcgccctctatgtggaaaaccagttccgcgaattcaagctcagtaaggtctggagggatcagcactttgtgaaaattcaagtcaaggattctgcacaaaacagcgtaatcattgttgacaagaacggcaggctggtgtacctggttgagaacccgggcggttatgttgcctactctaaggccgccaccgtgacaggcaagctcgtccacgccaactttggtaccaaaaaggattttgaagatttgtataccccagtgaatggatcaatcgtcatcgtacgggccggtaagatcactttcgctgagaaagtcgctaacgcagagtcactgaacgccattggtgtgttgatttatatggaccaaaccaagttcccgatcgtcaacgccgagcttagtttcttcggtcacgcacacttgggcacaggtgacccatacacacctggtttcccaagctttaatcacacccagtttccacccagtaggtcctccgggctcccaaacatcccagtgcaaaccatctcacgcgctgctgccgaaaagctctttgggaacatggagggggactgtccctcagattggaagactgactcgacttgccgaatggtgacctcggagtctaagaacgtgaagctcaccgtgagcaacgtgctgaaagagattaaaatcctgaatatcttcggcgttattaagggatttgtcgagcctgatcattatgtggtggtgggggcccagagggatgcctgggggcccggagccgcgaaaagcggcgtcggcactgctttactgctcaaactggctcaaatgttttccgatatggtgctcaaagacggattccaaccgtcacgttctatcatcttcgccagctggtccgcaggcgacttcgggagcgtaggggctactgaatggctagaggggtatctgtcaagtttacacctcaaagcattcacctatattaacttagataaggctgtgctgggcacctccaacttcaaagttagtgcatcccccctcctctataccttgattgaaaaaacaatgcagaacgttaagcaccctgtgaccggtcagttcctgtatcaggattccaattgggcttccaaggtggaaaaactcacacttgacaacgcggcctttccatttctggcttacagcggcatcccggcagtcagcttttgcttctgcgaagatactgactatccatacctgggcacaaccatggacacatacaaagaattgatcgagcggattccagaactgaacaaagtagccagagccgccgctgaggttgcaggacagttcgtgatcaaattaacgcatgatgtggagctcaacttggactatgaacgctataactctcagttgctgtcttttgtgcgcgaccttaatcagtatcgggcagatatcaaggagatgggacttagcctgcaatggctgtattctgcccgaggcgatttttttcgggctacctctcggctcaccaccgactttggtaacgccgagaaaacagaccgttttgttatgaaaaagttgaacgatagagtcatgcgcgttgagtaccatttcctcagtccctatgtgtcaccaaaggaaagcccttttaggcacgtcttctggggaagtggttcccacaccctaccggctctgttggagaacctcaagttaaggaaacaaaataatggagccttcaatgagaccctattccgcaatcaattggctctggctacgtggacaatccagggtgctgccaacgcactttccggcgacgtctgggatattgataacgaattctag

SEQ ID NO: 209087 - DNA, 2283 bp, synthetic construct
  misc_feature 1..2283: note = Description of Artificial Sequence: Synthetic coding sequence
  source 1..2283: mol_type = other DNA
atgatggaccaggcccggagcgccttcagcaacctgttcggcggcgaaccattgtcctacactaggttcagtctggcacgccaagtggatggggacaatagccacgtcgagatgaagctcgcagttgacgaagaagaaaatgcagataacaacactaaggcgaatgttacaaaacccaagcgctgttctggaagcatctgttatggaactattgctgtcatcgtgttttttcttatcggattcatgatcggatacctgggctactgcaaaggggttgaaccaaagactgagtgcgaacggctggccggtaccgaaagtccagtgcgcgaggagccaggagaggacttcccagcagcccgcaggctgtattgggatgacctgaaacgcaagctgtcagaaaagttggatagtaccgatttcaccggtacgataaagctgctgaacgagaatagttatgtcccaagggaggccggctcacagaaggacgagaatctcgccctatacgttgagaatcaatttcgagagtttaagctgtcaaaagtgtggcgcgaccagcactttgttaaaattcaggtgaaggacagtgcccagaactctgttatcattgttgataagaacgggaggctggtatatctggttgagaatccaggaggctacgtggcatattcaaaagcagcgactgtgaccgggaagcttgtccatgcaaactttgggaccaagaaggactttgaagacctgtacacccccgttaacggcagcatcgtgattgttagagctggaaagatcaccttcgccgagaaggtagccaatgccgagtccctaaatgctatcggcgtcctgatttacatggatcagacaaagttcccaattgtgaacgcggagctgtcattctttggacacgcccacttgggcactggcgacccctatacccccgggtttcctagcttcaaccatacccagttccccccctccaggagctccggtttgcccaatataccagtccagactatatcaagggctgcagcggaaaaactgtttggaaacatggagggagactgcccttcagattggaaaacagactccacctgccggatggtaacttcagaatctaaaaacgtgaagcttaccgttagtaacgtcctgaaagagatcaagatcctgaatattttcggggtgattaagggattcgtagaacctgatcattatgttgtggttggagcccagagggatgcctggggaccaggggctgccaagagtggggtgggcaccgctctgcttctaaaattagcccaaatgttctccgacatggttctgaaggatgggttccaaccaagcagatccattatttttgcatcatggtcagcgggcgacttcgggtctgtaggagcgaccgagtggctcgagggatacctatcctctttacacctgaaggcgttcacttacattaatctggacaaggccgtgctgggtacttcgaactttaaagtcagcgcttcacctctactctacaccctcatagagaagaccatgcaaaacgtgaagcacccggtaactggacagttcttatatcaggacagcaactgggctagtaaagtggagaagctgacacttgataatgctgccttcccattccttgcatacagtggtatccccgctgtcagcttttgtttttgtgaagataccgattacccttatctcggcactaccatggacacatataaagagctgatcgaaagaatcccggaattaaataaagtggcccgagctgccgcagaagtggccggacagtttgtcattaaactgacccacgacgtggaattgaacctggattacgaaagatataattctcagttgttatccttcgtgagagatctcaatcagtatcgggcagacatcaaggaaatgggcctgtctctgcagtggctctactctgcaagaggcgatttttttcgggcaacaagtcgtctgacaactgattttggtaacgctgaaaagactgatcggttcgtaatgaagaagctcaacgaccgggtaatgagggtggagtatcatttcctgagtccatacgtcagtccgaaggagagtcctttcaggcacgtgttttgggggtcaggatctcataccctacctgctctccttgaaaatttaaagctaagaaagcaaaacaacggtgccttcaatgaaacgttattcagaaaccagctcgcactggccacatggaccatccagggcgcagcgaacgccttatccggcgatgtatgggacatcgataatgaattctag

SEQ ID NO: 209088 - DNA, 1437 bp, synthetic construct
  misc_feature 1..1437: note = Description of Artificial Sequence: Synthetic coding sequence
  source 1..1437: mol_type = other DNA
atggaccagaccaagttccccatcgtgaacgccgagctgagcttcttcggacatgcacacctgggtacaggggatccttacacacccgggttcccctcctttaatcatacacaatttccgccttcccgaagttcaggactgccaaatattccggtccagacaattagccgggcagcagctgaaaaacttttcggaaatatggagggggattgtcctagcgattggaagacagactcgacctgcaggatggtcacctcagagagtaagaatgtgaaactgaccgtgagtaacgtgttaaaggaaatcaaaattcttaatatttttggggtgatcaagggcttcgtggagcctgatcactatgtggttgtcggtgcccaaagagacgcttggggaccgggcgccgctaagagcggagtggggaccgctctattgctaaagctcgcccagatgttttcagacatggtgttgaaggacggatttcagccctcaaggtctatcatatttgcatcatggtccgccggcgattttgggtcagtgggcgcaaccgaatggctggaggggtacctgagcagcctgcatttaaaggcatttacatatattaacctggacaaagcggtcctcgggacgtccaactttaaagtttccgcttcgccgctgttatataccctaattgagaagactatgcagaacgtgaaacacccagttacaggccaatttctatatcaggactcaaattgggcttccaaagtagagaagcttacgctggacaacgcagccttccccttcctcgcttactcagggatccccgctgtttccttttgtttctgtgaggacacagattatccttatctcggtaccaccatggacacatataaagagctcatcgagcggattcctgagctgaacaaggttgcccgggctgctgccgaagtcgcaggccaattcgttattaaactgacccacgacgtcgagctcaatctggactatgaacggtataacagccagttactctcctttgtgcgcgaccttaatcaatatcgggccgatatcaaggaaatgggactcagcctgcagtggctttacagcgccagaggggacttctttcgggcaacgagcagactgaccactgacttcggaaacgctgagaaaacagacagatttgtgatgaagaagctaaacgacagggttatgcgtgtggaataccacttcctgtcaccctacgtctcccccaaggagtctccattccgccatgtgttctggggcagtggctctcatactttgccagctttattggagaatctgaagctgaggaagcagaataatggagctttcaacgagacactttttaggaaccaattggccctggccacctggaccatacagggcgccgcaaacgctctctctggtgacgtatgggatatagacaacgaattttag

SEQ ID NO: 209089 - DNA, 42 bp, synthetic construct; identical to SEQ ID NO: 173691
  misc_feature 1..42: note = Description of Artificial Sequence: Synthetic coding sequence
  source 1..42: mol_type = other DNA

SEQ ID NO: 209090 - DNA, 11493 bp, synthetic construct
  misc_feature 1..11493: note = Description of Artificial Sequence: Synthetic coding sequence
  source 1..11493: mol_type = other DNA
atggccttcgtggccacccagggcgccaccgtggtggaccagaccaccctgatgaagaaatacctgcaattcgttgctgctttgacagatgttaacacccccgacgaaacaaagcttaagatgatgcaggaggtgtcagaaaactttgaaaatgtgacatcaagtccccaatactcgaccttcctcgaacacattattcctaggttcttaacctttctccaggacggcgaggtgcagttcctccaggaaaaacctgctcagcagctgaggaaactagtgctggagatcatacaccggatcccaaccaatgagcacctgaggccccacaccaaaaacgtccttagcgtgatgttcagattcctggaaacagagaatgaagaaaatgtgctgatttgcttacgcattattatcgagctccacaaacagttccggcctcctattacacaggagattcaccacttcctggattttgtaaagcagatctataaggaactccctaaagtcgtgaacagatactttgaaaatccccaggtgatccctgagaatacagttccaccacctgagatggtggggatgatcacgaccatcgcagtgaaagttaatccagagcgggaagactctgagactaggacccattctataatccctcgagggtctttgtcactcaaggtgctcgccgagttacccattattgttgtactgatgtatcagctgtataagcttaacatccataatgtcgtggccgaattcgtgccgctgattatgaacacaattgcaatacaagtgagcgcccaggcacgtcaacacaagttgtataacaaggagctttacgccgatttcatcgcagcgcaaatcaagaccttgagttttctggcctacattataagaatttatcaggagctggtcaccaaatacagtcagcaaatggtgaaaggaatgttacagctgctatcgaactgccccgcagaaaccgcacatctccggaaagagttgctgatagcagccaagcacattctcaccactgagctcagaaaccagttcattccatgtatggataagctgttcgatgaatcgatactgatcgggtccgggtacactgcccgcgaaaccctgagaccccttgcctacagcacactcgccgacttggtgcatcacgttcgacagcacttgcccctcagcgacttatccctggctgtccagctgtttgctaagaacatcgatgacgagtcccttcccagtagcatccagaccatgagttgcaagctactgttgaatctcgtggactgtatccgttcgaagtcagaacaggaaagcgggaatggaagagacgtacttatgagaatgctggaggtgtttgtgctcaagtttcacaccatcgcacggtaccaattgtctgctatctttaaaaagtgcaagccgcagtccgagcttggtgcggtcgaggccgctctgcctggcgtgccaaccgctcctgctgcccctggccccgcaccctctcctgctcccgtcccagccccccctccaccccctcccccacccccacctgctacgcccgtcaccccggctcctgtccccccatttgaaaaacaaggtgagaaggacaaggaagataaacagacctttcaagttacagactgcagatccttagtaaagaccctcgtgtgcggggtgaagacaattacctgggggataacgtcatgcaaggcccccggcgaagcgcagtttatcccaaataagcagcttcagcccaaggagacacagatctacattaagctggtgaaatacgctatgcaagcgttagatatttatcaggtgcagatcgctggcaatggacagacttatataagggtagccaattgtcagacagtgcgcatgaaagaagagaaggaggttcttgagcacttcgctggcgtttttacaatgatgaacccgctcacctttaaggagatctttcagacaaccgttccttacatggtggaaagaattagtaagaactatgccctccagatcgtagccaattctttccttgccaacccaacaacatctgcgttgtttgcaactatcttggtagaatatttactggaccggctgcccgagatggggagcaacgtggaactgagtaacctttacttaaaactgtttaagttggttttcgggagtgtttccctttttgctgcagaaaacgagcaaatgctaaagccccacctgcacaaaatcgttaacagttcgatggagctggcccagactgccaaggagccatataactacttcctgctgctgcgagcccttttccgtagcatcgggggcggatcccatgatctgttgtatcaggagtttctgcccctgctgcccaatctgctacagggcctgaacatgttgcagtctgggctgcacaagcaacatatgaaggacttgttcgtagagttatgtctgaccgtgcctgtgcgactgtcaagccttctgccttacctgccaatgctgatggatcctttggtctcagcgttgaacgggtcacagaccttggtaagccagggcttaaggacgcttgagttatgtgtggataatttacaaccagatttcctctacgatcatattcagccagtgcgcgctgagctgatgcaggcgctctggcgaaccctgcggaacccggcagacagcataagccatgtcgcctatcgcgttttaggaaagtttggcggaagcaatcgaaagatgttgaaagaatcccagaagttgcattatgtcgtgacggaggtccaaggaccttccatcacagtggagttctccgactgtaaggcctctctccagctacccatggagaaggccatcgaaactgcactagactgtctcaagagcgctaacactgaaccctattacaggcggcaagcgtgggaggtaatcaagtgtttcctcgtggccatgatgagtctggaggataacaaacatgcgctgtaccagctgctggctcaccctaactttactgagaaaactattcctaatgtcattatctctcacagatacaaagctcaagatactcccgccaggaagacgtttgagcaggctctgaccggtgccttcatgagcgctgtgataaaagatctgcgccctagcgcactgccttttgtggccagtttgatccggcactacacaatggtcgcggtggctcaacagtgtggaccctttctgcttccttgttaccaagtggggagtcagcctagtactgcaatgttccacagcgaagaaaatgggtctaagggaatggaccccctggtgttaatcgatgcaattgcaatatgcatggcttatgaggaaaaggaactttgtaagatcggcgaggttgcgttggccgttatcttcgacgtggcaagcattatcctgggttctaaagagcgcgcctgtcaactgcctttgtttagctacatcgtggaacgcctctgcgcatgctgttacgagcaggcatggtatgctaagctcggcggggtggtgagtatcaagtttctaatggaacggcttccactgacatgggtactgcagaaccagcagacctttttgaaggctctcctatttgtcatgatggatctcaccggagaggtctccaatggcgctgtagccatggccaagaccacactggaacaattgctgatgcggtgtgccacccctctcaaagacgaggagcgggccgaagagattgtagccgctcaggaaaagtctttccaccacgtgacccatgacctggtcagagaagtgacttcccccaactctactgtaaggaaacaggcaatgcattccctgcaggttctcgcacaggtgaccggcaagtctgtgaccgtgatcatggagccccacaaggaagtccttcaggacatggtgcccccaaagaaacacttactgaggcatcagcccgcgaacgcccagatcggcctgatggaaggtaatacgttttgtaccaccctccaaccaaggctgttcacaatggacctgaacgtggtggaacataaggttttctataccgaactgttaaacctgtgcgaagctgaggatagcgctctcaccaagctgccctgctataagagtcttccatcccttgtgccgttgcgaatcgctgccctgaacgccttggctgcttgcaactatttgcctcagagccgggagaagattatcgcggctcttttcaaggctctaaactctaccaatagcgagctccaggaggcaggcgaagcgtgcatgcgcaagttcctagagggggcaacaatcgaagtggaccagattcacactcatatgcgccctctcctcatgatgttgggagactatcgctccctgacgctaaatgtagtgaacagactcacctccgtcactaggctattccccaactccttcaatgacaaattctgtgatcagatgatgcagcatctcagaaaatggatggaggtggtggtaataacgcacaaaggggggcaacgtagtgatggtaacgagatgaagatatgcagcgccatcattaatctgtttcatttgattccagccgccccacaaaccctggtaaaaccattactcgaagtggttatgaaaaccgagagggccatgctcatcgaggcaggttcgcctttcagggagccactcattaagtttctgacaaggcacccatcacagaccgtggaactcttcatgatggaagccaccttaaacgacccacaatggtccagaatgtttatgagctttctgaagcataaggacgctcgtcctctgagagatgtgctggcggcgaaccctaaccgtttcattacgttgttactacccggcggggcgcagacagcggtgaggccggggagcccaagtacaagcaccatgcgattggacctgcagttccaggccatcaagattatcagtattatcgtcaagaacgatgattcctggctggccagccagcactcattggttagtcaactgaggcgcgtttgggtgagcgagaactttcaggaacggcaccggaaagagaatatggcagccacaaactggaaggaacccaagcttcttgcatactgtcttcttaattactgcaagcgaaattatggggacatcgagctgctttttcagctgctccgggcattcacggggcgatttctgtgcaacatgacctttctgaaggagtatatggaagaggagataccaaaaaattactctatcgcacagaaacgggcattgttttttcggtttgtcgattttaacgatccgaattttggcgatgagctgaaagccaaggtcttgcaacacattctcaatcctgccttcctgtacagttttgagaagggcgagggcgagcagctactgggacctccgaatccagagggagataatccagagtctatcacatcggtgtttatcaccaaagtcttggacccagaaaaacaagccgatatgcttgactctctgaggatttatcttctgcagtatgccaccctgcttgttgagcatgctcctcaccacattcacgataataacaaaaatcgcaacagtaagcttcgtcgcctcatgacctttgcttggccctgtttgctgagtaaagcgtgtgttgatcctgcgtgcaagtattctggccacctcttgttagcccacataatcgctaagtttgccatacacaagaagatcgtacttcaggtatttcacagtctgcttaaggcgcatgccatggaggcccgagcaattgtgagacaggccatggcgatccttacccccgccgtacccgccaggatggaggacggccatcagatgctgacgcactggactagaaagatcattgtagaagagggccacacagtgccacagcttgtgcacatcctccaccttatcgtccagcactttaaggtctattatcctgtgagacaccacctggtgcagcacatggtttccgcaatgcagcgtctcggtttcacccccagcgttaccatcgaacagcgcaggctggccgtggacttgtctgaagtagttataaaatgggagctccagcgcatcaaagaccagcagcctgattctgatatggatcccaactcttcgggggagggggttaatagcgtgagctcgagcatcaagaggggcctgagcgtcgactccgcccaagaagtaaagcgctttaggactgccaccggggcaatatctgccgtcttcggccggtcacagagcctgcccggagccgactcattgctcgctaagccaatcgacaaacagcacaccgacacggtagtgaacttcctcatacgagtcgcctgccaggttaatgacaacacaaacactgctggctcgcctggcgaagttctgagtcgcaggtgcgttaacttgctgaaaacagccctgcgacccgatatgtggcccaagtccgaacttaaacttcagtggttcgacaaattattgatgaccgtagaacagcctaaccaggtcaactatggaaatatttgtactggcctggaggtactgagttttctccttacagtgcttcagagtcccgccatcctcagctcattcaaaccgttgcagaggggtatcgccgcttgcatgacatgcggcaacactaaagtactaagagccgttcactcactgttgtcccgcttgatgtccatcttccctacggaaccaagtacaagcagtgtcgcctccaagtacgaggaactcgagtgtctctacgccgcggtgggcaaggtcatatacgagggccttacaaattacgagaaggcaaccaatgccaaccctagtcagctcttcggaacgctgatgattttaaagagcgcctgcagtaacaatccctcctacatcgaccgcctgatctctgtgtttatgcggagtctgcagaagatggtgcgcgaacatctcaaccctcaggcggcttccggctctactgaggccacatctggaaccagtgagttggttatgttgagcctcgagttggtgaaaaccagactcgccgtcatgtctatggagatgaggaagaattttattcaggcaatattgacttcactaatcgagaaaagtcccgatgcgaagattctccgcgctgttgtgaaaatcgtggaggagtgggttaagaacaacagtcctatggctgcaaaccagacacccacactccgcgagaaaagcattctgttggtcaagatgatgacctacatagagaaaaggtttccggaggacttggaactcaacgcccagttcctcgacctggtcaactacgtctatcgggatgagacactaagcggatcagaactaacagcaaaactggagcccgcatttctgagcggattacggtgcgcgcaacccctaatcagggctaagttctttgaagtcttcgataacagcatgaagcgaagagtgtacgaaagactgctttatgtgacctgctcacagaattgggaagcgatgggtaaccatttctggattaaacagtgtatagagcttctgctggccgtgtgtgaaaaatcgactcccatcggaactagttgccagggtgcaatgctgccctcaataacgaacgtgatcaaccttgctgatagccatgaccgtgcagctttcgccatggtcacacacgtgaagcaggaaccgcgtgagcgggagaatagtgaaagcaaagaggaggatgtggaaattgacatcgaattggctccaggggatcaaacatcaacccctaaaacaaaggagctgagcgaaaaagacatcggcaatcagttgcatatgctcactaataggcacgataagtttttggacactctacgcgaggtgaagacaggagccctcctgtcggcctttgtgcaactgtgccacatcagtacgactctcgcagagaaaacctgggtgcagctgtttccaagactttggaaaatcttgagcgatcggcagcagcacgcactggcaggggagatttcccccttcctttgttccggcagtcaccaagtccagcgcgactgtcagcctagtgctctgaactgcttcgtggaagctatgagccaatgcgttcccccaatccctatcaggccatgtgttctgaagtatttggggaagactcacaatttatggttccggagcactctgatgctagagcaccaggcgtttgagaaaggccttagcttgcagattaaacccaaacagacaacagagttttacgaacaggagtctatcaccccccctcagcaagaaattctcgattcactggctgaattgtattccctgctccaggaagaagatatgtgggctggtctctggcagaagcggtgtaagtattcagagactgcaacagcaatcgcatacgagcagcacggcttctttgaacaggctcaggaaagctatgaaaaggccatggacaaggctaagaaagagcacgagcgtagcaacgccagtcctgccatatttcctgagtatcagctctgggaggatcactggattaggtgctcaaaagagctaaatcagtgggaggcgcttacagaatacggacagtctaagggacacatcaacccttacttagtgctggaatgtgcttggcgtgtgtcaaattggacagccatgaaggaagccctggtgcaggtggaagtatcttgtcccaaggaaatggcgtggaaggtgaacatgtaccgggggtacctcgccatatgtcacccagaggagcaacagctctcattcattgagagactggtagaaatggcatcttctctagccattcgcgagtggagacgcctccctcacgtggtgtcccacgtgcatacacccctccttcaagccgcgcagcagatcatagaactacaggaggccgcccagatcaacgccggcctgcagcctactaatctcggaagaaataactctctccatgatatgaagacagtagtgaagacctggagaaatagactccctatcgtctccgacgacttgtctcactggtcgtctatattcatgtggagacagcaccattatcaggccatcgtcacggcctacgaaaattccagccagcatgacccgtccagtaataatgccatgttgggggttcatgcatctgcctctgctattattcagtatggtaagatagctcgcaagcaaggactggtcaacgtcgcgctcgacatcctgagtcgtattcacactattccgactgtgcctatcgtggactgtttccagaagattaggcaacaggtgaaatgctatctgcagctggccggcgtgatggggaagaatgaatgtatgcaggggctcgaggttatcgagtctaccaacctgaagtacttcacaaaggagatgactgctgagttttacgccttgaagggcatgtttctagctcagattaataagagtgaagaagccaataaggccttttctgcagccgtgcagatgcatgatgttctggtcaaggcttgggccatgtggggagattatctcgagaatatcttcgtaaaggaaagacagctgcacctgggggtgagcgccatcacctgctatctccacgcctgtcgacatcagaatgaatccaagagcagaaaatacctggccaaagtgctgtggctgctaagtttcgatgatgataagaacaccctggctgatgccgtcgacaagtactgcattggagtgcctcccatccagtggctggcctggatcccacagcttcttacatgcctggtcggtagcgaagggaaactgttactgaatctgatatcacaagtggggcgggtgtatcctcaagccgtgtactttccaattcgcactctgtacctgactctgaagatcgagcaacgggagagatataaaagcgatcccggacctatacgcgcaaccgcacccatgtggcgctgtagtcggatcatgcacatgcagcgggagttgcatcctaccctgctctcatccctggaggggatagtcgaccaaatggtttggtttcgtgaaaactggcacgaagaggtgctcagacagctgcagcagggtttggccaaatgttattcagtcgcatttgaaaagagtggtgcggtaagtgatgccaaaattaccccccacacgttaaacttcgttaagaaattggtgtcgactttcggagtggggctggaaaacgtgtctaacgtttctaccatgttttcttctgccgcttctgaatcactggctaggagagcacaggccaccgcccaggacccggtcttccagaagttgaagggacaatttacaacagacttcgacttttccgtgccaggctccatgaagctgcacaatttgatctcgaaactcaagaagtggattaagatcttagaagcaaagacaaaacaactccccaagtttttcctgatcgaagagaagtgtcgatttctgtctaacttttccgcgcagaccgccgaggtggagatccctggagagtttttgatgccgaaacccactcactattacataaaaatagctcgatttatgccccgcgtggagatagtccagaagcacaacactgccgcacggagactctacataaggggccacaatggcaaaatttatccatacttagtgatgaacgacgcctgtttaacagagtccaggagagaagaacgcgttctgcagctgttgcgacttttgaatccttgccttgaaaagcgcaaggaaacaactaagaggcatctcttcttcactgtcccgcgcgtggttgccgtgtcccctcagatgaggctggtagaagacaacccttcatccttgtctttagtagaaatatacaagcaacgctgtgccaaaaagggcattgagcacgacaatcctatttccaggtattatgaccggcttgcgaccgtgcaagcaaggggtactcaggcttcacatcaagtgcttcgcgacattctaaaagaagtgcagagcaatatggtgccccgaagcatgcttaaggagtgggccctccacacatttccaaacgcaaccgactattggactttccgcaaaatgttcacgattcaactggcgctgatcggtttcgctgagtttgtgttgcatctcaaccggctcaatcctgaaatgctgcagattgctcaggacactggtaaactgaatgtggcatactttagatttgacatcaatgatgcaacaggtgacctggacgccaacagacccgtgcctttcaggctgacgcccaacatttccgagttcttgaccaccatcggcgtgtctgggcccctgaccgcgagcatgattgctgttgcacgttgtttcgcacagcctaatttcaaggttgatggcattctgaagactgttcttcgagacgagattattgcctggcacaagaaaacccaggaggacacaagcagccccttgagcgcggcaggacagccagagaatatggacagtcagcagcttgttagcctggtgcaaaaggcagtcactgctatcatgacaagactccacaacctggcccagttcgaaggtggcgagagcaaggtcaatactcttgtagccgctgcaaacagtttagacaacctgtgtcgaatggatcctgcctggcacccctggttgtag

SEQ ID NO: 209091 - DNA, 11580 bp, synthetic construct
  misc_feature 1..11580: note = Description of Artificial Sequence: Synthetic coding sequence
  source 1..11580: mol_type = other DNA
atggccttcgtggccacccagggcgccaccgtggtggaccagaccaccctgatgaaaaagtacctgcagttcgtggctgcgttgaccgacgtgaatactccagatgagacaaagttaaaaatgatgcaggaagtgagcgagaactttgaaaacgtcacctcctcaccccagtattccacgttcctggagcacattattccccggtttttgacttttctacaggacggagaagtgcaatttctgcaggaaaagcctgcccagcagctcagaaagctggtattagaaatcattcacaggatccccacaaatgaacacctcagaccgcataccaaaaatgtgctaagcgtaatgttccgtttcctggaaactgagaatgaagagaatgtgctaatctgcttgagaataataatcgaactccataagcagtttcgtcctcccatcactcaggaaatccatcactttctggacttcgtgaagcagatctataaagagctgcccaaagtcgtaaaccgttatttcgagaaccctcaggtgattcccgagaacactgtccctcccccggagatggtcgggatgattaccacaatcgccgttaaagtgaaccccgaacgggaggacagcgaaactaggacccattctattattccccgcggttccctatcattgaaggtcctggccgagctgccaatcatagtggttctgatgtatcaactgtacaagctgaacatccataacgtcgtcgctgaatttgtgcctctgattatgaacacgatagcaatacaggtatccgcgcaggccagacagcacaagctttacaacaaagaattgtacgcagactttattgccgcccagattaaaaccctgagtttcctcgcctacataatccgcatttaccaagagcttgttaccaagtatagccagcagatggttaagggcatgttacagttgctctcaaattgccccgctgaaactgcacatttacgcaaagagctgctgatcgccgctaaacacatcttgacaaccgaactcagaaaccagttcatcccatgtatggataaactcttcgatgagtctatcctgattgggtctggctatactgctcgggagacacttcgtcctcttgcctattctactctggccgacctggtgcatcacgtgaggcagcacttgcccctttccgacttgtcacttgcggttcaactgtttgccaaaaacatcgatgatgagtcgcttcccagtagcatacagacaatgtcatgcaagctcttactcaacctggttgattgtattcgctccaagagcgaacaagaatctggcaacgggagagatgtcctgatgagaatgctggaggtattcgtgctgaagttccacaccatcgctcgctaccaactatcagccatttttaaaaagtgcaagccccagtccgagctgggcgccgtggaggcggcacttccaggtgtgcctaccgcacctgctgccccgggacctgcccctagccccgctcctgtaccagccccaccccctccgccgccaccgccccctcccgctacaccagtgacacccgcccccgtacccccattcgagaagcagggcgaaaaggacaaagaggacaaacagacatttcaggttacagactgcaggtctcttgtaaagaccctggtgtgtggagtgaaaaccattacttggggcataacaagctgcaaggcccctggtgaggcccaatttatccctaataagcagttgcagccaaaggagactcagatctatatcaaattggtaaagtatgctatgcaggccctggatatataccaggtgcagattgccggaaatggccagacttatatccgagtcgccaattgccaaacggtgcgtatgaaggaagaaaaagaggtgctagaacactttgccggggtcttcaccatgatgaaccctctgactttcaaggaaatattccagactaccgtgccctacatggtcgagcggatcagcaagaactacgcattgcaaatcgtggcaaattcattcttagccaatccaactaccagcgccttgttcgcgacaatactggtcgaataccttctggacagactgcctgagatgggatcaaatgtggagctgtcaaacttgtatcttaaactgtttaagctagtgttcggatcagttagcctgtttgcagccgagaatgagcaaatgcttaagccacaccttcacaagatcgtaaactctagcatggaattggcccagactgcaaaggagccatacaattactttctgctgctccgcgctctgtttcggtctataggtggagggtcacacgaccttttataccaggagttccttccacttctccctaatcttcttcagggcttgaacatgctgcagagtggactgcacaagcaacacatgaaagacctgttcgtggagctgtgcttaacagtgcccgtgcggttgagtagcctgctgccttacctgcccatgctcatggatccactagtctcagcactgaacggatcccagacactggttagccagggcctgcgcactctcgaactgtgcgtagacaatctgcagcccgatttcctatatgatcatattcagccagtcagagccgagcttatgcaggccctgtggcggactctgagaaaccccgctgactctatctcacatgtagcataccgggtgttgggaaagtttggcggaagtaacaggaagatgctgaaggagtcccagaaactgcattacgtagtgactgaggtgcaaggcccttccatcacagtggagttctccgactgtaaagcctcccttcagttaccaatggaaaaagcaatagaaacagccttggattgcctaaaatcagccaacaccgaaccgtattaccgaaggcaggcgtgggaagtgattaagtgttttcttgtggccatgatgtccctcgaagataataaacacgccctgtatcagctactggctcatccgaatttcacggaaaagacaattcccaatgtgataatctctcatcggtacaaagcccaggacacccccgcgaggaagacatttgaacaggcccttaccggagctttcatgtccgcagtgatcaaggacctgaggccctctgcactgccattcgtcgcctccctgattcggcattacactatggtggccgttgcccagcagtgcgggccatttctcctgccatgttatcaggtggggtctcaaccctctactgctatgttccactctgaggagaacggctcaaaaggcatggacccgctggtgttgattgatgcgattgccatctgtatggcctacgaggaaaaggaactctgtaagatcggagaagttgcactggcggtcattttcgatgttgcctcgatcatcctcggcagcaaggagagagcatgtcagctgcctctgttcagttatattgtggagagactctgtgcttgttgctacgagcaggcatggtacgcgaagctcggcggagttgtgtctattaagttcctgatggagcggcttcccctaacttgggttctgcagaaccagcagacatttctgaaagctctgctgtttgtgatgatggatttgactggggaagtgagtaacggggccgtagccatggccaagacaacgctggagcagctgctcatgcgatgcgcaacacccttgaaagatgaggagcgggcggaagagatcgtggctgcccaggagaagtcttttcatcacgtcacgcacgacttggttagagaagtgacctcgcccaacagtactgtgcggaagcaggcgatgcattcactgcaggtgctggcccaggttaccggcaaaagtgtgaccgtcattatggagcctcataaggaggtgctgcaggacatggtgccccctaaaaaacacctgctgagacaccaaccagcaaatgcacagattggcttaatggagggaaacaccttttgtacgacactgcagccccgcctctttaccatggacttaaacgtggtggagcataaagtattctacactgagcttctaaacctttgcgaagccgaagatagcgcgttgactaaactgccatgctataagtccctgccaagcttagtgccattgaggattgccgccctgaatgccctcgcggcctgcaactatcttccccagtctagggaaaaaattatcgccgcactttttaaagctctcaatagtaccaattctgagttacaggaggcaggcgaggcttgtatgcggaagtttctggagggggccacgattgaggtcgaccagatacacactcacatgaggcctctgctaatgatgctgggggattatcggtcactgacattgaacgtcgtcaaccgattgactagcgtgacgcggctgtttcctaacagttttaacgacaaattctgcgaccaaatgatgcagcacctgaggaagtggatggaggtcgtcgtaatcacccacaaaggagggcagagaagtgatggcaatgaaagcatctcagaatgcggccgctgccccttgtctcctttttgccagtttgaggaaatgaaaatttgcagcgccatcatcaacctgtttcatctgatcccagccgccccccagactctagtgaagcctttgctggaggtcgttatgaagaccgagcgcgcgatgttgattgaggcagggagcccgtttagggagccactcataaagtttctgactcgccatccaagtcagactgtagaactcttcatgatggaggctactttgaacgaccctcagtggtctagaatgtttatgtcatttcttaagcataaagatgcaagaccactccgcgacgttctggccgccaatccaaacagattcatcaccctgctattgcctggtggagctcagacggcagtcagaccaggcagtccatcaacctcaactatgagattggacttgcagtttcaggccattaaaatcattagtattatcgtcaaaaatgatgacagctggctggcttctcaacattctttagtttcccagcttcgcagggtgtgggttagcgaaaactttcaggagaggcacagaaaagagaacatggcagctactaactggaaagaacccaaactgctggcttattgtttgttgaattactgcaagaggaattatggggatattgaacttctgtttcaactactgcgcgcctttaccgggcgattcctgtgcaacatgacgttcctcaaagagtacatggaagaagaaatcccgaaaaattattctatcgctcagaagcgggcgctcttcttccgattcgtagactttaatgatcccaatttcggagatgaactcaaggcgaaggtgctgcaacatattttaaaccctgccttcttatacagctttgagaagggagagggcgaacaactgctgggcccacctaaccccgaaggggacaaccctgagagcattacatccgtattcatcacaaaagtgctcgaccctgaaaagcaggctgatatgctggattccttgcgcatataccttctgcagtacgcaaccttactggtggagcacgctccccaccatatccacgacaacaacaagaatcgcaactccaaactgagacggctgatgacatttgcttggccatgtctgctgagcaaggcatgtgtggatcctgcatgcaagtacagcggtcatctgctcttagcacacatcatcgccaagtttgctatccataagaaaattgtcttgcaggtttttcattccctgctgaaagcgcacgcaatggaagccagagccattgttcggcaggctatggccatcctgacaccagccgtgccagcacggatggaggatggacaccagatgctgacacactggacacgtaaaatcattgtggaagagggacacacagtcccgcagctcgtccacatacttcatctgattgtgcaacattttaaagtgtactaccctgtcagacaccacttagtacagcacatggtgagtgctatgcagcgacttggcttcactccaagcgtcaccattgagcagcggcgcctagcggtcgacttatctgaggtggttattaagtgggagctacagcgcatcaaagatcagcagcctgactcagatatggatcccaattctagtggagagggggtgaactccgtttcatcaagcattaagcggggcctctcagttgacagcgctcaggaagtgaaaagatttagaactgcaactggcgcaatcagcgccgtctttggccggtcccaatccctgcccggggccgattcactcctggccaagcctatcgataagcaacacacagacacagtggtcaactttctaattcgggtggcttgccaagtgaatgacaataccaatacagcgggttctcccggagaagtgctgtccaggagatgcgtgaatttactgaaaaccgctctgcgtccggatatgtggcccaagtccgagctgaagttgcaatggttcgacaaactgcttatgacagtggagcagcccaaccaggtgaactatggtaatatatgtactggcctggaggtgctgagtttcttactgactgtgttgcagtcaccagcaattttgtcctcttttaagcctctgcaaaggggtatagccgcctgtatgacatgcggcaacactaaggtgcttcgtgcagtccacagtcttttgtcacgtcttatgtcgatctttccaactgagccctccacctctagtgttgcgagtaagtatgaggagctcgaatgtctctacgccgctgtcggcaaagttatctatgaagggctcactaactatgagaaagccactaacgccaacccgagccagttgttcggtaccctaatgatcctgaagagcgcctgcagcaataatccgagctacatagatagacttatctcggtgttcatgcggagcctgcagaagatggtaagggagcacctgaaccctcaggcggctagcggctcaacggaggccacatccggcacaagcgagctggtaatgctctccctggaattagtcaaaacaagacttgccgtcatgagtatggagatgagaaaaaacttcatccaggccatccttacctccctcattgagaagtctcccgatgccaaaatcctgcgggctgtcgtaaaaattgtggaggagtgggtaaaaaataattcccccatggccgccaatcagactccaaccctgcgcgaaaagagcatcctgcttgtgaagatgatgacctacatcgagaaacgctttccagaggatcttgaactgaacgcgcagtttcttgatcttgtaaactacgtgtacagggacgaaaccctgtccggatcagaactgacagcaaagcttgagcccgcctttttatcaggcctgaggtgcgcccaaccacttatcagagccaagttttttgaggtttttgacaattctatgaagcgccgggtctatgagcggttactgtacgtcacgtgcagtcagaactgggaggcgatgggcaatcatttttggattaagcagtgtatcgagctgcttctcgctgtttgtgaaaagtctacccccatcgggaccagttgtcaaggtgctatgctgccatcgatcacaaacgtaattaacctcgctgattcccatgaccgcgccgcatttgccatggttacacacgtgaagcaggaacctcgcgaaagagagaatagtgaaagtaaggaggaagatgtggagattgatatcgagcttgcgcccggtgatcagacttccacgccaaaaacgaaagagctctcagagaaggatattggaaaccagctgcacatgctgacaaaccggcacgataagttcctggacaccctcagggaggtcaagactggtgccctcttgagcgctttcgtgcaattatgccatatatcaaccaccctcgccgaaaagacttgggtacagctctttccaagactctggaagattctatcagaccggcagcagcacgctttggccggcgagatatcaccctttctgtgtagcggctcccaccaggttcagagggattgtcagcccagtgcactcaactgcttcgttgaggccatgagtcagtgtgtgccccccatcccgatcaggccctgcgtgctaaagtacttggggaagacccacaatttatggtttcgttccacattgatgctcgagcaccaggcatttgagaagggtctctcattacagattaagccgaagcagactaccgaattctatgaacaggagagtattactcccccacagcaagagatcctggactctctagctgaactatacagtctcctacaggaggaggacatgtgggctggtctgtggcagaagagatgcaaatactcagaaactgcaacagcaattgcttatgagcagcacggcttcttcgagcaggcccaggagtcgtatgaaaaggcgatggataaggccaagaaagagcatgagagatcaaacgctagccccgccatttttcccgagtaccagctttgggaggatcattggattcgatgttctaaggaactgaaccagtgggaggcattaacagagtatgggcagagcaagggccacattaatccctatttggtgctggagtgtgcttggagggtttccaattggaccgcaatgaaagaggcattagtccaggtggaggtttcctgccccaaagaaatggcatggaaggtgaatatgtaccgcggctatctcgccatatgccaccctgaagagcagcagctctcattcatcgagcggctcgtggaaatggcctcctcgttagccattagagagtggcgcagattgcctcacgtcgtgtctcacgtccacacaccgctgctgcaggccgcacaacagatcattgaactgcaagaagctgctcaaatcaacgctggtctccaacccacgaacttaggacgcaacaactcacttcacgacatgaagacagtggtcaaaacttggcgaaataggctaccaatagtttccgacgacctcagccattggtcttctattttcatgtggcgccaacaccactaccaaggcaagccaacttggtccggtatgcactcctcttccatagttacagcctacgagaatagttcccagcacgatcccagcagcaataacgctatgcttggagtccacgcttccgcgagtgcaatcatccagtacggcaagattgcccgtaaacaaggacttgtgaacgtggccctggatatcctctcacgcattcacacaatccccacagtacctatcgtagactgcttccaaaaaatccgtcagcaggtaaagtgctacctacagcttgctggagttatgggaaagaatgaatgtatgcagggtttagaggtgattgagtcaactaatcttaaatacttcacgaaagagatgaccgccgaattctatgcactgaaagggatgtttcttgctcagataaacaagagcgaggaggccaataaggctttcagcgctgccgtgcagatgcacgacgtgttggtgaaggcatgggcaatgtggggggactatctggaaaatatctttgtgaaagaacggcagctacacctgggggtctccgcgattacttgttatctgcacgcttgtaggcaccagaacgagtccaaatcgcgaaagtatctagccaaagtgttatggctcctttccttcgatgacgacaagaatacactggcagatgcagtggataaatactgtataggcgtgcctccaattcagtggctggcttggattccgcaattgctaacatgtctagtaggttccgaaggcaagcttctcctcaacctgatctctcaagttggacgggtttatcctcaagcggtttactttcccatcaggacgctctatctgacactcaaaattgagcagcgggaacgatacaaaagcgatccaggccccattagggctaccgcaccaatgtggaggtgttcgaggataatgcatatgcaacgagaactgcatcctactctcctgagcagcctagaaggcattgtggaccagatggtgtggtttcgggagaactggcacgaagaggtgctgaggcagttgcagcaggggctggctaaatgttatagtgttgctttcgaaaagtcaggcgctgtatcggatgcaaaaataactcctcatacattaaacttcgttaaaaagctagtgtctactttcggcgtgggactggaaaatgtcagcaacgtttcaacgatgttttcatccgcggctagcgagtctttggcacggagggcacaggctactgcccaggatcccgtgtttcagaaactgaaaggtcagttcactactgacttcgactttagcgtgcccggttcaatgaaactgcataacctgatctctaaactgaagaagtggatcaagatcttggaggccaagaccaagcagctcccaaagtttttcctcattgaagagaaatgcagattcctgagcaacttctcggcccagacagccgaggttgaaatccccggggaattcctgatgcccaaaccaacacactattacattaaaatcgcacgctttatgccacgagtggaaattgtgcagaagcataataccgcagcacggcgtctgtacatacgaggacacaacggcaaaatctacccctatttggtgatgaacgatgcttgcctgactgagtctagaagggaggaaagagtcctgcagttattgcgccttttaaatccatgcttagagaaacgtaaggagacaacaaagaggcaccttttttttactgtacccagggtcgtggccgtcagtccccagatgcggttggtggaggataatccttccagtctaagcctggtggagatctacaaacagcggtgcgcgaagaaaggcatcgaacacgacaaccccatttcaaggtactacgacagactcgcaacagtgcaggcccgtggtacacaggcaagccatcaagtgttgcgggatattctaaaggaggtgcaaagtaacatggtgcctcgctccatgctgaaggagtgggccctccacacctttcccaatgccactgactactggacgtttagaaagatgtttacaattcagctggcactgatagggtttgcagagtttgtgctgcaccttaatcgcctcaaccctgaaatgttacaaattgctcaggacactggcaagctgaacgtggcttactttagatttgatatcaacgatgccacaggggatttagatgcaaaccgtcctgtgccgttccgcctgaccccaaacattagcgaattcctgacgactattggtgtgtcaggccctctgactgcaagtatgatagccgttgcgaggtgcttcgcacaacccaactttaaggtggatggcatccttaaaacagttcttcgggatgaaatcatcgcctggcataagaagactcaagaagacacctcctcacccctgtctgccgccggccagcccgaaaatatggattctcagcagttagtgtcactcgtacagaaggccgtgacagccattatgactaggttgcacaacttggcccagttcgagggcggcgaatctaaagtcaacactcttgtagctgctgccaacagcctggacaatctgtgtcggatggaccccgcatggcacccttggctgtag

SEQ ID NO: 209092 - DNA, 216 bp, synthetic construct
  misc_feature 1..216: note = Description of Artificial Sequence: Synthetic coding sequence
  source 1..216: mol_type = other DNA
atggccttcgtggccacccagggcgccaccgtggtggaccagaccacccttatgaagaagtatctccaatttgtggcagctctgaccgacgttaacacccctgacgaaacaaagctgaaaatgatgcaggaggtgagtgaaaactttgaaaacgttacaagttctccacaatactcaaccttcctggagcatatcatccctcggtttttgacctag

SEQ ID NO: 209093 - DNA, 117 bp, synthetic construct
  misc_feature 1..117: note = Description of Artificial Sequence: Synthetic coding sequence
  source 1..117: mol_type = other DNA
atgagcgacagcggcgagcagaactacggcgagcgggtgaacgtggaggaagggaagtgtggcagtcgacacctgaccagcttcattaatgagtacttgaagctgcgcaacaaatag

SEQ ID NO: 209094 - DNA, 567 bp, synthetic construct
  misc_feature 1..567: note = Description of Artificial Sequence: Synthetic coding sequence
  source 1..567: mol_type = other DNA
atgagcacccggcggcggcacgtgggcaaccgggccaaccccgaccctaactgttgcttgggggtgtttggactctctttgtacacgacagaaagagacctgagggaagtgtttagtaaatacgggcccatcgctgacgtgtctattgtatacgaccagcaatcccgtagatcccgaggctttgcgtttgtctattttgaaaatgtggacgatgctaaagaggcaaaagagcgggctaatggcatggaactggacggacgacgaattagggtagattttagtatcaccaagaggccccacacaccaacacccggaatctacatggggcgtcctacctatgggtcctctcgtcggagggattattacgaccgggggtatgatcggggatacgacgaccgcgattactatagtcgctcctatcgcggcggtggaggcggaggcggaggctggcgcgcggcacaggaccgggatcagatctatcggagaagaagcccttccccatactattcaagaggtggctacagaagccggtcgagatcccggtcttacagccctcggcggtactag

SEQ ID NO: 209095 - DNA, 867 bp, synthetic construct
  misc_feature 1..867: note = Description of Artificial Sequence: Synthetic coding sequence
  source 1..867: mol_type = other DNA
atgagcgacagcggcgagcagaactacggcgagcgggagagccggtccgctagtaggtcaggctctgcacacggctccggaaaatcggcccgccacactccagcgagaagccgctcgaaggaagattcccgtaggtcccgctccaagtctcgcagccgctctgagtctcgctctcgtagtcggaggtccagccgtcgtcattataccagaagcagatcacggagcaggagccacagaagatccaggtcccgttcctattcacgtgattaccgccgcaggcactcgcatagccacagtcctatgtcaaccaggcgcagacatgtggggaatagagccaatccagaccccaactgctgccttggcgtgtttggtctatcactctacactaccgaaagagatcttcgggaagtattttccaaatatgggcctattgccgatgtgtccattgtgtatgatcagcagtcgcgacggtccagaggattcgcttttgtctacttcgagaacgtggatgacgcaaaagaggctaaagagagagctaacgggatggaactagatgggaggcgaattcgcgtcgattttagcatcactaagagaccacatactcctacacccggcatctatatgggcaggcctacttacggctcaagtaggagaagggactactatgacaggggatatgatcgaggctacgacgaccgggattattactccaggtcctatcgaggagggggaggtggtggaggcggctggcgggccgcacaggacagggatcaaatctataggaggaggtctccctctccatactattccagaggagggtaccggagccggtcccgctcaagaagctactcaccacgcagatattag

SEQ ID NO: 209096 - DNA, 483 bp, synthetic construct
  misc_feature 1..483: note = Description of Artificial Sequence: Synthetic coding sequence
  source 1..483: mol_type = other DNA
atggtgcccagcgccggccagctggccctgttcgccctgggcatcgtgctagcggcttgtcaagcactggagaatagtacgtccccactgtcagccgaccccccagttgccgcggcggtggtgtcacatttcaatgattgccctgactcccatacacagttctgtttccacggtacgtgcaggttcctcgtacaggaagataaacccgcgtgtgtatgccactccggatacgtgggcgcccggtgtgagcacgccgatcttctcgcggtcgtggctgcaagccagaagaagcaggctatcacggcattggttgtcgtgtctatcgtcgccctggcagtactgataatcacctgcgtgctgatccactgttgccaagtgaggaaacattgtgaatggtgccgcgcactcatctgcagacacgagaaaccctcagcactgctaaaaggacgaactgcgtgttgtcactccgagacagtggtttag

SEQ ID NO: 209097 - DNA, 480 bp, synthetic construct
  misc_feature 1..480: note = Description of Artificial Sequence: Synthetic coding sequence
  source 1..480: mol_type = other DNA
atggtgcccagcgccggccagctggccctgttcgccctgggcatcgttctggccgcctgccaggccctggagaactcaacctcccccctgtcagatccccctgttgcagcggccgtagtctctcactttaacgactgtcctgatagtcatactcagttctgcttccacggtacttgccgctttctggtacaggaggataagcctgcctgcgtttgtcactcaggatacgtgggggctcgctgcgaacacgccgacttactggccgtcgtggctgcgagccaaaagaagcaggcaattactgcactggtagtcgtttcaatcgttgcgctcgctgtgttaatcattacatgtgtgctgattcactgctgtcaggtgcgaaagcactgtgaatggtgcagagccctgatatgtcgccatgagaagccctccgcactgcttaaagggagaaccgcctgttgtcacagtgagaccgtggtgtag

SEQ ID NO: 209098 - DNA, 2583 bp, synthetic construct
  misc_feature 1..2583: note = Description of Artificial Sequence: Synthetic coding sequence
  source 1..2583: mol_type = other DNA
atgatgagcatcaaggccttcaccctggtgagcgccgtggagcgggagcttttgatgggagataaagagcgggtgaatatcgaatgtgtagaatgctgcggcagggacctgtacgtgggtaccaatgactgctttgtataccacttcttgctggaagaaagacccgtgcctgccggcccggctactttcactgccaccaagcagctgcagagacacctgggcttcaaaaagcccgtaaacgaactgcgcgccgcaagcgcactgaatagactcctggtcctgtgtgacaattctattagtcttgttaatatgctgaaccttgaaccagtgcccagcggagcgcggatcaagggagcggcaacattcgctcttaacgaaaatcctgtgtcaggggatcccttctgcgtagaagtctgtattatcagcgtgaagcggcgtaccatccagatgttcctggtgtatgaggatagggtacagattgttaaggaagtgtccacagccgagcagccactggccgttgctgtggatggccacttcctctgtctcgctctgacgacccagtatattatccacaattactctacaggcgtcagccaggatctgttcccctactgctcagaggaacggccccctatcgttaagcggatcgggagacaggagtttctactcgccgggcccggtggtctaggaatgttcgctacagtggccggtatcagccaacgagcccctgttcattggagtgaaaacgtcattggcgctgcagtctcttttccgtacgtgatcgccctggacgatgaattcatcaccgtgcactccatgctcgaccagcagcagaagcagaccctgccatttaaggagggccatatcctccaagatttcgaagggcgcgtcatcgttgcgacttccaaaggggtgtacatcctggtccccctgcccttagagaagcagattcaggacctcctggcatctagaagggtagaggaagcactggtattagccaaaggcgccagaaggaacataccaaaggaaaagttccaggtgatgtaccgcagaattcttcagcaggccggtttcatccagttcgcccagctgcaatttttggaagctaaggagctgtttcgctctgggcagcttgacgtgagagaattgatttccctgtatcccttcctccttcccacatcctcaagcttcaccagatcccaccccccactccacgagtacgccgaccttaaccagctcactcagggtgatcaggagaaaatggcaaagtgtaaacgtttcctgatgtcttatctcaacgaagtgaggagcacagaagtcgccaacgggtacaaagaggatattgatacagccctgctgaaattatacgcagaagctgaccacgactcacttctggatctgttggttaccgaaaacttctgcctcctgactgactctgcagcatggttggaaaaacataaaaagtattttgccctgggactgttgtatcactataacaaccaggatgcagccgcagtgcagttatgggtcaatatcgtaaatggagatgttcaggatagcacccgttctgatctttacgagtatatcgtggacttcctcacgtactgcctggatgaagaactagtttgggcatacgctgattgggtgcttcagaaatcggaggaggttggcgtgcaggtcttcacaaaacgtccactggacgaacagcagaaaaatagttttaacccagatgatatcatcaattgtctgaagaagtatccaaaggcacttgtcaaatacctggagcacctggtcatcgataagcggctgcagaaagaggagtaccacacccacttagcggtactgtatctggaagaagtactcctacaacgggccagcgcctccggcaagggggcagaagcaacggagacccaggccaagctgcgaaggctcctccagaagagcgatctctaccgagttcattttctcctggagcgcctgcaaggagcagggctcccaatggaaagcgccattctccatgggaagctcggggaacatgagaaggccctgcacatccttgtgcatgagttacaggatttcgctgccgcggaggattattgcctgtggtgttcagaggggagagaccccccgcatcgccagcagctgttccataccctcctggcaatttatctgcacgcagggcccaccgcgcatgaattggctgtcgccgccgtggatttgcttaaccggcacgcaaccgagttcgacgctgcgcaggtgttgcagatgcttcccgatacgtggagcgtgcagctcttgtgcccctttctgatgggagccatgcgcgattccattcatgctcgcaggacaatgcaggtggctttgggcctggcacgctcggaaaacctgatatacacatatgacaaaatgaagctgaagggctcctctatccaactgagcgacaagaagttatgtcagatctgtcagaatcccttctgtgagccagtattcgttcgctaccccaatggcgggttagtacacacgcactgtgctgcttcgagacacaccaaccctagtagctcctctcctggaacacgcacatag

SEQ ID NO: 209099 - DNA, 2583 bp, synthetic construct
  misc_feature 1..2583: note = Description of Artificial Sequence: Synthetic coding sequence
  source 1..2583: mol_type = other DNA
atgatgagcatcaaggccttcaccctggtgagcgccgtggagcgggagcttctgatgggcgacaaggagagagtcaatatagaatgcgtggaatgctgtggacgggatctctacgtggggactaacgactgcttcgtgtaccattttttgctcgaggaacgtcccgtgcccgctggcccagctacattcaccgcgacgaagcagctccaacgacaccttggatttaagaaacctgtgaacgagcttagggcagcgtctgccctaaatcgactcctcgtcctctgcgataattccatttcgttggtgaatatgcttaatttagagcccgtcccatccggcgcccgtattaaaggggccgccacattcgccctcaacgagaatcctgtctccggagatcccttctgcgtggaggtatgtataatctctgtgaagcgaaggacaatccaaatgtttctcgtgtatgaggatcgagtgcaaatcgtgaaggaggtttctactgccgagcaacctctggctgtcgccgtcgatggacactttctgtgtcttgcactcacaactcagtatattatccataactactcaaccggtgtcagtcaagacttgttcccgtactgctctgaggagcggcccccaatagtgaaaagaattggccgacaggagttcttactcgctggtcccgggggattaggcatgttcgctaccgtggccggaataagccagagggcgcccgtgcactggagtgagaacgtaattggcgctgcggtgtcctttccctacgtcattgcacttgacgatgaattcatcaccgtgcactccatgctggatcaacagcagaaacagaccttgccctttaaggagggacacatcctgcaggatttcgagggcagagtaatagtggccaccagcaagggggtctatattctcgtgcctctgccgctggagaagcagatccaggatctactggcatcccgcagggtggaggaggctctggtgttggctaagggggcaaggagaaacattcccaaagagaagtttcaagttatgtacaggagaatcctgcagcaggcaggattcatacagttcgcgcaactgcagtttctggaggccaaggaactgttcagatcaggacagctggacgtgcgggagctcatcagtctgtatccgtttctgttaccaaccagttcctccttcacccgctcccaccctccattgcacgagtacgctgacctgaatcaactgacgcagggagaccaggagaaaatggcgaagtgtaaaaggtttctgatgtcctacctcaatgaggtgaggtccacggaggttgcgaatggctataaggaagacattgacaccgccctgctcaaactgtatgcggaggccgaccacgattcactgttggacctcctggtgacggagaacttctgcctcctaacagactcagcagcttggctggagaagcacaagaaatattttgcccttgggctcctctatcactacaataaccaggatgctgcagccgttcagctctgggtgaacatcgtgaatggagacgtgcaggattctacacggagcgatctgtacgaatatatagttgacttcttgacctactgtcttgacgaggaactggtgtgggcatatgcggattgggtccttcagaaaagcgaggaggtaggtgtgcaggtgttcaccaagagaccactcgacgagcaacaaaagaactcttttaatccagacgacattatcaattgtttgaaaaaatatcctaaagcactcgtgaaatatctggagcatctagtgatcgacaaaagattgcagaaagaggagtaccatactcatctcgccgtgttatatctggaagaagtgctgctgcaacgtgcctccgctagtggaaagggggccgaggccacggagacacaggccaaactgaggcggctgctccagaaatccgacctataccgggtccacttccttttggaaaggttacagggggctggcctgccaatggagtccgcaatcttgcacggaaagcttggcgaacacgaaaaggccttacacatattggttcacgaactccaggacttcgcagccgctgaggactattgcttatggtgtagtgaggggcgtgatccaccccaccggcagcaattgttccacaccctactcgccatctacctgcatgcaggacctacggcccacgagttagcagtggccgctgtggatctcttgaacagacacgctacagagttcgatgcagctcaggtcctacagatgctgcctgacacatggtccgtccaactcctgtgccccttcctgatgggtgcgatgcgggattccattcatgccaggcgtactatgcaagtggcattgggcctggcacggtccgagaatctgatctacacttatgataaaatgaagctcaaaggatcatccatacagctgtccgacaaaaaattgtgtcaaatctgccagaaccctttttgcgaaccggtcttcgtaaggtaccctaacggcggcctagtgcacacacactgcgccgcgtccagacacacgaacccctcatcttcaagcccaggaacccgaacctag

SEQ ID NO: 209100 - DNA, 948 bp, synthetic construct
  misc_feature 1..948: note = Description of Artificial Sequence: Synthetic coding sequence
  source 1..948: mol_type = other DNA
atgctgatcggcagctgccggaaggtgaagcggagcgtgcaggtgtttactaaaagaccactggatgaacaacagaagaactccttcaatcctgacgacatcatcaattgcctgaaaaagtatcccaaggccctggtgaaatatcttgagcacttggtgattgacaagcgactgcagaaagaagagtaccacactcacctggctgttctgtacttagaagaggtcctgttgcagcgcgcctcagcatccggaaagggggccgaagcaaccgagactcaggcaaagctcagacgcctcctgcagaagtcagatctgtatagggtacacttcctgctggagcgcctgcaaggcgcggggctacctatggagtcggcgattctccacggcaaattgggagagcatgagaaggctttacacatcctggtccacgagctccaggactttgctgccgcggaagactactgtttgtggtgttccgaggggcgcgaccctccacatcgccagcagctgtttcataccctgctcgcgatatacctccacgccggtcctactgctcacgaattggctgtggccgccgtcgatctcttgaatagacacgccacggagtttgatgcggctcaggtgctccagatgcttccagatacttggtcagttcagttgctgtgccccttcttgatgggggccatgagagactcgattcatgctaggagaacaatgcaggttgccttgggtcttgctaggtccgagaatctcatatatacgtatgacaagatgaaactcaaaggatcatctattcagctttctgacaagaaactttgccagatatgtcaaaatccattttgtgagcccgtgtttgtgcgctatcccaacggcggtctagtgcatactcactgcgctgcgtctaggcacaccaacccctctagctcatccccgggaaccagaacatag

SEQ ID NO: 209101 - DNA, 1704 bp, synthetic construct
  misc_feature 1..1704: note = Description of Artificial Sequence: Synthetic coding sequence
  source 1..1704: mol_type = other DNA
atgggccggggcctgctgcggggcctgtggcccctgcacatcgtgttgtggactaggatcgcttcaacaattcctccccatgtacagaagtccgtcaataacgatatgatagtgaccgataataacggagctgttaaatttccgcagctctgcaagttttgtgacgtgcgtttttccacttgcgacaatcaaaaatcttgcatgtcaaattgcagtattaccagtatttgtgaaaaaccacaggaggtgtgcgtagccgtctggcgaaaaaacgacgaaaacattacccttgaaaccgtgtgccacgacccaaagctaccataccacgacttcattctggaagacgccgcttcacctaaatgcataatgaaagagaagaaaaagcccggtgagacctttttcatgtgcagctgctctagcgacgagtgtaacgataatataatatttagcgaggaatataatacgagcaatccagacttgctgctggttatctttcaagtcactggaatctctctgttgccacctctcggggtggctattagcgtgatcattattttttattgctatcgggttaatcggcaacagaaactctcctccacttgggaaacgggcaagactcgtaagttgatggaattcagtgagcactgtgccatcattctggaggatgatcggagtgacatttcttcaacctgcgccaacaacatcaatcacaacacagagttgcttcctatagagctggacacacttgttggcaaaggacggttcgctgaggtgtacaaagctaaactgaaacagaacaccagtgagcaattcgagactgtggccgtaaaaatttttccatacgaggaatacgcctcatggaaaactgaaaaggacatcttttctgacatcaatctgaaacacgagaatattttgcagttcttgacggcagaagagcgaaagaccgaattggggaagcaatactggttgattactgcctttcacgccaaagggaatctgcaagaatacctgactcgacacgtcatcagctgggaagacctccgcaagctcggatcatcactggccagaggaattgcacatcttcacagtgatcatacaccttgcgggaggcccaagatgcccatcgtgcacagggatctgaagagttccaacatcctcgttaaaaatgatcttacttgttgtctgtgtgattttggactctctctgcggcttgatcccactctcagcgtcgacgatcttgccaactccggccaggtcggcactgcaaggtacatggcacctgaggttctggagagcagaatgaatctagaaaacgttgaatcgttcaaacaaaccgacgtgtattccatggccttagttctatgggagatgacttctagatgcaatgccgtcggagaagtgaaggattatgaacctccatttggcagcaaagtccgagaacacccctgtgtagagtctatgaaggataatgtcctgcgcgatcgcggacggccagaaatcccatctttctggctgaaccaccagggaatccagatggtctgtgagacactgaccgagtgttgggatcatgacccagaagcccgcttgaccgcccagtgtgttgccgagcggttcagcgagctagagcacctggaccgcctcagtggtcgaagctgtagcgaggagaaaatacctgaggatggcagcttgaataccactaagtag

SEQ ID NO: 209102 - DNA, 1779 bp, synthetic construct
  misc_feature 1..1779: note = Description of Artificial Sequence: Synthetic coding sequence
  source 1..1779: mol_type = other DNA
atgggccggggcctgctgcggggcctgtggcccctgcacatcgtgctgtggacccgaatcgcaagcacaatcccacctcacgtacagaaaagtgacgttgagatggaagcacagaaggatgagatcatttgccctagctgtaataggacagcacacccactcaggcatataaacaatgacatgatcgtgacggataacaatggcgcagtgaagtttccccagctgtgcaagttctgtgatgtacgattctctacctgtgataatcaaaagagttgcatgtctaattgcagtattaccagtatctgcgaaaagccccaggaagtgtgtgtcgccgtatggaggaagaacgacgagaatatcactcttgagaccgtgtgccacgaccccaaactgccttatcacgactttattttggaagacgccgcaagccccaagtgtattatgaaggagaaaaagaagccaggagagacatttttcatgtgcagctgttcatcagatgaatgcaacgacaacatcatatttagtgaggagtacaacacaagtaatccagatctcttgctggtgatctttcaagtcacaggcatcagtctccttcctccactgggcgtggccatcagcgttattattattttttattgttatagggttaatagacaacaaaagctctcatccacttgggaaacaggcaagacgcggaaactaatggagttcagcgagcactgtgcgatcattcttgaggatgaccgatctgatatttccagcacatgcgccaataatatcaatcataatactgaattgttaccgatcgagctcgatacactcgttggcaaggggcggtttgccgaagtttacaaggccaaactgaagcagaacaccagtgaacagttcgaaaccgtagccgtaaagatattcccttacgaggaatacgcctcctggaagactgaaaaggatatcttttcagacattaacctgaagcacgaaaatattctacagtttctgaccgccgaggaacggaagactgaattgggcaaacagtattggctgattaccgcttttcacgcaaaaggcaatttacaggaatatttaacacgccacgtgatctcgtgggaggatctgcgcaaactgggatcatctctcgcccgcggcatcgctcaccttcattccgatcatacgccatgtggaaggcccaaaatgcccatcgtgcacagagatctcaagtcttctaatattttggtcaaaaatgacctgacctgctgcctctgtgattttggcctatccctgcggctggacccaaccctttctgtcgatgaccttgccaatagcggacaggtcggaaccgctcgctacatggcacctgaggtgctggagtcacgcatgaacctggaaaacgtcgagtcgtttaaacaaacagatgtgtatagcatggccctagtgctgtgggagatgaccagtcgctgcaacgccgtgggcgaagtgaaagactatgaaccaccattcgggtctaaagtgcgggaacatccttgtgtggagagtatgaaagataacgtacttagagatcgtggccgacctgaaattccttccttctggctgaaccatcagggcattcaaatggtttgcgaaactctcacagaatgctgggaccatgaccccgaagccaggctgaccgcccagtgtgtagcggagaggttctctgaactggaacatctggaccggctctcggggcgctcttgctcagaagagaagatacctgaggatggctcactcaacacgacaaagtag

SEQ ID NO: 209103 - DNA, 339 bp, synthetic construct
  misc_feature 1..339: note = Description of Artificial Sequence: Synthetic coding sequence
  source 1..339: mol_type = other DNA
atgtgcagctgcagcagcgacgagtgcaacgacaacatcatcttctccgagggcagatgtaagattagacatataggaagcaacaatcggctgcaacggagtacctgccagaacaccggatgggagtccgcgcatgttatgaagaccccaggatttagagagtacaacacttccaaccccgacttgctcttagtcatctttcaggtgaccgggatcagtctccttccccctctgggagtggcaatctcagttattatcatattttattgctaccgtgtcaacagacagcaaaaactctcttcgacctgggaaacagggaagactcgcaaactgatgtag

SEQ ID NO: 209104 - DNA, 1194 bp, synthetic construct
  misc_feature 1..1194: note = Description of Artificial Sequence: Synthetic coding sequence
  source 1..1194: mol_type = other DNA
atgtgcagctgcagcagcgacgagtgcaacgacaacatcatcttctctgaagaatataatacgtctaacccagatctgttgctggtgatattccaggtgaccgggatcagcctgctgccccccctcggggtggcaatatccgttattatcatcttctactgttaccgagtgaatcgccaacaaaagttgtcctcaacctgggaaacagggaaaacaagaaaactcatggaattttcagagcactgtgccattatccttgaggacgacagatccgatatctcctcaacttgcgccaacaatatcaaccacaacacagagcttttacctattgagctggatactcttgtgggtaaagggcggttcgctgaagtatataaagctaagctgaagcatgagaacattctccagtttcttaccgccgaagagcgcaagacagaactcgggaagcagtactggcttatcacagctttccacgcaaaaggaaacctgcaagagtatttgacccggcacgtgatttcgtgggaagacctgagaaagcttggtagttcgcttgcccggggcattgcacacttacactcggatcataccccctgtgggagaccaaaaatgccaatcgtgcatcgggacttgaaatccagtaacatattggtgaaaaatgacctcacctgttgcttatgcgatttcggcctctcacttaggctcgacccgacactgtccgtggatgatcttgctaacagtggacaagttggtaccgcgagatacatggcaccagaggtgctggagagcagaatgaacttggagaatgtggagtcctttaaacagactgacgtgtatagcatggcgctcgtcctttgggaaatgacttcgcgctgcaatgccgtgggggaggtgaaagactatgagcccccgttcggtagcaaggtgagagagcacccctgcgtggaaagcatgaaagataatgtcctcagagacagaggcaggcccgagattccaagtttttggctgaaccatcagggaatccagatggtctgcgaaacgctcacggagtgctgggaccacgatcccgaagcccggctgaccgcccagtgcgtagctgagagatttagcgaattggaacacctcgataggctgtccggacgtagctgttctgaagaaaaaataccggaagacgggagcctgaataccactaaatag

SEQ ID NO: 209105 - DNA, 2244 bp, synthetic construct
  misc_feature 1..2244: note = Description of Artificial Sequence: Synthetic coding sequence
  source 1..2244: mol_type = other DNA
atggccgacgaggccgccctggccctgcagcccggcggcagcccctctgccgccggagctgatcgcgaggctgcaagcagcccagctggggagcctctcaggaagcgcccccggcgagacggaccaggactggaaaggtccccaggggagcccggaggcgcggcgccagagcgggaggttcccgctgcagcacgaggatgtcctggcgcggcggctgccgcactatggagagaagccgaggccgaagccgccgcagccggcggagagcaggaggcccaggcgaccgcagccgccggcgaaggagacaacggaccgggcttacagggccccagcagggagccgccactggctgataacctgtatgatgaggacgacgatgacgagggcgaagaggaggaggaggcagcagccgccgccataggctaccgggataacctgctcttcggggacgagataattacaaacggctttcattcctgcgaatccgacgaagaggatcgggcatcacacgcttcatcatcagactggaccccccgaccgaggatcggtccatataccttcgtccagcagcacctcatgattggcactgacccaaggaccattttgaaggatctccttccagaaacgatccctcccccagagctcgacgatatgacgctttggcagatagtgataaacatattgtctgaacccccgaagagaaagaaaagaaaggatatcaataccattgaggatgcggtgaagcttcttcaggaatgcaagaaaatcatcgtcctcaccggggcaggagtatcagtttcatgtgggatccccgatttccggtctcgtgatggcatttacgccagactagccgttgacttccctgacctccccgacccccaagcgatgtttgatattgaatattttcgtaaagaccccaggcccttttttaagttcgcaaaagaaatctaccctggacagtttcaaccaagtctgtgtcacaaatttatcgccctgtccgataaagagggaaagttgctaagaaactacacgcaaaacatagatactctggaacaggtggccggcattcaacgcattatacagtgccatggtagtttcgctacagccagttgtctgatatgcaaatataaagtcgattgcgaggccgtccggggcgatatattcaaccaagtggtgcctcggtgtcctagatgccccgccgacgaacctcttgcaatcatgaagcccgagattgtgttcttcggggagaatctgccagagcagttccatcgggccatgaagtacgataaggatgaagtggatttgctgatagtaatcggaagttcactcaaggtgcgaccggtggctctcatcccgagctctattccgcatgaggttccacaaatcctgattaacagagagccgctgccacatctccactttgatgttgaacttcttggtgattgcgacgtgataatcaatgaactctgccacagactcgggggggaatacgccaaactgtgctgtaaccccgtgaagttgtcagagatcacagaaaaacccccacgcacacagaaagaactggcatacctgagtgagcttcctccaacacctctgcacgtaagtgaagattcatcttcccccgaaaggacgtcgccccctgactcttcagtgattgttacgctgctggatcaagctgcaaagagtaacgatgacttagacgtcagtgaatccaagggatgtatggaagagaagcctcaggaggttcagacatcacgcaatgtcgagagtatagctgagcagatggaaaacccggacttaaagaacgtcgggagctccaccggagagaagaatgagaggacctctgtcgctggaacggtccgtaagtgttggccaaaccgcgtggcaaaggaacagattagccggcggctggacggcaaccaatatctgttcctcccccccaacaggtacatctttcatggcgccgaggtgtatagtgattcagaagacgatgttctctccagctccagctgcggatcaaacagtgacagcggcacttgtcagagtccaagcctagaggagcccatggaggatgagtcagaaatcgaggagttttataacggccttgaagatgaacccgatgtacctgagagggcaggtggtgctggcttcgggaccgacggtgacgatcaagaggccatcaatgaggccattagtgtgaagcaggaggttaccgatatgaattatccatccaacaagtcttag

SEQ ID NO: 209106 - DNA, 2553 bp, synthetic construct
  misc_feature 1..2553: note = Description of Artificial Sequence: Synthetic coding sequence
  source 1..2553: mol_type = other DNA
atgaccagccactacgtgatcgccatcttcgccctgatgagcagctgtctggccacagcaggacccgagcccggagctctgtgtgagctatcgcccgtgtccgcgtcccacccagtgcaggccctgatggaaagctttaccgtcctgtccgggtgcgccagcaggggcacgaccggattaccccaagaagtacacgtgctgaatttgcggaccgctggacagggaccgggccagctccagcgcgaggtaaccctgcacctcaatccgatatcctcagtacatatccaccataaatccgtagtgtttctcttaaattctccccaccccctggtgtggcatctgaagaccgaacggttagctactggggtgtctcgcctgttccttgtctccgaagggagtgtggtccaattttcttccgctaatttctcgttaaccgctgaaaccgaggagcgcaactttccccacgggaatgagcacttactcaactgggctcggaaggaatacggcgccgtaacttcctttaccgaactcaagatcgcccgaaacatatacatcaaggtcggcgaggaccaggtgttccctccgaaatgtaacatcggcaaaaatttcctgtcacttaattacctggccgaatatctccaaccaaaggccgccgaagggtgcgtcatgtcttcacagcctcagaatgaggaagtgcatatcattgaattaataacccctaactcaaacccttattctgccttccaggtcgatattacaatcgacataagaccaagccaggaggatctagaggtagtaaagaaccttatcttgatcctgaaatgtaagaaaagtgtaaattgggtgatcaaatccttcgatgtcaagggttctctgaagataatcgcgccaaacagcatagggtttggtaaggaaagcgaacgtagcatgaccatgaccaaatccatcagggacgacatcccaagcacccagggtaacttggtcaagtgggctctggataatggctacagcccaatcacgtcctatactatggcccctgtggcaaatagattccacctgcggctcgaaaacaacgaggaaatgggcgacgaggaggtgcatactatcccccctgagctgcgcatcttactcgaccccggggccctccctgcgctgcagaatccgcctattagggggggggaaggacagaacggcgggttaccatttcctttccccgacatatcacgcagagtctggaatgaagagggtgaagacggactccccaggccaaaggaccctgtgattccctctatacagctctttcctggtctgagagagcctgaagaggtgcagggaagtgtcgatatcgcgctgagcgtgaaatgcgataacgagaaaatgatagtcgcagtggaaaaggactcctttcaagcatctggatattcaggcatggacgtaacgctgctggaccccacgtgtaaagccaaaatgaacgggacccacttcgtactcgaatcaccactcaatggctgcggcacccgaccccgctggtcggcattggacggtgtcgtctattataactccatcgtcattcaggtcccggctctgggtgattcctccggttggcccgacggatacgaagatttggaaagtggagacaacggattccctggtgacatggatgaaggagatgctagcctgttcaccaggccagagattgtcgtttttaattgttccctgcagcaggtgcgcaatcccagctcctttcaggagcagcctcatgggaacatcacttttaacatggagctctacaatacagatctgttcttagtaccaagtcagggagtgtttagcgtgccggagaatggccacgtctacgtcgaggtatcggtcaccaaggcagagcaagagctgggtttcgccatccagacctgttttattagcccttacagcaatcctgatcggatgtctcactatacaattatcgagaatatttgccccaaggacgagagcgttaagttctactctcctaagcgagtacacttccctatcccccaggcagatatggataagaagagattctctttcgtgttcaaacctgtcttcaacactagtctccttttcctgcaatgcgaactgactttgtgcaccaaaatggagaagcatccacagaaactcccgaagtgcgtgcctcccgatgaagcctgcaccagccttgacgccagtattatctgggcaatgatgcagaataagaagaccttcaccaagccgctggccgttattcatcacgaggcggagtcgaaagagaagggtcccagtatgaaagaacctaatccgatcagtccacccattttccacggccttgacaccctcacggttatgggaattgcctttgccgcattcgttatcggcgccctgttaacaggggccctgtggtacatctactctcatactggcgaaaccgctggccgtcagcaggtgcccaccagccccccagcctctgagaattccagtgcagctcacagtatcggcagtacacagagcactccgtgctcgagctcatccaccgcatag

SEQ ID NO: 209107 - DNA, 108 bp, synthetic construct
  misc_feature 1..108: note = Description of Artificial Sequence: Synthetic coding sequence
  source 1..108: mol_type = other DNA
atgaccagccactacgtgatcgccatcttcgccctgatgagcagctgtctggcgaccgccgggccagagcccggggccctttgcgaattgtcacccgtttccgcttag

SEQ ID NO: 209108 - DNA, 2553 bp, synthetic construct
  misc_feature 1..2553: note = Description of Artificial Sequence: Synthetic coding sequence
  source 1..2553: mol_type = other DNA
atgaccagccactacgtgatcgccatcttcgccctgatgagcagctgtctggctacagccgggcccgagcctggcgcgctttgcgaactaagtccagtctccgcatcacaccccgtgcaggccctgatggagagtttcaccgtgctgtccggctgcgcctctcgggggactacgggactcccacaggaggttcacgtgctcaatctgcgcaccgccgggcaggggcctggacagctccaacgtgaagtgaccctccacttaaatcccattagttcagtgcatatccaccacaagtctgtggtattcctgctcaactctccccatcccctggtatggcatttgaagaccgaaaggcttgccacaggcgtctcgcgccttttcctggtaagcgaggggtccgttgtccagttctcctctgctaattttagtcttactgcagaaacagaagagcggaactttccccatggtaacgaacatcttctgaattgggcgcggaaggaatacggggcggtgacctcgtttacagagctgaagattgccagaaacatctacatcaaagttggtgaagatcaggtgtttcctcctaaatgtaatatcgggaagaatttcctgagcctcaactacttggctgagtatctgcagccaaaagctgctgaaggatgcgtaatgagctcacagccccagaatgaagaagtccacattattgaattaataactcccaattcaaacccttacagcgctttccaggtggacatcacgatagatataaggccgtctcaagaagatctggaagtagtcaagaacctcattctgattctcaaatgtaaaaagtctgtgaactgggtgatcaaatcttttgacgttaagggatccctgaaaattatcgcgcctaacagcatcgggtttggcaaggaatctgagcgatccatgaccatgaccaagagcatcagggatgatatacccagcacacagggaaatctggtaaagtgggcgctggataacgggtattcccccatcacaagttacacgatggcccccgtcgcaaatcgctttcatcttaggttggagaataacgaggagatgggggatgaagaggttcatactatcccaccagagctcagaatcctcctcgaccccggagcactgcccgctctgcagaatcctccaatccgcgggggagaagggcagaatggaggactgccttttcccttcccagatatcagtaggcgtgtgtggaacgaagaaggggaggatggcctgccaaggccaaaggatcccgtcatacccagcatccagctctttccggggctgagagaacctgaggaagtccagggctcagtcgatatcgccctgtctgtgaagtgcgacaacgagaaaatgatcgtcgcagtggagaaggactcttttcaggccagtgggtactcaggaatggacgtgaccctgctggatcctacatgtaaggcgaaaatgaatggcacgcacttcgtgctggaatcccccctgaacgggtgcggaacaagaccaaggtggagcgctttggacggagttgtctactataatagcatcgtaattcaggtgcctgcactgggtgactctagcggatggcccgacggctatgaagatctggagtctggtgataatgggtttccaggagatatggacgagggggacgcttcgcttttcacaaggcctgagatcgtcgtgttcaattgctcgttgcagcaggttcggaatccgagttcattccaggaacaacctcatggcaacattacctttaacatggagctgtataacactgaccttttcctcgtgccttcacagggcgtgttcagcgtgcccgagaatggtcacgtgtatgtcgaggtgagtgtgactaaggcagaacaggaactcggatttgcaattcagacgtgctttatttcaccttactctaatcccgatagaatgagccactacaccatcattgagaacatctgccccaaggatgaaagtgtaaagttttatagcccgaaacgagtccacttccccatcccacaggctgacatggataaaaaacgctttagctttgtcttcaaacccgtgtttaacaccagcctcctctttcttcaatgtgaattaactctgtgcacaaagatggagaagcatccccagaagttgcctaaatgtgttccaccagacgaagcttgcacatccctggacgcctcaataatctgggcgatgatgcagaacaagaagaccttcacaaaaccactggccgtgatccatcacgaggctgaaagtaaagagaagggacctagcatgaaggaacccaacccaatttctccacccattttccatggtctggatactttaactgtgatgggcatagctttcgcagcctttgtgatcggagcactacttacgggcgccctgtggtacatttactcacacactggggaaacagcgggacggcagcaggttccaacctcccctcctgccagtgagaactccagtgccgcacatagtattggaagcactcaaagtaccccgtgctcatctagctcgactgcttag

SEQ ID NO: 209109 - DNA, 2556 bp, synthetic construct
  misc_feature 1..2556: note = Description of Artificial Sequence: Synthetic coding sequence
  source 1..2556: mol_type = other DNA
atgaccagccactacgtgatcgccatcttcgccctgatgagcagctgcctggctactgctgggccagagcccggcgccctgtgtgaactgagccccgtgtctgcttcacatccagtgcaagcactcatggagtcttttacagtactgtccgggtgtgcaagccggggtacaaccggactcccccaggaggtccatgtgttaaatttgcgcaccgccgggcaaggaccaggccagttgcagagggaagtaacactgcacttgaaccccatctcatcagtacatatccatcataagtccgttgtctttctcttgaatagtcctcaccctctcgtgtggcacctgaaaacagaacggctggctaccggggtctcgcgcttatttcttgtttctgaaggttcggttgtgcagttcagcagtgccaacttctccctgactgcggaaaccgaggagcggaatttcccacacgggaatgaacatctactgaattgggctcggaaggaatacggcgcagtgacatctttcaccgagctcaagatcgcaagaaatatctacatcaaggtgggggaagaccaagtctttcccccgaagtgtaacatcggcaagaatttcctgtcgcttaactacctggccgaatacctgcagccgaaggcggctgaagggtgtgtaatgtcctcccagccccagaacgaggaggtgcacatcatcgaactgattacccctaactccaacccctactctgcctttcaggtggacattacaatcgatattcggccctcacaggaggacctcgaagtcgtcaaaaacctgattctgatactcaagtgcaaaaagtctgtgaattgggtgatcaaatctttcgatgttaaaggttcactgaaaataatagcccccaactctatcggctttgggaaagaaagtgagagaagcatgaccatgaccaaaagcatccgggatgacatccccagcacacaaggtaacctcgttaagtgggccctcgacaatggatacagcccaattaccagctacaccatggcccccgtggctaaccgctttcacctgcgtctggagaacaatgcagaagagatgggagatgaggaggtgcataccatcccccctgagctgcgcattttactcgaccccggcgccttgcctgccctccagaacccacccatccggggcggagagggccagaacggcggtctaccatttcccttcccagacatcagcaggagggtctggaatgaggaaggggaggatggcctcccccgaccaaaggatccagttataccttctatccagctcttcccgggcctgagagaacccgaagaggttcagggtagtgtggatatcgcactttctgtgaagtgcgacaatgagaagatgattgtcgcagttgaaaaagactcctttcaggcctcagggtattcaggtatggatgtgactcttttagatcccacctgtaaagctaagatgaacggtacgcacttcgtcctcgaaagccctctgaatggctgcgggacccgccctcggtggtccgccctagatggtgtggtgtattataactctatcgtgatccaggtgccagccctgggagattcctctgggtggcccgatggttatgaagatttggaatcaggcgacaacggatttccaggggatatggacgagggggatgcatctctctttacccgccccgagatcgtggtgttcaactgctcactgcagcaggtaaggaacccctcctcctttcaggaacagcctcacgggaacatcacattcaatatggagctgtataatacagacctgttcttagtcccctcccagggtgtgttctctgtacccgaaaatggacacgtgtacgttgaggtgtccgtgacaaaggcagaacaagaattggggttcgcgatccagacctgcttcatctctccttactccaacccggatcggatgtctcactacaccattattgagaacatatgccccaaagacgagagcgttaaattctacagccctaaaagagtgcacttccccattccccaggccgatatggacaaaaaaaggttcagcttcgtatttaagccggtttttaatacttccctcttgttccttcagtgcgaattgaccctgtgtactaagatggagaagcatccccagaagttaccgaaatgtgtccctccagacgaagcctgcactagccttgacgcgtcaatcatatgggcgatgatgcagaacaagaagactttcaccaagcccctcgccgtgattcaccatgaggctgagagcaaagaaaaagggcccagtatgaaagagcccaatccaatcagtccacctatctttcatggcctggacacgctgaccgtgatgggcatcgccttcgccgccttcgtgatcggcgctttgctgacgggcgccctgtggtacatctacagtcatacgggtgagacggcaggccgacagcaggtgccaaccagtccacccgccagcgagaacagctccgcagctcattccatcggcagtactcagtccaccccctgcagttcttcttccacggcttag

SEQ ID NO: 209110 - DNA, 2052 bp, synthetic construct
  misc_feature 1..2052: note = Description of Artificial Sequence: Synthetic coding sequence
  source 1..2052: mol_type = other DNA
atggccctgttcgtgcggctgctggccctggccctggccctggccctcgggcctgccgccacgctcgccggtccagccaagagtccctatcaattggtcctgcagcactcaagactccggggccgccaacacggccctaacgtttgtgctgtgcagaaggtaatcggcacaaatcggaaatactttaccaattgcaaacagtggtatcaaaggaaaatctgtgggaagtctacagtcatctcttacgaatgctgcccgggatatgagaaggtccctggggaaaaaggctgcccagctgctctgccactcagcaacctatatgagacgctaggagtagtgggtagcacaaccacccagctgtacaccgatcgcaccgagaagctccggccagaaatggaaggccctggcagttttaccatctttgcaccctccaatgaggcatgggcatcactaccagccgaagtgctggactcgttggtttccaacgttaatattgaattgttgaatgctctccgctaccacatggttggtcgtagggtgctgactgatgagcttaagcatgggatgacattaacatcgatgtatcagaattcgaatatacaaatccatcactatccgaatggaattgtcaccgtgaactgcgcccgtcttctgaaggcagatcaccacgctacgaatggggttgtccatctaatcgacaaagtcatcagcacaattacaaacaatatccagcagattattgagatagaggatacatttgagactctgagggccgcagtcgccgcaagtggcctgaataccatgttggagggcaatggtcagtacaccctgctcgctccaacaaatgaggcatttgagaagattcctagtgagactctgaaccgcatcctcggcgatccagaagcacttcgcgacttgcttaacaaccatatcctaaagagcgccatgtgcgccgaagctattgtcgcagggttatcagttgagacactagagggcacgaccctggaagttgggtgttccggggacatgctgaccattaatggaaaagctattatctccaacaaggacatactggccaccaatggggtgatccattacattgacgagctgttgattccagattcggccaaaacactctttgagcttgctgcggaatcagatgtatctaccgcaattgatctgttcagacaggcaggcctgggaaatcacctctcagggtcagaacgtttgacgcttctggccccgctgaactcagtgttcaaggacggaactcctcctattgatgctcacaccagaaacttattacggaatcatattataaaagaccaactagcttctaaatatttgtatcacggtcaaactttggagaccctgggcggcaagaaattgcgcgtgtttgtgtacaggaattcactgtgcatcgagaactcttgcattgctgctcacgacaagcggggacgatatgggactctgttcacaatggacagagttcttactcctcctatggggacagtcatggacgtactcaagggcgataaccgcttttccatgctcgtggctgccatccagtccgccgggctcaccgagaccctgaatagggagggagtttacacagtgttcgccccgacgaatgaggctttccgcgccctaccccctagagaaagatcaaggctattgggtgacgccaaggaattggcaaacattctgaaataccacataggagatgaaatcctggtgtctggcggaatcggcgccctggtgaggctgaagtctctccagggtgacaagttggaggtgtcgctgaagaataatgtggtgtctgttaataaagaacccgtggctgaacccgatattatggcaaccaacggagtggtgcacgtgattaccaatgtactccaacctcccgctaatcgcccccaggagagaggagatgagctcgctgacagtgctctggagatttttaagcaggctagtgcattcagcaggccggagcaaccgcaagtgttgtgctcaccagtctaccaaaagctcctcgaacggatgaagcactag

SEQ ID NO: 209111 - DNA, 1251 bp, synthetic construct
  misc_feature 1..1251: note = Description of Artificial Sequence: Synthetic coding sequence
  source 1..1251: mol_type = other DNA
atgctggagggcaacggccagtacaccctgctggcccccaccaacgaggctttcgaaaaaatcccttctgaaaccttgaacaggatccttggcgacccagaggccctcagggacctccttaacaatcatatactcaagagtgccatgtgtgctgaagccatcgttgcagggctctctgtagagacgttagaaggtaccaccctcgaagtgggctgctctggggatatgctcaccatcaatgggaaggcaataatatcaaataaagacattttagcaacaaacggcgtgatacactacatcgatgaattgctgataccagacagtgcaaagactttattcgaactagctgccgagtcagacgtgtccactgctattgatttgttcaggcaagctggactcgggaatcacctgtccggctcggagcggctgaccctgttggctccacttaattccgtgttcaaggatggcactccccctatcgatgctcatacacggaatctattgaggaatcatatcatcaaagatcagctggcctccaagtacctctatcatggccaaaccctcgagacactcggcggaaagaagttgagagtcttcgtgtaccgaaactctctctgcatagagaactcctgcattgccgctcacgataagaggggtcgctatggtacactgttcaccatggaccgggtcctaactccgcctatgggcactgtaatggatgtgctgaaaggcgacaaccgcttcagcatgcttgtggccgcaatacagtctgctggattgacagagacacttaatcgcgagggcgtgtatacagtattcgcaccaaccaacgaagcttttcgcgcacttccaccgcgcgaaaggtctcggttgctgggtgacgcgaaagaattggctaacatcctaaagtatcacatcggggacgaaatactggtgtccggcggaattggtgccctagttcggctcaagtcccttcagggagacaagctggaggtctccctcaagaataatgtggtgagtgtcaataaggagccagtggccgagccagatatcatggctactaatggcgtggtgcatgtcattacgaatgttctccaaccacccgccaacaggcctcaagagagaggcgatgaactcgccgactccgctcttgagatcttcaaacaggctagcgccttctcgcgggccagccagagatccgtcaggttagctccagtgtatcagaagctcctcgagcgcatgaaacactag

SEQ ID NO: 209112 - DNA, 2052 bp, synthetic construct
  misc_feature 1..2052: note = Description of Artificial Sequence: Synthetic coding sequence
  source 1..2052: mol_type = other DNA
atggccctgttcgtgcggctgctggccctggccctggccctggccctcgggcctgcagccacactagccggacccgccaagtctccctatcagctggtgttgcagcactcccggttgcggggccgtcagcatggcccaaacgtgtgtgctgtccaaaaagtcattggaactaatcgtaagtattttactaactgcaaacaatggtatcagagaaagatttgtggaaaatctacagttattagctacgagtgctgtcccggctacgaaaaggtacccggggaaaaaggatgccctgctgccctgcccctgagtaatctctatgagacgcttggcgtggtcgggagtacaaccacgcaactgtacacagacagaacagagaaacttcggcctgaaatggagggtccaggctccttcacaatcttcgcaccttctaacgaggcttgggcaagcctgccagcagaggtgctggacagcctggtctccaacgtgaacattgagctcctgaatgccctgagatatcacatggtgggccggcgggtgctgaccgacgaattaaaacacggcatgaccctgaccagtatgtaccagaatagtaatattcagatccaccattacccgaacggtattgtgaccgtcaattgtgccaggcttctcaaggcggaccatcatgccactaatggagtggtccatctgatagacaaggtgataagcacaatcaccaataatattcaacaaatcattgagattgaagacactttcgaaactttaagagctgcggtggctgcaagcggactgaatactatgcttgagggcaatggccaatatactctcctcgcccccacgaatgaggccttcgaaaagattcctagcgagacgctgaaccgcatcctgggggatcctgaagctctgcgggatttactgaacaatcacatcttaaagtcagcaatgtgcgctgaagccattgtggctggactgtccgtcgaaacccttgaggggactaccctggaagtgggctgttccggcgacatgctaaccataaacgggaaggctataataagcaacaaggacatcctcgccactaacggtgtaattcactacatagacgaattgcttattccggacagcgccaaaactctgttcgaactagcagccgagagcgacgtgagcaccgctatagatctttttcgccaggcaggtttgggaaaccacctgtccggaagcgaaaggctgacactgctagcgccgttaaatagcgttttcaaggatggtacgcctccaatcgacgctcacacccgaaacctcctgcgcaaccatatcatcaaagaccagctggcaagtaagtatctttatcatgggcagactctggagacactgggagggaagaagctgagggtcttcgtctaccgaaattctctgtgcatcgagaactcatgcatcgctgctcacgataagaggggccgttacggcacacttttcaccatggatcgtgtccttacaccacccatgggaaccgtgatggacgttttgaaaggagataacaggttttctatgttggtggcagccatacagtccgctggactgaccgagacactaaaccgtgagggagtgtatacagtgttcgctcccacgaacgaggcctttcgagccctccctccaagagagcgtagccggctcctcggcgacgccaaagagctggctaatattctgaagtaccatattggcgatgaaattctcgtttctggaggcataggcgcactagtcaggctgaaatcactccagggagacaaacttgaggtctctttgaagaataatgttgtatctgtcaacaaggaacctgtagctgaacctgatatcatggctactaatggagttgttcacgtcattacaaacgtgctgcagcctcccgccaaccgcccccaggaacgcggagacgaactggccgattctgctctcgaaatcttcaaacaggcctctgcattttctcgcgcatctcagcggtccgtgagacttgcccccgtgtatcagaagctgcttgaaagaatgaagcactag

SEQ ID NO: 209113 - DNA, 1188 bp, synthetic construct
  misc_feature 1..1188: note = Description of Artificial Sequence: Synthetic coding sequence
  source 1..1188: mol_type = other DNA
atggccttcagcccctggcagatcctgagccccgtgcagtgggccaagtggacttggagtgccgtgcgtggtggggccgcaggggaggacgaggcaggaggaccagaaggcgatcccgaggaggaggattcacaggcagagaccaaaagcttgtcctttagaagcggctgcaaagtgaagaaacatgaaactcaatccttagcattggacgcttgttcccgcgatgagggggccgtaatttcgcaaatcagcgacataagcaatcgggacgggcacgctactgatgaggaaaaactggcctccacatcatgtggccagaaatctgctggcgccgaagtaaaaggtgagccagaagaagatctggagtacttcgaatgcagtaatgtgcctgtctctaccataaatcacgcttttagttcctctgaggctggcattgaaaaagaaacatgccaaaagatggaggaggatggcagcacggtgctgggattattagaaagctccgccgaaaaggcccccgtttccgtttcctgcggcggagagtctcccctcgacgggatctgtctgtccgagtccgataagacagcggtcttaacattgatccgggaggaaattatcacaaaggaaatcgaggcgaatgaatggaaaaagaaatatgaggagactagacaggaggtgctcgaaatgcgcaagattgttgcggagtacgagaaaactatcgcacaaatgatcgaagacgagcaaaggacaagcatgacctcacagaaatcttttcagcagctcactatggaaaaagaacaggctctcgccgatcttaacagtgttgaacggagcctatctgacctcttccggcggtacgagaacctgaagggtgtgttggagggcttcaagaagaatgaggaagcactgaaaaaatgcgcacaagattacctggccagagtgaagcaagaggagcagaggtaccaggctctaaaaattcacgcagaagaaaaattagacaaggcgaatgaagagattgcacaggttagaacaaaggcgaaagccgagagtgcagccctgcacgcagggctgcggaaggagcagatgaaggtcgaatctctggagagggcattacagcaaaaaaaccaagagattgaggaattgaccaagatttgtgatgaattgatcgctaaactgggcaagaccgactag

SEQ ID NO: 209114 - DNA, 2418 bp, synthetic construct
  misc_feature 1..2418: note = Description of Artificial Sequence: Synthetic coding sequence
  source 1..2418: mol_type = other DNA
atggccttcagcccctggcagatcctgagccccgtgcagtgggccaagtggacatggtccgccgtccgaggcggagcagcaggggaggacgaagctggcgggccagaaggggatcccgaagaggaagactctcaggccgagaccaagtcgctctcattcagcagtgattctgaggggaacttcgagacccccgaagccgagactcctattaggtctccattcaaagagtcatgtgacccgtccctgggcctggcagggcctggcgctaagagccaggagtcccaggaagcagatgagcagctggtcgccgaagtcgtagagaagtgttcttccaagacctgctccaagcccagcgagaacgaagtcccccagcaagccatagattctcatagcgttaagaatttccgtgaagagccagaacatgacttcagcaaaatctcaatcgttaggcctttttctattgaaaccaaggattccacggacattagtgccgttctgggcactaaggccgcccatggatgcgtcacagcggtgtctgggaaggctctgccctcttcgccaccagacgctcttcaggacgaggcaatgaccgaaggatccatgggtgtcaccttagaagcctctgcagaagcagaccttaaggcaggcaactcttgtcccgagctggttcctagcaggcgttccaaattaaggaaacctaaacccgtgccactgcgcaagaaggcgatcggaggggagttctctgataccaatgctgcagtagagggaacacccttacctaaggcttcttaccacttcagtccagaagaattggatgaaaacacctcacccctgctgggtgatgcaagattccagaagagtccgccagatcttaaggaaactcctggcactctttcatctgataccaatgacagcggggtggaactgggggaggaatcccggagttcccccttgaagctggagttcgactttactgaagacaccgggaacatagaagctcgcaaagcgctgcccagaaagctcggaagaaagctgggcagcaccctgacccccaagatacagaaagatggaatctccaagtctgccggtctggagcagccgactgatcccgtcgctagggatgggcctctgagtcagacttccagcaagcctgatcctagccagtgggagtcacccagcttcaacccgttcggatcacattccgtcctccaaaactctcctccgcttagcagcgagggcagttaccacttcgatccagataatttcgacgagtctatggatccatttaaacctaccaccacgttaacctcctccgatttctgctccccgaccggcaatcacgttaacgagattcttgagagccctaagaaagctaagtccaggttgatcacgagcggctgtaaggtgaagaagcatgagacccagtccctcgcgctcgatgcgtgctctagggacgaaggcgctgtaatttctcaaataagcgacatctccaatagagacggccatgcaaccgacgaggagaagcttgctagtacatcatgcggacagaaaagtgccggcgccgaggtgaagggtgaaccggaggaggatctggagtatttcgagtgctccaatgtgcccgtgagcactatcaatcacgccttctcgtcaagtgaagcagggatcgagaaggagacctgccagaaaatggaggaggatggcagcaccgttcttggcctgttggaatcctcggcggaaaaggcaccggtatctgtgtcttgtggaggggaaagtcctctggatgggatttgcctgtctgaatctgacaagacggcagtgctgacactgatccgcgaggagattattaccaaggagattgaggccaatgagtggaagaagaaatatgaagaaaccagacaggaagtgctcgagatgcggaaaattgtagcagagtatgaaaaaactattgcccagatgattgaggatgagcagagaaccagtatgacatcacagaagtcttttcaacagctgacaatggagaaggagcaggcacttgctgatctaaactcagttgagcggtctctgagtgacctgtttaggcggtacgagaatctaaagggcgtacttgagggcttcaaaaaaaatgaggaggcattgaagaagtgtgcgcaagattacctggctcgggtcaaacaggaggaacagaggtaccaagcactgaagatacatgcggaagaaaagctggataaagctaatgaagaaattgcgcaagtgaggaccaaggctaaagcggagagcgccgcactgcacgccggcctgcgaaaggaacagatgaaagtggagtctctggaaagggcactgcagcaaaaaaatcaggagattgaagaactaactaagatctgcgatgagttgatagccaagctgggaaaaaccgactag

SEQ ID NO: 209115 - DNA, 1140 bp, synthetic construct
  misc_feature 1..1140: note = Description of Artificial Sequence: Synthetic coding sequence
  source 1..1140: mol_type = other DNA
atgggcggcagccacagccagaccccccggggccgggagcccgccggggagcggcaccccagaccaactgaaactgctactaccgagcaagtgaagttcttgtgtttcttgttatccgggtgtaaagtgaaaaaacacgaaacacagagtttagcactggatgcatgttcccgggacgagggcgctgtaatcagccagatttccgatatcagcaaccgggacggacacgctacagacgaggagaaactggccagcacatcatgcggacagaaaagtgcaggcgcagaagttaagggtgaacctgaagaagatctggagtatttcgaatgctctaacgtgcctgtgagtactataaaccacgcattttccagttccgaggctggaatcgagaaggagacttgccagaaaatggaagaagatggctcaaccgtcctcggcctgctggaatccagcgccgaaaaggccccagtgtccgtttcttgtggaggtgagagtcctctcgacggaatctgcctttccgaaagtgacaaaaccgcagtgctgacccttatccgggaagagattattacaaaagaaatcgaggcaaatgagtggaagaagaagtatgaggaaacccgtcaggaagtcctcgagatgagaaagattgtcgctgagtatgagaaaacaatcgcccaaatgattgaggacgagcagaggactagtatgacttcacaaaagagcttccagcagctaacgatggagaaggaacaggccctagctgacttgaactcagttgagagatctctctcagatctatttcggcggtatgagaacttgaagggggtactcgaaggatttaagaagaacgaagaagccttaaagaagtgtgctcaggactatttggccagagtaaagcaagaggagcagcggtatcaggctctgaaaatacacgctgaagaaaagcttgacaaggcaaatgaggaaatcgctcaagtgcgcacaaaggcaaaggccgaatccgccgccttgcacgcagggcttcgtaaggaacagatgaaagtcgagtcccttgaaagggccctgcagcagaaaaaccaggaaattgaggaactgaccaagatttgcgacgagctgattgcgaaactaggtaagacagattag

SEQ ID NO: 209116 - DNA, 1104 bp, synthetic construct
  misc_feature 1..1104: note = Description of Artificial Sequence: Synthetic coding sequence
  source 1..1104: mol_type = other DNA
atgggcggcagccacagccagaccccccggggccgggagcccgccggggaaaggcacccgcgaccaaccgagaccgctagtggatgcaaggtaaagaagcacgagacgcaaagtcttgcactggatgcctgctctcgagacgagggagccgtaatttctcagatcagcgatatttcgaatcgagatggccatgctaccgacgaggaaaagctggcttcaacgtcgtgcgggcagaaaagcgccggggctgaagttaagggtgaacctgaagaggatttagaatactttgaatgctccaacgttccagtgtccaccatcaaccacgccttttccagctctgaggccggaattgagaaggagacgtgccagaagatggaagaggacgggagtaccgtgctggggctgttggaaagctcggccgagaaagcccccgtttccgtgtcctgcgggggagaatcacctttggatggaatttgcctcagtgaaagtgataaaacagccgttctcaccctgatccgagaagaaataatcactaaagagatcgaagcaaatgagtggaagaaaaagtacgaggaaacgaggcaagaggtcctggagatgagaaagattgtggctgagtatgaaaagactattgcacaaatgattgaagatgaacagagaacgtctatgacgagtcagaagtcatttcagcagctcaccatggagaaggaacaggccttggccgatctgaattcagtggagagatcactctctgatctcttcaggcgttatgagaatcttaaaggcgtattggagggattcaagaagaatgaggaggccctcaaaaaatgcgcccaggactacctggctcgggtgaagcaggaggaacagcgttatcaggctttaaaaattcacgccgaagagaagctggacaaggctaatgaggagatcgcgcaggtacgcaccaaagccaaggctgaatctgccgcgctgcacgccggactgaggaaggagcagatgaaagtggaatctctggagcgggctctacagcaaaagaaccaggagatagaggaactgacaaagatttgcgacgaactgatagcgaaactgggcaaaaccgattag

SEQ ID NO: 209117 - DNA, 2454 bp, synthetic construct
  misc_feature 1..2454: note = Description of Artificial Sequence: Synthetic coding sequence
  source 1..2454: mol_type = other DNA
atggccttcagcccctggcagatcctgagccccgtgcagtgggccaaatggacttggagtgccgtcagaggcggcgccgccggcgaggatgaggccggcggtcccgaaggtgatcctgaggaagaagattcccaggccgagacgaagagcctgagtttctcctccgactcggaaggcaattttgagactccagaagccgagaccccaatcagatcaccatttaaggaatcttgcgatccctcattggggttggccggccctggggctaaaagtcaggagtcacaggaagcggatgagcagctggttgccgaggtcgtcgaaaagtgctccagcaaaacatgctcaaagcccagcgagaacgaagtgcctcagcaggccattgatagtcattccgtgaaaaacttccgggaagagcctgaacacgacttcagcaaaatcagcatcgtgcgccccttctcgatcgaaactaaggattcaaccgatatctctgccgttttaggcactaaagctgcgcatggctgtgttaccgctgtgtccggcaaggcccttcctagcagtccccccgatgcgctacaggatgaggccatgactgaggggtcaatgggtgtgaccctggaggcgagtgcagaagccgacctaaaagctggaaacagctgcccggaactggtaccaagtcgaaggtccaaactgaggaagccaaagccagtaccccttaggaaaaaagctattggaggagagttttccgataccaacgccgctgtggagggcacccccctgccaaaggcttcataccacttttcacccgaagaacttgacgaaaacacttcacctctgctgggtgatgctcggttccagaaaagtccccctgatctcaaggagacacccggaaccctgagcagcgatactaacgacagcggcgttgagctgggagaagagagtaggtctagccccttgaagctagaatttgacttcacagaggatactggtaacattgaggcaagaaaagcactgccaaggaagcttggacgtaaattgggaagcactttaactcctaaaatccagaaggatgggatctcaaagtccgctggactggagcagccaacggatcccgttgctagagatggtcccttgagtcagacatcctccaagcctgatccctcccaatgggagtccccttctttcaatccgtttggatctcactctgtcctacagaactcaccccccctgagctcagagggatcctaccactttgaccctgacaacttcgacgagagtatggaccctttcaaacctaccaccactctgaccagtagcgacttctgtagtcccacagggaaccatgttaacgagatactcgaatctcccaaaaaggctaagtctaggctcatcaccacaaccgaacaagtaaaattcctctgttttctcctctccggatgcaaagtcaagaaacacgaaacacaatcactggccctcgacgcctgcagccgagatgaaggcgccgtgatttcacaaatctcagacatctccaatcgcgatggccatgccaccgacgaggagaagctggcgagcacatcctgtgggcagaagtcggctggcgcagaggtgaaaggcgaaccagaggaagatcttgagtactttgaatgcagcaacgtgcctgtgtctacaatcaaccacgcattcagttcttccgaagccggaatcgaaaaggaaacttgtcagaagatggaagaagatggctcaactgtgctaggtctcctcgaatcgagtgcagagaaagcccccgtatcagtatcatgcgggggggagagcccactggacgggatatgtctatcagagagcgataaaaccgccgttctcactctgattcgggaagaaatcattaccaaagaaatcgaagcaaacgaatggaagaagaagtatgaggaaacacgacaggaggtgctggaaatgcgcaaaatagtggctgaatatgagaagaccatcgctcagatgattgaagacgagcagaggactagtatgacttctcagaagtcctttcagcagctaacaatggagaaagagcaagcgctggctgacttaaactccgtggagcgatccctttccgatctttttaggagatatgagaatttgaagggtgtgctagaggggttcaagaaaaacgaggaggcgttgaagaaatgcgctcaggattatctcgcgagggttaaacaggaggaacagaggtaccaggctctgaagatccacgctgaggaaaagcttgacaaggccaatgaagagattgcccaggttagaacaaaagccaaggcagagagcgcggcacttcatgccgggctccggaaagaacagatgaaggtggagagcctcgaacgcgctctgcagcagaagaaccaggagatcgaagaactcacaaagatctgcgatgaacttattgccaagttagggaagactgattag

SEQ ID NO: 209118 - DNA, 2379 bp, synthetic construct
  misc_feature 1..2379: note = Description of Artificial Sequence: Synthetic coding sequence
  source 1..2379: mol_type = other DNA
atgcagcggcagaccatcaagggcgccggcgccggcggcgccgccctaatggctttcagtccgtggcaaattctctcccccgtccaatgggctaagtggacgtggtcagctgttagaggcggtgctgcaggtgaggatgaggctgggggacctgaaggcgaccctgaggaggaggatagccaggcagagaccaagtccctctctttcagttcagattcagaaggcaatttcgagactcccgaggctgaaacgcctattcggtctccattcaaagaaagttgtgatccgtcattagggctcgctggtcccggcgctaagagccaggaaagccaggaagcggatgagcagctcgtggccgaagtcgttgaaaaatgttcctctaaaacctgctccaaaccttcagaaaacgaggtaccacagcaggccatcgactcccacagcgtcaaaaattttcgggaggagcctgagcacgacttcagcaaaatatcgatcgtaagaccatttagtatagaaaccaaagactctacagatatcagcgccgtccttggaaccaaggccgcgcacggatgtgttaccgcagtgtccggaaaagctctccctagctctcctccggacgccctacaagacgaggctatgaccgaggggtccatgggagtgaccctcgaggctagcgcagaggctgatttgaaggctggaaacagctgtccggaacttgtcccaagccggcgctccaagctccgcaagcccaagcccgtccccctgagaaaaaaagctataggcggcgaattcagcgacacaaatgctgctgttgaaggaaccccattacccaaggccagctaccactttagtccagaagagcttgacgagaacacatccccccttctcggcgatgctagatttcagaaatcaccgcccgacctgaaggaaactccagggacgctgtccagtgacactaatgacagcggtgttgaattaggagaggagtctcgttcgtccccactgaagctggaatttgatttcactgaggatacaggtaacatagaagctcgcaaggcactccctcgcaaactgggaaggaaattaggaagtacactgacgcccaagattcagaaggacgggatctccaaaagcgccgggttggagcagccaaccgatccagtcgctagagacgggccacttagtcaaacaagcagcaagccagaccctagtcagtgggagtcccccagctttaatcccttcggcagtcactccgtcctgcaaaacagccccccgctgtcatcagaaggctcctaccactttgatcccgacaactttgacgagagtatggatccgtttaagccgaccactacactcacctcttcagacttctgcagccccaccggaaatcatgtcaatgagattctggagtctcccaaaaaggctaagagccgactgatcactagcggctgtaaggtaaagaagcatgagacacagagcctggctctcgacgcctgctctagagacgagggagctgtgatcagtcagatcagtgatatctccaaccgggacggtcatgctactgacgaggagaagctggcttccacctcatgtggacagaagtccgccggagccgaggtcaaggggatagagaaggaaacttgccagaagatggaggaagatggttctacagtcctaggcttactcgaatcaagcgccgaaaaggcccctgtgtctgtgtcgtgcggtggtgaatcaccacttgatggcatctgcctgtctgaaagtgacaaaacagcggtcctgaccctgatccgggaagaaatcatcaccaaagagatcgaggccaatgaatggaagaaaaaatacgaagagacccgccaagaggtgctggaaatgcgcaagatcgtggccgaatatgagaagacaattgctcagatgatcgaggacgagcagagaacctctatgacctcacagaaatcctttcagcagcttaccatggaaaaggaacaggctttggctgacctgaattccgtggagcggagtctcagcgaccttttccgtcgttacgaaaacctcaagggtgtcctggagggattcaagaaaaacgaggaggcactgaagaagtgcgctcaggactacctagcgcgcgtgaagcaggaggaacagcggtaccaggctctaaaaatacacgctgaggagaagttagataaggccaatgaagaaattgcgcaggtgcggactaaggctaaggccgaaagcgcagcactccacgcagggctgaggaaagaacagatgaaagttgagtctctggaaagggcccttcagcagaaaaaccaggagattgaggaactgacaaaaatctgtgatgagttgatcgcaaagctgggcaaaaccgattag

SEQ ID NO: 209119 - DNA, 1431 bp, synthetic construct
  misc_feature 1..1431: note = Description of Artificial Sequence: Synthetic coding sequence
  source 1..1431: mol_type = other DNA
atgaccgagggcagcatgggcgtgaccctggaggccagcgccgaggcggacttaaaggccggcaatagctgccccgaactcgtacccagccgacgatccaagttacgtaagcccaagcccgttcccttgagaaagaaggccattggtggcgaattttcggacaccaatgctgcagttgaaggcactcctctgcctaaggccagctatcatttctccccagaagaactcgacgagaatacgagccccctgctgggcgatgcccgatttcagaaaagcccccctgacttgaaggaaacccctggtactctgagcagcgacactaacgattccggagtggagctcggagaagagtctaggagcagcccgttgaagttagaattcgattttaccgaagacaccgggaatatcgaagccagaaaagcgttgccaagaaaacttggtcgtaaactcggaagtactctgaccccaaagattcagaaagacggaataagcaaaagtgctggcctggagcaaccaacggacccagtagctcgggatggacccctgagccagacgagcagtaagcctgatccatctcaatgggaatcacccagctttaacccttttggctctcacagtgtcctccagaactctccacccctttcctcagaggggtcttaccatttcgacccagataacttcgacgagtctatggacccatttaaacccactaccaccctcactagctccgatttttgctcgcccactgggaaccacgtaaatgagattctcgaatcgccgaagaaggccaaatcccggctgatcaccagcggttgcaaggtgaaaaaacatgagacacagtcgctggccttggacgcctgcagtcgcgacgaaggcgctgtgataagccagatttcggatataagtaatcgagacgggcacgccaccgatgaggagaagctggcctccacctcttgtggccagaaatctgccggggccgaagtcaagggtgagcccgaagaggatttggagtacttcgaatgctctaacgtcccagtgtcaaccatcaatcacgcttttagtagcagcgaggccggtattgagaaagagacatgccaaaagatggaggaagacggaagtaccgtgcttggcctccttgagtcctccgctgagaaagcaccagtcagtgtgtcctgcggtggagagagccccctggatggcatttgcctcagcgagtccgacaaaaccgccgttctgacattgattcgggaggaaatcatcaccaaggagatcgaagcaaacgagtggaagaaaaagtattttaataaggaggtttttaggggcgatatatgccccaaacggttcggcctgcagatccccgtgatctttaaaaaacagctaacaactaaatctctctccctacatagagtgacagtaaaaaagttgatgtag

SEQ ID NO: 209120 - DNA, 2196 bp, synthetic construct
  misc_feature 1..2196: note = Description of Artificial Sequence: Synthetic coding sequence
  source 1..2196: mol_type = other DNA
atgaacaacatcctgaagctgaagagcagcgacagcgagggcaactttgagacgccagaggcggaaacacccattcgtagtccattcaaggaatcctgtgatccatctctcgggctggctggaccaggcgccaagagccaggagtcccaggaagctgacgagcagctcgtggcggaggtagtagaaaagtgcagctctaaaacatgttccaaacctagcgagaacgaggtgcctcagcaagccattgactctcactccgtcaaaaacttccgagaggagcccgagcatgatttttccaaaatctcgatagtgaggccctttagcattgagacaaaggattcgaccgacatctccgccgttttgggaaccaaagctgcccacggatgtgtgacagccgtctcaggaaaggccctgccttccagtcccccagatgcactccaggacgaagccatgaccgaagggtcaatgggcgtcacactggaagcttccgctgaggcagacttgaaggccgggaacagctgtcccgagctcgttccttcccggcgttcaaaactgaggaaacccaagccagtacccctgcggaaaaaggcaattgggggggaattttctgacaccaatgccgctgtagaaggcacacccctgccgaaggcctcgtatcacttttctccagaggaattggacgaaaacaccagtcccctccttggggacgcgagatttcagaaatctccacctgatctaaaagagacccctggcacactgagctccgacaccaatgattccggggtcgagttgggggaggagagtcggtcaagccccctgaagctggaatttgacttcacagaagacactggaaatattgaagcccggaaagctctccctcgcaaacttggccgcaagctggggagcaccctgacaccgaagattcaaaaagacgggatttccaaatctgccggcctggagcaaccaaccgaccctgtggcacgcgatggcccacttagccagacctcttcaaaaccagacccgagccaatgggaaagcccttcctttaacccattcggctctcacagcgtgctacagaatagtccccccttaagttcggaggggtcctaccacttcgaccccgacaatttcgatgagtctatggaccccttcaaaccaaccaccacccttaccagtagcgacttttgcagtcctactgggaatcacgtaaatgagatattggagtcccctaagaaagctaaaagcaggctaatcacttctggttgtaaagtgaagaaacacgagacccaaagtctcgctctggacgcctgtagcagggacgaaggcgccgttatctcccagatatccgacatcagcaatcgagatgggcatgcaaccgatgaggaaaagctggcatccaccagctgcgggcagaaaagcgccggtgctgaggtcaagggaattgaaaaagagacatgtcagaaaatggaagaggacggatcaaccgtgttgggactcctggagagttctgccgagaaggcgcctgtttcagtgtcatgtggaggcgagagcccccttgacgggatttgcttgtccgagtctgacaagaccgccgtccttacccttattagagaggaaatcattacgaaggagattgaagccaacgagtggaaaaaaaagtatgaggaaacacgccaagaagtgctggagatgaggaaaattgtcgctgagtacgaaaaaacgattgcacagatgatcgaagacgaacagcgaactagtatgacctcccaaaaatcctttcagcaattgacaatggaaaaagagcaggctttggccgacttgaacagtgtagaaagatcgctgtctgacctgttccggaggtacgagaatctaaagggtgtgttggaaggctttaagaagaacgaggaggccctgaagaaatgtgctcaagattaccttgcacgagtaaagcaggaggagcaaaggtaccaggccttaaaaattcacgcggaggaaaaactggataaggcaaatgaagagatcgcgcaggtaaggaccaaggccaaggcagagagcgcggccttgcacgccggtttgcggaaagagcagatgaaggtggaatcgctggagagggcattgcagcagaagaaccaggagattgaagaactgaccaaaatctgcgatgaactcattgcgaagctcggaaaaaccgattag

SEQ ID NO: 209121 - DNA, 1833 bp, synthetic construct
  misc_feature 1..1833: note = Description of Artificial Sequence: Synthetic coding sequence
  source 1..1833: mol_type = other DNA
atgaccgagggcagcatgggcgtgaccctggaggccagcgccgaggccgacctaaaagccggtaatagctgtccagaactggtgccttcacgaaggtctaaacttaggaagccgaaaccagttcccttacgtaagaaggcgattggaggtgagtttagcgacaccaatgctgctgtggaaggaaccccccttcctaaagcttcataccatttctctcctgaggaattagatgagaacacaagtccactgttaggagacgccaggttccagaagtcaccccctgatctgaaggagactcccggaactctaagtagcgataccaatgattcaggagttgagctgggagaggagtccagaagctccccgctgaagctggaatttgacttcacggaggacacagggaatatcgaggccaggaaggctctcccacgcaagctagggagaaagctcggtagcacacttactcctaaaatccagaaggatggcatttcgaagtcagctgggctggaacagcccacagatcccgtggcccgcgatggcccactcagtcagaccagtagcaaaccggacccctctcagtgggaatcaccatcttttaacccattcggctctcacagtgttcttcaaaatagcccaccgctgtcctccgaaggaagttaccattttgaccctgataatttcgacgagtcaatggaccctttcaagccgacaacaactctcaccagctccgatttttgttcacctacaggaaaccacgtgaacgaaatcctagaaagcccaaagaaggcgaagtctcggctgatcacatcaggatgtaaagtgaaaaagcacgaaacacagagcctggccctcgatgcctgctccagagatgaaggagccgtgatctctcaaatctccgacatatccaacagggacggccacgccaccgatgaggagaaactggcctcaacatcctgtggtcagaagtctgccggagccgaggttaaaggagagcctgaggaggatttggagtacttcgagtgctctaatgtgcctgtctccactataaatcatgccttctcaagttccgaggctggtattgagaaagaaacgtgtcagaaaatggaggaggatggatccacagtacttggattgctcgagtcaagcgccgagaaggcgccagtgagcgtaagctgcggaggtgagagtcccctagacggcatctgtcttagcgagtcagacaagacagcagtgcttacactcattcgggaagagatcattaccaaggagatcgaggcaaacgagtggaaaaaaaagtatgaggagacaagacaagaggtgttggagatgcggaagatcgtagccgagtatgaaaagacgattgcacaaatgatcgaggacgagcagaggaccagcatgacatcgcagaagagctttcaacaactgaccatggagaaggaacaggctctagccgatctcaattccgtggagcggagcctctccgatttgttcaggcggtatgagaacctaaaaggagttctcgagggattcaagaaaaacgaggaggcacttaagaagtgcgcgcaagactatcttgcacgcgtaaaacaggaggaacaaagataccaggccctcaagattcatgcagaggagaagcttgataaggcaaacgaggagattgcccaggtgcgaaccaaagcgaaggccgagtccgctgcgttacacgctggcttacgaaaggaacaaatgaaagttgagtcgctcgaacgtgcacttcaacaaaaaaatcaagaaatcgaggagctgaccaaaatctgcgatgaactgattgccaagctcggaaaaacggactag

SEQ ID NO: 209122 - DNA, 1746 bp, synthetic construct
  misc_feature 1..1746: note = Description of Artificial Sequence: Synthetic coding sequence
  source 1..1746: mol_type = other DNA
atgaccgagggcagcatgggcgtgaccctggaggccagcgccgaggctgacctgaaggccggcaatagttgtcctgaactggtgccatcccggcggtccaaattgaggaagccaaaacctgtacctttgcggaaaaaggccatcggcggcgaattctcagatactaacgccgccgtggaaggaacaccccttcctaaagcaagttaccactttagccccgaagaattggatgagaacacatccccactgctgggggatgctagattccaaaaatctcctccagacctcaaggaaacacccggaacactgtcctcagatactaatgactctggagtggagctgggcgaggaaagtaggtcatctcccctcaaactcgagttcgacttcaccgaggacacgggaaacatcgaggcccgcaaagcgctgccaaggaagctcggacgcaagctcggctccactttgacaccgaagatacagaaagacggcatcagtaaaagtgctggtctcgaacagcccacggatccagtagcacgagatgggcccctctcccagacatcaagcaagccagatccttcacagtgggagagcccatccttcaatcctttcggctcacactctgtcctccaaaatagcccgccccttagctccgagggatcctaccatttcgaccctgacaacttcgatgaatcaatggacccattcaagccaacgacaacactgacatcatccgacttctgttctccgaccgggaaccacgtgaatgagatcctggaaagtccgaaaaaagcgaagtcacgccttattacttcagggtgcaaggtgaaaaagcacgagacccagtctcttgccctggacgcttgtagccgcgacgagggagcagtgatttcacagattagcgatattagcaatcgagacggtcacgccaccgatgaggagaaactggctagcacttcttgcggccagaagtcagcaggagccgaggtcaagggaatcgagaaagagacctgtcaaaagatggaagaagatggaagtactgtgcttggccttcttgaatcctcggctgagaaagctccagtgtcagtgtcatgtggaggcgaaagccccctagatggaatctgcctgtccgaatcagacaagactgcggtgctcaccctcattagggaggagattattaccaaagaaatcgaggctaacgagtggaagaaaaagtatgaggaaacacggcaggaagtgctggagatgcgtaagattgtcgcagaatacgagaagactatcgcacaaatgatcgaggacgagcagcgcacctctatgacctctcagaagtcgttccagcaactgaccatggaaaaagaacaagcacttgccgacctcaatagtgtcgagaggtctctgtctgatctgtttaggaggtatgaaaacttaaaaggcgtgctcgaaggctttaagaaaaacgaggaggctttgaagaagtgtgcacaggattacctagccagggttaagcaggaggaacagcggtaccaggcactgaaaattcacgcagaggaaaaactggataaggctaacgaggagattgcacaggtcaggactaaagcaaaggcggaaagcgctgccctccacgctggtttaagaaaagaacaaatgaaggtagagtccctggagcgcgccttacagcagaagaatcaggagattgaagagttgaccaaaatctgtgacgaactcatcgccaaactgggtaagaccgattag

SEQ ID NO: 209123 - DNA, 93 bp, synthetic construct
  misc_feature 1..93: note = Description of Artificial Sequence: Synthetic coding sequence
  source 1..93: mol_type = other DNA
atgaccgagggcagcatgggcgtgaccctggaggccagcgccgaggccgatctgaaggccgggaatagctgccccgagctggtgcctagttag

SEQ ID NO: 209124 - DNA, 417 bp, synthetic construct
  misc_feature 1..417: note = Description of Artificial Sequence: Synthetic coding sequence
  source 1..417: mol_type = other DNA
atgaccgagggcagcatgggcgtgaccctggaggccagcgccgaggccgacttgaaggctggtaattcctgccccgagctggtcccctctagaaggtctaagctgcgaaagcccaaaccagtccctctaagaaagaaggcaatcggaggggagttcagtgatactaacgccgccgtggaaggtacaccgctgcctaaagccagttaccacttctcgccagaggaactagatgagaatacctctccactgttgggtgatgcacgtttccagaaatctcctcctgacctgaaagagacacccggcacactgagcagtgacaccaatgattccggagtggagcttggagaggagtcccgctcgtctcccctcaagctggagttcgactttacggaagacacggggaatatcgaagcatag

SEQ ID NO: 209125 - DNA, 186 bp, synthetic construct
  misc_feature 1..186: note = Description of Artificial Sequence: Synthetic coding sequence
  source 1..186: mol_type = other DNA
atgaccgagggcagcatgggcgtgaccctggaggccagcgccgaggccgacctgaaagccggcaattcctgcccggaacttgtccccagccggcgatccaaactacgcaagccaaaaccagttcctctgagaaagaaggcaataggcggcgagttctcagacacaaatgctgccgttgaaggctag

SEQ ID NO: 209126 - DNA, 390 bp, synthetic construct
  misc_feature 1..390: note = Description of Artificial Sequence: Synthetic coding sequence
  source 1..390: mol_type = other DNA
atggccttcagcccctggcagatcctgagccccgtgcagtgggccaaatggacatggtctgccgtgaggggcggagcggcgggtgaagacgaggcgggtggtcccgaaggcgatcctgaggaagaagactcccaggccgaaaccaagtctctaagtttctcctcagatagcgaaggaaattttgagacccccgaggccgagactccaatacgatcgccttttaaagagtcctgtgatcctagcttaggattggctgggcccggagcaaagagccaggaaagtcaggaggccgacgaacaactggtggctgaggtcgtggaaaaatgctcttccaagacatgtagtaaacctagcgagaacgaggtgccccaacaggctatcgattcatag

SEQ ID NO: 209127 - DNA, 3081 bp, synthetic construct
  misc_feature 1..3081: note = Description of Artificial Sequence: Synthetic coding sequence
  source 1..3081: mol_type = other DNA
atgggcggcagccagagcctgcagcccgcccccgccagcgacctgaatttagaggcatccgaagcaatgtcttcagactcagaggaggccttcgagacccctgagtctaccactcccgtgaaggcgccacctgcccctcccccgccaccccccgaggtgattccagagcccgaagtttcaacccagcccccacctgaagaacctggttgtggatccgaaaccgtgccagtcccggacggccctcgctccgattctgtggaaggcagtcccttccgccccccttctcattcattcagcgcagtgtttgatgaagataagccaattgcatccagcggcacctacaacctggattttgacaatattgagctagtggacacattccagacgctggagccacgcgccagtgatgccaagaaccaggaaggaaaggttaatactcgtaggaaatctactgacagcgtgcccatttccaagtcaactctctctcgttccctgtcgttgcaagcatctgatttcgatggagcctcatctagtggcaatcccgaggcagttgcactcgccccagacgcatattccaccgggtcctcctccgcatcctctactctaaaaaggaccaaaaaaccgaggccaccttctcttaagaagaagcagaccacgaaaaaaccaacggagacgccaccagtgaaagagacccagcaggaacctgacgaggagtcactggtgccaagcggtgagaacctcgcatccgagacaaagactgaatccgctaagaccgaggggccatctccagcgctactggaggaaacccctctggaacccgcggttggcccaaaagctgcctgtccccttgattctgagagcgctgaaggcgttgttccaccggcctcagggggcggtcgcgtgcagaacagtccccctgtcggtcggaagacgctccctctgacaaccgcgcccgaagccggagaggttactccgtccgactcgggcggacaggaggactccccggccaagggactgagtgtcagactcgaatttgattattcagaggacaaatctagctgggacaatcaacaggaaaatccaccccctactaagaagattggcaagaagcctgtggcaaagatgcccctgcgacggcctaagatgaaaaaaacaccggaaaagttggacaacacacccgcttctcctccgaggtcccctgctgaacctaatgacatacctatcgcaaaaggcacatatactttcgacattgacaaatgggacgaccctaactttaaccccttctcctcaacgtcgaaaatgcaggagtctcctaaattaccccagcagtcttacaattttgatcctgatacgtgtgatgaatcggtagatcctttcaagacgagtagcaagacccctagcagtccttcaaaatccccagcttcatttgagatccccgcttctgccatggaggctaacggggtggatggagacggacttaataagcccgcgaaaaagaagaaaacaccactcaaaacggacacgttccgcgttaagaagtctcctaagagatcgcccctgagtgacccgccatcgcaggaccctaccccagcagcgactccagaaactccacccgtcatcagcgctgtggtccatgcaaccgacgaggaaaaactggccgtgacaaatcagaaatggacttgtatgactgtggacctggaggccgataagcaggattacccacagccctctgacttgtcaacattcgtgaacgaaacaaaattctcctctcctaccgaagaactcgactaccgaaactcctatgaaatcgagtacatggaaaaaatcggtagtagccttccccaggatgacgacgcccccaagaagcaggcactctatcttatgttcgacacgtcccaggagtccccagttaaatcctcccccgttcgtatgtcagagtcccctactccttgcagcggcagtagcttcgaggagacagaggcccttgtgaatactgctgcaaaaaaccaacaccccgttcccagaggactcgccccaaatcaggaatcgcatctccaggttcccgagaaatctagccagaaagagctggaagccatgggcctgggcactccttcagaggcaatcgagataactgcgccagaaggttctttcgcctctgctgacgccctgctgagcagactggctcatcccgtgtcactgtgtggggcactggactatcttgagccagatctggccgaaaaaaatccacctttatttgcacaaaaactgcaggaggaactagaatttgctattatgagaattgaggcactcaagctggcccgccagatcgccctcgcctcacgctctcaccaggacgccaagagggaagctgcccatcccaccgatgtatccatctcaaagacagccttatattcccgtatcgggaccgccgaagtggaaaaacccgcaggattgctttttcagcagcccgacttagattcagccctgcaaattgctagggcagagattattacaaaggagcgggaggtgtctgaatggaaggacaagtatgaagagtccaggcgggaggttatggagatgcgcaagatcgtcgccgagtacgagaagacgatcgcacagatgatagaggacgaacagcgcgaaaaatctgtgagccaccagaccgttcagcagcttgtgctcgaaaaggagcaggcactcgcagacctgaattcagtggaaaagtcactggccgacctctttcggcgctacgaaaaaatgaaagaagtcctggaaggatttcgaaagaacgaggaggtactgaaacggtgcgcgcaagaatacctcagccgggtcaagaaagaagagcaaagataccaagccctgaaggtgcacgcagaggaaaagctcgatagggccaacgctgagatcgcacaggttcggggcaaggcgcaacaagaacaggcggcccatcaagcaagtttgaggaaggaacaactgcgcgttgatgccctagaacggactctggaacagaagaataaagaaatcgaagagcttacaaaaatttgcgacgagttgatcgctaagatgggaaagtcatag

SEQ ID NO: 209128 - DNA, 8847 bp, synthetic construct
  misc_feature 1..8847: note = Description of Artificial Sequence: Synthetic coding sequence
  source 1..8847: mol_type = other DNA
atgggcaacgagaacagcaccagcgacaaccagcggaccctgagcgctcaaacaccaagatcagcgcagccgcctgggaattcgcaaaatataaagcggaagcagcaggatacgcctggatcccccgatcaccgggacgcctccagtataggttccgttggtctcggcggtttctgcaccgcttctgaatcctccgcgtccttggacccatgtctggtaagtcctgaggtgaccgagcctagaaaagatcctcaaggagctcgtggacccgagggttcccttctgcccagcccgccacctagccaggagcgagagcatccgagttcatccatgccttttgctgagtgcccccccgagggctgcctggcaagccctgctgccgccccagaggatgggcctcaaactcagtcccctaggcgcgagccagcacctaacgcgcccggcgacattgccgctgcattccctgctgagagggattcctccacaccctatcaggaaatcgccgcggtcccttcagctggacgcgaaaggcagccaaaagaggagggccagaaatcatccttctcttttagcagcggcattgaccagtcacctgggatgagtccagtccctctgcgagagcctatgaaggcgccactgtgtggcgagggggaccagcctggcgggtttgagtcacaagagaaagaggctgcgggggggtttcctcccgccgagtctaggcagggagtggcttccgtgcaggtcacccctgaagctcctgctgcggctcagcaggggacagagagcagcgctgtgctggagaaaagccctctcaagcccatggcccctattccccaggaccccgccccgagggcttctgaccgcgagcgcggccagggtgaggccccaccccagtacctaactgatgacctagaattcttaagggcctgccacctgccgcgttcaaattccggagcagccccggaagccgaggttaacgcagcatcacaggagagctgccagcagcctgtgggagcctacttaccccatgccgaactgccgtggggcctcccttcccctgcactggtgcctgaggccggagggtccggcaaagaggctcttgacactatcgatgttcaaggccacccccaaacaggcatgagaggcacgaaacctaaccaggtggtctgcgtggctgccggcggacagcccgaaggaggtctgcccgtttcaccagaaccaagcctcttgactcctactgaggaggcccacccagcatcttcacttgccagctttcctgccgctcagatccccatcgctgtagaggagccaggctcctcctccagagagagcgtgtccaaagctgggatgcccgttagcgctgacgccgccaaagaagtggtcgacgcggggcttgtgggcctcgagcgtcaggttagcgatctcgggtcaaagggcgaacacccggagggtgatccaggagaggtgccggcccctagcccgcaggagcgtggtgagcacctcaacaccgagcaaagccacgaggtgcagccgggcgtgccccccccaccacttccgaaggagcagagccatgaggtgcaacccggagccccccctcccccacttcctaaggcccccagcgagagcgcccgggggccacctggacctacagatggcgccaaagttcacgaggattccacgtcgcccgctgtggccaaagaagggtcccggtcacccggcgacagccccggaggcaaagaagaggcacctgaaccccccgatggaggagatccagggaacctccagggggaggactcccaggctttttcaagcaaaagagatcctgaggttggtaaggatgagctctctaaaccaagtagcgacgccgaatctcgggaccacccgtcatcacactcagcacagcccccacggaagggtggtgccgggcacaccgacgggcctcattcacagactgccgaggccgacgcttccgggctgccacataagctgggagaagaggacccagttttgcctccggttcctgacggagccggggaacctaccgtccctgagggcgctatttgggagggctctggactgcagccaaagtgcccagacacactacagtcccgcgaaggcctggggcgaatggaatctttcttaacgctggagagtgagaagtccgatttccctccaacacctgtggcagaggtggcgcccaaggcccaagagggcgagtccaccctagaaatacggaagatgggtagttgtgacggtgaggggctactgacgagcccggatcagccaagaggccccgcctgtgacgcgagcagacaagagttccacgccggcgtgccacatcccccccagggcgagaacttggccgccgacctggggcttacagctctaattctggaccaagaccaacaggggatcccctcttgtccaggggagggatggattcgcggtgccgccagtgaatggcctctcctctcctccgagaagcatctgcaaccctcacaggcccagccagagacaagcatctttgatgttctgaaagagcaggcacagccacctgagaatggtaaagaaacctctccctcccatcccggattcaaagaccagggcgctgactcctcccagatacatgttcctgtggagccacaggaagataacaacttgcccactcatgggggccaggaacaagccctgggctctgagcttcagtcacaactcccaaagggtacactttctgacacacctacatctagtcctacggacatggtgtgggagagctcattaacagaagagtccgaattgtctgccccgacgcgccagaagttgccggcgctcggggagaagagaccggaaggggcttgcggggacggccaatcgtcacgagtgagcccgcccgccgccgatgtactgaaagacttcagcttggctggaaattttagcagaaaagagacctgttgtactggtcagggccccaataagtcccagcaggccctggcagacgcccttgaggagggctcacagcatgaggaggcgtgccaacgccatcctggggcttccgaagctgccgatggctgttccccactctggggcttatctaagcgcgaaatggcatccgggaacaccggcgaggcccccccctgccagccggattccgttgcgctgctagacgccgtgccgtgccttccagctcttgcacctgcgagccccggtgttactcccacacaagatgcccccgaaacggaagcgtgtgatgagacccaggaggggagacaacagcctgtcccagccccccagcagaagatggagtgctgggctacttctgacgccgagtcccccaagctccttgcgtcgttccccagcgccggagagcagggcggggaggcaggagcagctgaaaccggcgggagtgcaggcgctggggacccagggaaacagcaggctccagagaaacccggggaagcgacactctcttgtggcctgctccagactgagcactgtctgacatcaggggaggaagcttctactagcgcacttcgagaaagttgtcaggcagaacaccctatggcttcatgccaggacgctctgttgccggcaagagagctgggtggcataccacggtcgactatggacttctcaacccaccaggccgtgcctgaccccaaggagctgctcctctctggtcctccagaagtggcagctccagacactccttacttacatgtggattcagccgctcagcggggggccgaggattctggagttaaggcggtttccagcgccgacccacgagctccaggggaatccccttgtccagtgggggagcccccattggcactggaaaacgccgcttccctcaaacttttcgccgggagcctcgcgccccttttacagccaggcgctgccggtggtgaaatacctgctgtgcaggctagttcgggcagccctaaggcacgtaccacagagggtcctgtggactctatgccctgtttggacagaatgcccctgctggccaagggcaaacaggcaacaggcgaagaaaaggcagccaccgctcccggggcaggagccaaagcatcaggggaggggatggccggcgacgcggccggcgaaacagagggcagtatggagaggatgggggagcctagccaggaccctaaacaaggaacgtctggcggtgtcgacacaagctcagaacagatagcaacattgacgggatttcccgatttcagagagcatattgccaaaatctttgagaaaccagtgctgggcgcccttgcgacaccaggggagaaggctggcgccgggcgtagtgcggtaggaaaggatctcaccagacccctcggccctgagaagttgttagacggacccccaggggtcgacgtgactctcctccccgcaccccccgcacggttgcaggtggaaaaaaagcagcaattagccggtgaggcagagatctcccacctggctttgcaggatccagcttcggataagctgctgggccctgcaggacttacctgggagaggaatctccccggggctggcgtgggtaaagagatggcgggggttcctcccacacttcgagaagacgagcgtcctgaaggccccggcgccgcatggccgggtttggaagggcaggcatattcacaacttgaacggagccggcaggagttagcttccgggctcccttcacctgcggcaacgcaagaactgccagtggagcgggccgccgcatttcaagtggctccacattcccacggcgaggaggccgtggcccaagatcggataccatcgggaaagcagcatcaagaaaccagtgcctgcgactcaccacacggagaggacggaccaggcgattttgcccacacaggcgtacccggacacgtccctcgttctacctgcgctccaagcccacagcgagaggtcttaacagtgcctgaggccaattcagaaccctggaccctggacacactgggaggtgagagaagacccggtgtgacagctggcatcctagaaatgaggaacgccctgggaaaccagagcacgccagcccctccaacaggggaggtagccgacactcctcttgagcctgggaaggtcgctggtgctgctggcgaagcagagggtgatattaccctgagcacagccgaaacacaagcctgtgctagcggagatctgcctgaggcaggtacaacccgtaccttctctgtcgtggctggggatctggttctgcccgggtcctgccaggaccctgcctgcagcgataaagctcccggaatggaagggacagctgccctgcatggcgattcacctgcacggccgcagcaggccaaagaacaacccgggcccgagcggcccattccagccggcgacggaaaagtgtgtgtctccagcccacctgagccagatgaaacccatgatcccaaacttcagcaccttgcgcctgaagaactgcacaccgatcgagaatctcctcgtcccgggccctcaatgctgccatccgttcctaaaaaggacgccccgagagtcatggacaaagtgacaagtgacgaaaccagaggagcagaagggaccgagagtagccctgttgctgatgatatcatacagcccgctgctccagcggatctggaatctcccacccttgccgcctccagttatcacggggatgtggtgggccaggtgagcactgatttaatcgcccagagtatttctcctgcagcagctcacgcaggattgcctccctcagccgcagagcacattgtaagtccctccgctcctgctggggaccgggtggaagcctccactcctagctgtcctgatccagccaaggacttaagccgatcttcagactccgaggaggcctttgagacccctgagagtacaactccagtaaaggcgcccccagcgcccccacctccaccgcctgaggtgattcccgagcccgaggtctccacacaacctccacctgaggagcctggatgtggttccgagactgtacctgtgccagacggacctaggagtgacagcgtcgaggggtcgccttttaggcctccctctcactccttcagcgcagtcttcgatgaagataagccaattgccagttctggtacgtacaatcttgacttcgataatatcgaattagtggacaccttccaaaccttggaaccacgggcaagcgacgccaagaaccaagagggaaaggtaaacacacgccgcaaatctaccgactccgtgcccataagtaaatccactttgagtcgtagtctgagtctccaagcttcggacttcgatggggccagttcctcgggtaaccccgaagcagtggccctagctcccgacgcctacagcacaggcagcagctccgcttcatctactctcaagagaaccaaaaaacctaggccaccctcattgaagaaaaagcagaccactaaaaagcctactgaaacccccccagttaaggagacccagcaggaaccagacgaggaaagtctggtgcccagtggagaaaatctggcctcagaaaccaagacagagagtgcaaaaacagaagggcctagccccgccttgctggaggaaaccccactagagcccgctgtggggccaaaagcagcctgcccacttgattctgagtccgcggaaggggttgtgccaccggcctctggagggggccgcgttcaaaacagtcctcctgtgggacggaagacattgccactgaccactgcccccgaagcgggcgaggtgacaccttccgacagtggtgggcaggaagattcacccgcaaagggcctcagcgttaggctggagtttgattatagcgaagataaatcttcatgggacaaccagcaggaaaacccccctcctacaaaaaagatcgggaaaaagcccgtggctaaaatgcccctccggagacccaagatgaaaaagacccctgagaaactagataatactccagcttcaccccccaggtctcctgcagaacccaacgatattccaatcgccaaaggaacatacacctttgatattgataaatgggatgaccctaacttcaacccatttagcagtacatctaagatgcaggagtcaccaaaattgcctcagcagtcctataacttcgatccggacacatgtgacgagtccgtagacccctttaagacctcaagtaagacaccctcgagcccatccaagagcccagccagcttcgagatccccgcatccgccatggaggcaaatggcgttgatggagatggactgaataaaccggccaaaaagaagaaaaccccactcaagacagacacgtttagggtgaagaagagccctaaacgttcccccctgtctgaccctccgagtcaggatccgactcctgcagctaccccggagactccgcctgtgatctcagctgtcgttcacgccaccgatgaggagaagttggccgtgacgaaccaaaagtggacatgtatgacagtcgatctggaggcggataaacaggactatccacagccatcagacctttccaccttcgtcaatgaaactaaattcagtagcccgactgaagagctcgactacagaaactcatatgaaatcgaatatatggaaaagatcgggtcgtcgctccctcaggacgacgacgcacccaagaagcaggcactgtatttgatgttcgatacaagtcaggagtcccccgtaaaatcgagtcccgttaggatgagtgagtcccctacgccttgttcgggctcttcctttgaagagacagaggcacttgtcaacactgccgccaaaaaccaacatcccgtgccgcgcggcctggcacctaatcaggagagccacctccaggtgccagaaaagagtagtcagaaagagctggaggcaatgggcctggggacaccgagtgaagcgatcgagattactgcaccagaaggatcatttgcttctgcagacgctctactgtctcgattggcgcatcccgtaagtttatgcggagcacttgattacctcgagccggatctggccgaaaagaaccccccattgtttgcacagaaattgcaggaggaattggagtttgctataatgaggatcgaggcgctaaagctagcaaggcaaattgctctggcaagtcggagccaccaggacgcaaagcgggaagccgcccaccctactgacgtgtctatttctaaaaccgcactttattccagaattggaactgccgaagtggaaaagcctgctggcctgttgtttcagcaacccgacttggactccgctttacagatcgcccgcgcggagatcatcacaaaagagagggaagttagcgagtggaaggacaaatacgaggagagtaggcgggaggtcatggaaatgcgcaagatcgtggccgagtacgaaaaaaccatcgctcagatgattgaagatgaacagagagagaagagcgtctcacaccaaaccgtgcagcagctggtgttagaaaaggaacaggcgctcgcagacctcaactccgtggaaaaaagcctcgctgacctgtttaggcgctacgagaaaatgaaggaggtgctagaagggtttcgaaaaaatgaagaagtgctaaagagatgcgcccaggagtacttgagtagggtgaaaaaagaggagcagcggtatcaggcccttaaggtgcatgctgaggagaagctagacagggccaacgccgagattgcacaagtacgtggcaaggctcagcaggaacaggccgcacatcaagcctccttgaggaaggaacagctgcgggttgatgccctagagagaactctcgagcagaagaacaaagaaatcgaagagctgactaagatctgcgatgagctcatcgcaaaaatggggaagagctag

SEQ ID NO: 209129 - DNA, 8586 bp, synthetic construct
  misc_feature 1..8586: note = Description of Artificial Sequence: Synthetic coding sequence
  source 1..8586: mol_type = other DNA
cagcggaccctgagcgcccagaccccccggagcgcccagccccccggtaattcgcagaacattaagcgcaagcagcaagacacgccgggctcacccgatcatagagatgcctctagtattggtagcgtgggactgggcgggttttgcaccgccagcgaatctagcgcaagtttggatccttgcctcgtgagccctgaggttaccgaaccccggaaggatccccagggtgcccgaggacccgagggctcgctgctaccctcgcctccacctagtcaagaacgcgagcacccttcttcatctatgcccttcgccgaatgcccacccgagggctgtcttgcctctccagccgccgcaccggaggatggaccacaaactcagtctcccagaagagagcctgccccgaatgcgccaggcgacattgcggcagcgtttccagctgagcgagactcgagcaccccctatcaggagattgccgccgtgcctagcgcgggtagggaacgtcagccgaaggaggagggacaaaagtcaagcttctccttttcaagcggaattgaccagagccctggcatgtctccggttccactaagagagccaatgaaagctccgctctgtggtgaaggtgatcagccaggcggtttcgagtctcaggaaaaggaagcagcaggcggattcccccctgctgagtcacgacagggtgtggcaagcgtgcaagtgacccccgaggccccggccgcagcgcagcagggcaccgagtcgtctgccgttctcgaaaaatcccctctcaagcctatggccccaatcccccaggaccctgcccccagggcctccgacagggagagaggccagggagaagcaccgccccagtacctgaccgacgacctcgagtttctgagagcatgtcacttacccaggagtaattccggggccgcccctgaggccgaagtgaacgcggcctctcaggagagctgccagcagcccgtaggtgcctacctgcctcatgctgagctcccctgggggctgccctcaccagcccttgtccctgaggccggtggtagtggtaaagaggcacttgatacgatagatgtgcaaggccacccacagaccggcatgcgtggcacaaaaccgaaccaggtagtttgcgtagccgccggaggtcaacccgaaggcgggttgcctgtgtctccggagccatcgttgcttaccccaacggaggaagcccatcccgcctcctccctcgcttcattcccagccgcccagatccccatagccgtggaagagcccgggtcatcaagtagggaatcagtgagtaaggctggaatgcccgtttccgctgatgctgcgaaagaagtggttgacgccggattagtcgggctggagaggcaagtcagcgacctgggtagcaagggcgagcaccctgaaggcgatcctggtgaggttccagccccctctcctcaggaacgaggcgagcacttgaatactgagcagtcccacgaagtacaacccggcgtacctccccctccgctaccaaaggaacagtcccacgaggtgcagcccggcgctcctccacccccattacccaaggctccgtccgagtctgctcgcggtcctcctggcccaaccgacggggcaaaggtccatgaagattcaacttctcctgctgttgctaaagaggggagtagaagccctggcgacagtcctggcggaaaagaggaagcccctgaacctccggatggtggggacccaggtaatctgcaaggcgaagattcccaggctttctcttcaaagcgggaccccgaggtcggcaaagacgagttgtccaaaccatccagtgacgctgagtccagggatcacccttcctcgcacagtgctcagccccctaggaaagggggggctgggcacacggacgggccccactcacagacagccgaagctgacgccagcggtctgcctcacaagctcggagaagaggatcccgtcctgccgccagtgccagacggtgccggggagcctacagtccccgagggggccatttgggaaggctcaggcctccaaccaaagtgccccgatacactccaatcccgcgaaggcttgggcagaatggaaagtttcctcaccttagagtcagaaaaatccgactttccccctacacccgtcgccgaggtcgctccgaaggcccaagagggagaatctactctggaaattcggaagatgggatcgtgcgatggagaaggtctcctgacttcaccagaccagccgaggggaccagcatgcgatgctagccggcaggagttccatgctggggtaccgcatcctccccagggcgaaaatctcgcagcagatctgggtctaaccgccttaatactggaccaggatcaacagggcattcccagctgccccggcgagggctggattcgcggagcggcaagtgagtggccactactgagctccgagaaacaccttcagcctagccaggcccagcctgaaaccagcattttcgacgtgctgaaggagcaggctcagccaccagagaacggcaaggagacatcaccttcccacccaggtttcaaggaccagggagctgactccagccagatacacgttccagtggaacctcaggaagacaacaacctgccaacacatggcggacaggaacaggctctaggctctgaacttcagagtcagctgcccaagggaaccctctctgacactccaacatcctcacccaccgacatggtttgggaatcaagcttgaccgaggaatccgaactgagtgctcctacaagacagaagctacccgccctcggtgaaaaacggcccgagggggcttgtggggatggacagtcctccagagtgtcaccacctgccgctgacgtactcaaggatttctcactggccggaaactttagccgtaaggagacatgctgtactggccaaggtcccaataagagtcaacaggccctggccgatgccttggaggaggggtctcagcacgaggaggcgtgtcagcggcatcccggcgcgtctgaagctgcggatggttgttcacccctctggggattgagcaaacgcgagatggcctcagggaatactggcgaagcccccccttgtcagccggattccgtcgcactgcttgacgccgtcccttgtctgcctgccttggctcccgctagcccaggcgtcacacccacacaggatgcgccagagactgaggcttgcgatgagacgcaggaaggtcggcagcagccagttccggctcctcagcagaagatggagtgctgggcaacctctgacgccgaaagccccaagctactggcctcattcccgagtgctggagaacagggaggggaggctggggcagccgagactggcggatcagccggcgcaggcgatcccgggaaacagcaggcacccgagaagcccggagaggcaacattgagttgtggtctactccagactgagcattgcctgacttcaggagaggaagcgtccacttccgctctgcgagagtcctgtcaggccgagcaccctatggcatcctgccaggacgcactgctcccagcccgtgagttggggggaattccccggagcactatggacttttccacccaccaagccgtcccagacccaaaggaactcctcctctccggcccgccggaggtcgctgcccctgacaccccatatctccacgttgacagtgctgcccagcgcggagctgaggacagcggcgtgaaagctgtttcctctgccgatcctcgagcacccggcgagtccccgtgtccagttggggagccgcccttggcgctggagaatgctgcaagtctcaagctgtttgctggaagtctcgcaccccttttacaacctggggccgcgggaggagaaatccctgcggtccaagcttcctccgggtctcctaaagctcgtaccacagaaggaccggtggacagcatgccatgcttggacagaatgccgctgcttgctaaaggcaaacaggctaccggggaggaaaaggccgcaacagctccaggcgcaggggccaaggcctcaggggagggaatggctggcgacgccgccggcgaaactgaaggttcgatggaacgtatgggggagcccagtcaggacccaaaacaaggtacttccggtggggtagatacctcaagtgagcaaattgctactctgaccggtttccccgactttagagagcacattgctaaaatttttgagaagcccgtcctgggcgccctggctacacctggagaaaaggctggggccggccgcagtgctgtcggaaaagacctgacaaggcccctcggaccagagaagctgctggacgggccaccaggagtggatgttactctgcttcctgcccctcctgcacgcctgcaggtggagaagaaacagcagctggcaggggaagccgagatttctcacctagccctgcaggaccctgcttcagataagctgctgggccccgcagggctcacatgggaaagaaatctgcccggcgcaggagtagggaaggaaatggccggcgtccctccaactctacgagaagatgaacgaccggagggtccgggcgccgcctggcctggtctggagggccaggcctattctcagctggagcgatccagacaggaattagcaagtggcctgccctctcccgccgctacccaggagttgcccgtggaaagggcagcagccttccaagtcgcaccacactctcacggagaagaggccgttgcccaggacagaatcccctctggaaaacagcaccaagagacaagcgcctgcgacagccctcacggcgaagatgggccaggcgacttcgcccacacaggcgtgcctgggcatgttcctagatccacatgtgctccctcccctcaacgggaagttcttactgtaccagaggccaatagtgagccttggacactcgatactctgggcggcgagaggcggcctggcgtcactgcaggtatcctggagatgaggaatgccctgggcaatcagtctacacctgccccccccacaggggaggtcgccgataccccccttgagcccggtaaggtggccggagccgctggagaggcagagggcgatattacacttagcacggcggaaacccaagcctgcgctagcggggacttgccggaggccggcacgactcggacctttagcgtggtggccggcgacctcgttttgccagggtcctgccaggaccctgcatgcagcgacaaggcccctgggatggaaggcactgcagcccttcacggggactcccccgccaggccacagcaagctaaggagcagcccggacctgagaggccgatccccgctggagatggaaaagtgtgtgtatcttcccctcccgaaccggacgaaactcacgaccccaaactccagcatcttgcaccagaagagctgcatactgaccgcgagtcgcctaggcccggcccatccatgctgccgagcgtgcctaagaaagacgctcctagggtgatggataaggtaactagcgatgagacccgaggggccgagggtaccgagtcctcgccagtggccgatgacattattcaacctgccgccccagccgatttagagtcacccacgttagcagctagctcgtaccacggggatgtagtaggccaggttagtaccgacctgatcgcacagtcaatttccccagctgcggcccacgcaggcttgcctccgagtgccgccgagcatatagtaagcccatctgccccagccggtgaccgggtggaggcgtccacaccatcttgccccgatcccgccaaggacctctcaagatctagtgactctgaggaagccttcgaaactcctgagagcacaactcccgtgaaagcgccacccgctccccccccacctccgcccgaagtgataccagagccagaggtatccactcagcccccaccagaggaacctgggtgcggctcagaaacagtcccagtccccgatggcccccggagcgattcagtagaggggtcgccttttaggcccccctctcactcattcagcgctgtttttgatgaagacaagcctatagctagttcaggcacatacaacctggatttcgataacatcgagctggtggatactttccaaacacttgaacccagagccagcgatgctaaaaaccaggaaggaaaggtcaacacaaggaggaaatctacagactccgtcccgatctctaaatcaacattatcaaggagtcttagtctgcaagctagcgactttgacggggcttcaagctccgggaatcccgaagcagtcgctctggcccccgacgcctactccactgggtcctcttcagcttctagtaccctaaagaggaccaaaaagcccagacctccaagtttgaaaaaaaaacagacgaccaagaagcctaccgaaacccctcccgtgaaagagacccaacaggaaccagacgaggaatccctggtgcccagcggtgagaacctggcatctgaaacaaaaactgagagtgccaagaccgaaggacccagtcctgctctcctggaagagaccccattagaaccggccgtgggcccaaaggctgcatgtccactggattctgaatcagcagaaggtgttgtcccccctgcatcaggaggcgggcgggtgcagaactccccaccagtcgggcgaaagacacttcccctaactaccgcccctgaggctggagaggtgaccccctctgacagcggaggccaggaggacagccctgccaaaggcctttccgtgcgcctcgaattcgattactccgaagacaagtccagctgggacaaccagcaggagaaccctccccctaccaagaaaattggaaagaagccggtggccaagatgcctctgcgccgcccaaagatgaagaaaacgcccgaaaagttggataatactcccgcgagcccaccacgatcgccagccgagcctaatgacatacccatcgcaaaggggacctatacatttgatattgataagtgggatgatcctaactttaaccccttctcgtcgaccagcaaaatgcaggagagcccaaagctgcctcagcaatcctataactttgaccccgacacgtgcgatgagtcggtggatcccttcaaaacatcctctaagactcctagtagtcctagcaaatccccagcgtcttttgagatccctgctagtgccatggaggcgaatggcgtggatggcgatggcttgaacaaacccgccaaaaagaagaagacaccactcaagacagatacctttcgtgtgaaaaaatccccaaagaggtcacccctttcagatcctccctcacaagaccccactccggctgccaccccagaaacccctcccgtgatctcagcagtggttcatgccacagacgaagaaaaactcgccgtgaccaaccagaaatggacttgcatgactgttgacctggaggccgacaaacaagactatcctcagcccagcgacctgagcacttttgtgaatgaaaccaagttctcctcaccaacagaggaactcgattatcggaatagctatgaaattgaatacatggagaagatcgggagctcccttccccaggatgacgacgctccaaaaaagcaggctctgtatctgatgtttgacacatcgcaggagagccctgtcaagtccagtcccgtcagaatgtcggaaagtcctacaccatgctctggatcttcttttgaggagacagaggccctcgtgaatacagccgcaaagaatcagcatcctgtcccaaggggtttagcacccaaccaggagtctcatcttcaagtccctgagaagtcatcccaaaaggaattagaggcaatgggcttaggtaccccttccgaggccatcgagattagagaggccgcacatcccaccgacgtctccatttcgaaaaccgccctgtatagccggattggtacagcagaagtggagaaaccagccggtcttctttttcagcagccggatcttgactccgccctccaaattgcaagagccgaaatcattaccaaagaacgcgaagtgtctgagtggaaagacaagtacgaggagtcaagacgagaagtgatggagatgcggaaaattgtggcagagtacgaaaagacaattgcccaaatgattgaggatgagcaacgagagaaatcagtgagccaccagaccgtgcaacagctggtgctagagaaggagcaagctcttgccgacctcaatagcgtagagaaaagcctggcggacctgtttagacgttacgagaagatgaaagaggtgctggagggcttccggaagaatgaagaagtgctgaagcgctgcgcccaagaatacctgagtcgagtaaaaaaggaggaacaaagataccaggcattgaaggttcacgctgaagaaaaactcgacagggcaaatgccgagattgctcaggtgcgtggcaaagcccagcaggagcaggccgcccaccaggcctccttgaggaaggagcaactgcgggtggatgcactggaacgcactctggagcaaaaaaataaggaaattgaggagctaaccaagatctgcgacgaattgatagcaaagatgggcaagagttag

SEQ ID NO: 209130 - DNA, 3285 bp, synthetic construct
  misc_feature 1..3285: note = Description of Artificial Sequence: Synthetic coding sequence
  source 1..3285: mol_type = other DNA
atgggcaacgagaacagcaccagcgacaaccagcggaccctgagcgcccaaacccctaggagcgcccaaccacctgggaatagtcagaatataaagcggaagcagcaggatacgcccgggtccccagatcacagagatgccagcagctcgcctgtggccgacgatatcattcagcccgcagctcccgccgaccttgaatcgcctactcttgcggcaagctcgtaccacggagacgtggtgggccaagtctctactgatctcatcgcacagaggtctagtgactctgaagaggcatttgaaacacccgaatcaacaacacccgtcaaggcccccccagcaccacctcccccacccccagaggtaattcccgaaccagaggtatcaacccagccacctcctgaagaaccaggttgcggttctgagacggtcccggttcctgacggcccgcgttctgactctgtggagggctcgccttttagacctcctagccactcattcagcgcagtgttcgatgaggataaacctattgcaagttccggcacctacaatctggattttgataacattgaactggtggatacgtttcaaacactagagcctcgggcctctgatgctaagaatcaggagggcaaagtcaacaccagacgaaagagtacagactctgtgcccatcagcaagagcacacttagccggtctctgagtctgcaggctagcgacttcgatggtgcatcatcctcaggcaaccctgaagcagtcgccctcgcccccgatgcctactctactggcagctcctccgcctctagtacactcaagagaactaaaaaaccccgccccccctcactaaagaaaaagcagacaaccaaaaaacctacggaaacaccgcctgtgaaggaaacacaacaggaacctgacgaggagtcactggttccttccggggagaacctcgcctccgaaaccaagacagagtccgccaaaacagaagggccatctccagcacttttggaagagacacctctggaaccagccgtggggcctaaagccgcctgtcctctggatagcgagagcgcagagggggtggtgccacctgcctccgggggtgggcgcgtccagaatagcccccctgtggggcgcaaaaccttgccccttactaccgcccctgaggccggggaggtgactcccagcgacagtggaggacaggaggattcccctgccaaggggctcagtgtacggttagagtttgactatagtgaggataaatccagctgggataaccaacaggagaacccgccccctactaaaaagatcgggaagaaacccgtggccaaaatgccattgcgccgccccaagatgaaaaaaacccctgaaaaactggataatacacccgcatccccccctaggtcaccagccgaaccgaacgatatacctatagccaaagggacatacacttttgacatcgataagtgggatgaccctaatttcaaccccttctcaagcacatcaaaaatgcaggaaagtccgaaactgccccagcaatcctataatttcgaccctgatacctgtgacgaaagtgtcgatcccttcaagaccagctctaagactccttcttcaccctctaagtcacctgcaagctttgaaattccagcctccgcaatggaggcaaacggggtggacggcgatgggctgaataaaccagccaaaaagaaaaaaacccccctgaagacagatacatttagagtgaagaagagtccaaaaaggtcaccattgtcagatcccccctcccaagacccaacccctgccgccacaccagaaacccctcctgtcatttcagctgtggtgcacgccactgacgaggagaaactggctgtgactaatcagaagtggacgtgtatgacagtcgacctggaagccgataaacaggactatcctcagccttctgacctgtccacctttgtgaatgaaacaaaattttcatcaccgactgaggagctggattacagaaattcttacgaaatagagtacatggagaagataggtagctcactgccccaagatgatgatgcaccaaagaagcaagccctgtacctcatgttcgatacctcacaggaatcccccgtcaaatcgagccccgtacgtatgtcagaaagtcctactccttgttccgggtcctcttttgaagagaccgaggcattggtgaataccgcagcgaaaaaccagcatccagtgcctcgcggtctggctccaaatcaggagtcccatctacaggtccccgagaagagtagtcagaaggaactggaggctatgggtcttggcaccccctctgaggccattgaaatcacggctcctgaaggcagctttgcttctgccgacgccctgttatctagactggcccatccagtgtctttatgtggcgcgctagattatctggagccggatttagccgagaagaatccacccctttttgcccagaaactgcaggaagaacttgaattcgctatcatgcggattgaggctcttaagcttgccagacagattgctttggctagcagatcgcaccaggacgctaagcgggaggccgctcaccctacggacgtgtcaatcagcaagacggccctgtacagccgcattggaactgccgaagtggaaaaaccagcaggcctgctgtttcagcagccggacttagattcagccctacagatcgccagagctgagatcattaccaaagagcgagaagtttctgaatggaaggacaagtatgaggaatcccgtagagaggtaatggaaatgaggaagatcgtcgctgagtacgaaaaaacaatagcccagatgattgaggatgagcagagggaaaaaagtgtttctcatcagaccgttcaacagctagtcctcgagaaagagcaggcgctggccgacctgaactctgttgaaaaaagcctggcagatctttttcgacgctatgagaaaatgaaggaagtcctggaagggttccgcaagaacgaggaggtgctgaaacggtgtgcccaggagtatctgagccgtgtcaaaaaagaagaacagcgttaccaggccctgaaagtgcacgctgaagaaaagctagaccgagccaatgcggagatcgcccaagtccgcgggaaggctcagcaggagcaagctgcccaccaggcatcactccgaaaggagcagcttcgcgtcgacgccctggagagaacattggagcagaagaacaaggaaatagaggaactcactaagatctgcgatgagctaattgctaaaatgggtaagagctag

SEQ ID NO: 209131 - DNA, 2991 bp, synthetic construct
  misc_feature 1..2991: note = Description of Artificial Sequence: Synthetic coding sequence
  source 1..2991: mol_type = other DNA
atgggcggcagccagagcctgcagcccgcccccgccagcgacctgaatctagaagcaagcgaggcaatgtcttccgatagtgaggaagcattcgagacccccgagagcaccacaccagtgaaagccccacctgcaccgccccctcccccacccgaggttatcccggagcccgaagttagcacacagcccccccccgaggaacccggatgtggaagcgagactgtcccagtcccagatggccccagatccgatagcgtagaagggagtccctttcgccccccctcccacagtttcagtgccgtcttcgatgaagacaagccgattgccagctcaggcacttacaatcttgactttgataacatcgaacttgtggacacatttcagacactcgagccccgggcatccgacgcaaaaaaccaagagggtaaagtgaatacacggagaaagagcaccgattccgtgccaatctctaagagcacactgtctcgaagtttaagtctgcaagcatctgacttcgacggcgccagcagctcgggcaaccctgaggccgtggccctcgcaccagacgcctactccactggatcttccagcgctagttcgactctgaaaaggactaaaaaaccacgacctcccagtctgaagaagaagcagactactaagaagccaaccgaaacaccccctgtgaaggagacgcagcaggagccagacgaagaatcccttgtgcctagcggagagaatctagcctctgaaaccaagacggagtccgccaaaaccgaaggaccttcgcctgcactattagaagaaaccccactggagcctgccgtcggtcccaaggcagcctgccctctggattcagaaagtgctgagggagtggtacctcccgcctcgggcggcggacgcgttcagaactccccaccggtcgggcggaaaaccctccccctgacgactgcacccgaggccggcgaggtcaccccaagtgactcggggggacaggaagattcccccgctaaagggctctccgtcagactggagtttgattactctgaagacaaatcatcttgggacaaccaacaggagaatccacccccaacgaagaaaataggtaagaaacccgtggccaagatgcctctccggagacccaaaatgaagaaaacacctgagaaactggataacaccccggcctcccccccaagatcccctgctgaacctaatgatatccccattgctaagggcacctacaccttcgacatcgacaagtgggacgaccccaactttaaccctttcagttccacttctaaaatgcaggaaagccccaagctcccgcagcaaagctacaattttgaccctgatacatgtgacgagagcgtggacccttttaaaacctcgtcaaagactccttcatcgcctagtaaaagtcctgcgagcttcgagatccctgctagcgccatggaagcaaatggtgtggacggagacggtttgaataagccagcaaagaaaaaaaagaccccactcaaaaccgacacttttcgggttaagaagtcccctaagaggagtcccctctccgacccccctagtcaggaccccactcctgccgctaccccagaaacaccccctgtgatatccgctgtggtacacgctactgacgaagagaaactggcagttacaaaccagaagtggacttgtatgacagtagatctagaggctgacaagcaggactatccgcagcctagcgacttgtcaacattcgtgaacgaaacgaagttttcatcaccaactgaggaactcgattatcggaactcttatgagatagagtacatggaaaagatcgggtcttccctgccacaagacgatgacgcacctaaaaagcaggcactgtacctgatgtttgatacaagccaggagtccccagtaaaaagctctcccgttaggatgtcagaatcgcctactccctgttccggctccagcttcgaagaaactgaagcactggttaacacagcagccaagaatcagcaccctgtcccacgtggacttgccccaaatcaagagtctcacctgcaggttccggagaaatccagtcagaaagaattagaggcaatgggtttagggacgccaagcgaagcgattgagataaccgctccagagggctcattcgcctcagctgacgcccttctgtcccggctggctcacccagtgtccctgtgcggcgccctcgactatctagagcctgacttggccgagaagaatcctccactgtttgctcagaagctacagcgcgaggccgcacaccccacagacgtgagtatttctaaaactgccctctatagtcgaatcggcacagccgaggtggagaagccagcaggactgctgttccaacagcccgacctggattccgctctccagattgcaagagctgaaatcattactaaagaaagggaagtttcggagtggaaagacaaatatgaagaatctcgccgagaggtgatggaaatgcgcaaaatcgtggcggaatatgagaagacaatcgctcagatgattgaggacgagcaacgcgaaaaatcggtgtctcatcagacagtgcaacagttagttttggaaaaggagcaagctctggctgacctgaacagcgtggaaaagtcactggccgatctgttcaggcggtacgagaaaatgaaagaagttcttgagggattccgcaaaaacgaggaggtcctcaagcggtgcgcccaggaatatctgagtagagttaagaaggaggagcagcgctaccaggccctcaaagtgcacgcggaggagaaactggaccgcgctaatgctgagattgcacaggtcagaggcaaagcacagcaggagcaggctgctcatcaagcctctctgcgcaaagaacagcttagagtagacgcactagagcgcacccttgaacagaaaaataaggagatcgaggagcttaccaaaatttgcgacgaactcattgctaagatgggtaagtcctag

SEQ ID NO: 209132 - DNA, 1716 bp, synthetic construct
  misc_feature 1..1716: note = Description of Artificial Sequence: Synthetic coding sequence
  source 1..1716: mol_type = other DNA
atgcccctgcggcggcccaagatgaagaagacccccgagaagctggacaatacacccgcttctccgcctcggtcccctgctgagcccaatgatattcctattgcaaaaggaacatacaccttcgatatagataagtgggacgaccctaacttcaatcccttcagctccacatcaaaaatgcaagaatccccgaaactgccccagcaatcctacaatttcgatccagatacctgtgatgagtctgtggacccttttaaaactagtagcaaaacccctagcagcccttccaagtcgccagcctcattcgagattcctgccagcgctatggaagcaaacggggtcgacggggacgggctcaataaacccgctaaaaaaaaaaagacgcccttgaagaccgtcaagaagtcaccgaaaagatctcccctctccgaccctccatcccaggaccctacccccgcagcaactcccgaaacgcctcctgtcatctcggctgtggtgcacgctactgatgaagaaaaactcgccgtgaccaatcagaagtggacctgcatgaccgtggatctagaggcggataaacaagattatccacaaccttcagacctctctacatttgtgaacgagacgaaatttagcagtcctaccgaggagctggattatcggaattcatacgagatcgaatacatggagaagattggctccagtctgcctcaggatgacgacgctcccaaaaagcaagccttgtacctgatgttcgacaccagccaggagagccccgtgaaaagctctcccgtgcgaatgtccgagtcaccaacgccctgctcaggatcctcttttgaggagacagaggcgctggtgaacactgccgctaagaaccaacatcctgtccccagggggctcgcccccaaccaggagtctcatctccaagttcccgaaaagtcatcccagaaagagcttgaagcgatgggtcttgggaccccatccgaggctattgaaattagggaggctgcgcaccccaccgacgttagtatctcgaagacagcactgtattcacggattggaacagccgaggtagaaaagccggccggactgctcttccagcaacctgatctcgactctgctttgcagatagcacgagccgaaattattacaaaagaacgggaggtgagcgaatggaaggataagtacgaggagagtcgaagggaagtgatggagatgcgtaaaatcgtggccgaatatgagaaaacaatcgcccaaatgatcgaagacgagcagagggagaagagcgtgtctcaccaaaccgtccagcagctggtgctggaaaaggaacaggctctcgcagatctcaacagcgtggaaaagagcctcgccgacctgtttaggagatacgagaaaatgaaagaagttctggagggcttccgcaagaacgaggaggtgctgaaaagatgtgctcaggaatacctgtcaagagtcaagaaagaggagcagcgctatcaggcactgaaagtgcatgcagaggagaaactcgatcgagccaacgccgaaattgctcaagttagaggtaaagcccagcaggagcaagccgcccaccaggcttcactgcgaaaggagcagttgcgggtggatgctctcgagcgaacactcgagcaaaaaaacaaagaaattgaagaactaaccaaaatctgcgacgaactgatcgccaaaatgggcaaatcctag

SEQ ID NO: 209133 - DNA, 8847 bp, synthetic construct
  misc_feature 1..8847: note = Description of Artificial Sequence: Synthetic coding sequence
  source 1..8847: mol_type = other DNA
atgggcaacgagaacagcaccagcgacaaccagcggaccctgagcgctcaaactccgagatcagcccagcccccaggaaatagccaaaatattaagcgtaagcagcaagacaccccaggttcacccgaccatagagatgcctcgagcattggctcagtggggcttggggggttctgcaccgctagtgaatccagcgcctccctggacccatgcctggtgtctccggaggtcacagagcccaggaaagacccgcagggggctaggggccccgaaggatcccttctgccttcacccccacccagccaggagagggaacacccttcaagcagtatgccctttgctgagtgccccccggagggctgtttagcaagccctgcggcggcccctgaggacggcccccagactcagtccccccggcgcgagccggcccccaacgcacctggggacattgcggcagctttccctgcggaacgcgactccagcactccctaccaagaaatagctgccgtgccatcagccgggcgggagagacagcctaaggaggaagggcaaaagtcatcattctccttctcctcaggtatcgatcaatcacccggcatgtcacccgtgccgctgcgcgaaccaatgaaggctcccctatgtggcgaaggggatcagcctggcggatttgagtcccaagaaaaggaggccgcaggcggctttccccccgcggaatctaggcagggagtagcttccgttcaagtcacaccggaggcacctgcagcggctcagcaaggaacagaatcctcagccgtcctcgagaagagcccgctgaaacctatggcacctatcccccaggaccccgccccgcgcgcctctgaccgcgaaagaggacagggcgaagcgcccccacagtacttgaccgacgacctggaatttctgcgcgcttgccatctgccacgatctaattcaggcgctgcgcccgaagccgaggtcaacgcggcatcccaggaatcttgtcaacagccggtcggcgcatatctgccacacgccgagctcccctggggtctgcccagccccgcactagttccggaggccggcggttccgggaaagaagccctcgacacaattgatgttcagggtcaccctcagacaggcatgcgcgggacaaaaccaaaccaagtggtgtgtgtggccgcaggaggtcaacccgagggcggcttgccagttagccccgagccctccttgcttacgccgaccgaagaggcccaccccgcaagctccctggccagctttccagccgcccagattcccattgccgtggaggagcctggatcttcttcccgggagagtgtctcgaaggcaggaatgcccgtgtctgcagatgccgctaaggaagtggtggacgcaggcttggtgggactggagagacaggtctccgatctgggatccaagggagagcacccggagggcgaccctggcgaagtgcctgcccctagccctcaggaaaggggggagcacctgaacaccgagcagtctcatgaggtccaacccggtgttcccccaccaccactccctaaggagcagtcacacgaagtacaacccggcgccccaccaccacccttaccaaaagctccgtctgagtccgccaggggccccccaggccccacggatggggctaaagtgcacgaggactcgacttcacctgcagtggctaaagaagggtcaagatctcctggagactccccaggggggaaagaagaagcacctgagccccctgatgggggggatccaggcaatcttcagggggaggattcgcaagccttttcctccaaacgggatcccgaggtgggcaaggacgagctcagtaaaccttcaagcgatgccgaatctcgggatcacccttcttctcacagcgcccaaccgccccggaagggaggcgcaggccatacagacggacctcattcccagactgccgaggccgatgcttccggtctgccacacaagcttggagaagaagacccagtattacctcctgtgccagacggggctggggagccaacggtgccggagggcgccatctgggagggctccggactgcagccaaaatgccctgatactttgcagtccagagaaggactgggtagaatggagtcttttcttaccctggaaagcgaaaagtcggatttccctccaacacctgtggccgaggtggctcccaaggcacaagagggagagagcacactggagataagaaagatgggcagctgcgatggtgaaggattgctgactagtcccgaccagccgcgagggccagcttgcgacgcctcccgccaagaattccacgcgggagttcctcacccccctcagggcgaaaatctggcagcggatctgggcctgacggccttgattctggaccaggaccagcagggcatcccctcttgtcccggcgagggctggattcggggcgccgccagcgagtggcctttgttgtccagcgaaaaacacctgcaaccttcccaggcacaaccagagacatctatatttgacgtgctgaaggagcaggctcaaccacccgagaatggcaaggaaacttctccttcacaccctggcttcaaagaccagggagctgattcttctcagatacatgttccggttgaaccacaagaggataacaaccttcctactcacggcggccaggaacaagccctgggatcagaacttcaatcccagctaccaaaaggtacacttagcgacactccaacgtctagtcccacagatatggtgtgggagtcgagcttgacagaggagagcgagctgagtgcccccacacggcagaaactccccgcattgggggaaaagcggcctgagggagcgtgcggcgatggccaatcttcaagggtctccccacctgccgccgatgtgctgaaagatttttcacttgccggtaatttcagcaggaaagagacgtgctgtactggccaggggcctaataaaagccagcaggctttagccgacgctctcgaggagggatcccagcatgaagaagcttgccagagacatcctggagcatcggaggcagcggacggatgctcacccttgtggggcctctctaagcgcgagatggctagcggcaacaccggagaggccccaccctgtcaacccgacagtgtggcactgctggacgccgtgccatgccttccagctcttgcacctgcctcacctggagtaacccctacacaggacgcgcctgagaccgaagcctgcgatgaaacccaggaggggagacagcagcccgtacctgcgcctcagcagaaaatggaatgttgggcaacgtcggacgccgagagtcccaagttgctggccagctttccaagcgccggggagcagggaggcgaagccggggcagccgaaaccggaggcagtgccggagcaggcgacccaggtaaacagcaggcgcctgaaaagccgggcgaagccacgctcagctgcgggttactgcagacagagcattgcttaacgagcggcgaggaagccagcacgagcgcactgcgcgagagttgccaggccgagcaccccatggccagttgtcaggatgcattactgcccgcccgcgaactggggggtattccccgctcaaccatggacttctccacccatcaggccgttccagaccccaaagagttactgctaagcgggcccccagaagtggctgctcctgacacaccttatttgcatgtcgactccgccgcacagcgcggagccgaggattcaggtgttaaggctgtgagctctgcagatcctagagcccctggcgagagtccatgtcccgtgggagaaccacctcttgctctcgagaacgctgcctctcttaaactgttcgctgggagccttgctcccctgctgcagcctggagctgccggaggcgagataccagcagtgcaggctagttccggaagccccaaggcgagaacgacagaggggcctgtcgacagcatgccatgcctagataggatgcccctcctcgctaaaggaaaacaggcaacaggagaggagaaagctgccacagccccaggcgctggcgcaaaagcctcgggcgaaggaatggccggagacgctgccggtgagactgaaggctccatggaacgaatgggcgaaccttctcaggatcctaagcagggcaccagcggcggcgtggatacctcttcagagcagatcgccaccttgacagggtttccagatttcagggaacatatcgccaaaatttttgaaaaacccgtgctgggcgccttggctacacccggcgaaaaggccggggctggtagatcggctgtcggcaaagacttgacacggcctctagggcctgaaaagttgttggacgggcctcccggtgtagatgtgaccttgcttcccgctccccccgcaagactgcaagttgaaaaaaaacagcagctggccggggaggcagagatttcccacctcgctctgcaggaccctgcttcagataagctcttgggcccggccgggctgacctgggaacgaaatctgccaggcgctggagtaggaaaggagatggcgggagtgccacctactctgagagaggacgagagaccagaaggtcctggtgcggcatggcctggcttggaaggccaggcctattctcagttagaaaggagccggcaggagctagcaagcggtctgcccagtcctgctgccacccaggagctgcccgttgaacgggccgccgccttccaggttgccccccattcacacggcgaagaagctgtggcccaggatcggattccatctggcaaacagcaccaggagacatccgcgtgtgatagtccacatggggaagacggccccggcgactttgctcataccggcgtgcctggacatgtgccaagatctacttgtgcaccatcaccccagcgcgaggtattgactgttcccgaggcaaattccgaaccttggactctcgatacactcggaggcgagcggcgtccaggagtcaccgccggcatcctggaaatgagaaacgccctggggaatcagagtactcccgcaccacccacaggcgaagtcgcagacactcccctggagccaggcaaagtcgctggggccgcaggtgaagcagagggggacattacactatctacagcagagacgcaagcttgcgcttcaggggaccttccggaggcggggaccactcggacgttttccgtagtggcgggcgatttggtgctgccaggaagctgccaagaccctgcttgttctgataaagcaccgggcatggagggcactgccgccctgcacggggactcaccagctcggccacagcaggccaaagagcagccaggccctgaaagaccaatcccagccggggacggcaaggtttgcgtgagttcacctcctgagccggatgagacgcacgatccaaaactgcaacacttagcaccagaggaactgcacaccgaccgcgagagcccacggcccggaccctcaatgctgccttcagtaccaaagaaggacgctccccgggttatggataaggtcacctctgacgaaactcgtggtgccgagggaacggagagcagtcccgttgccgacgatataatccaacccgcagcgcccgccgatctcgagtcccctaccctcgcagcatcatcctaccacggcgacgtggtagggcaggtttccaccgacttgatcgcccagtccatcagcccagctgctgcccatgccggcctgcctccatccgcagctgaacacatcgtgtctccctcagccccagcaggtgaccgtgtcgaggcttccacccctagctgtcccgaccccgctaaggatttgtctcgcagcagcgacagtgaggaagcttttgagactcctgagtccactacccctgtgaaggccccccccgctccccctcctccccctcccgaagtgataccagagcccgaggtctccacacagccaccccctgaggaacctggttgcgggtccgaaacggttcccgtcccagatggaccacggagtgattcagtggagggctcccccttccgtccgccttcacatagttttagcgccgtattcgacgaggacaagccgatcgcatctagcgggacatataacctcgattttgataacattgaacttgttgatacgtttcagaccttggagcccagggcaagcgatgccaaaaaccaggaagggaaagttaatacacgccggaaaagtaccgatagcgtccctatttcaaagagcacacttagtcgctctctgagcttgcaggcttcagatttcgacggagcctctagcagcggaaatccagaggctgtggccctggctcccgatgcatactcgaccgggagctcgtccgccagttcaaccctgaaacgtacgaaaaagccaaggcccccatcactcaaaaagaagcagactacaaagaagcctactgagacccccccggtgaaggagacacagcaggaacccgacgaagagagcctcgtcccgtctggagagaacctagcctctgaaacaaaaaccgagtccgctaaaactgaggggccctctcctgctctcttggaggagacccctctcgaaccagctgtagggcctaaggccgcctgtccactagactccgaatctgccgagggtgtcgtgccaccggcatccggcgggggcagagtgcagaattccccaccagtcgggcggaaaaccctccccttgactacagcccccgaggccggcgaggtgacgccaagcgattcaggcgggcaagaggacagtcctgccaaaggactgagcgtgaggcttgagttcgactattcagaagataagagttcctgggacaaccagcaggaaaatccaccccccacaaagaagataggaaagaagcctgttgcaaaaatgcctcttaggagacccaaaatgaagaaaactcctgagaagctggacaacacgcctgcgtctcctcctaggtccccggctgaacctaacgacatccctattgccaagggaacgtacacgtttgatattgacaagtgggatgatccaaattttaatccatttagctctacttctaagatgcaggaatctccaaagctgccacagcagagctataattttgaccccgatacctgcgatgaaagcgtggacccttttaaaaccagttccaagactccatcctcacccagcaagtctcctgcatctttcgagattccagcctcagccatggaggccaatggcgttgatggcgatggactgaacaagccagccaagaagaagaaaactccactgaaaacagatactttcagagtgaagaagtcacccaagcgtagtcctctgagtgacccgccgagtcaggatccaactcccgcagctacgcctgaaacacctccagtgataagcgcggtcgtgcatgctaccgacgaagaaaaactggctgtgaccaatcaaaagtggacttgcatgactgtggacttggaagccgataagcaggattatccacagccttctgatctaagcactttcgttaacgagactaagttctcttcaccaacggaagagcttgattataggaatagctacgaaattgagtacatggaaaaaattgggagcagcctaccacaggacgacgatgcacctaaaaagcaggcactgtatctgatgttcgatacttcacaggagtcacccgtgaagagctcacccgtcaggatgagtgaatcccccaccccatgttccgggagttctttcgaggagacagaggccctggtcaacactgccgcaaagaaccaacaccccgtgcctaggggccttgcgcctaaccaggaaagtcacctgcaagtcccagagaaaagttcacagaaggagctggaagccatgggcctgggcacaccaagcgaggccattgaaattacagctccagagggatcctttgcttcagccgacgccttattatcaaggctagcacatcctgtgtccttatgcggcgccctcgactatttggaaccagacctggccgagaaaaatccccctctcttcgcacaaaaactgcaagaagagttggagtttgcaatcatgcgcattgaagccctgaagctggcacgccaaattgcactggctagcaggagccatcaagacgccaagagggaggcagctcatcctactgacgtgagcatctccaagaccgccctgtactctcgcattggaactgccgaagtcgaaaaacctgcaggactattattccagcaaccagacctggactccgccctgcagatcgctcgggcagaaatcattacgaaagaacgtgaagtaagcgaatggaaggataagtatgaggaaagtcgccgggaagttatggagatgaggaaaatcgtggcagagtatgaaaaaaccatcgcacaaatgattgaggacgaacagagagaaaaaagcgtctcacatcagaccgtgcagcagctcgtgctggaaaaagagcaggctctcgccgatctcaatagtgtggagaaaagtctggctgacctgtttcggcggtatgagaaaatgaaggaggtgctggaagggtttagaaagaacgaggaggtgctgaagcgatgcgcgcaagagtatctttctcgagtgaaaaaggaggagcagcgttatcaggcactgaaggtgcacgccgaagagaagttggatcgggccaacgccgaaatcgcccaggttcgcggaaaggcgcagcaggaacaagccgcccaccaagcctcacttcgtaaggagcagcttcgcgtggacgccctcgagcgaactcttgagcaaaagaataaggaaattgaagagctcactaagatctgtgatgagctcatcgcaaagatgggaaagtcttag

SEQ ID NO: 209134 - DNA, 8628 bp, synthetic construct
  misc_feature 1..8628: note = Description of Artificial Sequence: Synthetic coding sequence
  source 1..8628: mol_type = other DNA
atgggcaacgagaacagcaccagcgacaaccagcggaccctgagcgctcagacccccagatcagctcagccgcctggaaattcccagaatatcaagaggaaacagcaggacacgccagggtctcccgaccaccgtgacgcctctagtattggaagcgtgggactcggaggattctgcactgccagtgaatccagcgcctctctggatccctgcctcgtgtcacccgaggtcaccgagccccgtaaggatccacagggcgcccgtgggcccgagggctccctgctgccttcacccccccctagccaggagcgcgagcacccttcatctagcatgccattcgccgaatgcccgcccgaagggtgccttgcctcgcctgctgccgctcctgaagatggtcctcaaacccaatcaccccgcagggaacccgcccccaatgcacctggggacatcgctgcggccttccccgctgagcgcgactccagcaccccttatcaggaaatcgctgccgtccccagcgcggggagagagcggcaacctaaggaggaaggccagaagagctcattttccttctcctccgggatcgatcaaagccccgggatgtcacccgtccccctgcgtgagccaatgaaagccccattgtgtggcgaaggggatcagccaggcggctttgagagccaagagaaggaggcggctggaggctttccccctgcggaaagcagacagggagtcgcttctgtgcaagtcaccccggaggctcctgccgctgctcagcaggggactgagtcatccgcggtcttggaaaaatcgcccctgaagcccatggcccctatcccacaggacccagctccaagggcctccgacagagagcgggggcaaggagaagcccctcctcagtacttaaccgatgacctcgaattcctacgggcttgccacctgcctaggtctaacagcggtgccgcccccgaggccgaggtaaatgctgcaagccaggagtcatgtcagcagcctgttggtgcatacctcccacatgcagaattaccctggggcctcccttccccggcactggtgccggaagctgggggatccggaaaggaggcccttgatacaatagatgttcagggacacccacagactgggatgcgaggaactaagcctaatcaggtcgtgtgcgtcgccgccggtggtcaaccagaagggggtttgcctgtgagccctgagccctcactgctgacaccaacagaggaggctcatccggcgagttccctggcaagcttcccagccgctcagatccccatcgcagtcgaagaacctggctcctcatcccgagagagcgttagtaaagctgggatgcccgtcagcgcagatgcagctaaagaggtggttgatgctggcctggtggggttagagcgccaagtaagcgatctgggctccaaaggggagcaccccgagggcgacccgggagaagtgcccgctccatccccacaggagcgtggcgagcacctgaataccgagcaaagccacgaggtgcagcctggggtgccccccccccctttacctaaggagcaaagtcacgaggtgcagcctggggcacccccaccacccctcccaaaggctcccagtgaatccgcaagaggaccacctgggccaaccgacggcgccaaagtacacgaggatagtacaagcccggcggtcgccaaagaaggatccaggagccctggagacagtcctggtggcaaagaggaggccccggaacctccagacgggggcgatccagggaacctccaaggagaggactctcaagctttttctagtaagcgcgatcccgaagtagggaaggatgagcttagcaagccctcttcagatgccgaatccagagatcaccccagtagtcacagtgcccaacctccccgcaaaggcggagccggccataccgatgggcctcactctcaaaccgctgaggccgacgcaagtggcctaccacacaagctcggcgaggaagaccctgtgctgccacctgtgccagacggtgcaggggaacccactgttcccgagggagccatctgggagggctctggactccagccaaaatgtcccgatacactgcagtccagggagggcctgggccggatggaatcgttccttacgttagagtccgagaaatctgactttcctcccaccccagttgccgaggtcgctccaaaagcccaggaaggcgaaagcacactggaaattagaaaaatgggttcttgcgatggcgaaggattgctcaccagtcccgaccagcctagaggccccgcctgtgacgcatcaaggcaggagttccacgccggggtaccccaccccccgcagggcgaaaatcttgccgcggacctgggccttactgctttgatattagaccaggatcaacagggaatccctagctgtcctggagaaggctggatccggggagccgcctccgaatggccactgctttcttccgaaaagcacttgcaaccatctcaggctcagcccgaaacaagtatattcgatgtgctgaaggaacaagcccaacctccagaaaacggcaaggagacatcaccatcccatcccggattcaaggatcagggcgcagactcttcgcagatccatgtgccggtggagccgcaggaagataataatctccccacacatggcgggcaggaacaagcactcggaagcgaactccaatcccagctccccaagggcactctctcagacactccgaccagcagccccaccgacatggtctgggaaagctccctgacagaggagtcggaactctccgcaccgacacgacagaagctccccgcactgggcgaaaagagaccagagggagcatgtggtgatggccagtcttccagagtttcccccccggcagccgacgtgctgaaagacttcagtcttgctggaaatttcagcaggaaggaaacctgctgtacgggtcagggtccaaacaaatcacagcaggccctggccgacgcgttggaagaagggagtcagcacgaggaagcttgccaaaggcaccccggcgcctccgaagcagccgacggttgcagcccgttatggggcctctctaaacgtgaaatggcgtccgggaataccggcgaggctcccccatgtcagcccgattccgtggcactgctggacgccgtcccctgtctacccgccctcgcaccagcgtcacccggcgtcacccccactcaggatgctccagaaacagaagcctgtgacgagacccaggagggaaggcagcagcccgtgcccgcaccccagcaaaagatggaatgttgggccacaagtgatgccgagtcccccaagctgctggcttccttcccatcggccggggagcaggggggggaagccggcgcggctgagaccggcggctcagccggggcaggggatcccggcaagcagcaggctccagagaaacctggtgaggcaacactgtcctgcggactgcttcagaccgaacattgcctcacttcaggagaggaggcctctacgtccgcactgagggagagctgtcaagcggagcaccctatggcctcttgccaagacgccctactacctgccagggagctgggcggaatccccaggtcgactatggatttttccacgcaccaagctgtgcccgaccctaaggagttgcttctgagcggcccgccggaggtagccgccccagacactccctacctacacgtggattcagcagcccagcgtggcgccgaagactcaggagtcaaagccgtctcatcagctgatcctcgagccccgggggagtccccatgccccgttggcgaacctccccttgctcttgaaaatgccgcctccctaaagctgtttgctggctccctcgctccactcttgcagcccggcgcagccggcggggagatcccagctgtgcaggcttcttccgggtcgccgaaggctcgcaccaccgaaggacccgtggatagcatgccttgcctggaccggatgcccttattagcgaaaggaaagcaggccacaggagaggagaaagccgctactgcccctggcgcgggagcgaaggcatctggggagggtatggctggcgatgccgcaggcgaaacagagggctccatggaacgcatgggtgagccaagccaggatcccaagcagggcaccagtggcggtgttgacacgagcagcgaacagattgccacgttgacgggctttccagatttcagggaacatatagctaaaatttttgaaaaacccgttctcggcgctctagctacaccgggcgagaaggctggagcagggaggtctgcggtcgggaaagatctgacacgccctctgggaccggagaagctgcttgacggccctcctggagtggacgtcactttgttgcctgcgccacccgcccgcttacaggtggagaaaaagcagcagttggcgggtgaagcagaaatttcacatttggcccttcaagaccccgcctccgacaagctgttagggcctgccgggttaacatgggagcgcaatctgcccggggctggcgttggaaaggaaatggcaggggttccaccaacactgagggaggacgaacggcctgaggggccaggcgccgcttggcccggcttagaggggcaggcatattcacaattagaacgctctcgacaagaactagcaagtggcctgcccagccccgcagccacccaggagttgccggtggaaagagccgcggcattccaagtggccccacactcccatggcgaggaagccgtcgctcaggaccgtatcccctccggcaaacagcatcaggagacaagcgcttgtgatagtcctcatggggaagacggcccaggcgatttcgcccacacaggggtgcctgggcatgtgccgcgtagcacttgtgccccaagcccccagcgggaggtgctgaccgtcccggaggcaaattcagaaccttggaccctggatacgttagggggagagcgtcgaccaggggtgaccgccggtatcctggagatgcggaacgcactgggaaatcagagcacacctgcccctccaacaggggaggtggccgatactcctctagagcctggtaaggttgcaggggccgcgggagaagctgaaggcgatatcactctgtccacagccgaaacccaggcttgcgcatcaggcgatctgcctgaagccggtactactcggacattttccgtggtggcaggggatttagtcctccctggctcatgccaggatcctgcctgctccgataaagcaccgggaatggagggtacagccgcactccatggtgactcaccagctcggcctcaacaggccaaagaacagccagggcctgagaggcctataccagctggtgatgggaaagtatgtgtcagttctcctcctgaacccgatgagacccatgaccctaagctgcaacatctcgcacccgaggagctccacaccgacagggaaagcccacgccccggtccctctatgctgccaagtgtgcccaaaaaggatgccccacgcgtcatggataaggtcacaagtgacgaaacgcggggcgccgaggggacagaaaggagtgctaaagacataggattgtggaaggcaatgatgccgtccctggacacagacacgcttgatgtcctcgaacgcagggtcgtcctgatacaacacgagtttctgcacaaaaaagaagcgaatggacattcccgctttatgtactcctcacctgtagcggacgacataattcagcccgctgcccccgccgatttggagagccccacactggcagcttcttcctaccatggggatgtggtcggccaggtgagtacggatttgatagcccagcggagttcagactctgaggaggcgttcgagacgcccgaatccaccacgcccgtgaaagctccgcccgcaccacctcccccacctcctgaggttataccagaacccgaggtatcaactcagcccccaccagaggaacccggctgcgggagtgaaactgtgcctgtgcctgacggtccccggagcgattcagttgagggttcacctttccggcctccttcgcactcattctcagcggtctttgacgaagataagcctatagcgtcctcaggtacttataatctggattttgataatattgaactcgtagataccttccagacattagaaccgagggcatctgacgccaagaaccaagaagggaaagtgaatacacgccgaaagtccactgattcagtccctatttctaaatccaccctgtctcggtcgttgtctttgcaagcgagcgatttcgacggcgcaagcagttctggcaatccagaggctgtggctctagcaccagacgcctactcaacaggaagctcctcggcgtcctcaacactgaagaggaccaagaaaccaagaccaccgtccctaaagaagaaacagacaactaagaaaccgacggagactccacccgtgaaggagacccagcaggaacccgacgaagagtccctggtcccgtctggagagaacctggctagtgagactaaaacagagtccgctaagaccgaggggccatcacccgcactgctcgaggagacaccgctcgagcctgccgtcgggccaaaggccgcctgccccctggactcagagagtgccgagggagtggtgccgcccgcctctggcggcgggagagtgcagaattctcctccagtcggacgcaagacactccccctaactaccgcgcctgaggcaggggaagtcactccatctgattctggcggacaggaagattcacccgccaaggggctctccgtcaggctggaattcgattactcagaagacaagagctcctgggacaatcagcaggaaaacccccctccaactaagaaaattggtaagaaacccgtagcaaagatgcctctgcgcagacccaagatgaaaaaaactccagaaaagttggacaacacgcctgcctctcctccccgaagcccagccgaaccaaatgatattcccatcgccaagggaacctatacttttgatatcgacaagtgggacgacccaaacttcaacccttttagcagcacatctaagatgcaggagtcccccaagctgccacagcagagttacaatttcgatcccgacacctgtgacgagtccgtcgatccttttaaaacctcaagtaagacaccgagcagtccctccaagagccccgcgagcttcgagatccccgcttcagccatggaagccaacggagtagatggtgatggtttaaacaagcctgcgaaaaaaaagaagactccactaaagaccgatacattccgggtgaaaaaaagtccaaaacgaagcccactgtctgacccgccgtcccaggatcctacgcctgccgcaacgcccgaaacgcctccagtcatctcggctgttgtgcacgctactgacgaagaaaaacttgcagtgaccaaccagaaatggacttgcatgactgtcgatcttgaagccgacaagcaggattatccccagccatctgatcttagcaccttcgtgaatgagactaagttttcctcgccaactgaggagctggattacaggaattcctatgagatcgaatacatggaaaagatcggaagctcattgccgcaggatgacgatgcccctaagaaacaagcactctatctaatgtttgacacaagtcaggagtcccctgtgaagagctctccggtgaggatgtctgagtcccctaccccgtgtagtggctcaagctttgaagagacagaggcgctcgtcaacacagccgccaagaaccagcaccctgtgccaagaggactggcgcctaatcaggagtcccatttgcaagtcccagagaagagctcccagaaggaactggaagcaatgggtctcggaacaccctccgaagcgatcgaaatccgcgaagcagcccaccccacggacgtgtcaattagcaagaccgctctttacagtcggatcggcaccgcagaggtcgagaagccggcaggccttctttttcaacagccagacctggacagcgcccttcagatcgcccgcgcagagatcatcactaaggaaagggaggtctctgagtggaaggacaagtacgaagagtctaggcgtgaagtgatggagatgcgaaagatcgttgctgaatatgaaaaaaccattgcacagatgattgaggacgagcagcgggagaagagtgtctcccaccagaccgtccagcaactggtcctggaaaaagagcaggccttggccgacctgaacagcgtagaaaaatcattggctgacctattcagacggtacgagaaaatgaaagaggttctagagggcttcaggaagaatgaggaagttctgaaaagatgcgcccaggaatacttgagccgcgtgaagaaggaggagcagcgctaccaggccctgaaggtgcacgctgaagagaaattggatagagccaacgccgaaattgcccaggtgaggggaaaggcacaacaggagcaggccgcacaccaagcttccttaaggaaagagcagctccgcgtcgacgcactcgaaaggacgcttgaacagaagaataaggagatcgaggagttgaccaaaatttgcgatgaattgattgcaaagatggggaaatcctag

SEQ ID NO: 209135 - DNA, 3285 bp, synthetic construct
  misc_feature 1..3285: note = Description of Artificial Sequence: Synthetic coding sequence
  source 1..3285: mol_type = other DNA
atgggcaacgagaacagcaccagcgacaaccagcggaccctgagcgctcagaccccaagatcagctcaaccccctggaaatagtcagaacattaaaagaaagcagcaggataccccaggctctcccgatcatcgtgacgcctctagcagccctgtcgccgacgatatcatccaacccgccgcaccggccgacctggaatctccaaccctcgcagccagctcttaccatggagacgtggtggggcaagtgagtactgatttaatcgcacagaggagctcagacagtgaagaggcattcgagacccctgagtccaccacaccggtaaaggctccccctgcaccccccccacccccccctgaagtcattccagaaccggaggtgagcacccagccccctcccgaggaacctgggtgcggatccgagacagtacccgtgccggacggcccaagatccgactcggtggagggttcgccatttcgaccaccatcacactccttttctgctgtcttcgacgaggacaagcccattgcttcttccggaacctacaatttggattttgacaacattgaactggtcgacactttccagaccctggagccaagggccagtgacgccaagaaccaggagggcaaggttaatacacggaggaaaagcaccgacagtgtcccgataagtaagagtacactatctagatcgttaagcctacaggcttccgacttcgatggggcctcctcttctgggaatcccgaagcagttgcccttgcgcctgatgcttactcaacgggaagctcaagcgctagcagtaccttgaagagaaccaaaaagccccgacccccctctctgaagaagaagcaaacaaccaagaagccgactgaaaccccccctgtgaaagagacacagcaggaacccgatgaggaatctcttgtgccttccggggaaaatctcgcatctgaaactaaaacggagtcagccaagaccgaggggccatcacctgccctgttggaggagaccccccttgagcctgcagtgggtccaaaggcagcgtgtccattggatagcgaaagtgctgaaggcgtggttcctccggcttctgggggcggaagggtccagaatagcccccctgtggggcgcaagaccttgccgcttaccacggcaccagaggcaggcgaggtgacaccatccgacagcggcggccaggaggattcgcctgcgaaaggactgagtgtgaggttagagttcgactactcagaggacaagagtagctgggataaccagcaggagaacccaccacctaccaagaaaattggcaaaaagcccgttgctaaaatgccactcaggaggcctaagatgaaaaagacaccagaaaagctggacaatacccctgcaagtccgccacgctcacctgctgaaccaaatgatattccaattgctaaagggacctatacgttcgatatagataaatgggatgaccccaactttaatcctttctcaagcacctcaaagatgcaagagagtcccaagctgccccagcagagttataatttcgacccagacacatgcgacgagtctgtggaccctttcaagacatcttctaaaactccaagctcacctagtaagagccctgcttccttcgaaattcccgccagcgccatggaggcaaatggcgtggatggagacggactgaataaacccgcaaagaaaaagaaaacacccttaaaaaccgacactttccgcgttaaaaaatccccaaaacggtcccccctgagcgaccccccctcccaggatcctacgccagcagccacaccagagactccaccagtcatctctgccgttgtccacgcaacagatgaggagaagctggcggtgaccaaccagaagtggacttgtatgacagttgatctggaggcggataaacaggactacccacagccctcagacttgtccactttcgtgaacgagacgaaattttcgtcccccacagaagaactggactacagaaatagttatgagatcgaatacatggagaagattgggtctagtttacctcaagacgacgatgcaccaaagaaacaagctctgtacttgatgtttgacaccagtcaagagagtcctgtgaaaagttcccccgtccgcatgagcgaatcgccaaccccatgcagtggcagcagtttcgaagaaaccgaagcactcgtgaacaccgccgcgaaaaaccaacatccagtgccacgcgggttggccccaaaccaggagtcacacctacaggtaccagagaaaagtagtcagaaagaattggaagcaatgggactaggcactccatccgaagccatcgaaatcaccgcccctgaggggtcgtttgcgagtgccgacgctctactatctcggctggctcatcccgtctctctgtgcggcgcactggactacctggagccggatctggctgaaaaaaacccccccctgttcgcgcagaaactgcaggaggagctggaattcgcaataatgaggatcgaggccctcaagctcgcacggcaaatcgctttggctagccgaagccaccaagacgccaaacgggaggccgcccaccccacagatgtatctatcagcaagacagccctgtatagtcggattgggacggccgaagtggaaaagccagcgggcctcttgtttcaacaacctgaccttgatagcgccctgcagatcgctcgggccgaaatcatcacgaaggagcgcgaggtaagcgaatggaaggacaagtacgaggagtcccgccgggaggtcatggaaatgcggaaaattgttgccgaatatgaaaaaaccattgcacagatgatcgaagacgagcagagggaaaaatcagtgagccaccagacagtccagcagttggttctagagaaagaacaggcactggctgatctgaattctgtggaaaagtcactggcggacctatttcggaggtacgagaaaatgaaagaggtgctcgaaggctttagaaagaacgaagaagttctcaagcggtgtgcacaggaatatctctccagggtaaaaaaagaggaacagcggtatcaggcacttaaggttcacgccgaagaaaagctcgacagagccaacgccgaaatcgcacaagttagagggaaagcccagcaggagcaggcagcacatcaggcaagtcttcgcaaggaacagctgagggtggacgccctcgaaaggactcttgagcagaaaaataaggagattgaggagctgacgaagatctgtgatgaactgattgcaaaaatgggcaagtcctag

SEQ ID NO: 209136 - DNA, 2517 bp, synthetic construct
  misc_feature 1..2517: note = Description of Artificial Sequence: Synthetic coding sequence
  source 1..2517: mol_type = other DNA
atgagcctgcaggtgctgaacgacaagaacgtgagcaacgagaagaatacagagaactgcgacttcctctttagtccccctgaagtgacaggccggagcagtgttctgcgtgtcagccagaaggaaaacgtaccccccaaaaaccttgccaaggccatgaaggtgacattccagacccctttgagggaccctcaaactcaccggattttatccccaagcatggcgagcaaattggaagcaccctttacacaagacgataccctgggcttggagaattctcaccctgtgtggacacagaaagaaaaccagcagctgataaaggaagtggatgcaaaaactacgcacggcatcctgcagaaacccgtggaagctgacaccgatttgttgggagacgctagccccgcctttgggagtggatcttcctcagagtccggccctggagccttggccgatttggattgctcctcctctagccaatctcccgggtcctcggagaatcagatggtgagtccaggtaaagtgtcaggaagccccgagcaggctgtggaggaaaatctgagctcctatagcctagacagacgggtgactccagcttccgagacattggaggacccctgccgcaccgaaagccagcataaggccgagactcctcacggtgctgaggaggaatgcaaggctgagactccacacggagcggaagaagagtgtcgccatggcggcgtgtgcgctcctgctgccgtggccacatctcctcccggggccataccaaaggaagcgtgtgggggggcacccctacaaggcctcccaggagaggcactcgggtgcccggccggcgttggaacacccgtgcccgcagacgggacccagaccctgacttgcgcgcatacaagtgcccctgaaagtaccgcccctacaaatcacctcgtcgcaggaagggccatgaccctgtctcctcaggaagaggttgcagcagggcaaatggcctccagctcacgatctggccctgtcaagttggagtttgacgtgagcgacggcgctacgtccaaacgtgcccctcccccacgccggctgggagaaagatcaggactcaagcccccgctccggaaggcagccgtgcgccagcagaaagcccctcaggaagttgaagaagacgatggccggtcaggtgccggggaagacccccctatgcccgcatctaggggctcctatcatctggactgggacaaaatggatgaccctaattttatacctttcggaggagatacaaagtcagggtgctctgaggctcaaccgcctgaaagccccgaaacccgattgggccagccggcggctgagcaactacatgctggacccgccactgaggaacctggaccttgtctgtcgcagcagctccatagcgcttctgctgaggatacacctgtcgtgcagcttgccgcagagacaccaaccgcggagtccaaagagagagccctgaattctgcctcgacctcactgcctacatcctgccccggaagcgaaccagttccgacacaccaacagggacagccggccctcgagctgaaggaggaaagcttcagagaccccgctgaggtgctgggaaccggcgctgaggtggattacctagagcagttcggtacttccagctttaaggagagcgcactgagaaaacagagcttatatcttaagtttgacccattactgagggattcaccgggtaggcctgtgcctgttgctacagagacctcttcaatgcatggggccaacgaaacaccaagcgggcgcccccgggaagccaagctggtggagttcgactttttaggggccttggatattccggttcccggcccaccccccggtgtgcccgccccaggcgggccaccgctttcaacaggacccatcgtggatctgcttcagtatagtcagaaggacctcgacgctgtcgtcaaagctacccaagaagagaatagagaacttagatctcgatgcgaggagttgcacggcaaaaatctggagctcggcaagatcatggatagattcgaagaagtcgtgtaccaagccatggaggaagtgcagaaacaaaaggagcttagcaaagccgagattcagaaggtgctgaaggaaaaggaccagcttaccaccgatctcaattcgatggagaagtctttttctgacctgttcaaacgcttcgagaagcagaaggaggtcattgaaggttaccgcaaaaacgaagaaagcctgaagaagtgtgttgaggattatctagcccggattacacaggagggccagaggtatcaagctcttaaggcccacgcagaagaaaagctgcagctggctaatgaagagatcgcccaagtaaggtctaaggctcaagcagaagctttagccctgcaagcttccctgcgcaaggagcagatgaggattcagagtttggaaaagacagtggagcagaagaccaaggagaatgaggaactgacacggatatgtgacgacctcatctcaaagatggaaaagatatag

SEQ ID NO: 209137 - DNA, 438 bp, synthetic construct
  misc_feature 1..438: note = Description of Artificial Sequence: Synthetic coding sequence
  source 1..438: mol_type = other DNA
atgagcctgcaggtgctgaacgacaagaacgtgagcaacgagaagaatacagagaattgcgacttcctcttttcaccacctgaagtcaccggccgttcctcagttctgcgcgtatcacagaaggaaaatgtaccgcccaaaaatctggcaaaggccatgaaggttaccttccagactcccctcagagatccccaaacacataggatattgtccccttctatggcatccaaactggaggcccccttcacccaggatgacacgctagggctggagaactcacacccagtgtggactcagaaagaaaaagccgccgccttcagcctgtcaggtggccatgcttgcggcgctgtcggatctagggacccaaactcccgggaacagggggagagtctggagttatgccaacatctggcgagccacaaactgagtagacagtag

SEQ ID NO: 209138 - DNA, 666 bp, synthetic construct
  misc_feature 1..666: note = Description of Artificial Sequence: Synthetic coding sequence
  source 1..666: mol_type = other DNA
atgagcctgcaggtgctgaacgacaagaacgtgagcaacgagaagaacacggaaaattgtgatttcttgttctcccccccagaagttaccgggaggtcatcagtgctgagggtaagccagaaggaaaacgtaccaccgaagaacctcgccaaggccatgaaggttacattccagacaccattaagggatccacagactcaccgcatcctttcccccagcatggcatctaagttggaagcaccatttacacaggatgataccttagggctggaaaatagtcaccccgtgtggactcaaaaggaaaaccaacagctcatcaaagaggtggatgcaaagacaacacatggcattctgcagaagcccgtcgaggccgacaccgacctactcggggacgcgtcacctgcttttggtagcggcagctcttccgagagtggccccggcgccctggcggacttggactgctcctcaagctcacaaagcccgggatcctcagagaatcagatggttagcccaggcaaggtatcaggatccccagaacaagccgtggaggaaaatttgagcagttattctcttgataggcgagtaaccccggccagtgaaactctggaggacccatgccgtaccgaaagtcagcacaaagccgagactccccatggtgccgaatag

SEQ ID NO: 209139 - DNA, 696 bp, synthetic construct
  misc_feature 1..696: note = Description of Artificial Sequence: Synthetic coding sequence
  source 1..696: mol_type = other DNA
atgagcctgcaggtgctgaacgacaagaacgtgagcaacgagaagaatactgagaattgcgactttctattttctccgcctgaggtgacaggaagaagtagcgtgctgagagtctcacagaaggagaatgtccctcctaaaaatctcgccaaggcaatgaaggtaactttccagacacctctgagggatccgcagacccacagaatcctcagtcccagcatggctagtaaactggaggccccattcacgcaggatgacacactggggctggaaaacagtcacccggtgtggactcaaaaagagaatcagcaacttatcaaggaggtggatgcaaaaactactcatggaattttgcaaaagcccgtggaagccgacacagacctgctgggagacgctagtcctgcattcggatcaggaagctcctcagaatctgggcccggggctctggctgatttggactgtagcagttcttcacaaagccctggaagtagcgaaaatcagatggtgagccctggaaaggtgtccggaagccccgagcaagctgtcgaagaaaatctcagtagttattctctggatagaagggtgaccccagcaagtgagacgctggaggatccctgccggactgagtcgcagcacaaggccgaaactccccacggcgcggaggaggaatgcaaggctgaaacacctcatggatag

SEQ ID NO: 209140 - DNA, 606 bp, synthetic construct
  misc_feature 1..606: note = Description of Artificial Sequence: Synthetic coding sequence
  source 1..606: mol_type = other DNA
atggccaacaagggccccagctacggcatgagccgggaggtgcagagtaagatcgagaagaaatatgatgaagaactggaggagcgcctggttgagtggattattgtccagtgtggacctgatgttggccggccagaccgcggccgtctgggttttcaggtatggctcaaaaatggggttattctgagcaaacttgtcaatagcctgtaccccgacggatcgaagccggttaaagtccccgaaaacccaccaagtatggtctttaagcaaatggaacaggtagctcagttcctgaaggctgccgaagactatggcgtgattaagactgatatgttccaaaccgttgacctgttcgagggtaaagatatggcagcagtgcagcggacactcatggcattggggtctttggccgtgaccaagaatgacggtcattacagaggcgaccccaactggttcatgaaaaaggcgcaggagcataagcgtgagtttacagaaagtcaactgcaggagggtaaacatgttattgggctccaaatgggaagtaacaggggggccagccaagccgggatgacggggtacggccggccacggcaaatcattagctag

SEQ ID NO: 209141 - DNA, 108 bp, synthetic construct
  misc_feature 1..108: note = Description of Artificial Sequence: Synthetic coding sequence
  source 1..108: mol_type = other DNA
atggccaacaagggccccagctacggcatgagccgggaggtgcagccatcacggcttgcatgcttaactcacacaagagtagtcccgtcagctttagccaagttatag

SEQ ID NO: 209142 - DNA, 606 bp, synthetic construct
  misc_feature 1..606: note = Description of Artificial Sequence: Synthetic coding sequence
  source 1..606: mol_type = other DNA
atggccaacaagggccccagctacggcatgagccgggaggtgcagtccaagatcgaaaaaaagtatgatgaggagcttgaggagaggcttgtcgagtggatcatagttcaatgtggccctgatgtaggcagacctgatagaggccggctgggtttccaggtctggctcaagaatggcgtcatactgtccaaactggtgaattctttgtatccggacggctctaagcccgtcaaagtccctgagaatccaccttccatggtgtttaaacagatggagcaggtggcacagtttttgaaagcagccgaggattacggcgtaattaagacagacatgttccagacggtcgatctgttcgaagggaaagacatggctgcagtccagcgaacactgatggccctgggctcattggcggttactaagaatgatgggcactaccggggagatcctaactggtttatgaagaaagcccaagaacataagcgagaatttaccgagtctcaactgcaagagggcaagcacgtgattggactgcagatgggcagtaacaggggagcctcccaggcaggcatgactggctacgggcggccgcggcagatcattagctag

SEQ ID NO: 209143 - DNA, 606 bp, synthetic construct
  misc_feature 1..606: note = Description of Artificial Sequence: Synthetic coding sequence
  source 1..606: mol_type = other DNA
atggccaacaagggccccagctacggcatgagccgggaggtgcagagcaagatcgagaagaaatacgatgaggaacttgaagaacggttggtggagtggataatagtgcagtgcgggcctgatgtgggccggccagatagaggtcgcctggggtttcaggtttggttaaagaacggtgtcatcctgagtaagctagtcaattctctgtaccctgatggctctaaacccgtgaaggtcccagaaaatcccccgtctatggtgttcaagcaaatggagcaggttgcacagtttctgaaagctgccgaagattacggcgtgatcaaaacagatatgttccaaaccgtggacctgttcgagggcaaggacatggccgcagtgcagcggaccctcatggctctaggaagtctggcggtgacgaaaaatgacggccactatagaggagatcctaactggtttatgaaaaaagcgcaggagcacaagagagagtttactgaatcccagcttcaggagggaaagcacgtaattgggctgcaaatggggtccaataggggcgcttcacaagctggcatgacagggtacggccgaccgcggcaaattatatcctag

SEQ ID NO: 209144 - DNA, 276 bp, synthetic construct
  misc_feature 1..276: note = Description of Artificial Sequence: Synthetic coding sequence
  source 1..276: mol_type = other DNA
atggccaacaagggccccagctacggcatgagccgggaggtgcagagcaaaatcgagaaaaagtacgacgaagaattagaggaaaggctggttgaatggatcattgttcaatgtggacctgacgtgggacgacccgaccgcgggagattggggttccaggtgtggttgaagaatggtgtcatcctgagtaagttagttaattcactttatccagatgggtccaagcccgtgaaagtgccggaaaacccaccatcaatggtttttaaacagatgtag

SEQ ID NO: 209145 - DNA, 606 bp, synthetic construct
  misc_feature 1..606: note = Description of Artificial Sequence: Synthetic coding sequence
  source 1..606: mol_type = other DNA
atggccaacaagggccccagctacggcatgagccgggaggtgcagtcaaagattgagaagaaatacgacgaggagttggaagagagactcgtggaatggatcattgtccagtgtggaccggatgtgggcaggccagataggggtcggctcgggttccaggtctggctcaagaatggagtgatcctctctaaacttgttaattccctataccccgatggaagtaaaccggtaaaggtcccggagaacccacctagcatggtctttaagcagatggagcaggtggctcagtttctgaaggccgccgaagactatggagtgatcaagacagacatgttccaaaccgtcgatctcttcgagggaaaagacatggcagctgtccagagaacactgatggccctgggctccctggcggtgacaaaaaacgacgggcattaccggggtgaccctaactggttcatgaaaaaagcccaggaacataaacgcgagttcactgagagccagctacaggagggcaaacacgtgattggactgcagatggggtccaatagaggcgcttcgcaggctggaatgacaggatatgggaggccccgtcagataatctcctag

SEQ ID NO: 209146 - DNA, 606 bp, synthetic construct
  misc_feature 1..606: note = Description of Artificial Sequence: Synthetic coding sequence
  source 1..606: mol_type = other DNA
atggccaacaagggccccagctacggcatgagccgggaggtgcagtccaaaatcgagaagaagtatgatgaagagctggaagagcggctggtagaatggatcatcgtgcagtgtggacccgacgttggaaggcccgataggggacgcctcggctttcaggtttggttgaagaacggcgtgattctaagtaagctggtgaactccctgtaccctgacggatcgaaaccagtgaaagtgccagagaatccaccttcaatggtcttcaaacaaatggagcaggtggcccagtttctgaaagcagccgaggactacggagtcataaaaaccgatatgtttcagactgtagatctgttcgaaggaaaagacatggccgccgtacaacgcaccctaatggcactgggcagcctcgcagttaccaaaaatgatggtcattatagaggagaccccaactggtttatgaagaaagcccaagagcacaagagagaatttaccgaaagtcagctgcaagagggcaaacatgtgatcgggctccagatgggaagcaaccgaggcgcttcccaggcagggatgacaggctacgggaggccacgacagatcattagctag

SEQ ID NO: 209147 - DNA, 600 bp, synthetic construct
  misc_feature 1..600: note = Description of Artificial Sequence: Synthetic coding sequence
  source 1..600: mol_type = other DNA
atggccaaccggggccccgcctacggcctgagccgggaggtgcagcagaagattgaaaaacaatacgacgcagaccttgaacagatccttattcagtggatcactacacaatgtcgcaaggacgttgggcggccgcaacctggtagggaaaattttcagaactggctgaaagacggaaccgtgctgtgcgaacttatcaatgcactttatcctgagggtcaggcgcccgtgaaaaagatccaggcttccaccatggccttcaagcagatggaacaaatctctcaatttcttcaggcagcggaaaggtacgggatcaataccaccgacatctttcagacagtggatttgtgggaggggaagaacatggcctgtgtgcaacggacacttatgaatctcggtggtttagccgttgcaagggacgatggcttatttagtggggaccctaactggtttcctaaaaagagcaaagaaaatccgaggaacttctccgataatcaattgcaggaagggaaaaatgtaattggactgcagatggggacgaacagaggagcaagtcaggccggaatgaccggatatggcatgcctcgccagattctgtag

SEQ ID NO: 209148 - DNA, 663 bp, synthetic construct
  misc_feature 1..663: note = Description of Artificial Sequence: Synthetic coding sequence
  source 1..663: mol_type = other DNA
atgagcgccttcagcctggccctggccctggtgagcagcccccagcctcccccacccatcggaatggcgaatcgggggccagcctacgggctgtcccgtgaggttcagcagaagattgaaaaacagtacgacgctgatctggaacagatcctgatacaatggatcacaacccagtgccggaaggatgtgggacggcctcagccaggacgggagaactttcagaattggctgaaagacggcactgtgctgtgcgaactcatcaacgctctgtacccggaagggcaggcaccagttaaaaagattcaagcctcaacaatggcatttaagcaaatggagcagatatctcagttcctgcaggcggctgagaggtatggcatcaataccaccgacattttccaaaccgttgacctgtgggaaggcaaaaacatggcttgcgtgcagaggactttgatgaatcttggtgggctggctgtcgctagagacgatggtttgttttctggggatcctaattggttcccgaaaaaaagcaaagaaaatccccgcaacttctccgataaccagctacaagagggcaaaaacgtgatcggactgcagatgggcacaaacagaggtgcctctcaggcaggaatgacgggatatggtatgccaagacaaattctgtag

SEQ ID NO: 209149 - DNA, 600 bp, synthetic construct
  misc_feature 1..600: note = Description of Artificial Sequence: Synthetic coding sequence
  source 1..600: mol_type = other DNA
atggccaaccggggccccgcctacggcctgagccgggaggtgcagcagaaaatcgagaagcagtatgacgcagacctcgaacagattctgattcagtggattaccacacagtgtcgcaaggacgtgggacgcccgcaaccaggaagagagaacttccaaaattggctaaaggacggcacagtcctgtgcgagttaatcaacgcgctgtatcctgagggccaggcccctgttaagaagatccaagcgtctaccatggcctttaagcagatggaacaaatctcccagttcttgcaggcagccgaaaggtatggaattaataccacagacatctttcagacagtggacctgtgggaagggaagaatatggcctgtgtgcagagaaccctcatgaacctagggggcctggcagtggcgcgtgacgacggtcttttctctggggatcccaattggttccccaaaaagtctaaggagaatcctcggaatttctccgataaccagttgcaggagggaaaaaacgtgatcgggctacaaatgggcacaaaccgcggtgcgagccaggcaggtatgacagggtacggaatgcccagacagattctgtag

SEQ ID NO: 209150 - DNA, 564 bp, synthetic construct
  misc_feature 1..564: note = Description of Artificial Sequence: Synthetic coding sequence
  source 1..564: mol_type = other DNA
atggccaaccggggccccgcctacggcctgagccgggaggtgcagcagaagatcgaaaagcagtatgatgcggacttggagcagatcctcatacagtggattaccacacagtgccggaaggacgtgggccgcccccagcccgggcgcgaaaactttcagaattggttgaaggacggcaccgtactctgcgaacttatcaacgcactctatcccgaaggacaggcacctgttaagaagattcaggcgagtacaatggcctttaaacagatggagcaaatttctcagttcctgcaggctgcagagaggtacggtatcaataccactgacatctttcagactgttgatttgtgggagggcaagaacatggcatgtgtccagcgtactttgatgaatctgggagggctggccgtcgctcgcgatgacgggttgtttagtggagatcccaattggtttcctaagaagagcaaagaaaacccgcgcaacttctcggacaaccagctccaggaggggaaaaacgtcattggcctgcaaatgggcactaatcgtggagccagtcaggcatag

SEQ ID NO: 209151 - DNA, 3861 bp, synthetic construct
  misc_feature 1..3861: note = Description of Artificial Sequence: Synthetic coding sequence
  source 1..3861: mol_type = other DNA
atgagccacctggtggaccccaccagcggcgacctgcccgtgcgggacatcgacgcaattccactggtgttgcctgcttcaaaaggcaagaatatgaaaacacaacctcccctgagccggatgaacagggaagagcttgaagactccttctttcgactgcgtgaagaccacatgcttgttaaagaactgtcctggaaacagcaggatgagattaagaggctgcgaacgacactgctgaggctgacagccgccggtcgagatttgcgcgtggccgaggaggctgctccactttcggagaccgctcgaagagggcagaaagccgggtggagacaaaggctgagcatgcatcagagaccacaaatgcatcggctccagggccacttccattgtgttggtccagcttctcccagaagagctcagccacgggttcaggtggggcatcggcaacttcatacagcaggtgccccggtacccgaaaaacctaagaggggtccacgcgatcgattgagttacactgcaccaccaagcttcaaggagcacgcaactaacgagaataggggcgaggtggcatctaagccaagtgaactcgtaagtggttccaactccataatctcctttagctctgtcatttccatggccaaaccaatcggactctgtatgcctaacagcgcacacatcatggcttccaacacaatgcaggtagaggagccgcccaaaagcccggagaagatgtggcccaaggatgaaaattttgagcagcggagcagcctggagtgtgctcagaaggccgcggaactgcgggccagcatcaaggagaaagtcgaactcattaggctcaagaagttgctccacgagaggaatgcatctttggtgatgacaaaggcccagctcacagaggtgcaggaagcctgcacttttttgctcacacagaatcagggtatcttatcagccgcacatgaggcgcttctgaagcaggtgaacgagctcagggcggagctaaaagaagaatcaaaaaaagccgtttcactcaaaagtcagctcgaagatgtgagcattctgcaaatgacactaaaagaattccaggaacgggtggaggacttggaaaaagaaaggaagctcttgaatgataattatgataagctgctcgagtcaatgttggatagttcagattcttcatctcaacctcattggtcgaatgaactcatagctgagcagttgcaacagcaggtatctcagctccaggatcagctggacgccgaattagaggacaagcgaaaggtattgttagagttgagcagggaaaaggcccagaacgaggatttgaaacttgaggtaacgaacatccttcagaagcacaaacaggaagtcgaactcctgcagaacgccgctacaattagtcagcctcccgaccggcaaagtgaaccagcgacccatccagcagtcctccaggaaaacactcaaatcgagccgagtgagcctaagaatcaggaagaaaagaagctgagccaagtcctgaacgaactgcaggttagccatgctgagaccacactggaattggaaaagactcgggatatgcttatcctccaaaggaagatcaatgtttgctatcaagaggagcttgaagctatgatgaccaaggctgacaacgacaatagggatcacaaggaaaagctcgagaggcttacgcgcttgctcgacctgaagaataacagaatcaaacagctggaagggattttaaggagccacgatttgccaacctctgagcagctaaaggatgtggcttacggaacaagacctctgagtttgtgcctggagaccctgccggcccacggtgatgaagataaggtcgatatatctctcctgcatcaaggagaaaacctcttcgaactgcacatccaccaagcatttctcacatctgccgcgcttgcccaggccggagacacccagcccactactttctgcacctatagtttctatgacttcgagactcattgtacgccgcttagcgtgggaccacagccgctgtacgattttaccagccagtatgtgatggagactgatagcctctttttgcattatctgcaggaggcctccgctagacttgatattcaccaggctatggcaagtgaacatagtacactggcagctggatggatttgcttcgatagagtcctcgaaactgttgagaaagtgcatggtctcgctacgctgatcggcgctggtggcgaagagttcggcgttctggaatattggatgagacttagatttcctattaagccctcccttcaagcttgtaataagcgaaagaaagctcaagtgtatctgagtacggacgtgctgggtggtcgcaaggctcaggaggaagagttcagaagcgaaagctgggagccacaaaacgagctgtggattgaaatcacaaagtgctgcggcctgaggagcagatggcttggcacacagccgtcaccctatgcagtttacaggtttttcacttttagcgaccatgacaccgccatcattcctgcatcaaacaatccctattttcgggaccaggcccggttcccggtgctggtcacctctgacctggatcactacctgcggagggaggccttgtctatccacgtcttcgatgatgaggatctggaacccggctcctatttggggcgcgctagggtccccctgctgcccttagcgaagaacgagtccatcaagggggattttaacttaacggatcccgcggagaagcccaacggtagtatccaggtgcagttggactggaaatttccttacatacctcccgagagcttcctgaagcctgaagcccagacaaagggtaaggatacgaaagacagctcaaaaatcagctccgaggaagagaaagcctcctttccgagccaggatcagatggctagcccagaggtgcccattgaagccggtcagtatagaagcaaacggaagccgccccacggaggcgagcggaaggagaaggaacaccaggtagtgtcgtattctcgccgcaagcacggtaaaaggatcggcgtgcagggaaaaaacaggatggagtaccttagcttgaacatactcaacggcaatactccagagcaggtcaactacactgaatggaagttttcggaaactaattctttcataggcgacgggttcaagaaccagcacgaagaggaggagatgactctctcccattctgccctaaaacagaaggagcctctgcatccagtgaacgacaaagagtcgtcagagcagggctcagaggtgtcagaggcccagacaaccgacagcgatgacgtgatagtgcctcctatgtctcagaaatacccaaaagcagattcagagaaaatgtgtatcgaaatcgtgtcgttggcattctacccggaggctgaagttatgtccgatgaaaatattaaacaggtatatgtggaatacaagttctatgatcttcctctgtccgaaaccgagactcctgtgagcctcaggaagcccagagccggcgaggagatccactttcacttttccaaggttatagatctggatccccaggagcagcagggaaggcgcaggtttctgttcgacatgctgaatggccaggatccagaccaaggccatctcaagtttaccgtcgtgagcgatccacttgacgaggagaaaaaggagtgcgaggaggtcgggtacgcctacctgcagttatggcaaattttggagtctggccgcgacattctggaacaggagttggacattgtatccccggaggacctggccacacccatagggagactgaaagtctctcttcaggccgccgccgtcctgcacgctatttacaaagagatgactgaggaccttttcagttag

SEQ ID NO: 209152 - DNA, 1128 bp, synthetic construct
  misc_feature 1..1128: note = Description of Artificial Sequence: Synthetic coding sequence
  source 1..1128: mol_type = other DNA
atgaagcggcccgacctgcccagcggcttcgacggctggcaggtggtagatgcaacccctcaggagacctctagcgggattttttgttgtggcccctgcagcgtggagtcaattaaaaatggtttggtatatatgaagtatgacactccatttatcttcgcagaggtgaacagcgataaggtgtattggcaacggcaggacgacggttcattcaaaattgtgtatgtggaagaaaaagcaatcgggaccctgatagtcaccaaagctatctcatctaacatgcgcgaggacatcacatacttgtacaagcatcctgaagggagcgacgcagaacggaaagcagtcgagactgccgctgcacacggatcaaaaccgaatgtctacgccaacaggggcagcgctgaggacgtcgccatgcaagtggaggcacaggatgccgtgatggggcaagatctaatggtgtctgtgatgctgatcaaccacagttccagcagacgaactgtcaaattacacctctatttgagcgtgaccttctacacaggagtgagtgggactatctttaaagagaccaaaaaggaggtagagctagcacctggagccagtgacagagtgactatgcccgtcgcctataaggagtatcggccacacctggtcgatcagggcgcaatgctactgaacgttagtgggcacgtcaaagaaagtgggcaggtgttggctaagcagcacacctttcgcctgaggaccccggacttgtctctcaccctgctcggtgccgccgtggtgggccaggagtgcgaagtgcagatcgtttttaagaacccacttccagtcaccctgaccaatgttgtctttaggctcgaaggctcagggcttcaacgcccaaaaattttgaacgtgggtgacatcggcgggaatgagaccgtgactcttagacaaagtttcgtgcctgtgaggcccggcccaagacagctgatcgcttctctggactcaccacagctctctcaggtccacggcgtcatacaggttgatgtggccccagcccccggtgatggaggattcttctcggatgccggtggcgactctcatctaggagaaactattcctatggcttccagaggaggagcctag

SEQ ID NO: 209153 - DNA, 408 bp, synthetic construct
  misc_feature 1..408: note = Description of Artificial Sequence: Synthetic coding sequence
  source 1..408: mol_type = other DNA
atgatggacggcccccggagcgacgtgggccggtggggcggcaaccctctgcagcctcccacgaccccctctccagaacccgaaccagaacccgacggaaggtctcgtcggggcggagggaggtccttctgggcgcgctgttgcggttgttgctcgtgccgaaatgccgccgacgacgactggggtccagagccctctgactctaggggcagagggtcctcatctggcacccggaggcctggcagtcgaggctcagacagcaggcgccccgtgtcccgagggtctggagtgaacgctgctggggacgggactattcgagagggaatgttggttgttaatggggtggacctcctgtcgagccgcagtgatcagaaccgcagggagcaccacaccgatgagtacgagtag

SEQ ID NO: 209154 - DNA, 129 bp, synthetic construct
  misc_feature 1..129: note = Description of Artificial Sequence: Synthetic coding sequence
  source 1..129: mol_type = other DNA
atgatggacggcccccggagcgacgtgggccggtggggcggcaaccccctgcagccacccactacccctagtcccgagcccgagccagaaccagacggtcggtcgcgccgagggggcggccgcagctag

SEQ ID NO: 209155 - DNA, 198 bp, synthetic construct
  misc_feature 1..198: note = Description of Artificial Sequence: Synthetic coding sequence
  source 1..198: mol_type = other DNA
atgatggacggcccccggagcgacgtgggccggtggggcggcaacccccttcagcccccaacaaccccctccccggagccggaacccgaacccgatggtagatccaggagaggaggtgggaggagcttctgggcacgctgctgcggctgctgctcttgcaggaacgcagctgacgatgactggggcccggaaccctag

SEQ ID NO: 209156 - DNA, 153 bp, synthetic construct
  misc_feature 1..153: note = Description of Artificial Sequence: Synthetic coding sequence
  source 1..153: mol_type = other DNA
atgatggacggcccccggagcgacgtgggccggtggggcggcaacccactgcaacctcccacaactcccagcccagaaccagaacctgagccagatggccgctcccgtcggggcggaggccgatccttctgggctagatgttgtggttgttag

SEQ ID NO: 209157 - DNA, 30 bp, synthetic construct
  misc_feature 1..30: note = Description of Artificial Sequence: Synthetic coding sequence
  source 1..30: mol_type = other DNA
atgatggacggcccccggagcgacgtgtag

SEQ ID NO: 209158 - DNA, 2064 bp, synthetic construct
  misc_feature 1..2064: note = Description of Artificial Sequence: Synthetic coding sequence
  source 1..2064: mol_type = other DNA
atggccgaggagctggtgctggagcggtgcgacctggagctggagaccaacggcagggaccatcacacagccgacctgtgtcgggagaaactggttgttagaaggggccagcctttctggctaactcttcactttgagggaagaaactacgaagctagtgtcgactccttgaccttcagcgtggtgactggaccagcacccagtcaagaagccggcaccaaggctcgttttcccctgagggacgccgtggaggagggggactggaccgccacagtcgtcgaccagcaagactgcacgctcagtctccagctgactacacccgctaacgccccaatcggcctgtatcggctgagcctggaggcctccacaggatatcaaggctcgtcatttgtgttggggcactttatcttgctgttcaacgcctggtgccccgcagacgctgtctaccttgatagcgaggaagagagacaggagtacgttctgacacagcagggttttatatatcaaggctctgccaagttcattaaaaacatcccatggaatttcgggcaattcgaggacggcatactcgatatctgcttgatactgcttgatgttaaccctaaattcctaaagaacgcggggcgcgattgctctagacgcagctccccagtatacgtggggagggtcgtctcaggtatggtcaactgcaacgacgaccagggtgttctgctgggcagatgggacaacaactatggagatggggtttctcccatgtcttggatagggtcagtggatatactgcgcagatggaagaatcatgggtgtcagcgggtgaagtacggtcagtgttgggtgtttgccgccgtcgcctgtactgtcctccgttgcctcgggatcccgaccagagttgtgacgaattataattcagcccacgatcaaaactccaatttactgattgaatacttcagaaatgagtttggagagatacagggagacaaatccgaaatgatttggaacttccactgttgggtggagagctggatgacgcgtcccgatctacaaccgggttacgaggggtggcaggcactcgatcctactcctcaggaaaaaagtgagggcacctattgctgcggtccagtgccagtcagagccattaaggaaggagatttgagcactaagtacgacgccccctttgtatttgcggaggtcaacgctgacgttgtcgattggatacagcaagacgacggaagtgtgcataagagcattaatcggtctttgattgtggggcttaaaatcagcacaaaatctgtcggccgggatgaacgggaagacattactcacacttacaagtacccagagggctccagcgaggagagagaggcttttaccagagctaatcatttgaataaacttgccgaaaaggaggagaccggcatggcaatgaggatcagagtgggacagtctatgaacatggggagtgatttcgacgtgttcgcgcatatcactaataataccgctgaggaatacgtgtgcaggcttcttctctgtgcaagaaccgtgtcttataacggtatcctgggacccgagtgtggtaccaagtatttactcaacctgaacctggagcccttcagtgaaaagagtgttccactatgtattctgtatgaaaaatatcgggactgtctcactgagtcaaatctcataaaggtcagagcacttctggtggaacccgtgatcaactcctatttactggcagagcgggatctttacctggaaaatcccgaaattaagatacgcatccttggagaacctaaacagaagcgcaagctcgtagcagaagttagcctgcagaacccactacccgttgccctagaaggctgtacgttcaccgtggaaggagcgggacttactgaagagcagaaaaccgtggagatacctgatcccgtggaggcaggagaggaggtcaaagtgagaatggaccttctcccattgcacatgggcttgcacaagctggtggttaattttgaaagcgataaactcaaagctgtgaagggattccggaatgttatcatcgggcccgcctag

SEQ ID NO: 209159 - DNA, 846 bp, synthetic construct
  misc_feature 1..846: note = Description of Artificial Sequence: Synthetic coding sequence
  source 1..846: mol_type = other DNA
atggccgaggagctggtgctggagcggtgcgacctggagctggagacaaacggacgagatcaccatactgctgacctctgcagagaaaagctggtggttcgccggggtcaacccttttggctgactctccattttgaaggacggaactatgaagcttccgtggattcactgacgtttagtgtggtgactggacctgccccatcacaagaggccggtaccaaggctcggttcccgctcagagacgcggtggaagaaggtgactggactgctacagtggttgaccagcaggattgcaccttgtccctgcaactgaccactcctgcgaatgcccctattggcctttaccgactgtctcttgaagcctccactggttatcaagggagtagctttgtgctagggcatttcattttgctcttcaatgcatggtgcccggcggacgcggtgtacctggacagcgaggaggagcgtcaagaatatgtgctgactcagcagggatttatttaccagggcagcgcaaaatttattaagaatattccttggaatttcgggcagtttgaagacggaatcctggacatatgtctcatcttgctggatgtgaatcccaaattcttaaaaaacgccgggcgtgactgctcgcggaggagctctcccgtatacgtggggagggttgtctctgggatggttaactgtaatgacgatcagggggtgttgctaggaaggtgggataacaactacggtgacggcgtgtctcccatgtcctggatcggttctgtggatattcttcgccgatggaagaatcatgggtgtcagagagtaaaatacggccaatgctgggttttcgcctag

SEQ ID NO: 209160 - DNA, 483 bp, synthetic construct
  misc_feature 1..483: note = Description of Artificial Sequence: Synthetic coding sequence
  source 1..483: mol_type = other DNA
atggccgaggagctggtgctggagcggtgcgacctggagctggagactaatggacgggaccatcatacagccgatctctgtcgcgagaagctcgttgtccggcgaggtcagcctttttggctgaccttgcacttcgaaggaagaaattatgaggcttcagtggacagcctaactttctcagtcgtcaccggcccggctccttcccaagaagctggcactaaagccagatttcctttgcgcgatgctgtggaggagggcgactggacggccacagtcgtcgatcagcaggattgtacgctctctttacaactgaccacaccagcgaacgcacccattggactctacagactctccctggaagcgtctaccggataccagggcagcagttttgtactggggcacttcatactgcttttcaacgcctggtgtccagcagacgctgtgtaccttgatagcgaagaggagagacaggagtatgtctag

SEQ ID NO: 209161 - DNA, 1821 bp, synthetic construct
  misc_feature 1..1821: note = Description of Artificial Sequence: Synthetic coding sequence
  source 1..1821: mol_type = other DNA
atggccgaggagctggtgctggagcggtgcgacctggagctggagacaaacggtagagaccaccacactgccgatttgtgtagagagaagctggtggtgcgaaggggccagccgttttggctgaccttacactttgagggtcgaaactatgaagcatccgtcgatagcctgacctttagtgttgtgactgcagatgcagtttatctggactccgaggaggaacgtcaagagtacgtcctgactcagcagggatttatttatcagggaagcgccaagtttatcaagaacatcccatggaacttcggccagttcgaagacggtatcttagacatttgccttattctgttggacgtgaacccaaagtttctcaaaaatgctggaagggattgttcgcggcgctcttctcccgtctacgtggggcgcgttgtgtctggcatggttaactgtaatgacgaccagggagtgctcctggggcgatgggacaacaattatggggacggcgtgtctcctatgtcatggataggatccgtggatattttacgtcggtggaagaaccatggctgccagcgggtgaagtatgggcagtgttgggttttcgcagccgtggcttgtactgtccttcgttgcctgggtatacccacgcgggtagtgaccaattataacagtgcacatgaccagaattccaatctgctcatagaatattttcggaatgaattcggagaaattcagggggacaaatccgagatgatctggaactttcattgttgggttgagtcctggatgacccgtccggacctccaaccgggttacgaggggtggcaggccctcgatccgaccccccaggaaaagtcggaaggaacatactgttgtgggcccgtgcccgtgagggccattaaagagggggatctgtcaacaaaatatgacgccccatttgtatttgcggaggtcaatgcagacgttgttgactggatccaacaggatgacggcagtgtgcacaagtctatcaataggtctctgattgttggtctgaaaatctccacaaagtctgttgggcgggatgagagggaggatataacacacacgtacaaataccccgagggctcttcagaggaacgcgaggccttcacgagagcaaatcatcttaataaactggccgaaaaggaagagacaggaatggcaatgcgcatcagggtaggccagtccatgaacatgggctccgattttgatgtatttgcacacattactaacaatactgccgaggagtacgtgtgccggctgcttctgtgtgcccgaacggtgagctataatgggattctgggtcccgagtgcggcacgaagtacctgctcaatcttaatcttgaacccttctctgagaagtccgtgccactctgtattctgtacgaaaagtatagggactgcctgactgagtccaatctgatcaaggtgagggccttgttggtcgaacctgtcattaattcatatctgttagcagaacgtgatctttaccttgagaacccagagataaagattaggatcctcggggagcctaagcagaaacgcaaactcgtggcagaagtgtctttgcagaaccccctccctgttgccctggagggatgtacattcaccgtcgagggggccggcctcaccgaagagcagaagaccgtggaaattccggatcctgtagaagctggcgaagaggtgaaggttagaatggacctgctgccccttcacatgggcctgcataaacttgtagttaattttgaatctgacaaactcaaagccgtgaaaggatttcgaaatgtgatcataggacccgcatag

SEQ ID NO: 209162 - DNA, 1884 bp, synthetic construct
  misc_feature 1..1884: note = Description of Artificial Sequence: Synthetic coding sequence
  source 1..1884: mol_type = other DNA
atggccgagggccccgcccccagccaggaggccggcaccaaggcccgctttcccctgagagacgcagtagaggagggagattggactgcaactgtggtggaccaacaagactgtacactcagcctccagcttaccacccctgccaatgctcccatcggattgtacaggctttccttggaggcttccactggataccaagggtctagctttgttctaggccactttattctgctatttaacgcctggtgtccagcagatgctgtttatctggactccgaggaggagcgccaagagtacgtactaacacagcaggggttcatctaccagggatcagccaagtttatcaagaatattccatggaacttcggccaatttgaggatggcatcctcgacatctgcctgattttgctggatgtaaatccaaaatttctgaaaaatgctggaagagactgttctcgccgatcctcccctgtttacgttggaagggtcgtttccggaatggtgaactgtaatgatgatcagggagtcttgttgggccgctgggacaataattatggcgacggcgtgtctcccatgagctggatcggctccgtcgatatacttaggaggtggaagaatcacggctgccagagagtgaagtatgggcaatgctgggtctttgccgcagtggcgtgcactgtgctccgctgcctcggcattcccacgcgagtagtgaccaactacaactcagctcacgaccaaaattccaacctgctgatcgaatacttcagaaacgaatttggagaaattcaaggggacaaatccgagatgatttggaacttccattgttgggtagaaagctggatgacgcggcccgacctccagcccggctacgagggctggcaggctctggacccaacaccccaggagaagagcgaaggaacctattgttgtgggccagttcctgtcagagctatcaaggagggtgatctaagcactaagtatgacgcaccctttgtttttgcagaggtgaacgccgatgtggtcgactggattcagcaggacgatggtagcgtacacaaaagtattaaccggtccctgattgtgggcctgaagatctcaactaaatccgtaggacgggatgagagggaagacattacccacacttacaagtatccagagggttctagcgaagagagagaagcctttacccgcgccaaccatctgaacaaattagcagagaaagaagaaacaggtatggccatgaggattcgggttgggcagagcatgaatatgggttcagatttcgacgtgttcgctcacattactaacaacacagctgaagagtacgtgtgccgcctgcttctatgcgcacgaaccgtttcctataacggaatactggggcctgagtgcggaacaaagtatttgctcaatctcaatctcgagccttttagcgagaagtccgttcctctttgcattctgtacgagaaatatagagactgcctgacggaatccaatctcatcaaagtgcgtgctttgctagtggaacccgtgataaacagttacttgctggcggaaagagatttgtatcttgaaaacccggaaatcaagattcgcattctgggtgagcccaagcagaagcggaagctggttgccgaagttagcttacaaaatcccctgcctgtggccctcgaaggctgcacatttacagttgagggcgcaggcctgaccgaagaacaaaagacggtcgagattccggaccccgtagaagctggcgaggaagtgaaagtgcgcatggatcttctgcctctgcacatgggcctgcataagctcgttgtaaactttgagtcagataaacttaaagccgtgaaggggttcaggaatgtcattatcggccctgcatag

SEQ ID NO: 209163 - DNA, 2082 bp, synthetic construct
  misc_feature 1..2082: note = Description of Artificial Sequence: Synthetic coding sequence
  source 1..2082: mol_type = other DNA
atggccgccctgggcgtgcagagcatcaactggcagaccgccttcaatcggcaagcccatcacaccgacaagttctctagccaggagcttattcttaggcgaggccaaaatttccaagtactgatgataatgaataaaggtttgggcagcaacgagcgtctggaatttattgtgtctacaggtccttatccctccgaatctgccatgacaaaggcggttttcccgctctctaatggctcttcgggcgggtggagcgcagtgctccaggctagcaacggaaatactctgaccatttccattagttccccagcctctgcccccatcggaagatataccatggcgctgcagattttcagtcaaggcgggattagctcggtcaagctaggcacctttattcttttgtttaacccgtggttaaatgtcgactccgtcttcatgggcaaccatgctgaacgagaggagtatgtccaggaagacgctggcataattttcgtaggtagcaccaatagaattggaatgatcgggtggaacttcggccagtttgaggaagatattctctcaatatgcctgtccatcttggacaggtccctgaatttccggcgcgacgctgcaacagacgtcgcctcccggaatgatccaaaatacgtcgggagagtgctgtctgccatgattaatagcaatgacgacaacggagtgcttgccggaaactggagcgggacctacaccgggggcagagatcccagatcatggaacggaagcgtggagatcctgaaaaactggaaaaaaagcggtttctctcctgtccggtacgggcagtgctgggtgttcgcggggaccctcaacactgcacttagatccttaggcattcctagtcgggtcattaccaactttaatagcgctcatgacaccgaccggaatctctccgtagacgtgtattacgatcctatggggaaccctctggacaaaggtagcgacagtgtgtggaactttcatgtgtggaatgagggttggttcgtacggagcgatctgggcccgagctatggagggtggcaggtgcttgatgccactccgcaggaacggtcccagggagtgttccagtgtgggccagcttctgttattggcgtgagagagggcgacgtgcagctgaattttgatatgccattcattttcgccgaggtcaacgctgatcggattacatggctttacgataacactaccggcaagcagtggaagaactccgtgaattcccacactatagggcggtacatatccaccaaagccgtaggctccaacgcacggatggatgtaacagacaagtacaaatatcctgaaggctccgaccaagaacgacaggtgtttcagaaggcacttggtaaactgaaacctaatacgccttttgctgccaccagtagcatgggcctggaaacagaagagcaggagccctctattatcgggaaactaaaagtggccgggatgctcgcagtgggtaaggaggtaaacttggtactcctgctcaagaatctatccagggacacaaagacggtgaccgtaaacatgactgcatggacaattatttacaacgggacactggtgcatgaagtctggaaggattccgctacaatgtcactggatccggaggaagaagccgagcaccccatcaagattagctatgcccagtacgagaaatacctgaaaagtgataacatgatcagaattaccgccgtatgcaaagtgcctgacgaatctgaagtcgttgtcgaacgagacattattttagataacccaacgctcaccctggaggtgctgaacgaggctcgcgtgcggaagcccgtgaatgtgcagatgttgttttccaacccactggacgaaccagttcgagactgcgtgctaatggtggaggggagcggcttgctcctggggaacctgaagatcgatgtgccaactctcggacccaaggagggcagtagggtccgcttcgatattcttccctctaggtctggcaccaaacagctgttagcagatttctcctgcaacaaattccctgcaattaaggccatgctatcaatcgacgtcgcagagtag

SEQ ID NO: 209164 - DNA, 1602 bp, synthetic construct
  misc_feature 1..1602: note = Description of Artificial Sequence: Synthetic coding sequence
  source 1..1602: mol_type = other DNA
atggccgccctgggcgtgcagagcatcaactggcagaccgccttcaaccgccaggcgcaccatactgataaattttcttcccaggaactcatactcagacgtggccagaattttcaagtgctgatgatcatgaataaagggctgggctccaatgaacgcctcgaattcatcgtaagcacgggaccctatccctccgaatcagctatgacaaaagcagtgtttcctctgtccaatggttcttccgggggatggagcgccgtattgcaggccagtaacggtaataccctgacaatatcaatcagcagcccagcgtccgccccaattggccgctacactatggcattgcagatattctcacaaggagggatctcgtctgtgaaactgggcactttcatactgctttttaatccttggttaaacgtggacagtgtctttatggggaaccatgcagagagggaagagtatgttcaggaagatgcaggcatcatctttgtcggtagcaccaaccggattggcatgatagggtggaatttcgggcaattcgaagaggacattctgagtatttgtctctcaatcctcgataggtctctgaatttccgtcgcgacgccgccaccgacgtcgcctcaaggaacgatccaaaatacgtgggccgagtcctctccgctatgatcaatagcaacgacgataatggcgtgctggctggcaattggtccgggacctacacaggagggagagacccccgcagctggaatggctccgtcgagatactgaagaattggaaaaagagtggattttcacccgtaaggtacgggcagtgttgggtgttcgctggcacccttaataccgccttacgctccctcggcatccctagtcgagtcattactaactttaactctgcccatgacaccgaccgcaatcttagcgtggacgtgtactacgatccgatgggcaatcccctggataaagggagcgattctgtgtggaacttccatgtgtggaacgagggatggtttgtacgctcggatctggggcccagctacggcgggtggcaggtgttagacgctacccctcaggagagatcccagggcgtatttcagtgtggccctgcatccgtgattggagtaagagaaggggacgtccagctcaatttcgatatgcccttcatcttcgccgaggtgaacgcagatagaattacttggctgtacgataatacaaccggcaaacagtggaagaattccgtgaacagccataccatcgggagatatatttcgaccaaggcagttgggtctaacgcccgcatggatgttactgataagtataagtacccagaggggagcgaccaagagcggcaggtgtttcagaaggcactagggaaattgaagcctaatacccctttcgctgctacttcttccatggggctcgagaccgaagagcaagagccctctataatcggcaaactcaaggtcgccggaatgttggccgtcgggaaagaagtgaatttggtgctgctactgattccccatgccttgcagtgctgtcgaatggactggcccctcacacaagggctcagcaagcgggacactggggagaagctggtttag

SEQ ID NO: 209165 - DNA, 2055 bp, synthetic construct
  misc_feature 1..2055: note = Description of Artificial Sequence: Synthetic coding sequence
  source 1..2055: mol_type = other DNA
atgatggacgccagcaaggagctgcaggtgctgcacatcgacttcctcaatcaggacaatgcagttagtcatcatacctgggagttccagacctcctcccctgttttccgacgggggcaagtgtttcacctgcgcctggtcttgaatcagccacttcagtcctaccatcagctgaagctggagttctcaaccggtcccaacccgagtatcgcaaaacacacccttgtggtacttgatccaaggacgccaagtgatcactataactggcaggcaacattacaaaatgaaagcgggaaggaagtgaccgttgcggtaacaagttcaccaaatgccatcctgggcaagtaccagctgaatgtgaaaacaggaaaccacattctgaaaagcgaagaaaacatcttatatcttctatttaacccgtggtgtaaagaggacatggtatttatgcctgatgaagacgagcgaaaagaatatatactgaacgatactggctgccattacgtgggagctgctcgtagcattaaatgcaaaccgtggaatttcggacagtttgagaaaaacgtgctggactgctgtattagcctcctcaccgagtccagcttaaagcccaccgaccgacgcgatccggtgctcgtgtgcagggctatgtgtgcaatgatgtcattcgaaaagggccagggtgtccttataggcaactggactggcgactatgaggggggaactgccccctacaagtggaccggatccgcgcccatcctgcagcagtactataataccaagcaggcagtctgttttggacagtgttgggtgtttgcgggtatactaaccactgtgttgcgcgccctgggcataccagcacgatccgtcaccggcttcgacagtgcacatgatactgaacgaaacttgactgtggacacttacgtaaatgagaacggtgagaagattacgtctatgacacatgactccgtgtggaattttcacgtgtggaccgatgcatggatgaaacggcccgatctgcctaaggggtatgacgggtggcaggctgtggacgccactccacaggaacgcagtcaaggcgttttctgttgtgggccttcccccctcaccgccataagaaagggggacatcttcatcgtttacgacacgcgcttcgtttttagtgaggtcaacggtgaccgtttgatctggctggtcaaaatggtgaacggccaagaggagctgcatgtgatctctatggaaacaactagtataggaaagaatataagcaccaaggcagtaggccaagacaggagaagggatatcacctatgagtacaagtaccccgaaggtagcagcgaagagagacaggtgatggaccatgcgtttctccttcttagctctgagcgggagcacagacgacctgtcaaggagaacttcctgcatatgtctgtgcagagcgatgacgtgctgctcggcaatagcgtgaacttcacagtaatcctgaaaaggaaaaccgctgctttacagaacgttaacattctcggatcctttgaactccagttgtacacgggaaaaaagatggccaagctttgcgatctgaataagacttcccagattcagggacaagtgtctgaggtgactttgaccctggactcaaagacctacattaattcacttgccattctggacgatgagcccgttattagaggctttatcatcgcagaaatagtggagagcaaagagattatggctagcgaagtttttaccagcttccagtaccccgaattctcaatcgagctgccgaatactggaagaataggccagctgctcgtttgcaattgtatttttaaaaataccctggcgattccattgaccgatgtgaagttcagcctggaatccctagggatcagtagccttcagactagcgaccacggtacagtgcagcctggcgagacgatccagagtcagataaaatgcacccccatcaagaccgggccaaaaaagttcatagtaaaactatcctcgaaacaggtaaaagaaataaacgcccaaaaaatcgttcttatcaccaagtag

SEQ ID NO: 209166 - DNA, 1626 bp, synthetic construct
  misc_feature 1..1626: note = Description of Artificial Sequence: Synthetic coding sequence
  source 1..1626: mol_type = other DNA
atgttcagctggatgggccggcaggccggcggccgggagcgggccgggggggcagatgctgtccaaactgtcacagggggactgagatctctgtaccttcgaaaggttttacccctggaagaggcatatagattccacgaattccatagtcctgctctggaagacgctgacttcgagaacaagccaatgatcttactggtaggccagtattctacaggtaagactacattcattcgctatttgctggaacaggacttccctgggatgaggatcggtcctgaacccacaactgattcattcattgctgtgatgtatggtgagacagagggtagtactcccgggaacgccctggtggtggaccctaaaaagccatttaggaagctgtccagattcgggaacgcttttctgaaccgctttatgtgctctcagctgccaaaccaagtcttgaaaagtatcagcgtaatcgatagccctggcattctcagtggagaaaaacagaggatatcccgaggatatgatttctgccaagtgctgcagtggtttgcagagcgagtggaccgaatcatccttttgtttgatgcgcataaactagatatttccgacgagttctcagaagccatcaaagccttcagaggtcaggacgacaagatccgtgtcgttttgaacaaagccgaccaggttgacacgcagcagctcatgcgagtgtacggagccctcatgtggtctcttggaaaggttattaatacccccgaagtgttgcgcgtgtacatcgggtccttctgggctcaacccctgcagaacactgataataggagactttttgaagcggaagctcaggatctgttccgggacattcagtccctgccccagaaggccgctgtgcgaaagctgaatgacttgatcaaacgcgcacgcctggccaaggtccacgcatatattatttcgtatcttaagaaggagatgccaagcgtgtttggcaaagaaaacaagaaaagagaactaatctcccggcttcccgagatttacatccagcttcagagggagtaccagatttccgcaggcgatttcccggaagtgaaggccatgcaggaacagctggagaattacgattttacaaaatttcatagcctgaaacccaagttgattgaggccgtggataatatgctctcgaataagatatccccactcatgaacctgattagccaggaggagactagcacccccactcagttggtgcagggtggcgccttcgacggcacaactgaggggccatttaatcaggggtacggcgagggtgccaaggaaggtgccgacgaggaagagtgggtggttgcaaaggacaagcctgtgtatgatgaactgttttatacactttctcctatcaacgggaagatctcaggcgttaacgccaagaaggaaatggtaactagtaaattgcccaattccgtgctgggcaagatatggaagttggccgattgcgactgcgacgggatgctggatgaggaggagtttgccctcgccaagcaccttattaagataaaactggacggctacgaactgcctagctctctgccccctcatctggtaccaccttcgcatagaaaaagcctccccaaagcagactag

SEQ ID NO: 209167 - DNA, 1917 bp, synthetic construct
  misc_feature 1..1917: note = Description of Artificial Sequence: Synthetic coding sequence
  source 1..1917: mol_type = other DNA
atggcccagggcctggaggtggccctgaccgacctgcagagcagccgcaataacgtgcggcaccacactgaggagattacggttgatcacctactggtgcgtcgcggacaggccttcaatctcactctgtacttcagaaataggtcatttcagccgggactcgacaatattatatttgtcgttgaaacagaggacgcagtgtatcttgacagcgaaccgcaacgccaggagtacgtaatgaatgactatggattcatataccagggatcaaaaaattggatcagaccctgcccttggaactacggacaatttgaggacaagattatcgatatatgtctgaagcttctagataagtctttgcattttcaaacggaccctgctacagactgcgcactgcgcggaagccccgtgtacgtgtcccgcgtggtgtgcgccatgatcaattctaacgacgataacggggtgcttaacggaaattggtcggagaactacaccgacggtgccaaccctgcagagtggactggttccgtggccatactcaagcaatggaatgcaaccggatgccagcctgtgcgctacggacagtgctgggtattcgcagcagtgatgtgtaccgtcatgcgttgtcttggcatacctactagagttatcaccaatttcgatagtggacacgacactgatgggaacttgattatagacgagtactatgacaacaccgggcgcatcttgggcaataagaaaaaggacaccatctggaatttccatgtgtggaacgaatgctggatggccaggaaagaccttccgcccgcttatggaggctggcaggtgctggatgcaacacctcaagaaatgtctaatggcgtgtactgttgtggcccagcatcagtgagagccatcaaagaaggcgaggtggatctgaactacgacacccccttcgtgttctctatggtaaacgccgattgtatgtcttggctagtccagggagggaaggagcaaaaactgcatcaggataccagctctgtgggtaactttataagcacaaagtccattcagtccgacgaaagagatgacatcacagagaactataagtacgaagaaggcagtctccaagagcgccaggtcttcctgaaggccctgcaaaaacttaaggcgagaagttttcatgggtcccagagaggggccgagctgcaaccatcacgccctacgtccctatctcaagactcgccccggtccctacacaccccatccctgcgaccttccgatgttgtgcaggtgtcattgaaatttaagctgttggatccccctaacatggggcaggatatctgctttgtgctgctggccctgaatatgtcctcgcagttcaaagatcttaaagtcaatctttctgcacagagcttgcttcatgacggatctcccctgagccccttctggcaggacacagcattcatcaccctttccccgaaggaggcgaaaacctacccctgtaaaatttcttactcccagtattcccagtacctctctaccgataaattgattcggatctcagccctgggggaggaaaagtcatctcccgagaagatccttgtgaataagattatcaccttgagctatccatccattacgattaacgtgctcggagccgccgtcgtgaaccagcccctgtctatacaagtaatattcagtaacccactctcagaacaagtagaggattgcgtgcttacggtcgaaggctctggactgttcaagaagcaacagaaagtctttctcggagtgctcaaaccacaacaccaagcttcgattattctggaaacagttccttttaagagcggtcagcggcagattcaagccaatatgcgcagcaacaaattcaaagacatcaaaggatacaggaatgtatatgtcgactttgcactctag

SEQ ID NO: 209168 - DNA, 2160 bp, synthetic construct
  misc_feature 1..2160: note = Description of Artificial Sequence: Synthetic coding sequence
  source 1..2160: mol_type = other DNA
gcccagggcctggaggtggccctgaccgacctgcagagcagccggaataacgttcggcatcataccgaggaaattaccgtggaccaccttctggtacggcgagggcaggcatttaacttaaccttatacttccgtaaccgctcttttcagccaggcctcgataatatcatcttcgtcgtggaaacaggaccactcccagatctcgccctgggcacccgggccgtgttctctctggcgcggcaccactccccatcaccttggattgcctggctggagaccaacggagctactagcaccgaggtatcactgtgtgctccaccgactgctgccgtgggacggtatctcttgaagattcatatcgattcattccagggatccgtcactgcctaccaactgggcgagttcattctgctattcaacccttggtgcccagaggatgctgtttatttggacagcgagccgcagcggcaggagtacgttatgaacgattacgggtttatctaccaagggagtaagaactggatccggccctgcccctggaactatgggcagtttgaggataaaattattgatatttgccttaaattgctggataagagtctgcactttcagactgatccagcgaccgactgtgcacttcgcggcagccctgtttatgtctcccgcgtggtgtgtgcaatgataaactctaacgacgataatggcgtcttgaacggcaattggtccgagaattatactgatggcgccaaccctgcagagtggactggcagcgtggcaattctgaagcagtggaacgctactggatgccagccagtgagatatgggcaatgctgggtattcgccgctgtaatgtgcaccgtcatgagatgcctcgggatccctactcgggttatcaccaattttgattccggacatgacaccgacggaaacctgatcatcgatgaatactacgacaacactgggagaatcctgggcaataagaaaaaggatactatctggaatttccacgtatggaacgagtgctggatggctaggaaggatttgccgccagcttatgggggttggcaggtgttagacgctactccacaagagatgtcgaacggcgtatattgctgtgggccagcttccgtgcgcgcgataaaggaaggcgaggtcgacctgaattatgataccccgtttgtgttcagtatggtgaatgcggattgtatgagctggttagtacagggaggcaaggagcagaaactccatcaggacaccagcagtgtgggaaacttcatcagcacaaagagcattcagagtgacgagcgggacgacattaccgagaactataagtacgaggagggttccctacaggaaagacaagtcttcttaaaagccctacaaaagctcaaagcgaggagtttccatggctcgcagcggggcgccgaacttcaaccaagcagacctacctccctctcgcaagattcaccccgctccctgcataccccgagcttacggccaagcgacgtagtgcaggtgtcgctcaaattcaagttgctcgacccacccaatatgggacaggacatctgcttcgttctgttagcactaaatatgtcatctcagttcaaggacctgaaggttaacctgtctgcccaatcattgctacatgacggtagccctctctcccctttttggcaggacacagcgtttataacactgtcccccaaggaggcaaaaacgtacccttgtaaaatttcttactcccagtacagccaatacctgtctactgacaaattgataaggatctctgccttaggagaggagaaatcctcaccggaaaaaatccttgttaacaagattatcactttgtcatatccctctataacaatcaacgtgctgggagctgccgttgttaaccagcccctttccattcaggttatcttttctaatccccttagcgaacaggtggaagattgtgtgctgaccgtcgaggggagcggcctgtttaaaaaacaacagaaggtgtttcttggcgtcctgaaaccacagcatcaggcgtccattatactggagacggtaccttttaaatccgggcaacgccagatccaagccaatatgcgatcgaacaaattcaaagacattaagggctatcggaacgtgtatgtggattttgctctttag

SEQ ID NO: 209169 - DNA, 2121 bp, synthetic construct
  misc_feature 1..2121: note = Description of Artificial Sequence: Synthetic coding sequence
  source 1..2121: mol_type = other DNA
atggccggcatccgggtgaccaaggtggactggcagcggagccggaatggcgctgctcatcatacccaggagtatccttgtcccgagctggtggtgcggagagggcagagctttagcctgacactggaattgtcccgggctttagactgcgaagagatccttatatttactatggaaacaggccctcgcgcctccgaagctcttcacacaaaggccgttttccagacttccgaactggaaagaggagaaggatggacagctgctcgggaagcccagatggagaagaccctcactgtgtcccttgccagcccaccatcggccgtgatcgggaggtacttgcttagtatcaggctgagctcgcataggaaacactcaaatcgaaggctgggggagttcgtgctgctcttcaatccttggtgcgctgaggatgacgtgtttctcgccagtgaggaagagcgacaggaatacgtgctttccgattccgggataatcttcagaggagtggagaaacacattagagctcagggctggaattatggccaattcgaggaggatattctgaatatctgtctgtctatcctcgaccgcagcccaggccaccagaacaatccagcaactgacgttagctgtcgccataacccaatttacgtcacccgggtgatctcagccatggtaaactcaaataacgacaggggggttgtgcagggtcagtggcagggcaaatacggcgggggtacctctcccctgcactggcgcggatctgtggcaatactccagaaatggctgaaggggagatataagcccgttaagtatggtcagtgttgggtcttcgcaggagtactgtgcacggtgcttcggtgcctcggaattgcaaccagagttgtctctaattttaattctgcgcatgacacagaccagaatctgtctgtcgacaaatatgtggatagctttggacgcaccttggaggatctgacggaggatagcatgtggaatttccatgtctggaatgagtcttggttcgccagacaggatctggggccttcttacaatggctggcaggtccttgatgccacacctcaagaagagagcgaaggcgtcttccgctgcggtcccgcctccgtcacggctatcagagagggcgatgtccatctggcgcacgatggtcccttcgtgttcgctgaagtgaatgctgactacattacatggctctggcacgaagatgagagccgggaacgggtgtattcaaacaccaagaaaatcgggaggtgtatatctactaaggccgttggctccgatagccgagtggatatcaccgatctctacaaatatcccgagggcagccggaaggagaggcaggtttactcaaaagcagtgaacagactcttcggcgtcgaggcctccgggcggaggatttggatccggcgtgctggcggtagatgcttgtggagagatgacttgctggaacccgccacgaaaccttctatcgcaggcaagttcaaggtgctcgagccaccgatgcttgggcacgacctccggcttgccctgtgcctcgctaacttaacctctcgggcccagcgcgttagggtgaacctgtccggtgccactatcctctataccagaaaaccagtggccgaaatattgcacgaatcccatgcagtgcggctgggcccacaagaagaaaaacgcatccccattaccattagctactcaaaatacaaggaggacctcacggaggataaaaaaatacttctggcagctatgtgccttgtgactaagggggaaaagttactggtggagaaggatataaccctggaggatttcatcacgattaaggtacttggtcccgccatggtgggtgtcgccgtgactgtggaagttaccgtcgtcaatccactcatagaaagggtgaaggattgcgcattaatggtggaaggcagtggactattgcaggaacaattatccattgacgtcccaacccttgagccccaggagcgtgctagtgtacagtttgacatcactcccagtaagagtggtccaagacaactgcaggtggacttggtgagcccccactttcccgatattaaaggattcgtcatcgtgcacgtcgctactgctaagtag

SEQ ID NO: 209170 - DNA, 1878 bp, synthetic construct
  misc_feature 1..1878: note = Description of Artificial Sequence: Synthetic coding sequence
  source 1..1878: mol_type = other DNA
atggccggcatccgggtgaccaaggtggactggcagcggagccggaacggcgctgcccaccatacacaagaatacccatgtcccgagctggtcgttcgccgggggcagtctttttcccttaccttggaattgtctagagcccttgactgcgaggaaatcctgatctttacaatggaaacaggaccacgtgctagcgaagctttacacactaaggccgtatttcaaactagcgaactggagaggggagagggctggactgctgccagagaagcccagatggaaaagaccttgaccgtctctttggctagcccaccctcagcagtgatagggcgttacctcctttccatcagactttcctcccacagaaagcatagcaacagaagattgggcgagttcgtgttgctgttcaacccgtggtgcgcagaggacgatgtttttctagccagtgaggaggagcgccaggagtacgtgctgagcgacagcgggataatattccgcggcgtggaaaaacatattagagctcaaggatggaactatggccagtttgaagaagatattctcaatatttgcttgagcatcctggatagatctcctggacaccaaaacaatcccgctacagatgttagctgccggcacaaccccatctacgtaacaagagtaataagtgctatggtgaactccaataatgaccgaggcgtcgtgcagggacaatggcagggtaaatatggcggaggcacatcacctctacactggcgtggctctgtcgccattctgcaaaagtggctgaaggggcgctacaagcctgtcaaatacggacaatgttgggtgtttgctggagttctatgcaccgtactccgctgcttaggcatcgctacgagagtggtgtcaaatttcaattcagcgcacgacaccgaccaaaacctctccgtcgataagtatgtggactcatttggcaggactctcgaagatctaactgaggattcaatgtggaattttcatgtttggaacgaatcatggtttgcacgacaagacttgggcccatcgtacaacggatggcaagtactggacgctaccccccaggaagagagtgagggtgtttttcggtgtggacctgcttcggtcactgctattcgggagggcgatgttcacctggcccacgatggcccgttcgtgttcgctgaggtcaatgcagattacatcacctggctttggcacgaggacgaaagtcgtgaaagagtatactctaacaccaagaaaattgggcggtgcatttctaccaaggcagtcggctccgactcccgtgttgacatcacggacctctataaatatccggagggatccaggaaggagcgccaggtgtattcgaaggccgtcaacaggctgtttggggttgaggcttcgggtcgccgcatctggattagacgggctgggggccgatgcctgtggcgtgacgaccttctcgaaccagcaactaaaccaagcattgctggaaagttcaaggttcttgaaccacctatgctgggtcacgatctcaggttagccctttgtttagccaacttaacatcgagagctcagagggtgcgcgtgaatctgtcgggagctactatcttgtacacacgtaagccagtggccgagattttacacgagtcgcacgccgtgcgcctaggcccacaagaagagaaacgtatcccaattactatctcttacagcaagtacaaagaggacctgacagaggacaagaaaatcctattggccgctatgtgtctcgtgacaaagggtgaaaagttactggttgagaaggatatcaccttggaggacttcatcaccattaaacgggcctaccctggggcctctggggaagggctgtcacctgtgtag

SEQ ID NO: 209171 - DNA, 2133 bp, synthetic construct
  misc_feature 1..2133: note = Description of Artificial Sequence: Synthetic coding sequence
  source 1..2133: mol_type = other DNA
atggaccaggtggccaccctgcggctggagagcgtggacctgcagagtagtagaaacaacaaggagcaccacacccaagagatgggcgtaaaaaggctgaccgttaggagaggtcagcccttctacttgagactaagcttctctcgtccattccagagtcagaatgatcacataacgttcgtcgctgagaccggccccaaaccctctgaactgcttggaacccgcgccacatttttcctgacacgggttcagcctggaaacgtgtggagcgctagtgacttcacaatcgacagtaatagtttacaggtcagcctctttacgcctgccaacgcggtaatcggacactatacactgaagatcgagatcagtcaaggacaggggcactctgtcacataccctttagggaccttcatcctcttgtttaacccctggtctccagaggatgatgtgtacttaccatctgagatccttcttcaggaatacattatgcgtgactacgggtttgtgtataagggacacgaaagattcattaccagctggccctggaactatggccagtttgaggaggatattatcgatatctgtttcgagatactcaataagtcattgtaccacctgaagaatccagccaaggactgctcacagcgaaacgacgtggtgtatgtctgccgggtggtttcagccatgatcaattccaacgacgataacggagtgttgcaaggcaactggggtgaggactactccaaaggtgtgtcgcccctagaatggaagggttcagttgccatcctccagcagtggtccgcgcgcggcgggcagcccgtgaagtacggacagtgctgggtgtttgcctcggttatgtgcactgtgatgaggtgcctcggtgtcccaacacgggtggtcagtaacttcaggagcgcccataacgtggaccgtaacttgacaatcgatacctactatgacagaaacgccgagatgctcagcacccagaaaagagacaagatttggaatttccacgtgtggaatgagtgctggatgatacggaaagatctacccccaggctataatggatggcaggtgctcgaccctaccccacagcagacttcttctggtctgttttgctgtggacccgcctctgttaaagcgatccgagagggcgacgttcacttagcttacgatactccttttgtgtatgccgaggtcaatgctgatgaagtaatttggctgctgggtgatggtcaagctcaggaaattctcgcccacaacacttcctcaatagggaaggagataagcaccaaaatggttggcagtgatcaacgccagagcattacgagttcctacaaatatcccgagggcagcccagaggaaagagccgtgttcatgaaggcctcccgcaagatgctgggcccacagcgcgcatcactcccttttcttgacttgctcgaaagcggaggacttcgcgatcagccagcccagctccagctgcatctggcccggatacccgaatggggccaagacctgcagctgttgctacgtatccagcgggtcccggactctacgcacccccgagggcccatcgggctggtggtgcgcttttgtgcgcaggcactgctgcacggaggagggacacagaaaccattctggcggcacactgtccgaatgaacctggactttgggaaagaaacacagtggcccctcttgctgccgtattcaaattataggaacaagctaacagatgagaagctgatccgagtcagtggtatcgctgaggtagaggagacgggtaggtctatgctagtgctgaaggacatttgcctggaacctcctcacttgtcaattgaagtgtcagaacgcgctgaggtaggcaaggctctaagagtgcatgtcaccttaacaaacacactgatggtggctctgtcgtcatgcactatggtgctcgaggggagtggcctcatcaatggacaaattgccaaagacctgggcaccctggttgctggacacacgttgcaaatccagctggacctgtacccaacgaaggcaggcccaagacagctccaagttctgatttctagtaatgaggtgaaggagataaaaggttacaaggatatcttcgtgacagttgctggcgctccctag

SEQ ID NO: 209172 - DNA, 846 bp, synthetic construct
  misc_feature 1..846: note = Description of Artificial Sequence: Synthetic coding sequence
  source 1..846: mol_type = other DNA
atgcggttcgtggtggccctggtgctgctgaacgtggccgccgccggggcagtacccctcctggccaccgaaagcgtcaagcaggaggaagccggggtgaggccttcagcaggaaatgtttcgacacatcccagtctgagtcaaaggccaggcgggtctacaaaatctcatcctgagccacaaacaccaaaagattccccttccaaaagttcctcagaggcacagaccacaaaagacgtgcctaataagtccggcgcagacggccagacacctaaggacggctcttctaagagcggcgctgaggatcaaacccccaaggatgtccctaacaaatccggagcagagaaacagactcccaaagatggttctaataagtccggcgctgaggagcaagggccaatcgatgggccttctaaatcaggggctgaggaacagacgagcaaggacagcccaaacaaggaagaggtgaagagcagcgagcctacagaggatgtggagcccaaagaagccgaagacgacgacactgggcccgaagagggctccccccccaaagaagagaaggagaagatgtcgggatcagcgtcgtccgagaacagggagggtacgttaagcgattcaactggttccgagaaggacgatctctacccaaatggatctggcaacgggtctgcagagagcagccatttctttgcatatctggtgaccgccgcgattttggtagccgtgctgtacattgcccatcataataaacgaaaaattattgcctttgtccttgaaggcaagcgtagcaaagtgacaagacggcccaaggcttccgactaccagcgcctggaccagaagagttag

SEQ ID NO: 209173 - DNA, 1314 bp, synthetic construct
  misc_feature 1..1314: note = Description of Artificial Sequence: Synthetic coding sequence
  source 1..1314: mol_type = other DNA
atgcggttcgtggtggccctggtgctgctgaacgtggccgccgccggagctgtgcccttgctcgccacggaatcagttaaacaagaggaagctggcgtgcgaccttccgcgggcaatgtgtcaacgcaccctagcttatcccaacgcccaggaggtagcaccaaatcccacccagagccgcagactccaaaagactctccttctaagagcagtgcagaagctcaaacacccgaggacacccccaataaaagcggcgcagaagcgaagacccagaaagattccagtaataagtccggggccgaggcgaagactcagaagggctctacatctaagagcggctccgaggcccagaccactaaggactccacgtctaagtctcaccccgaattgcagacccccaaagatagtacaggtaagagcggtgccgaggcacagacaccagaggattccccaaaccggtccggagcagaagcaaagacgcagaaagacagccctagcaaaagcgggtctgaggcccagacaacaaaggatgtgccaaacaaatctggggcagatggtcagacgcccaaggatggctcgtctaaaagcggggccgaggatcagacccccaaggacgtgcccaataagtccggagccgagaagcagactcccaaggatgggagcaataagtcgggcgcggaggagcaagggcctattgatggtccatctaaatctggggctgaggagcagacctccaaggacagtccaaacaaggtggtccccgagcagcccagccggaaggatcatagtaaacccattagcaacccgagcgataataaggagttgccgaaggccgataccaaccagctggccgacaagggaaaactcagtccccacgcttttaagacggagtcgggcgaggagacagacctgattagccctccccaggaggaagttaagagctccgagccaacagaagatgtggagcccaaggaggcagaggacgacgacactgggcccgaagaaggatcaccacccaaagaagagaaggaaaagatgtctggaagtgcttcctccgaaaatagggaagggacccttagcgactcgaccggctcagagaaagacgatctctaccccaacggaagcgggaatgggagcgcagagtcaagccacttttttgcctatctcgtgactgctgccatcctcgttgctgtgttgtatatcgctcaccataacaaacgcaaaatcattgcctttgtgcttgagggcaaaaggtctaaagtgactcgtagaccaaaggcgtccgattaccagagactggaccagaagagctag

SEQ ID NO: 209174 - DNA, 1140 bp, synthetic construct
  misc_feature 1..1140: note = Description of Artificial Sequence: Synthetic coding sequence
  source 1..1140: mol_type = other DNA
atgcggttcgtggtggccctggtgctgctgaacgtggccgccgccggagctgtgccgctcctggctacagagtcagtcaaacaagaggaggcaggggtacgtccaagtgccggaaatgtttcgactcaccccagtctgagccagcggcccggcgggtccaccaaaagccatccggaacctcagacacccaaggatagccctagcaagtccagcgccgaggcacagaccccggaggataccccaaacaaatctggagcagaagctaagacccagaaagactcctcaaataagtctggagccgaggccaaaacacagaaaggatctacaagtaagtctgggtctgaagcacagactactaaggattccactagcaaatcccatccagagcttcagactcccaaagacagcaccggcaaaagtggcgcggaggcccaaacccccgaggactctcccaatcgatcaggtgcggaggccaagacacagaaggattccccatccaaaagcggctctgaggcccaaacaactaaggacgtacctaacaagtccggcgcagacgggcagaccccaaaggatggttcctccaaatccggtgctgaagatcagacgcccaaggacgtccctaataaatctggggccgaaaaacagacccccaaggacgggagcaataaatcaggcgcggaggagcagggcccgattgacggtccttctaagagcggggccgaagaacagacttccaaggattcgccaaataaagaagaggtgaagtcttcagaacctaccgaggatgtggaacccaaagaggcagaagacgacgatacaggcccagaagagggatctccgccaaaagaagaaaaggagaaaatgtctggaagtgctagcagcgagaatagggagggaactctgagcgacagcactggcagcgaaaaagacgatctgtaccccaacggatccggtaatggcagcgcggagtcttcccatttcttcgcctacttggtcactgctgcaatcctggtggccgtgttgtacatagctcatcataacaaaaggaaaatcattgcgtttgtgctggaggggaagcgatccaaagtgacaaggcgccccaaagcctctgattaccagcgcctggaccagaagtcgtag

SEQ ID NO: 209175 - DNA, 1362 bp, synthetic construct
  misc_feature 1..1362: note = Description of Artificial Sequence: Synthetic coding sequence
  source 1..1362: mol_type = other DNA
atgcggttcgtggtggccctggtgctgctgaacgtggccgccgccggagccgtgcccttgctggcaaccgagagcgtaaaacaggaggaggcgggtgtccgaccttctgcgggaaacgtttctactcatccatctctgtcccagcggcctggcggctccaccaaatcccaccctgagcctcagactcccaaagattccccttctaaatcctccgccgaagcccagacgccagaggataccccgaacaagtcaggggccgaggcaaaaacgcagaaggactcaagtaacaaatctggcgctgaagctaagacgcagaagggcagcacatccaagagcggcagtgaggcgcagacaactaaggactccacatctaaatcccatccagaactgcagacaccgaaagattccacggggaagagcggagccgaggcgcaaactccagaagattcgccaaatagaagcggcgcagaggccaaaacacagaaggactctccctctaagtctggctccgaggctcaaaccaccaaagacgtgccgaataagagcggagcagacggacagacgccaaaagatgggagctctaagtcaggagcggaagaccagacccctaaagacgtacctaacaagtctggagccgaaaagcagactcctaaggatggtagcaacaaatcaggcgccgaagagcaaggacctatcgacgggccttcaaagagcggcgctgaggaacagacctccaaagattcgccaaataaggtcgtgcctgagcagccatcccggaaggaccactccaaacccatcagcaacccgtccgataacaaagaactgcccaaagccgataccaaccagctggccgataaaggaaagcttagcccacatgctttcaagaccgaatctggtgaggagaccgatttgatttcgcccccgcaggaggaggtaaagtccagcgagcctaccgaagacgtggagcccaaggaggccgaagatgatgatactggtccagaagagggatcaccccccaaagaagagaaagaaaaaatgtccggctctgcttcctctgaaaatcgggagggaacactgagcgactctacaggaagcgaaaaggacgacctgtaccctaatgggtccggcaatggcagcgccgagagctctcatttcttcgcttatctggtgaccgccgccatcctggtagcagtgctgtacatcgcccatcacaataaacggaagattatcgcgttcgtattggaaggcaaacggagcaaggtaacccgcagacccaaggcctctgactaccaacgtctcgaccagaagatcttcttcccactgagtcccaaccggatggtgtattcaagcggaaagcggtag

SEQ ID NO: 209176 - DNA, 693 bp, synthetic construct
  misc_feature 1..693: note = Description of Artificial Sequence: Synthetic coding sequence
  source 1..693: mol_type = other DNA
atgtacgtgcgggtgagcttcgacaccaagcccgacctgctgctgcaccttatgaccaaggaatggcagctggaactgcccaagttgcttatcagcgtgcacggaggcctgcagaattttgaattgcagccaaagctcaaacaggtctttgggaaaggtcttataaaggctgctatgacaaccggagcctggatctttactggaggagtcaacactggggtaattagacacgtgggggatgcactcaaggaccacgcttcaaaaagtcggggcaagatctgcaccatcggaatcgctccgtggggtatcgtcgagaaccaggaggacctgattggtagagatgttgtgcgcccctaccaaaccatgagcaaccccatgtcgaaactaaccgtccttaacagtatgcattctcactttattctggccgacaacggaaccactggaaaatatggcgccgaggtgaagcttagaagacagctggaaaagcacatcagcttgcaaaagatcaacactcgaatcgggcagggggtacccgtggtcgccctcattgttgagggagggcccaatgtcatcagcatcgtattggaatatctccgtgatactccacctgtgcccgtcgtcgtgtgcgacggatctgggcgggcctcggacatactagctttcggccacaaatattccgaagagggaggctag

SEQ ID NO: 209177 - DNA, 2520 bp, synthetic construct
  misc_feature 1..2520: note = Description of Artificial Sequence: Synthetic coding sequence
  source 1..2520: mol_type = other DNA
atgaagaagtggagcagcaccgacctgggcgccgccgccgaccccttgcagaaagatacctgcccagatcctcttgatggagatcctaattcaagaccacccccagccaagccccagttgtccacagcaaaaagccgcaccagactgttcgggaagggagattcggaagaagcttttcctgtcgattgccctcacgaggagggagaacttgactcctgcccgaccatcacggtgtccccagtgataacaatccagcgcccaggagacggtccgaccggcgcccggctcctgtcccaggactccgtcgctgcgagcacagaaaagactctaagattgtatgatagaagatcaatcttcgaagcagtcgcacaaaacaattgccaggatctggaaagtttattgctctttctgcagaagtctaagaaacacttaactgataatgagtttaaggacccagagactggcaaaacctgcctgttaaaggccatgctgaacctgcatgacggccagaacaccacaattcccctgcttctggagattgcccggcagacggacagcttaaaggagctcgtaaacgcttcatataccgattcgtactataaagggcagacagctctgcacattgctatcgagcggcgcaacatggctctggtgacacttcttgtcgagaacggagctgacgtccaggctgcggcgcacggggatttcttcaagaaaacaaagggtagacccggcttctactttggagaactgcctttatcactggccgcatgtactaaccaacttgggatcgttaagtttctcttgcagaactcatggcaaactgccgatatttccgccagggactccgtgggaaacaccgttttgcatgccctggtcgaggttgccgacaacactgcggacaacactaagtttgttactagcatgtataatgaaatccttatgctcggggctaaactccatcctacactcaaacttgaggaattgacaaacaagaaaggaatgactcccctcgctctcgcagccgggactggaaaaataggggtgctggcctacattctacagcgagaaattcaggaaccagaatgtcggcacctgtctcggaaatttacggagtgggcatatggccctgtccatagctcattatacgacctgagttgcatagatacttgtgaaaagaactcagtgctggaggttatcgcctactccagctccgaaacaccgaaccgccacgacatgttgctggtagagccactgaatcgcctgcttcaagataaatgggacaggtttgtgaagcggatattctactttaatttcctggtgtattgtctgtacatgattatatttacaatggctgcttattacaggcccgtggatgggctacctccctttaagatggagaaaacaggggactattttagagtgacaggcgaaattctttctgtcctcgggggtgtttacttctttttcagagggatccaatactttttgcagagaagaccttccatgaaaaccctgttcgtcgatagctattccgagatgctgttctttctgcagtccttgttcatgctggccacagtcgtgctgtatttttcccaccttaaggaatatgtggccagcatggtatttagcctggcactcgggtggaccaacatgctttattacacaagaggttttcagcagatgggcatttatgctgttatgatcgagaagatgattcttcgtgacctgtgtcgctttatgtttgtttacattgtcttcctctttggcttctccacggctgtcgtcaccctgatcgaagacggtaaaaacgacagtctgccaagcgagtccacatcacaccgttggaggggcccagcctgccggccccccgatagctcatataatagtctgtactccacatgcttggagctgtttaaatttaccatcggaatgggggatttggaatttaccgaaaactacgattttaaggccgtgttcattatcttactgctggcgtacgtgatcctcacctacatcctgttactgaacatgctgattgctttgatgggggaaactgtgaataaaattgctcaagaatccaagaatatttggaaactgcagcgggcaatcacaattttagacaccgaaaaatcttttttgaaatgcatgaggaaggcatttcgctctggcaagctgttacaggtgggatatacacctgacggcaaggatgactacagatggtgttttagggtcgacgaagtcaactggaccacgtggaacaccaacgtgggcatcataaacgaggaccctggtaactgtgaaggggtcaaaagaaccctgagttttagccttagatcttcgcgggttagcggtcgtcactggaagaattttgctctcgtccccctgctgagagaggcgagcgccagggaccgccaatccgctcagcccgaagaggtctatctgagacagttctctggatcccttaagcccgaggacgccgaggtctttaagtcacccgccgccagcggcgagaagtag

SEQ ID NO: 209178 - DNA, 2373 bp, synthetic construct
  misc_feature 1..2373: note = Description of Artificial Sequence: Synthetic coding sequence
  source 1..2373: mol_type = other DNA
atgaaggcccaccccaaggagatggtgcccctgatgggcaagcgggtggccgccccatctggaaacccagccatattgcctgagaagcgtcctgcagagatcacccccacaaaaaagtctgcccacttctttctggaaattgaaggcttcgaaccaaacccaaccgtggctaaaacaagtccccctgtcttttcgaagcctatggattccaatattaggcagtgcatctctggaaactgcgacgacatggattccccccagagtcctcaagacgacgttactgagactcctagcaatcccaactctccttccgctcagctggctaaggaggagcagcggagaaaaaagagacgcctaaagaagcggattttcgcagctgttagtgagggttgcgttgaagagttggtagaactgctagtggaattacaggaactgtgcaggcgtaggcacgacgaggatgtgcccgatttcctgatgcacaagctgactgcttcagatactggaaaaacctgcctaatgaaagccttgttaaatattaacccaaatacgaaagaaatagtcagaatactcctcgcatttgccgaggagaacgacattctggggcggttcatcaatgcggaatacaccgaggaggcatacgaagggcagacggccctaaatatcgctatcgaacgccggcagggagacatcgccgccctcctcattgcagcgggggcggacgtcaacgcccacgctaagggtgccttttttaatcccaaataccagcatgaaggcttttatttcggagaaacgcccttggccctggctgcatgcacgaatcaaccggaaattgttcaacttctgatggagcatgaacagacagacatcacctcaagggacagtcgtggtaacaacattttacacgcactggtgaccgtcgcggaagattttaagacacagaatgacttcgttaagcgcatgtacgatatgatcctcctcagatcaggtaactgggagctggagactacccgcaataacgacgggctaacacccctgcagttagcagcgaaaatgggcaaggccgagatccttaagtacatactgtccagggagatcaaggaaaaacgcctccggagcctgtcacgcaaattcacagattgggcttacggacctgtctccagctctctgtacgaccttacgaatgtggatacgacaactgacaattctgtgctcgagattaccgtctacaacaccaacatagacaataggcacgaaatgcttactctggaacctctgcacaccctgctgcacatgaaatggaagaagtttgcgaagcacatgttcttcttgtccttttgcttctacttcttctacaatattactcttactttggtttcctactaccgacctcgcgaagaggaggccataccccacccactagcgctgactcataagatggggtggttgcagcttttgggaagaatgtttgtgctgatatgggcaatgtgtatctccgtgaaagagggcattgcaattttcctgctgagaccatccgacctgcagtcgatacttagcgatgcctggttccacttcgtgttctttattcaggctgtgcttgtgatcttgtccgtgtttctgtaccttttcgcctataaggaatacctggcatgcctagtgctggctatggctttgggctgggccaacatgctgtattataccagagggtttcagagtatgggtatgtacagtgtcatgatccaaaaagttatcttgcatgacgtcctgaaatttctatttgtctatattgtctttttgctgggattcggggtggctctggcatcgctcattgagaaatgtcctaaagacaataaagattgtagttcttacggctcgttttcagacgctgtattggagttgttcaagcttaccattggcctgggagacttgaacattcaacaaaatagcaagtaccccatcctttttctttttctccttataacctacgttatcctgacttttgtacttctgttgaacatgctgatcgccctgatgggtgaaacggtggaaaatgtatccaaagagagtgaacggatatggaggctgcagcgggcacgcaccatcttggaattcgagaaaatgttgccggagtggcttcgctcccgctttaggatgggtgagctctgcaaggttgctgaggacgatttccggctgtgtctccgcataaacgaagtgaaatggaccgaatggaaaacgcacgtctcttttcttaacgaagaccctggtcccgtgcgcaggaccgatttcaacaagatccaggactcatcgcggaataattcaaagaccactctcaacgctttcgaagaggttgaggagtttccagagacgagtgtgtag

SEQ ID NO: 209179 - DNA, 3360 bp, synthetic construct
  misc_feature 1..3360: note = Description of Artificial Sequence: Synthetic coding sequence
  source 1..3360: mol_type = other DNA
atgaagcggagcctgcggaagatgtggcggcccggcgagaagaaggagccacagggggtggtgtatgaagatgtcccggatgacacggaggactttaaggaatctctcaaggtggtatttgaaggaagtgcttacggcctgcagaattttaacaagcagaagaaactgaagcgttgtgatgacatggataccttcttcctgcattatgcggccgccgaggggcaaattgagctgatggaaaaaatcacccgcgactcttcactggaagtcctccatgaaatggatgactatggtaatacccctcttcactgtgctgtggagaaaaaccagattgagtctgtgaaatttttgctctctagaggtgcgaatcccaacctgaggaattttaatatgatggcacctcttcacatcgctgttcagggaatgaacaacgaggtgatgaaagttctgcttgaacaccggacaatagatgtcaatctggagggagagaacgggaataccgccgtgattatcgcttgcaccaccaacaattccgaagctctgcagattctcctaaaaaaaggagcaaaaccgtgtaagtcaaataaatgggggtgttttccaatacatcaagccgcatttagtgggtctaaggaatgtatggaaattatccttcggttcggcgaagagcatggatactcccgccagctccatataaactttatgaacaacggaaaggcaacccctttacatttagccgtccaaaacggcgaccttgagatgatcaaaatgtgcctggacaacggggctcagatcgacccagtcgaaaaggggcggtgtaccgctatccattttgcagccactcaaggcgctacagagattgtgaagctgatgatcagcagttacagtggtagcgtggacattgtcaacacaacagacggctgtcatgaaaccatgctacatcgtgcctctctattcgaccatcacgaactggccgactatctgattagtgttggagctgatattaataaaatagactctgaggggcgctccccactgattctggccacagcttctgcctcttggaatatcgtgaacctgctgctgagtaaaggggctcaagtggatatcaaagacaacttcgggagaaactttctacatttgactgtgcagcagccgtacggcttgaagaatttgcgtccagaattcatgcagatgcaacaaatcaaggaattggtgatggacgaagataatgacgggtgcaccccgttgcactacgcttgcagacagggaggacccggctccgttaacaaccttctcggcttcaatgttagcatccattcaaagagcaaagataaaaagagcccccttcactttgcggctagctatggccgcatcaacacgtgccagagactcttacaagatatttcggatacccgtctactcaacgagggagatttacatggcatgactccactgcatctggcagctaaaaatggtcatgataaagtggtccagctgctactaaagaagggggctctcttcctgagtgatcacaatgggtggactgctctccatcacgcctcgatgggcggctatactcagaccatgaaggtgatcctggatacaaacctgaaatgcaccgataggctggatgaggatggaaacacggccctgcatttcgcagcgcgcgagggccacgcaaaagccgtcgccttgcttctgagtcacaacgccgacatcgtgctaaataaacaacaagcctcctttcttcatcttgccctgcataacaaaaggaaagaggtggttctgaccatcatacggtctaagcgttgggatgagtgcttgaagattttcagccacaacagcccgggaaacaaatgtcccattaccgagatgattgagtatcttcccgagtgcatgaaggtcctcctcgatttctgtatgttacacagtacagaggacaaatcgtgtagggactactacatagaatacaactttaaatatctccaatgcccgctagaattcaccaagaagaccccaacccaggacgtgatctatgaaccgctgacggccctgaacgcaatggtgcagaacaatcgcatcgaactgctgaaccatccggtatgtaaggaatatctgctaatgaaatggctcgcctatggatttagagcccacatgatgaaccttggatcttactgcctggggctcatccctatgacaatcctagtcgtgaacatcaaaccagggatggccttcaattctacagggataattaacgagaccagcgaccattctgaaatcctcgataccacaaatagctacctgatcaagacatgcatgattctggtttttctctccagcattttcggctattgcaaagaagccgggcagatctttcaacagaaacgcaattacttcatggacatttccaacgtgctggagtggatcatctatactactggcatcattttcgtgcttccgttgttcgtggaaattcctgcacacctccagtggcagtgcggtgcaatcgccgtgtacttctattggatgaactttttactttacctgcagaggtttgagaactgtggcatattcatcgtgatgctggaggtgattctgaagaccctgcttcggagcaccgtagtattcatttttctgctgctggcctttggacttagcttctacattttgctgaacctgcaggacccatttagctcccctctcttgagcatcattcaaactttctctatgatgctgggcgacatcaactatagggagtcattcttggaaccctatcttcgcaatgaactggcacaccccgtgctgtctttcgcccagctagtgtcctttaccatctttgtgccaattgtcctgatgaatttactaataggcttggccgtgggcgacatagctgaggtgcagaaacacgcctccctcaagcgtatcgccatgcaagtggaactgcacacaagtctggaaaagaagctgcctctgtggtttcttcggaaggtggaccagaagagcactattgtctatcctaacaagcctagaagtggtgggatgctattccacatcttttgtttcctcttctgcactggggagatcaggcaggagatacccaatgctgacaaaagtctggagatggagatcctgaagcagaaataccgactgaaagatctgactttcctgttggaaaagcagcatgaattaataaagctgatcatccagaaaatggaaattatctccgaaaccgaggacgacgactcgcactgttcctttcaggataggtttaagaaagaacagatggagcagaggaatagtcggtggaacaccgttcttcgcgctgtcaaggccaagacccaccatcttgagccatag

SEQ ID NO: 209180 - DNA, 2280 bp, synthetic construct
  misc_feature 1..2280: note = Description of Artificial Sequence: Synthetic coding sequence
  source 1..2280: mol_type = other DNA
atgatggccgccctgtaccccagcaccgacctgagcggcgccagcagttcctcactgccaagtagtccgtcgagctccagtccaaacgaagtcatggcattaaaggatgtacgcgaagtcaaagaagagaacactctaaacgagaaactgttccttctggcatgcgataaaggagattattacatggtcaaaaagattctggaggaaaactcctcaggcgacctgaatatcaactgcgtcgatgttttgggacgcaacgctgtgaccattaccattgaaaacgagaacctggacatccttcaactgctgcttgactatgggtgccagaaactcatggagcgaatccagaacccagagtactctaccacaatggatgtagcacctgtaatacttgccgcacatcgcaacaattacgagattttaaccatgctgctcaaacaggacgtcagtcttccgaagccgcacgctgtgggctgcgagtgcacactctgttctgcgaagaacaaaaaagacagtctacggcatagccgattccgtctagacatttatagatgcctggcctcccctgccttgatcatgctaacggaagaggatcctatattgagggcttttgaactgagcgctgatctgaaagagctgagtctggtggaggtcgagttccgcaacgattatgaggagctagccagacagtgcaaaatgtttgctaaggacctgcttgcccaagccaggaacagtagggaactagaagttatcctgaaccatacctcttccgatgaaccgcttgacaagagggggctgctggaagagaggatgaaccttagcagattgaagttggccatcaagtacaaccaaaaagagtttgtgtcacagtcaaattgtcagcagttcctgaataccgtttggtttggccaaatgagtggctaccgacgtaaacccacctgtaagaaaattatgaccgtgttgaccgtggggatcttctggcctgtgctctctctctgctatctgatcgcccctaaaagccagtttggcaggataatacatactccattcatgaagtttattatccacggggcgagctacttcacgtttctcctattactgaatctgtattcactggtatataatgaggacaagaaaaacacaatgggccccgccctcgagaggatcgactatctattgattctgtggatcattggtatgatctggagcgacattaagcgattgtggtatgaggggctggaagattttctggaggagagccgtaaccagctaagtttcgttatgaactccctttatctagcaacattcgccctcaaggtggtggcccataacaagtttcatgactttgccgaccgaaaggattgggatgcatttcacccaaccctagtggctgagggcttattcgcctttgccaacgtcctttcctatctccgcctgttcttcatgtacaccacctcaagcatccttgggcctctccagatctccatgggccagatgcttcaggactttgggaagttcctgggtatgtttctgttggtcctttttagtttcacaatagggctgacccagctttacgataaaggatatacctccaaggaacaaaaggactgtgttggcatcttttgcgagcaacagtcaaacgacacattccactcatttatcgggacatgctttgctctgttttggtacatcttttcgctcgcgcatgtcgccattttcgtgactaggttctcatacggggaagagctacagagttttgtgggcgctgtgattgttggtacctacaatgttgtagtggtgatcgtcctgactaaacttttggtagcaatgctgcacaaatcttttcaactgattgcgaaccatgaagacaaagaatggaagttcgcccgggccaaactgtggttaagttacttcgacgataaatgtaccctgcctcccccctttaacatcatccctagtccaaaaacaatttgctatatgatctcatccctcagcaagtggatctgtagccacacatctaaaggaaaggtgaagcggcagaatagcctgaaggaatggagaaatctaaagcagaagagggatgagaactatcagaaagtgatgtgttgccttgtacaccggtatctcacaagtatgaggcagaagatgcagtccacggaccaggcaaccgtcgaaaacctcaatgagctccgtcaggacctgtctaaattcaggaatgagataagggacctcctgggcttcagaacttcaaaatatgctatgttttatccacgaaattag

SEQ ID NO: 209181 - DNA, 435 bp, synthetic construct
  misc_feature 1..435: note = Description of Artificial Sequence: Synthetic coding sequence
  source 1..435: mol_type = other DNA
atgatctggagcgacatcaagcggctgtggtacgagggcctggaggacttcctggaggaaagtaggaaccagctgtcattcgtgatgaactccttgtatctcgcgacctttgctctcaaggtggtggcacataacaagatatctatgggacaaatgctgcaagattttggcaagttcctggggatgttcctgcttgtgctcttttcttttaccatcggactgacacagctgtatgacaaagggtacacttctaaggagcagaaggattgtgtggggatcttttgtgagcagcagagtaatgatactttccatagttttatcggcacctgtttcgcgctgttctggtatatcttttccctggctcacgtggccatctttgtgacccggttcagctacggggaagagctgcagtccttcgtgggcgcagtcatttag

SEQ ID NO: 209182 - DNA, 2382 bp, synthetic construct
  misc_feature 1..2382: note = Description of Artificial Sequence: Synthetic coding sequence
  source 1..2382: mol_type = other DNA
atgatggccgccctgtaccccagcaccgacctgagcggcgccagctcatccagcttaccctcctccccctccagttcatcacctaatgaagtaatggccctgaaagacgtgagggaagtgaaagaagagaatactttgaacgaaaagctgttcctgttggcatgcgataagggtgattattatatggtgaaaaagattttggaagaaaattcttcgggagacctgaatattaattgcgtggatgttttgggccgcaacgccgtgaccattactatcgagaatgagaatttagacatacttcagcttctcctggattacggatgtcagtccgccgatgcgcttctcgtggccattgattccgaagtggtcggagccgttgacatcctgctcaaccatagacccaagagatcctcacgccccactatcgtcaaactgatggagagaatccagaacccagagtactccaccacaatggatgtggccccagtgatcctggctgcccatcgcaacaattacgagattttaacaatgttgttaaagcaggacgtatctctgcccaagccccacgcggtcggatgcgagtgtaccctgtgcagtgccaaaaacaaaaaggattccctgcgtcactcacgctttcgcctggacatttatcgatgtctggcctcccccgccctgattatgcttaccgaggaggaccctatcttgcgcgctttcgagctttccgcagacctcaaggagctgagcctggtcgaggtcgagttcaggaacgactacgaagagctagcgaggcagtgtaaaatgttcgctaaagacctgctggcacaggcccggaacagtagagaactggaagtgattctgaatcacacgagcagcgatgaacctctggacaaacgtggactgctcgaagaaaggatgaatctcagccggctgaagctagccataaagtataaccagaaggagttcgtgtcacagtcgaattgccagcagttcctgaacaccgtgtggttcggacagatgtccggctaccggagaaaacccacttgcaagaaaattatgaccgtactgactgtcggaatcttttggccggtactctccctgtgctacctgattgctcccaaatcccagtttggccgaatcatccacactccattcatgaagttcatcatccacggcgctagttattttaccttcctcctgctccttaacttgtactctcttgtgtacaatgaagacaagaagaacaccatgggacctgctctcgaacggatcgactatctcctgatcttatggattattggaatgatctggagcgatattaagcgcctatggtacgaagggcttgaggattttctggaagagagcaggaatcaacttagcttcgtgatgaactctctctatctcgcaacctttgccctcaaggtggtagctcacaacaaatttcacgatttcgctgatcgcaaggattgggatgctttccatcctaccctcgttgctgaaggcctgttcgcttttgccaacgttttgtcatacttacggctttttttcatgtacacaacaagctctatacttggaccactccagatctccatgggccagatgctgcaggacttcggtaaatttctcggcatgttcttgctggttctgttttcattcacgattggtctgactcagttatatgacaaagggtatacaagcaaggaacagaaagactgtgtcgggattttctgcgaacagcagtcaaatgataccttccatagctttatcggcacctgctttgctcttttctggtacatcttctccctcgctcacgttgctatatttgtgacgcggttcagttacggggaggagctgcagtcttttgtaggtgctgtcatcgttgggacatataatgtggttgtggttatcgttctgacaaaacttctggtggccatgctgcataagtcatttcagttgatagccaatcacgaagataaggagtggaaatttgcgcgggccaaactctggttatcatatttcgacgacaagtgcacactgccacccccctttaacattataccctcccctaagacaatctgttatatgataagttctctcagtaagtggatctgctcccacacctcaaaaggcaaggtgaaacgtcagaactctctgaaggaatggcgcaatctcaagcaaaagcgggatgaaaactaccagaaggtcatgtgttgcctggtgcacagatatttgacatctatgagacagaaaatgcaaagtactgaccaggcaactgtggagaacctaaatgagctccgtcaagacttatccaagttccgcaatgaaattcgggacctgctgggctttagaacttcaaaatatgccatgttctatccccgcaattag

SEQ ID NO: 209183 - DNA, 2415 bp, synthetic construct
  misc_feature 1..2415: note = Description of Artificial Sequence: Synthetic coding sequence
  source 1..2415: mol_type = other DNA
atggcccagttctactacaagcggaacgtgaacgccccctaccgggaccgcatccccctgcggatagttagggcggagagcgaactgtcaccgtccgagaaagcttatctcaatgccgtagaaaagggcgactacgcttccgttaaaaagagcctagaggaagccgaaatctatttcaagattaacattaactgtattgacccgctggggaggacagcactgctcatcgccattgagaacgaaaacctggagctgattgagctgttactgtcattcaacgtgtatgtgggcgatgccctactgcacgccatcaggaaggaggtcgtgggcgctgtagaattgttgctgaaccacaaaaagccttcaggggagaagcaattcgtggcccagcctaattgtcagcagctcctggctagccggtggtatgatgagtttcctggctggcgccgtcgacactgggccgtgaagatggtgacttgtttcatcatcggcctcctgtttcccgtattctctgtctgctacctgatagctcccaaatccccgcttgggctcttcattagaaaaccgttcattaagttcatctgccacactgctagctatctgacattcctatttctgctccttcttgcttcgcagcatatagatcggtccgacctgaacagacaaggcccaccccctacaatcgtcgaatggatgatacttccttgggttctcgggttcatatggggcgagatcaaacaaatgtgggatggaggactccaagactacatccatgattggtggaacctgatggattttgtgatgaattctctgtacttggctacgatctcattaaaaatcgtggctttcgtgaagtacagcgccctgaacccccgtgagtcgtgggacatgtggcatccaaccctggtggccgaagcattgtttgcaattgccaacatcttcagcagcctgagactgattagtctgttcactgcaaatagccacttaggcccgctccagatcagcttaggcagaatgctcctggacatcctcaagttcctgttcatttactgtttagtgctgcttgccttcgccaacggcctgaatcagctatatttttactatgaggaaacaaagggccttacctgtaagggaattaggtgtgagaaacagaacaatgctttctcaacgctgtttgagaccctgcaatctttattctggtcaatctttggcctgattaatctgtacgtgacgaacgtgaaagcccagcatgaatttaccgaattcgtcggcgcaacaatgtttgggacttacaacgtcatcagcttagtggtgctcttaaatatgctgatcgctatgatgaataactcttaccagctgatagcagaccatgcagacatcgagtggaagtttgcccgcactaaactgtggatgtcctattttgaggagggaggcacactcccaacacccttcaacgtcatcccatccccaaagtccctgtggtacttaatcaagtggatatggacccatctgtgtaagaagaagatgcggcgcaagcccgagtccttcggcaccattggaagaagagcagcagacaatttgcgccgccaccaccagtatcaggaagtcatgcgaaatctagtcaaaaggtacgtcgcggctatgatcagagatgctaagacagaagagggccttacagaagagaacttcaaggagctaaagcaggacatcagctcattccggtttgaagtgctcggcctcctcagaggatccaaactgtcaacgatccagagcgccaacgcctcaaaggagagcagcaacagcgccgatagtgatgaaaagtcagacagtgaagggaatagcaaagacaagaagaaaaacttttcactgttcgatctgactacactaattcacccgcgtagtgccgcgatcgcctctgaaagacataatatcagcaacggctcagccttggtggtccaggagccccccagggagaagcaacggaaagtcaactttgtaacggatatcaaaaacttcggcctctttcatagaagatccaaacagaatgccgccgagcagaacgcgaaccagatattcagcgtgtctgaggaagtcgcacggcagcaggctgcaggcccacttgagagaaatattcagctagagtctcgtgggctggcctctaggggcgacttgtcgatccccggacttagcgagcagtgtgtcctggtcgaccatagagaacggaacaccgacaccctgggattacaggtggggaagagagtctgtcctttcaaaagtgagaaggtcgttgtagaggacacagtccctataatacccaaggaaaagcacgctaaggaagaagattcctccatagactacgatttaaatctcccagatactgttacacacgaggactacgtgacaaccaggttgtag

SEQ ID NO: 209184 - DNA, 2511 bp, synthetic construct
  misc_feature 1..2511: note = Description of Artificial Sequence: Synthetic coding sequence
  source 1..2511: mol_type = other DNA
atggcccagttctactacaagcggaacgtgaacgccccctaccgggacaggattccactgcggattgtgagggcagaaagcgagcttagtccatctgaaaaagcttacctgaacgcagtggagaagggggattatgcgagcgtgaagaagtctctcgaggaggctgagatttacttcaagatcaacataaactgcatagatcccctcggtcgcactgccctgcttattgccatcgagaacgaaaacctggaattaatcgaattattactctcttttaacgtgtatgtgggagacgcccttctgcacgcgatacgaaaagaagtggttggcgccgtggaactgttactgaatcacaagaaaccaagcggggaaaaacaggttccaccaatcctgctcgacaaacaatttagtgaattcacacctgacataacgcccatcatattggccgcccacacaaacaattatgaaatcattaagttattggtgcagaagggggtctccgttcctaggcctcacgaggtacggtgcaattgcgtagaatgtgtctcctcttcagacgtggatagtcttcgccactcaaggagtcggctgaacatatataaagccctggcttcgccctctcttatcgctctgtccagcgaagaccctttcttgacagcctttcagttaagctgggagctccaggaactttcaaaggtggagaatgagtttaaatccgagtacgaggagctgtccagacagtgtaagcagtttgctaaagatcttcttgatcagacgcggagttcccgcgagctggagattattctgaactaccgcgatgacaatagcctcattgaagaacagagcggaaacgatctggcacgcctgaagttagccatcaaatatcgtcaaaaggaattcgtagcacagccaaattgccagcagctcctggccagcaggtggtacgacgaattccccggttggcgacggcgccactgggcagtgaaaatggtgacatgttttatcatagggcttctcttccctgtcttctccgtatgttaccttattgcccccaagagcccattggggctctttattagaaagccttttataaagtttatttgtcacaccgcatcttacctgacgtttttgttcctgctgttgctagcatcgcaacacatcgatagatcagacctgaacaggcagggcccaccacccacaatcgtcgaatggatgattctgccatgggtgttaggtttcatctggggagaaataaagcagatgtgggatggaggtctccaggattatattcacgactggtggaacctaatggacttcgtcatgaacagcctgtatctagccacaatcagcctaaaaatcgtggcattcgtgaagtatagtgctttgaaccctcgcgagagttgggatatgtggcaccccacactcgtggcggaagccctctttgctattgccaatatcttcagctctctccgcctgatctctttattcacagctaattcccacctagggcccctacagatttccctgggccgcatgctcctcgatattctcaagtttctttttatctactgcttggtgcttctcgccttcgcaaacggcctgaatcagctgtacttctattatgaagaaacaaagggccttacatgtaagggaattcgttgtgagaagcagaataacgccttctcaacactatttgaaactctccagtctttgttttggtccatttttggacttatcaatctctacgtgactaacgtaaaggcacagcacgagttcacagaatttgtaggcgcaactatgtttggaacatacaacgtgatttctttagttgtcctgcttaacatgctgatcgccatgatgaacaacagttatcagctaattgccgatcacgctgatatcgagtggaaattcgccaggaccaaactttggatgtcgtattttgaggagggcgggactttgcccacacccttcaacgttataccttctccgaaaagtctgtggtacctgatcaaatggatctggactcatctgtgcaagaaaaaaatgaggaggaaaccagagtcttttggcactatcggacggcgcgcagcggataacctgagaagacatcaccagtaccaggaggtgatgaggaaccttgttaagcgctacgtggcagctatgatacgggacgcaaagaccgaagaggtcgctaggcagcaagctgctggcccattagaaagaaacattcaactggagtcacgaggtcttgctagcagaggggacctctcaatcccaggcctctctgagcagtgcgttcttgtagaccatcgggaacgaaatactgacacactggggctccaggtgggaaaacgcgtgtgcccatttaagagtgaaaaagtagtggtggaggacaccgtaccaatcattccaaaagaaaaacacgctaaggaggaagatagttcaatcgactatgatttgaacctacctgatacagtgacccacgaagactatgtcacaacgaggctgtag

SEQ ID NO: 209185 - DNA, 2682 bp, synthetic construct
  misc_feature 1..2682: note = Description of Artificial Sequence: Synthetic coding sequence
  source 1..2682: mol_type = other DNA
atggcccagttctactacaagcggaacgtgaacgccccctaccgggaccgcattcctctccgcatcgtgcgtgccgagagtgagctgtctccgtccgagaaggcctatctaaacgccgtggagaagggagattatgctagtgtaaagaagtcactggaggaagccgaaatttatttcaagatcaatatcaattgcattgatcctttggggcgaactgccctgctcatcgctatcgaaaacgaaaacctagagttgatcgaactcctgttgtcctttaatgtgtatgtaggcgacgcactgcttcacgctatcaggaaggaggttgtaggagccgtggagttgctcttaaatcacaaaaaacccagcggcgaaaagcaagttccccctattttgctggacaagcagtttagtgagttcactcccgacattactcctattattctggccgcacacacaaataattatgagataataaaactactggtgcagaagggggtctctgttcctcggcctcacgaggtgaggtgtaattgtgtagaatgcgtcagctcctctgacgtcgatagcttgcgacacagtcggagccgtctgaacatctacaaggctctagcctctccctctctgatagcgctgtccagcgaggacccctttctaaccgctttccagctgagttgggagctgcaggagctgagcaaggtggagaatgagttcaaaagcgagtatgaggagctttccagacagtgcaaacagtttgccaaggacctgctagatcagacacgcagtagtagggagctcgagatcattttgaattatagggacgataactctttgattgaggagcagtcaggcaacgacttggccaggttaaagctggccatcaaataccgccagaaggagttcgtagctcagcctaattgtcagcagctgctggcaagccggtggtacgacgagtttcccggctggagaagacgccactgggccgtaaaaatggtgacatgctttattataggactcctcttccctgtgtttagcgtgtgttatttgattgcacctaaatcaccgctgggcctgtttatccggaagccattcatcaagtttatctgtcatacagcctcctacttaactttcctgtttttgctactgctagcttctcagcatatcgataggtccgatctgaacaggcaggggcctccccctactatcgtggaatggatgattttgccttgggtgttgggattcatctggggtgagatcaagcagatgtgggacggaggactgcaggactacatacatgactggtggaacctgatggactttgtgatgaattcactgtacctcgcaacaatttccctgaaaatagttgctttcgtcaaatatagtgcactcaacccgcgagagagttgggacatgtggcaccctaccctcgtggctgaagccctgtttgccatcgctaacatcttttcctccctgaggctgatcagtctgtttaccgccaattcacacttgggtcccttgcaaatttccctcggcaggatgttgctagacatactcaaattcctgtttatttattgtctagtactgctcgcatttgctaatggcttgaatcagctctacttctactatgaggagaccaagggcctcacgtgcaagggcattcggtgtgaaaaacagaacaacgcattcagtactctgtttgagactctccagtcgcttttttggagcatttttggcctgattaatctctacgtgacaaacgtaaaggctcagcacgaattcacggaattcgtgggtgccacaatgttcgggacgtataacgtaattagcttggtggttctgctgaatatgctcattgcaatgatgaacaactcctatcagctgattgccgaccatgcagacatcgagtggaagtttgcccggaccaagctctggatgagttacttcgaggaagggggcacgctcccaactcccttcaacgttataccatcacccaagagtctctggtacctcatcaaatggatttggacacacctgtgcaaaaaaaaaatgaggaggaagccagaatcattcggaacaatcgggaggcgagcagccgataacctgcgaaggcatcaccaataccaggaagtaatgcggaatctcgttaagcgttatgtggccgccatgatccgggatgccaagaccgaggaggggttgactgaagagaacttcaaggagctgaaacaggatatctcctctttccggttcgaggtgctgggattgctcagggggtccaaactgtcaaccatccagtctgcaaatgcatccaaagaatcctcgaatagcgctgacagtgatgagaaaagcgatagcgaagaggaagtggcccgccagcaggctgcgggccccctcgagcggaacatccagcttgaatcaaggggcctcgctagccgcggagacctctctattccaggactttctgaacaatgtgtgctggttgaccatcgcgagagaaatacggacacgctgggcctacaagtggggaaaagagtgtgtcccttcaaatcagagaaagttgttgtggaagataccgtgcccattatccctaaggagaagcacgctaaggaggaggatagttctatcgactacgatctcaatctgcccgataccgttacgcatgaggattacgtcacaacccggctctag

SEQ ID NO: 209186 - DNA, 2487 bp, synthetic construct
  misc_feature 1..2487: note = Description of Artificial Sequence: Synthetic coding sequence
  source 1..2487: mol_type = other DNA
atggcccagttctactacaagcggaacgtgaacgccccctaccgggaccgcattcccttgcgaatcgtaagagctgaaagcgagctgtctccttctgaaaaagcctatctgaacgctgtagagaagggagattacgctagcgtgaagaagagcttggaagaagcagagatctactttaaaattaacataaattgtatagacccccttggtagaactgcactgctgattgcaatcgagaatgaaaatctcgaactaatcgagcttctgcttagtttcaatgtgtatgtcggggatgctctgctgcacgcaatccgcaaagaggtggtaggcgcggtggaactgctgctcaaccataaaaaaccttccggggaaaaacaggtgccccctattttactggataaacagttttctgaattcaccccggatatcaccccgattattttagcagcacacaccaataactacgagatcataaagctgctggtgcaaaagggcgtctccgttcccagaccgcatgaagtgcggtgcaattgcgtagagtgtgtgagctcttccgatgttgacagcctgcgccatagtcgtagcaggctgaacatttataaggcgctggcatcgccttcgcttatcgctcttagcagcgaggacccattcctcacggctttccagctgtcttgggaactgcaggaactgtccaaagtggaaaatgaatttaaatcagagtatgaggagctgtcgagacaatgtaagcagttcgcaaaagacctgttggaccagacccgctcctcgcgggaactggaaattatcttgaactatcgtgacgacaactctctgatagaggagcaatctggaaatgatctggcccggcttaaactggctatcaagtataggcaaaaggagtttgttgcgcagcccaactgccagcaactgctggccagccgttggtatgacgaattccccgggtggagacggcggcattgggccgtcaaaatggtgacttgttttatcatcgggttactctttcctgtgttctcagtgtgttatctgatcgctcctaaatccccactgggactttttattcgaaagcctttcataaaattcatatgtcatacagcatcatacctgaccttcctctttctgcttctactggcatcccagcatattgatcgctctgatcttaaccgccagggaccccctcctacaatcgttgaatggatgatccttccatgggtcctcggatttatctggggggaaattaagcagatgtgggatggggggctccaagattacatccacgactggtggaatcttatggacttcgtaatgaatagcctttatctggcaacaatatccttaaagattgttgccttcgtcaaatattcggctctgaacccacgtgagagctgggacatgtggcaccctacactcgtagccgaagccctttttgcgatcgctaatattttttcttccttacggctgatatcattattcaccgctaactctcacctcgggcctcttcagatatcacttggacggatgctgttggatatcctgaagttcctttttatctactgtctcgtgctgctagcattcgctaacggactgaatcaactatatttttattatgaggagactaaaggcctgacctgcaaggggatccgctgcgagaaacagaataacgccttttcaactctgtttgagacactccagagtctgttctggtccatttttgggctgattaatttatacgttaccaacgtgaaggcacaacacgaattcacagagttcgttggagccactatgtttgggacatataacgtaatcagtttagtggtcttgctgaacatgttgattgcgatgatgaataatagctaccaacttattgctcggagagcagccgacaatttaagacgtcaccaccagtatcaagaagtgatgcggaatttggtcaaacggtatgtcgccgccatgatccgtgatgccaagactgaagaggggctgaccgaagaaaacttcaaggaattaaaacaggacatctcaagtttcaggttcgaggtgttgggcctgctcaggggcagcaagttgagcacaattcaatctgccaacgcctcaaaggagagctcaaatagtgcagatagtgacgagaaaagtgacagcgaggaggaagttgcaaggcagcaggcggctgggcccctagagaggaatattcaactcgagagccgggggttagcctctagaggcgatctcagtatccccggcctatccgagcagtgcgtcttagtggatcatcgcgagcggaatactgatacacttggcctacaggtaggaaagagggtctgcccatttaaaagcgaaaaagttgtggtggaggatacggtgccgatcataccaaaggagaagcatgccaaagaggaggactcctctattgattacgatctgaatctgccggacaccgtgacgcacgaagactatgtgaccacccgcctgtag

SEQ ID NO: 209187 - DNA, 2415 bp, synthetic construct
  misc_feature 1..2415: note = Description of Artificial Sequence: Synthetic coding sequence
  source 1..2415: mol_type = other DNA
atggcccagttctactacaagcggaacgtgaacgccccctaccgggaccgtatcccactacgtatagtccgggccgagtccgagctctcacctagcgaaaaagcatacctcaacgctgttgagaagggcgattacgctagtgttaagaagagtcttgaggaggcagagatttactttaaaataaatataaattgtatagacccactggggcgtaccgcgctgctcattgcgatcgagaacgagaacctggaactgattgaacttctgctgtccttcaatgtttatgtgggagacgccctgctgcatgccattcgcaaggaagtcgtcggcgcagttgagttattgctcaaccacaagaaacccagtggcgagaagcagtttgtggcccagcctaactgccagcagttactcgcgtcaagatggtacgacgagttccctggatggcgccgacggcactgggcagtcaaaatggtcacctgcttcatcattgggttgctgttcccagtgtttagcgtgtgctacctgatcgctccaaagagccccctcggcttatttatacgcaaaccttttatcaaattcatctgccacactgccagttacctcacttttctgtttctgcttctgctagcgagccagcacatcgatagatcagacctcaaccgtcagggtcccccccccaccatcgtggaatggatgatcctcccatgggtcctcggattcatatggggggaaatcaaacagatgtgggacggcgggctgcaggactatatccatgattggtggaacctgatggacttcgtgatgaactcactgtatcttgccacaatatcactcaaaattgtggctttcgtgaaatattccgctctgaaccctcgggagagttgggacatgtggcaccctacactcgtggcagaggctctgtttgctattgccaacatcttcagctccctgcgcctgatttccctgttcactgccaactctcacctcggccctctacagatctccttaggcagaatgttgctggacatcctcaagttcctgtttatctactgcttagtactgctggcgtttgccaatggtctgaatcagttatacttctattacgaagaaaccaagggtctgacatgtaaaggaatccgttgtgagaaacagaacaatgcttttagcaccctgtttgaaacactgcagtcactgttctggtccatctttggtttgattaatttgtatgtgacaaatgtgaaggcacaacatgaatttaccgagttcgtgggcgcaaccatgtttggaacctacaatgtgattagcttggtcgtcctcttaaatatgctcattgctatgatgaataacagttatcagttgattgcggatcacgcagacatagaatggaagtttgcaagaacgaagctatggatgtcctactttgaagagggcggtaccttgcctacgccctttaacgtcattccaagtcccaagagtttgtggtacctgattaagtggatttggacccacttgtgcaaaaagaaaatgaggcgaaagcccgagagcttcggcacaattggccgacgcgccgccgacaatcttaggcggcaccaccagtatcaggaggtgatgcggaacctcgtgaagaggtacgttgccgccatgatacgcgacgcaaagacagaagagggattgacagaagaaaacttcaaagaactgaagcaggatatttcttcctttcggttcgaggtcctgggtctgttacgcgggtccaaactctctaccatccagtcagccaacgcaagtaaggagtcgtctaactctgctgattctgacgagaaatcagattccgagggcaattctaaggataaaaagaagaacttctcactctttgacctaacaaccctgattcatccgcgctcagcagctattgcctcggaaaggcacaacatctccaacgggagcgcacttgtggtccaggaacctccccgcgaaaaacaacggaaagtgaacttcgttaccgacattaaaaatttcggactatttcatcggcgctctaaacagaacgccgcagaacagaatgcgaatcagatctttagcgtctccgaggaggtagccaggcagcaggcggccgggcccctggaacgcaatatccagcttgaaagcagagggctggcgagccggggcgatctgagtattcccggcctgtcagaacaatgtgtcctggtagatcatagggagagaaacaccgacacccttgggctccaggttggtaagcgggtgtgtccgtttaaatccgagaaggtggtggttgaggatactgtgcccatcatccccaaagagaaacacgccaaagaggaggactcttccattgattacgacttgaacctgcctgacactgtgacgcatgaggattacgtcactaccagactgtag

SEQ ID NO: 209188 - DNA, 2949 bp, synthetic construct
  misc_feature 1..2949: note = Description of Artificial Sequence: Synthetic coding sequence
  source 1..2949: mol_type = other DNA
atggcccagttctactacaagcggaacgtgaacgccccctaccgggacaggattcctctccgcattgtgcgggcggagtcagagctgtcaccgtcagagaaggcgtatctgaatgctgtggagaaaggagattatgccagtgtcaagaagtccttggaggaggctgaaatctatttcaagataaatattaattgcatcgaccccctggggcgcacggcactcttgattgccatcgagaacgaaaacctggagttgatagaactgctgttatcctttaacgtgtacgtcggcgatgcccttctccacgccattcgcaaagaagtcgtaggtgccgtcgagctgctgctgaaccataaaaagccatcaggcgagaagcaggtgcctcctatcttgctcgataaacaattttcggaatttacccccgacattaccccaatcatcctggccgcccacaccaataactatgagattattaagttgctcgtgcagaagggtgtgtccgtgcctcgcccccatgaagttcgctgcaactgtgtcgaatgcgtgagctcatccgatgtcgattcactaaggcatagccgctctaggcttaatatctataaagcactcgcttctccatctctcattgcactgtcctccgaggaccctttcctcacagcttttcagctgtcctgggaactgcaggaactgtcaaaggtagagaacgaattcaagtcagagtatgaagaactctcgcgccagtgtaagcaatttgcaaaagatctgctcgatcagacaaggtcatcccgtgaactggaaatcattctgaattaccgcgatgataacagcctgattgaggagcaaagtggcaatgatctcgctagattaaaactggctataaaataccggcagaaagagttcgttgcccagcccaactgtcagcagctcctggcttcccggtggtatgacgagttcccaggttggcgaagaagacattgggcagtgaaaatggttacatgtttcattataggccttctgtttcccgtgttctccgtctgttacctaatagcccccaaaagccctctcggcttgttcatccgcaagccctttatcaaattcatttgccataccgccagttacttaaccttcttgttccttctgcttctggctagtcaacacattgatcgatctgacctcaataggcagggcccgccccctacgattgtcgagtggatgatacttccatgggtgttggggtttatttggggggagattaagcagatgtgggacgggggactccaggattatattcacgattggtggaatctgatggacttcgtgatgaactccctataccttgccaccataagccttaaaattgtcgccttcgtgaaatactcagctctgaatcctagagagtcgtgggacatgtggcatcccactctggttgctgaggccttattcgcaattgccaatatcttttcaagcctgaggcttatttccctgtttaccgcaaatagccacttaggtccgttgcagatctctctggggcgcatgctgctggatattttaaaatttctgttcatttattgtcttgtcctgctggcattcgctaatgggctaaatcaactgtatttttactacgaggaaactaaagggttaacatgtaaaggcataaggtgcgagaagcagaacaacgctttcagtactctttttgagactctgcagagtctgttttggagtatctttggtctgatcaacttgtatgtgactaacgtgaaggcccagcacgaatttaccgaattcgtcggagccactatgttcgggacatataacgtgatcagcttggtggtgctcctgaatatgctcatcgccatgatgaacaattcctatcaactcatcgcagatcatgcagacatagagtggaaattcgctaggactaagctttggatgtcttatttcgaggaaggcggcactctgcctacaccgttcaatgtcatcccttccccaaaatccctgtggtacttgattaagtggatttggacccatctctgtaagaaaaaaatgcgacgcaagcccgaaagcttcgggacaattggtgtgaggacgcagcatcgaagggccgctgataatctccgtcgacatcatcagtaccaggaagttatgcgtaacttagtcaaacgatatgtcgcagctatgatacgcgacgctaagacagaagaagggctgacggaggagaacttcaaggagctgaaacaggacataagcagtttcagatttgaggttctgggactcttgcgcggatccaagctgagcacgatacagagcgcgaatgccagcaaggaatcatccaactccgccgactctgacgagaagtctgattccgaagggaattcgaaagacaagaaaaagaattttagccttttcgacctgacaaccctgattcaccctcgaagcgctgcaattgccagtgagagacacaacatcagcaatggaagcgcactcgtagtgcaggagccccctagggaaaagcagcggaaagtgaattttgtgactgatatcaagaattttgggctatttcacaggaggagcaaacagaacgccgctgaacagaacgctaatcagattttctcggtttcggaggaggtcgcgcgtcagcaggccgccggccctcttgagaggaacatccaactggagagtagggggttagcttctcgaggggacctaagtatccccggtttgagcgaacagtgtgtcttggtggaccaccgcgagcggaacacagacacactgggtctacaggtggggaaaagggtgtgtcccttcaagtcagagaaggtagttgtggaggacactgttcccataatccccaaggaaaagcacgccaaggaggaggacagttccatcgactatgacctcaatctgcctgacaccgtcacacatgaggactacgttaccactcgcctttag

SEQ ID NO: 209189 - DNA, 2934 bp, synthetic construct
  misc_feature 1..2934: note = Description of Artificial Sequence: Synthetic coding sequence
  source 1..2934: mol_type = other DNA
atggcccagttctactacaagcggaacgtgaacgccccctaccgggatagaattcccctccggatcgtcagggccgagtcggagcttagcccatcagagaaagcctatcttaatgctgtggagaaaggcgactatgcaagtgtgaagaagtctttggaggaggcagaaatatactttaagatcaatattaactgcattgatccattgggcaggactgcacttctaatagcaattgagaacgaaaacttggaactgattgagctgctactgagcttcaatgtgtatgttggggatgctctgctacacgcaatcaggaaggaggtcgtcggcgcagtcgagcttcttctcaatcacaagaagcctagcggggagaagcaggtgccacctattctcttggacaagcagttctccgagttcacccctgacatcacacccattatattggcggctcacaccaacaactacgaaattatcaagctcctggtgcaaaaaggagttagtgtacccagaccacacgaggtgcgctgcaattgcgttgaatgcgtctcaagcagcgatgttgattcactgagacactctcgcagcagactgaacatctacaaagcgctggcttcacccagcctcatagctctgtccagtgaagatccattccttaccgcctttcagctttcgtgggagcttcaggagcttagtaaggtcgagaacgaatttaaatccgagtatgaggagctgtcccggcagtgtaaacagttcgctaaggacctactggaccagaccaggtcatcgagagagctggagattatactgaattacagagatgataatagccttatcgaggaacaatcgggaaacgatctggcccgtctgaaactggcaattaagtatagacaaaaggaattcgtcgcccaaccaaactgccagcagctcctggctagtcgctggtacgatgagttcccaggctggaggcgccgccattgggccgtgaaaatggtcacttgttttatcattggactgttgtttcccgtcttctctgtatgttatctcattgccccgaaaagcccccttgggctctttatccgtaaaccgttcatcaaattcatttgccacacagcttcttacctgacatttctgtttctcctcctgttggcgtcgcagcacattgacagaagcgatcttaaccgtcagggacctcctcctacgattgtggaatggatgattctgccttgggttctgggatttatttggggagagatcaagcagatgtgggatgggggtctgcaggactatatccacgactggtggaaccttatggatttcgtgatgaatagtttgtacttggctacaatttcattgaaaatagttgcattcgtgaaatattcagccttgaaccctcgggagtcctgggatatgtggcaccctacgttggtggccgaggccctgttcgctatcgccaacatcttcagttctctccggcttatttcactcttcacagcgaattctcacttaggcccactccaaatatcactgggccggatgctgctggacatcctaaagtttctcttcatttactgcctggtgctgttagcatttgcaaacggactcaaccagctgtacttttattatgaagaaaccaagggtctgacctgtaagggcatccgatgcgaaaagcagaacaatgctttctctacactgtttgagactcttcagagcttgttctggtcaatttttggactgatcaacctgtacgttaccaacgtgaaagcgcagcacgagttcaccgaatttgtgggggcaacgatgttcggcacctacaacgttatctctctcgtcgttcttctcaacatgctcattgccatgatgaataatagctatcagttgatagccgatcatgctgatatcgaatggaaattcgcacgcactaagttgtggatgtcatatttcgaggagggcggtactctgcctactccattcaatgtgattccgagcccaaagtccctatggtatcttatcaaatggatttggacacacctttgtaagaagaaaatgaggcggaagcctgagagttttggtaccattggccggagagcggcagataacctgcggagacatcaccaatatcaggaggtgatgcgcaatctcgtcaaaagatatgtcgccgcgatgatcagagacgcaaaaacggaggagggtctaacagaggagaattttaaggagctaaagcaggacattagctctttccgctttgaagtcttagggctccttcgaggaagcaagttgtccaccatacaatcggcaaatgcaagcaaagagtcaagtaactccgctgactcagacgagaaaagcgattcagaaggcaattcaaaagacaagaagaaaaatttcagcctgttcgacctcactactctgattcatccacggtctgctgcaattgccagcgagcggcacaacatctccaacggaagtgcattggtggttcaggagccgccgagggagaaacagcgcaaggtgaactttgtgactgacatcaaaaattttggcctttttcaccggcgctcaaaacagaacgctgcggagcagaacgctaaccaaattttttcggtctccgaggaggtagcaaggcagcaggctgccggccctctggaacgaaacatccagttagaatctcggggcctggccagtagaggtgacctgtcaattccaggccttagtgagcaatgcgtcctggtggatcacagggagcgcaataccgacacacttgggctgcaggtaggtaaacgcgtctgcccctttaagagcgaaaaggtggttgttgaggacactgtgcccatcatccccaaggagaaacacgcaaaggaggaagactccagcattgactacgacctgaatttgccagatacagtgacccacgaggactacgttactaccaggctgtag

SEQ ID NO: 209190 - DNA, 1383 bp, synthetic construct
  misc_feature 1..1383: note = Description of Artificial Sequence: Synthetic coding sequence
  source 1..1383: mol_type = other DNA
atggcccagttctactacaagcggaacgtgaacgccccctaccgggatcgcattcctctgcgcatagtcagggctgaatccgaactgtcaccttctgaaaaagcctacctcaacgcagttgagaagggggattatgcgtccgtcaaaaaatcactcgaggaagcggaaatctatttcaaaattaatataaattgcattgatcccttggggaggactgcacttctcatcgccattgagaacgagaacttagagctgatcgagcttttactttctttcaacgtatacgtaggcgatgcattactgcacgcaatacggaaagaggtcgtcggagcggtggaacttttgttgaatcataaaaaaccgtccggtgagaaacaggtgccccccattctgcttgataaacaattttcagagtttacccctgatatcaccccaatcatcctggccgcccataccaataactacgaaatcatcaagcttctcgtgcagaaaggggtgagcgttccacgcccccatgaagtgaggtgcaactgtgtagagtgtgtgagttcatccgatgtcgacagcctgcgacactctaggagtagactgaacatctacaaagccctggcgagcccctcattgattgccctgagctcagaagatccattcttaacggctttccaattaagttgggagttgcaagagctcagcaaagtggagaacgagttcaaatctgagtacgaagagctcagcaggcagtgcaaacagttcgccaaggaccttttggaccagactaggtctagccgcgagctggagattattctcaattatcgagatgacaacagcttgatcgaggagcagagcggcaacgatctggcaagactgaagctcgctatcaagtataggcagaaggagtttgtcgctcagcccaactgtcagcaactactggcatctcgctggtacgatgaattccccgggtggcgcaggcgccactgggccgtcaagatggtcacgtgtttcataatcgggctgcttttcccagtgttcagcgtctgttacttgatcgccccgaagtctcccctgggcctgttcataaggaagcctttcataaagttcatttgtcatactgcgtcttatctgacattcttgtttctgttgcttctagccagtcagcatatagacagatcggatctgaaccgccagggccccccacccactatcgtggagtggatgatcttaccatgggtgctcgggttcatttggggggagataaaacagatgtgggacggtggactgcaggattacattcacgattggtggaatctgatggacttcgtcatgaatagtttgtacctggcaacaatctctttgaaaattgtcgcctttgttaaggttatttag

SEQ ID NO: 209191 - DNA, 2511 bp, synthetic construct
  misc_feature 1..2511: note = Description of Artificial Sequence: Synthetic coding sequence
  source 1..2511: mol_type = other DNA
atggcccagttctactacaagcggaacgtgaacgccccctaccgggatcgcatccccctgcggatcgtgcgggccgagagtgaactgtctcccagcgaaaaagcatatctgaacgcagttgagaaaggagactatgcttccgtgaaaaaatctcttgaggaagctgagatttactttaaaatcaacattaactgcattgaccctttgggtcgcacagcactgctgattgctatagaaaacgagaatctggaattgatcgagctgctcttgtcctttaatgtatatgttggtgacgcactgctccatgccattcgaaaggaggtcgtgggcgccgtagaactactcctgaaccacaaaaagcctagcggtgagaaacaggttccgccaattctgttggataaacagttttcagaattcaccccagatattacccccatcatcctggctgctcataccaataattatgagatcattaagctgttagtgcagaaaggagtttctgtgcccagaccacatgaagtccgatgcaattgtgtggaatgcgtctcttcatcagatgtggattctcttaggcactcaagatctagactaaatatttataaagccctggctagtccatccttaattgcgttaagcagcgaagaccctttcctgactgccttccagctttcttgggagctccaggagctgtcaaaagtggaaaatgagttcaagagtgagtacgaagagctgagtagacagtgcaaacaatttgcgaaggacctcttagatcaaacgcgtagttcacgtgaactagagattatcctgaactaccgtgatgacaactcgctgattgaagaacagagcggaaacgacctggctcgcctgaagctggccatcaagtatcgccaaaaagaatttgtggcccaacctaattgccagcaactgctggccagccgttggtatgatgaattcccaggctggcgtcgccgccactgggccgtgaagatggtgacctgctttattataggactcctattccccgtgttttccgtatgctacctgattgcacctaagagccctctgggactgttcatccggaagccattcatcaaattcatctgccacactgccagctatctgacctttttgtttctattactgctggcgtcccagcatattgaccgatcggatttaaatcggcagggccctccacccaccatcgtcgagtggatgattctgccatgggttctgggtttcatatggggagagatcaagcaaatgtgggacgggggtctccaggactatatccatgattggtggaacctgatggatttcgtaatgaacagcctgtacttggcgactattagtcttaagatcgttgcgttcgtgaaatacagtgcactcaatccccgtgagagttgggatatgtggcaccccactctggttgctgaagctctgtttgcaattgctaatattttctcctcactccgcctcatcagcttgtttacagctaacagccatctaggccctctccagatttcactcgggcgtatgctgctcgatattctgaaatttttattcatctattgtctcgttttgttagcattcgcaaacggcctgaaccaactgtacttctactatgaagaaactaaaggtctaacttgcaagggaatcagatgtgagaagcaaaataatgctttttctaccctctttgagactcttcagtctttattttggagcattttcggtctcataaacctgtatgtgaccaacgtgaaagcgcagcacgagttcaccgagtttgtgggagccaccatgtttggcacatacaacgtaatttctcttgtcgtccttctgaacatgctgattgcaatgatgaataatagctaccagctaatcgcagatcatgccgatatcgagtggaaattcgcgagaactaagctctggatgtcatactttgaggagggtgggactctccccaccccttttaacgtcattccttctccgaaatccctctggtacctgatcaagtggatttggactcacctttgtaagaagaaaatgcgcaggaaacccgaaagctttgggacaatcggaagacgagccgccgataacctgcggcgtcatcatcaatatcaggaggttatgcgaaacctggtgaagaggtatgtcgccgccatgatccgcgacgcaaaaacagaagaggtcgctagacagcaagccgctggaccacttgagcggaacatccagctcgagagtagaggcctggcctccaggggcgatctgagcattcctggcttgagcgaacaatgcgtcctggtggaccatagagaacgaaataccgacactctgggtctacaggtgggcaaacgcgtgtgccctttcaaaagcgaaaaggtggtggtagaggacactgtacctataatcccgaaggagaagcacgccaaagaggaagacagctctatagactatgatctcaacttgccagatactgtgacccatgaggactacgtcacaacgcggttatag

SEQ ID NO: 209192 - DNA, 2394 bp, synthetic construct
  misc_feature 1..2394: note = Description of Artificial Sequence: Synthetic coding sequence
  source 1..2394: mol_type = other DNA
atggccgccgcccccgtggccgccggcagcggcgccggccggggccgcaggtccgcagccacagtggctgcttggggaggctggggcggccgccctcgccctggcaacatcctcctacaattgagacagggacaactcactggacgaggactggtgcgagctgtccaattcacagagactttcttgacagagagggacaagcagtctaagtggagcggaataccacagttgctgctgaagctgcatacaaccagccatctgcattctgactttgtcgagtgccagaatatacttaaggaaatttcccctctgctgagcatggaggccatggcctttgtgacagaagaaagaaaactcactcaagagacaacctaccccaacacctacattttcgatctttttgggggcgtggacttgttggtggaaatcctgatgaggccgaccatctcaattcgaggccagaagctcaagatttcggacgagatgtccaaagattgtctttctatcctgtacaacacctgtgtctgcacagaaggtgtaaccaaacggctcgccgaaaaaaatgacttcgttattttcctcttcacactgatgacttcgaaaaagacgttcctgcaaacagctaccctcattgaagatattttaggtgtgaagaaagaaatgattcgtctggacgaagtgcctaacctcagctccttggtcagtaactttgaccaacagcagttagcaaatttttgtagaatactggcagttaccatttcagagatggatacagggaatgacgacaaacacacactgctggcaaaaaacgctcagcaaaaaaaaagtctcagcctcggccctagtgccgcggaaattaatcaggccgccctcctgagtatcccaggctttgttgagcggctgtgcaaactggctactaggaaagtatccgaaagcaccgggaccgccagtttcttgcaggagcttgaggaatggtatacttggctcgataacgcactcgttttggatgccctgatgagggtcgccaatgaagagtctgagcataatcaggcttcaatcgtcttcccccccccaggggcctccgaggagaatgggctcccccacacatccgctcgcacacagctaccacagtcaatgaagatcatgcacgagatcatgtataagctggaggtattgtacgtactgtgtgtgctgttaatgggaaggcaaaggaaccaggtacatcggatgatcgcagagttcaagctcattcccggcctcaataatctcttcgacaaacttatctggcgaaagcacagcgctagtgctttagtgttgcatggccataatcagaactgtgactgcagtcccgacattacattgaagatccaatttttgcggctgcttcagagcttcagcgatcatcacgagaacaaatacctgctgctgaacaaccaggaactgaatgaattatctgccatcagtcttaaagccaatattccagaggttgaagctgtgctgaacaccgatagaagcctggtgtgtgacggaaaacggggcctcctcactcgtctgctgcaggtgatgaagaaggaaccggctgagtccagcttcagattctggcaggcgagagcagtagaaagcttcctccgaggcaccacatcctatgctgatcagatgtttctcctgaagcgcgggttgctggaacacatcctttactgcatcgtggactctgaatgcaaaagtagggatgtgctccagtcctacttcgatttattaggcgagctcatgaagtttaatgtggacgcatttaaacggttcaataagtatataaatactgatgcaaaattccaggtgttcctgaaacagattaatagctcactcgttgacagcaacatgcttgtccggtgcgttacactaagcctggatcggtttgaaaaccaggtagacatgaaggtcgccgaagttttaagtgaatgccgactccttgcctatattagccaggttccgactcagatgtcgttcctgtttcgactgatcaatattatccacgtgcagaccctgacgcaggagaatgtctcatgcttgaatacgtccctagtcatcctcatgttagctcgccgaaaagaaaggctgcctctctatctccgtcttttacagcggatggaacacagtaaaaagtaccccggatttctgctgaataacttccataaccttctgcggttctggcagcagcactatctgcacaaagacaaggatagcacatgcttagaaaattcatcgtgcatcagtttctcatattggaaggagaccgtgtccatcctcctgaaccccgataggcagtcaccatctgctctggtgagctacatcgaggaaccatacatggatatcgaccgggattttactgaggagtag

SEQ ID NO: 209193 - DNA, 2277 bp, synthetic construct
  misc_feature 1..2277: note = Description of Artificial Sequence: Synthetic coding sequence
  source 1..2277: mol_type = other DNA
atggccgccgcccccgtggccgccggcagcggcgccggccggggccgaagatccgcagccacagtggctgcctggggcggatgggggggcagacctcgccctggaaacatactcctccagctgcgtcagggccagttgaccgggcgcggcttggtacgggcagttcagtttactgagactttcctgacagagcgcgataaacagagcaaatggtcagggattccccaactgctgctaaaactgcacacaacatcacacctccactctgatttcgtagagtgtcaaaacatcctgaaattactggtagagatactcatgcgtcctactatctccatacgtgggcagaaattgaagatttccgacgagatgagcaaggactgcctcagcattctgtataatacatgtgtctgcacggaaggtgtgacaaagagactggctgagaagaatgactttgtgatcttcctgtttaccctgatgacatccaaaaaaacatttcttcagacagctacattgatcgaggatatcttaggtgtgaaaaaggagatgatcaggctagatgaggtaccaaacctgtcctctttggttagtaactttgatcaacagcagctcgcaaatttctgtcgcatccttgcggtgacaatctcggaaatggatacagggaatgacgacaagcacacattgctggccaagaacgcccaacaaaagaagtctctatcgctagggccttctgccgctgagatcaatcaagctgcattgctgtccatccccgggtttgtggaaagactgtgcaaactcgctacacgcaaagttagcgagtcaacgggaaccgccagcttccttcaggaactggaagaatggtacacatggctcgacaatgctttagtactggatgcacttatgcgggttgccaacgaggaatccgagcataatcaagcatccatcgtgtttccgccaccaggagccagtgaagaaaatggactgccccatactagtgccagaacccagttaccccagtcaatgaaaatcatgcacgagatcatgtacaagctggaggtactttacgtgttatgtgtgttactcatggggagacaaaggaatcaggtgcacaggatgatcgccgagttcaaactcattcctggtttgaacaatctatttgataaacttatctggaggaagcactccgcctcagctttggtgttgcacggccacaaccaaaactgtgactgctcgccagacataaccctcaagattcagtttctgcgcctgttacagtcattcagcgaccaccatgaaaacaaatacttgctgttgaacaaccaggaactgaacgagctgtcagccatctcccttaaagcgaatattccagaagtagaagcggtcctgaacaccgatcgttccttagtctgcgatggaaaacgcgggctgttaactaggctactgcaggtgatgaaaaaagaaccggccgagagtagttttcggttttggcaagcgagagctgttgagtcattcttgagaggtacaaccagctacgccgaccaaatgttcctcctgaaacgtggactgctcgagcacatcctgtactgcatcgtagattccgaatgcaagagtagagacgtcttacagtcctacttcgacctgctcggagaactgatgaagtttaatgttgacgccttcaagaggttcaacaagtatatcaataccgatgctaagttccaagtcttcttgaaacaaattaacagctcactggtggattctaacatgctggtccgctgcgttactcttagcctggatagattcgagaatcaggtggatatgaaagtcgcggaggtgctgtcagagtgtcggctcctggcctacatttctcaggtcccgacccagatgagcttcctgttcaggttgatcaatattatccacgttcagactctaacccaggaaaacgtgtcttgcttaaatacctcccttgtgattttgatgctggcacgaagaaaggaacggctcccactgtacctgcggttgttacagcggatggaacacagtaagaaatatcccggatttctgttaaacaacttccacaaccttcttcgattttggcagcagcactaccttcacaaagacaaggactctacctgcctggaaaatagctcatgcatatccttttcatactggaaggaaacagtaagcatccttctgaatccagacagacagtcaccctccgccctggtgtcttacatcgaggaaccctacatggatattgatcgggacttcactgaggaatag

SEQ ID NO: 209194 - DNA, 2370 bp, synthetic construct
  misc_feature 1..2370: note = Description of Artificial Sequence: Synthetic coding sequence
  source 1..2370: mol_type = other DNA
atggccgccgcccccgtggccgccggcagcggcgccggccggggccgcaggagcgccgcaaccgtcgcagcctggggtggatggggaggtcgtcccaggcctggtaatatcctgctgcagttgcgccagggccagttgacggggagagggcttgtgcgtgcagtacagtttaccgagacttttctgaccgaaagagataaacaatcaaagtggtccggtatacctcagctcttgctaaagctccataccacttcgcatctccactcagatttcgtggagtgccagaatatcctcaaggaaatatccccgttactgagcatggaggccatggcattcgtgaccgaagaaagaaaactcacccaagagactacctaccctaacacatacatctttgatctgtttggaggcgtcgacctcctggtcgagattcttatgagacccaccatttctatcagaggccaaaagttaaagatcagtgatgagatgagtaaggactgcctttccattctgtacaacacgtgcgtttgcactgaaggggtaactaaacgactggcagagaagaacgattttgtgattttcttgttcacactgatgacttctaaaaagacgttcctgcagaccgccacactcattgaggacatcctaggcgtgaaaaaggagatgatacgcctcgacgaagttccaaacttatctagccttgtgtccaacttcgaccaacagcagctcgccaatttctgccggatcctggcggtgacaatcagcgagatggataccggtaacgatgacaaacacacactgctggccaaaaatgcgcagcagaagaaaagcctaagcctggggcccagcgccgctgaaataaatcaggctgcactgcttagcatacccggattcgttgaaagactgtgtaagctggctacccggaaggtgtcagaatctactggtacagcctccttcttacaagaattggaagagtggtacacatggctggacaacgctttggttctcgacgccctgatgagggtggccaacgaggaaagcgagcataatcagggcgcttcagaggaaaacgggctcccacatacatctgcccggacccagctaccccaatcaatgaagataatgcatgaaataatgtacaaactagaggtactctacgtcttatgcgtgctactcatgggtcggcagaggaatcaggttcaccggatgattgccgaattcaaacttatccctggtctcaataatctgttcgacaaactcatatggaggaagcactctgcctctgcacttgtactccacgggcacaaccagaactgtgactgttcacctgacatcacactgaaaatccaatttttgcgcctcctccagagcttttccgaccatcacgaaaataaatatctgctgctgaataatcaggagcttaatgagctaagtgctatctcgctcaaggcgaatattccagaagtcgaggctgtgctgaacaccgatcgctcactcgtctgtgacggaaagcggggactgctaacgagactgttacaagtgatgaagaaggagccggctgagtcatccttcagattttggcaggctcgcgcggtggagtctttcttacgtgggaccacttcatatgccgatcagatgttcctgctaaaacgggggttgcttgaacatattttatactgtatcgttgatagtgagtgtaaaagtcgcgacgttttgcaatcttacttcgacctcttgggggagctaatgaagtttaatgtcgatgcctttaagcgcttcaataagtacatcaataccgacgccaaattccaggtgttcctgaagcagatcaattcctcactcgtagatagtaacatgctggtgcggtgcgtgacactgtccctcgacaggttcgaaaaccaggtcgatatgaaggtggcagaagtgctaagcgagtgtcgcctgctggcatatatctcccaagtccctacacagatgagtttcctctttaggctaatcaatatcattcacgtgcagactctaacccaagaaaatgtcagctgcttgaatacctcgcttgtaatcctgatgcttgcccgacgaaaggaacgactgcctctctacctccgtttgctccagagaatggagcactctaagaagtaccccggattcttgctcaacaattttcacaaccttctccggttctggcagcagcactatctccataaggacaaagacagtacatgcctggagaatagttcatgtatctctttttcctattggaaggaaaccgtgtcaatactgctgaacccggatcgacagtctcctagtgctctggtgtcatacattgaggaaccatatatggacattgatcgggatttcacagaagagtag

SEQ ID NO: 209195 - DNA, 1200 bp, synthetic construct
  misc_feature 1..1200: note = Description of Artificial Sequence: Synthetic coding sequence
  source 1..1200: mol_type = other DNA
atgcggagccagagcaccatcaaggtgcaccggatgatcgccgagttcaaactgattcccggactaaacaatctgtttgacaagctcatttggcgaaaacactcagctagcgcactggtgctgcacggacacaatcagaactgtgactgtagccctgacataaccctcaagatccagtttttaaggttgctacaaagtttctcagaccaccacgagaataaatacctgttgctgaacaaccaggaattaaatgaactctctgctatctccctaaaggctaacattcctgaggtcgaagccgtcctgaacactgatagaagcctggtgtgcgatggaaaaaggggactgttaaccagactgctgcaggtgatgaagaaagagcctgccgagtcctcattccggttttggcaggcccgagcagttgaaagctttctgagggggaccaccagctacgccgaccagatgttcttattgaagcggggactgctagaacacattttgtattgtatagtggatagcgagtgcaaatcccgggacgttcttcagagctactttgacctgttgggcgaactgatgaagttcaatgtggacgccttcaaacgcttcaacaagtatatcaacacggacgcgaagtttcaagtgttccttaaacagatcaactcctctcttgtagacagtaacatgctggtgcgatgtgtcacactctccctggaccgatttgaaaatcaagttgacatgaaggtcgcagaagttctgagcgagtgtcgcctgctggcctatatcagccaggtgccaacacagatgtccttcctgtttaggctgatcaacatcatacatgttcaaactctgacccaggagaacgtttcttgtttgaacacttcgctggttatcttgatgctggcccgcaggaaggaacggctcccattgtaccttagactgttacagcgtatggaacactccaagaaatacccaggattcctgctgaataattttcataatctactgaggttttggcagcaacactacttgcataaagacaaggactccacatgtctggagaatagtagctgcatctctttcagttactggaaggagactgtaagtatccttcttaatcccgatcgacagtcaccgagcgccctggtctcatacatagaggagccgtatatggacatcgaccgcgatttcacagaggaatag

SEQ ID NO: 209196 - DNA, 2349 bp, synthetic construct
  misc_feature 1..2349: note = Description of Artificial Sequence: Synthetic coding sequence
  source 1..2349: mol_type = other DNA
atggccgccgcccccgtggccgccggcagcggcgccggccggggcagacggtctgccgctaccgttgctgcctggggcgggtgggggcaactcactggccgcgggctggtgcgtgccgttcagttcactgagacatttctcacagagcgagataagcagagtaaatggtccggtatcccccaacttcttctcaaactgcataccaccagccatctacattctgacttcgttgagtgccagaacatactcaaagagatttcacctctcctgtccatggaagccatggcttttgtgaccgaagagaggaagcttacccaggagactacgtaccctaatacgtatatttttgacctgttcggtggtgtggacctcctcgtcgagattctaatgcgacccacgattagcattcgtggacagaagttaaaaatatcagatgaaatgtccaaagattgcttgagtatcttgtacaatacttgcgtctgcactgaaggggtgacgaaacggttagcagaaaaaaatgatttcgttatctttctgttcaccttgatgacgtccaagaagacgtttctgcagaccgcaacgctgattgaagacattctgggagtgaagaaggaaatgatccggcttgatgaagtgcccaatcttagttcactggtgtcaaactttgaccagcagcagctcgcaaatttttgtcggatcctggccgtgaccatctctgaaatggacacaggcaacgatgacaagcacacattgctcgccaaaaatgcgcagcagaaaaagtcgctgagccttggtccttctgcggccgaaataaaccaggctgccctgctatccatccctgggtttgtcgaacggctgtgtaagctcgcgacgagaaaagtgagcgagagcacaggcaccgcatccttcctccaggaactggaggagtggtacacctggctggacaacgctctggttcttgatgctcttatgcgtgtggccaacgaggaatcagagcacaatcaggcatccattgttttccccccccctggcgcctccgaagaaaacggattgccacacaccagcgcaagaactcagttgccacagtccatgaaaatcatgcatgagataatgtataagttggaggtgctatacgtactctgcgtgttactgatgggccggcaaagaaaccaggtacaccgaatgatcgcagaattcaagttaattcctggcctcaataacctttttgacaagttaatctggaggaagcactcagcgagcgcccttgtcctgcatggccacaatcaaaattgtgactgttcgcctgacatcacactgaagattcagttcctgcgcttacttcagtctttttccgatcaccatgagaacaaatacctgttgttgaataatcaggagttgaatgaactatctgccataagtttgaaagccaatatccccgaagttgaagcagtcctgaatacagacagatccctggtgtgcgacgggaaacgtggattgctgacccggcttcttcaggttatgaagaaggagcccgccgagagttctttcaggttctggcaagcacgggctgtggaatccttccttagaggaacaaccagctatgcggaccaaatgtttctgctgaaaagaggactcttggagcatatcttatactgcatcgttgattcagaatgcaagtcccgcgacgtgttacagtcttactttgacctgctgggagagctgatgaagtttaacgtagacgcctttaaacgcttcaacaaatacattaacacggatgcgaagttccaggtgtttttgaaacagatcaattcgagcctcgttgattcaaatatgctcgtcagatgtgtgaccctgagcctggatcggtttgaaaaccaagtcgatatgaaggtcgccgaagtgttgtccgaatgcaggttactagcatacataagtcaagtgcccacacagatgagctttctcttcaggctcataaacattattcacgtgcaaaccctcacgcaggaaaacgtctcatgtctgaataccagtttggtcatcctgatgctggcccgaagaaaggagcggcttcccctctacctccgtctccttcagcgcatggaacacagcaagaagtatccagggtttctcctcaataatttccacaaccttcttcgtttctggcagcagcattatctccataaggacaaagatagtacctgtctagagaactctagctgcattagctttagctattggaaggagaccgtaagtattctcctgaatcccgatcggcaatctccttcggccttagtatcttatattgaagagccatacatggatattgaccgggattttaccgaagagtag

SEQ ID NO: 209197 - DNA, 2922 bp, synthetic construct
  misc_feature 1..2922: note = Description of Artificial Sequence: Synthetic coding sequence
  source 1..2922: mol_type = other DNA
atggcccagctgtactacaagaaggtgaactacagcccctaccgggaccggattcccctgcagatcgtgcgggccgaaaccgagttgtcggcagaagaaaaagcatttcttaatgccgtggagaagggggattatgccaccgtgaaacaggctctgcaagaggcagagatttactataacgtgaacataaactgtatggaccctttgggcaggagtgcgcttttaatcgcaatcgagaatgaaaaccttgagatcatggaattattgctcaaccattctgtgtacgtgggcgatgcgctactgtatgcaatcaggaaggaggtggtgggagcagttgagctgctgctgagctatcgtcgtccttctggcgagaaacaggttcccaccctcatgatggatacccagtttagcgagttcactcctgacatcaccccgattatgcttgcggctcatacaaataactacgagattataaaactgctagtccagaagagggtgactattccacgcccccatcagattaggtgcaactgtgtcgaatgcgtttcgtcttcagaggttgattcactcagacactcaaggtcaaggctgaacatttacaaagccctggccagccccagtctcatagccctgtctagcgaggaccctattttgaccgcttttagactggggtgggaacttaaggaactgtctaaagtggagaacgagtttaaagccgagtatgaagaactgagtcaacagtgcaaactgtttgccaaagacctcctggatcaggcccgcagcagtagagagcttgagatcattctgaaccaccgggacgatcacagcgaggaactggacccgcagaaatatcacgatttagctaaactcaaggtggcgatcaagtatcatcagaaggaatttgtcgcccaacccaactgccaacagcttttggcaactttgtggtatgacgggtttcctggctggaggaggaaacattgggtggtcaagctgctcacttgcatgacaatcggcttccttttcccaatgctgtccatcgcgtatctgatctccccccgatctaatctggggctcttcatcaagaagccattcattaagttcatctgtcacaccgctagttacttgaccttcctatttatgctgctgctggcctcacagcatatcgttcgcaccgacttacatgtccaggggccaccccccacagtggtggaatggatgattctgccctgggtgctggggtttatctggggggagattaaagagatgtgggacggggggtttaccgagtatatccatgattggtggaacctaatggacttcgccatgaacagtctctacctcgccactatttccctcaagattgtggcatacgtcaaatacaacgggagccgccccagggaagaatgggagatgtggcaccccaccctgatagcagaagccctctttgcgattagcaatattctttcttcgctacgcctgatcagtctgtttactgctaattcgcacctaggccctcttcagatcagcctcgggcgaatgctcctcgacattcttaaattcttattcatctactgtctggtgttgctggcctttgccaacgggttgaatcaactgtatttttactacgagacaagagccatcgacgaaccaaacaactgcaaaggaattagatgcgagaaacagaataacgcgttcagtaccttatttgaaaccctgcaaagcctgttctggtctgtgtttggcttactaaatctgtacgtaaccaatgtgaaggcgcggcacgagttcaccgagtttgtgggcgcaacaatgtttgggacctacaatgttatttctcttgtcgttcttctgaacatgcttatcgccatgatgaacaattcctatcagctgatcgcagaccatgcagacatagaatggaaattcgcgcgtaccaagctctggatgagttactttgatgagggcgggactctgccacctccatttaacatcatcccctctcctaagtcattcttatacctaggaaattggtttaacaacacattttgccctaagcgggacccagacggtagaaggaggagaaggaacttgcgatccttcaccgaacggaatgcagattcactgatccaaaaccagcactatcaagaggttattagaaacttggtaaagcgttatgtcgctgctatgattagaaacagcaagacacatgagggcttgaccgaagagaatttcaaggagctgaagcaggatatttcttcctttcgatacgaagtccttgacctgctcggtaatcggaagcacccaagatcgttctctacttctagcacagagctcagccagagagatgacaacaatgacggttccgggggcgcgagagcgaaaagcaaatctgtgagctttaacctgggttgtaagaagaaaacttgtcacggacctcccttaataaggacaatgcctcggagttccggtgcccaaggaaaatccaaggctgagagctcatccaaacggtcattcatgggcccctccctaaaaaagctggggctgttattctcgaagttcaatggacacatgagcgaaccgtcatcagagccaatgtacactattagcgacggaattgttcaacagcactgcatgtggcaagatatccggtactctcagatggaaaaagggaaggccgaagcgtgcagtcagtccgagatcaatctctcagaggtagagcttggagaagttcagggtgccgcccaatcctcagagtgcccactggcttgttcttctagcctccactgcgcgagctcgatctgtagcagtaatagtaaactgctggatagcagcgaagatgtattcgagacttggggcgaagcctgtgacctgcttatgcacaaatggggcgacggtcaggaagaacaggtgaccacccgcttgtag

SEQ ID NO: 209198 - DNA, 2796 bp, synthetic construct
  misc_feature 1..2796: note = Description of Artificial Sequence: Synthetic coding sequence
  source 1..2796: mol_type = other DNA
atgagccagagccccgccttcggcccccggcggggcagcagcccccgtggggccgctggcgctgccgccagaagaaacgagagccaggactatctgctcatggactccgagctgggggaggacggctgtcctcaagctcctctgccttgttacggttattacccatgctttcgcggttccgataatcgattagcccaccggcgccaaactgtgttacgcgagaaggggcgccgactggctaatcgcgggcctgcgtatatgttttcggaccggtccacctcactgtccattgaagaggaacgattcctagacgccgccgaatacggaaacattccagtagtgcggaagatgctagaggaatgccatagcctgaatgtaaattgcgtggactacatggggcaaaacgctctgcagctggcagttgccaacgagcatctggagatcaccgaactcctcctgaaaaaagagaatctctcacgcgtgggcgacgctctgctcctggcaatttccaaaggatacgtaagaattgtagaagctatcctctcacaccctgcgtttgctgaaggtaaacggcttgccacaagcccctctcagtccgagctacagcaggacgacttttacgcatatgatgaggatggcacacggtttagccacgatgtgaccccgatcattctggctgctcactgccaagaatacgagatcgttcataccctactgcgcaagggagcccggatcgagagacctcacgactatttctgtaagtgtaacgactgtaaccagaagcagaagcacgacagcttcagccacagccgctctcgtattaatgcctacaagggactggcgagcccagcttatttgagcctgtccagtgaagacccagtcatgaccgcacttgaattgtcaaatgagctggcagtgcttgccaatatcgagaaagagttcaagaatgattacaagaaactgagtatgcagtgtaaagattttgtcgtgggtctgttggatctgtgcagaaatacagaggaggtggaagccatcctaaacggcgacgtcgaaacactccaatccggagatcatgggcgtcctaatctctcgcgactgaaactggctatcaagtacgaggtgaagaagtttgtcgcccaccctaactgtcaacagcagttgctgtctatatggtacgaaaacctaagcgggcttaggcaacagaccatggccgtgaagttccttgtcgtactggctgtcgctatcggattgcccttccttgccctgatttactggtttgctccctgtagcaagatgggcaagatcatgagaggcccttttatgaagtttgtagcacacgcggcttctttcaccatcttcctcggtcttctcgtgatgaacgcagcggaccgcttcgaaggtacaaagctgcttccaaacgagacttcaacggataatgccaagcagctcttccggatgaagacgtcctgctttagctggatggagatgcttatcatcagctgggtaattggtatgatctgggccgaatgcaaggaaatctggactcaggggcctaaagagtacctattcgagctgtggaatatgctggactttggcatgctggcgattttcgccgcctcctttattgctcgttttatggccttctggcacgcatctaaggcacaaagcatcatcgacgcaaacgataccttgaaagaccttacaaaggtgacactgggggacaatgttaagtactataatctggcgcgcatcaagtgggatccaagcgacccccagatcatatctgagggactgtacgctatagccgtcgtgttgtcgttttcccgaattgcatacattctgcccgctaacgaatcgttcgggccgctccagatctctctcgggcggacagttaaagacatatttaaattcatggtgatcttcatcatggtgttcgtggcatttatgatcggcatgttcaatctctacagctattacattggggctaagcagaacgaggctttcaccacggttgaggagtcctttaagacccttttctgggcaatattcggattatctgaagtgaaaagtgttgtcataaattataaccacaaattcattgagaacatcggatacgttctgtatggcgtgtataacgtgacgatggtgatagtgctgcttaatatgctgatagccatgattaatagctccttccaggagatagaagacgacgccgacgtggagtggaaatttgcgcgtgctaaactgtggttctcttacttcgaagagggtcgtaccttgccggtgccattcaatctggtgccaagtccgaagagtttattctatctgctgctaaaactgaagaaatggatctctgaactattccagggacataagaagggtttccaggaagacgcggaaatgaataaaataaatgaagagaagaaacttggaattctcgggagtcatgaggatttatccaagctatccctggacaaaaaacaggttggacacaacaaacagccgtctatcagatcctctgaggactttcatctaaatagtttcaacaaccctcctcggcagtatcagaagatcatgaaacgtctgatcaagcgctatgtgttgcaggcacagatcgacaaagagtcagatgaggtgaatgaaggagagctaaaagagataaagcaagatattagcagtctgaggtatgaactgttggaggagaagtcccagaatacagaggacctggccgagctgattagggagctcggagagaagttgtccatggaaccaaaccaggaggagaccaatcgctag

SEQ ID NO: 209199 - DNA, 2448 bp, synthetic construct
  misc_feature 1..2448: note = Description of Artificial Sequence: Synthetic coding sequence
  source 1..2448: mol_type = other DNA
atgagccagagccccgccttcggcccccggcggggcagcagcccccgcggcgccgcaggtgctgccgctcggcgaaacgagtcacaagactaccttttgatggattctgagctaggtgaggacgggtgcccacaggcccctctgccgtgttatggctactatccttgtttcaggggatccgacaacagactcgcacataggcgccagaccgtgctgcgggaaaaaggcaggaggctggccaatcggggacctgcttacatgtttagtgatcgctctacatcattgtcaattgaggaagagaggttccttgatgctgcagagtatggcaatatccccgtggtccgaaaaatgctggaggaatgccacagcctcaacgttaattgtgtggactacatgggccagaatgctctccagttggccgtcgctaatgagcatctggagattaccgagctccttctgaaaaaagagaatctatctagggtaggcgatgccctgcttctcgccatttccaagggatatgtaagaattgtggaagccatactgagccatcccgccttcgctgagggaaagcggcttgctacaagtcccagccagagcgagcttcagcaggacgacttctacgcctacgatgaggacgggacaaggttctctcacgacgtaactccaattattctggcagcccactgtcaggagtacgagattgtccatacactgctgcggaagggtgctcgtatcgagagaccacacgactatttttgtaaatgcaatgactgcaatcagaagcagaagcacgattccttttcacattctcgatctaggattaatgcctacaagggcttggcaagtccggcttatctgagcctgagttctgaggatccagtcatgaccgccttggaactgagcaacgaactcgctgtgctagcaaacatcgagaaggaatttaagatggggaagattatgcggggccctttcatgaaattcgtggcccatgcggcctccttcactatcttcctgggcttactggtgatgaacgcggccgatagatttgaaggaaccaagctgctacccaatgagacatccaccgacaacgccaaacaactgtttaggatgaagacgtcttgcttcagttggatggaaatgctcattatctcatgggtcattgggatgatttgggctgagtgtaaagaaatctggacccaaggcccaaaggaatacctcttcgagctgtggaatatgctggacttcggaatgctggctatatttgccgccagctttatcgcaagatttatggcattttggcatgcttccaaggcacagagcatcattgatgccaatgacaccttaaaagacctcaccaaggtgacgttaggtgacaatgtcaagtactacaacctggcgaggattaaatgggatccatctgacccacagattattagcgagggtctctatgccattgctgtggtgctgtctttttcccggattgcctatatcttaccagccaacgagtcttttgggccacttcaaatctccctgggtcggacggtgaaagatatatttaagttcatggtcatattcatcatggtgttcgtggcatttatgattggcatgtttaacctgtacagttactacattggagcgaaacagaacgaggcattcacaactgtcgaagagagcttcaagaccctgttctgggctattttcggcctgtcggaggtgaagtccgtcgtgatcaattataaccacaaattcatagaaaatattgggtacgtcctgtacggggtctataatgtgaccatggtgatagtgctgctcaatatgcttattgccatgataaactcatcatttcaggagatagaggatgatgcagatgttgaatggaagttcgctcgggcgaaattatggttttcatacttcgaagaagggcgtaccttgccagtcccattcaatctggttccaagccctaaatccctcttctatcttttgttaaaactgaaaaagtggatttccgaactcttccagggtcataagaaaggctttcaggaagacgccgagatgaataaaatcaacgaggaaaagaagctgggaattctcggcagccacgaggacctcagcaaattgagtctggataagaaacaagtcgggcacaataaacaacctagcatacggtcttcagaagactttcatctgaactcctttaacaacccccctagacagtatcagaaaatcatgaaacgtttaattaagcggtatgtgctgcaggcccagatagataaggaatccgacgaggtcaacgagggcgagctaaaggaaatcaagcaggacatttccagcttacgctatgagctgttggaggaaaaatcgcagaataccgaagatttggcagagcttataagagagcttggagaaaagctgagtatggaacctaaccaggaagagacaaataggtag

SEQ ID NO: 209200 - DNA, 2631 bp, synthetic construct
  misc_feature 1..2631: note = Description of Artificial Sequence: Synthetic coding sequence
  source 1..2631: mol_type = other DNA
atgagccagagccccgccttcggcccccggcggggcagcagccccagaggagcagctggggcagctgcccgccgtaacgaaagtcaggattacctgctgatggattctgaactgggcgaagatggctgcccgcaggctcctctgccatgctatgggtattatccctgtttccgaggatcagacaatagactggcccaccgtcgacagaccgtgttacgagagaaaggacgccgactggccaacagaggtcccgcttacatgttttcagatagaagcacatctctgagtatcgaggaagagagattcctggatgcagcagagtatggaaacatacctgtggtgcgaaaaatgctagaagagtgccatagccttaatgttaactgtgtggactacatggggcagaatgctcttcagctggcggtcgccaatgaacacctagagattacggaattgctgttgaagaaggaaaatctctctcgggtcggcgatgcactactattagctattagcaaggggtacgttcgaattgtggaagccatcttatcccaccctgcttttgccgagggcaagagactcgctacgagtccaagccagagcgagctgcagcaggacgacttctacgcatacgatgaagacggcacccgattttcgcatgacgtaacgcctattatactggccgctcactgtcaagagtacgagatcgtacacaccctgcttcgcaagggagctcggatcgagaggccgcacgattatttttgcaaatgtaacgattgcaatcagaaacagaagcatgattctttctcacactctagatccagaataaatgcatacaagggattggcatcaccggcctacctctccctgagcagtgaagatcccgttatgacagccctggagctgtctaacgagctggcagtactggcaaacattgagaaagagttcaagaacgactacaaaaagctgagtatgcagtgcaaggactttgtggtaggattgttggacctgtgtagaaacactgaggaagtcgaagcaatcctgaatggcgatgtggagacactgcagtcaggtgatcatggtaggcctaatttaagtcgacttaaactggccattaagtatgaggtgaaaaagatgggcaaaatcatgaggggaccctttatgaagtttgtggcacacgccgcttcgtttacaattttcttagggctgttggttatgaacgccgctgaccgttttgaggggaccaagctcttgccaaatgagacatccaccgataacgcaaagcagttatttagaatgaaaaccagctgcttcagctggatggaaatgcttatcatttcctgggtcatcggcatgatttgggccgaatgtaaggagatctggacacagggacccaaagagtatctatttgagctgtggaatatgctggattttggcatgctggccatcttcgctgcctccttcatagctaggttcatggcattctggcacgccagcaaagctcagtcaatcatcgatgcgaatgatacactgaaggacctcacaaaagtgactttgggtgataacgtgaaatattacaacttggccaggatcaagtgggatccttctgacccacagattattagcgagggactgtacgccatcgctgtcgtcctctcattttctcggattgcttatattcttcctgcaaatgagtcttttggcccgctccaaatatccctcggtaggaccgtgaaagacattttcaaattcatggtgattttcataatggtatttgtcgcattcatgatcgggatgttcaatttgtactcctactacataggggcgaagcagaacgaggctttcactaccgtcgaagaaagcttcaaaactctgttttgggctattttcggtttgtctgaagtaaagagtgtggtaatcaactacaaccacaagtttattgaaaacattgggtatgtcctgtatggagtttataacgtgacaatggtaatcgtgttgctaaatatgctgatcgcgatgattaacagttcttttcaggaaattgaggacgatgcagacgtggaatggaaattcgcccgagcaaagctgtggtttagctacttcgaagagggtcggaccttgcccgttccatttaacttggttccaagtcctaagtctctattttatttactactgaagttaaagaagtggatatctgaacttttccagggccacaagaaaggtttccaggaggacgcagaaatgaataagataaatgaagaaaaaaaactggggattctaggctcccatgaggatctatctaagttgtctctggacaagaagcaggtgggacacaacaagcagccctcgatccgtagcagtgaggactttcacctcaattcctttaataatccaccacgccaatatcagaaaattatgaaacggcttatcaaaaggtatgtgttgcaagcgcaaatcgataaggaaagcgacgaagtgaacgagggagagcttaaagagatcaagcaggatattagcagcctacgctacgagctgctggaagagaagagccaaaatacagaggacctagctgagctcatacgcgaactaggagagaagctaagtatggagccaaaccaagaggagactaaccgctag

SEQ ID NO: 209201 - DNA, 2406 bp, synthetic construct
  misc_feature 1..2406: note = Description of Artificial Sequence: Synthetic coding sequence
  source 1..2406: mol_type = other DNA
atgctgcggaacagcaccttcaagaacatgcagcggcggcacaccacccttagggaaaaagggagacggcaagcaatacggggaccggcctacatgttcaatgagaaaggcactagcttgaccccagaggaagagagatttttagactctgcggagtatggtaacattccagtggtgcgtaaaatgctggaagaatctaagacgttgaacttcaattgtgtcgactacatgggacaaaacgccctgcagctggctgtgggcaacgaacacctcgaagttactgaactcctcctgaagaaagagaaccttgccagggtgggcgacgcactactgctggccattagcaagggctatgttcgcatcgtcgaggccatccttaaccaccctgccttcgcccaaggacaacgtctgactctttcaccccttgaacaggaattgagagatgacgatttctatgcctatgatgaggacggaacacgattttcacacgacattacccccatcatactggccgcccactgccaggagtatgaaatcgtgcatatcctgctgctgaagggggcaaggatcgagagaccccacgactacttctgtaagtgtaatgaatgtacagagaagcaaagaaaagattctttctctcactcacgctccaggatgaacgcctacaagggtcttgcctccgcagcatacctttccttgagctccgaagatccagtcttaaccgccctggaactaagcaacgagctggcacgcctggctaacatagagaccgagtttaagttcgtggcccacccgaattgccaacagcaattacttaccatgtggtacgaaaacctttctggactgcgacaacagagtatagcggtgaaattcctggctgtgttcggtgtgagtataggcttaccattcctggcaattgcatactggattgccccttgcagcaaactggggcgcacgctaaggtcaccatttatgaagttcgtggcacacgccgtgagcttcacgattttcctgggcctactagtcgtcaatgcgtcagataggttcgagggggtgaaaacgctgccaaatgaaactttcactgactatccaaagcaaatctttcgggtgaagaccactcagttctcttggaccgaaatgctgataatgaagtgggtgttaggaatgatctggagcgaatgcaaggaaatctgggaggaaggacccagggagtacgtgctgcatttgtggaatctgctggactttgggatgctgtctatttttgttgccagctttacagccagatttatggcctttctgaaagcaactgaggcccagctttacgtggatcagcacgtgcaggacgacactctgcacaatgtgagccttcccccagaggttgcatacttcacctatgcccgcgataagtggtggccatctgatccccagattatctccgaggggttatatgccatcgcggtagtgctgtctttcagtcggatcgcatacatcctgccggcgaacgagagctttgggcccctgcagatctccttgggcagaacagtcaaggatatcttcaagttcatggtaatcttcataatggtctttgtcgcctttatgatcgggatgttcaacctctattcgtactatcggggagctaaatataatcctgctttcacgacagtcgaggagagcttcaagacactcttctggtcgatctttggtctgagcgaggtgatatctgttgtcctgaagtatgatcacaaattcatagaaaacataggttacgtcctctatggagtgtacaacgtgacaatggtggtagtgctgctgaatatgctgatcgcaatgattaacaattcctaccaggagatagaggaagatgctgatgtcgagtggaagttcgctcgtgctaagttgtggctgagctacttcgatgaaggccggactctgccagccccattcaacctagttccctcccctaaaagtttttactaccttatcatgcggatcaagatgtgtttgattaagctgtgcaaatcaaaggccaaaagttgtgagaatgacctggagatggggatgctcaacagcaaattcaaaaaaacgagatatcaggccggcatgaggaattccgaaaacctaaccgcaaacaatacactgtccaaacccacacgatatcaaaagatcatgaagcgactgatcaagcgctatgtcctcaaggcacaggtcgatcgcgagaatgacgaagtcaatgaaggggaactaaaagagatcaaacaggatatctcttcactccgatatgaattgcttgaagaaaagagccaggcaacgggtgaacttgcagaccttattcagcagctgtccgaaaaattcgggaaaaacctcaataaagatcatctgagagttaacaaaggaaaggacatttag

SEQ ID NO: 209202 - DNA, 2241 bp, synthetic construct
  misc_feature 1..2241: note = Description of Artificial Sequence: Synthetic coding sequence
  source 1..2241: mol_type = other DNA
atgctgcggaacagcaccttcaagaacatgcagcggcggcacaccactctgcgtgagaagggacggcggcaagctatccgcggtcccgcatatatgttcaacgagaaaggcacaagtcttacgccggaagaagagcggttcctcgacagtgccgagtatggcaatattcctgtagtgagaaaaatgcttgaggagtcaaagacactgaatttcaactgcgtggactacatgggccaaaacgccctgcagctggcggtcgggaatgagcacctcgaggtcacagagctactgcttaagaaggagaatttggcccgcgtcggggatgccctgcttcttgcaatctcaaaaggctacgtgcgcattgtggaggccatcttaaaccaccccgccttcgcacaggggcagcggctgacacttagcccattagagcaggaacttcgcgacgatgatttttatgcctatgacgaggatggaacaagattcagtcacgatattacccccattatcctcgccgctcattgccaagagtacgagattgtgcatatcctgcttctaaaaggtgcgcgcattgagagacctcatgactacttttgtaaatgcaatgagtgcaccgagaaacagcgcaaggacagctttagccactcaaggtcaaggatgaacgcgtacaagggtctggcgtcagctgcctatttgtccttgtcgtcagaggatcctgttctcactgcactcgaattgagtaacgagctcgctcgactcgctaacatcgagacagagttcaaacttggccgcactcttagaagtccgtttatgaagtttgtggcccacgcagtcagctttacaatcttcctgggcctcctagtggtgaatgcgagcgatcgcttcgagggagtcaagaccctgcccaacgaaactttcaccgattaccccaagcaaatattccgagtgaaaactacacagttcagctggaccgagatgctaatcatgaagtgggtgctaggaatgatatggtctgagtgtaaggaaatttgggaggaggggccccgggaatacgtccttcacctgtggaatttgctcgacttcggcatgctgtcgatctttgttgctagctttacggcgagattcatggcattcctaaaagccacagaagcccagctgtatgtggatcaacacgtgcaggatgacactctgcacaatgtttccctcccccctgaagtcgcgtattttacttatgcacgcgacaagtggtggcccagtgacccacagatcatcagtgaggggttatacgctatagcagttgtgctttctttcagtagaattgcctatatccttcctgccaacgaaagttttggccctctgcagatttccctgggacggactgtaaaagacatcttcaagtttatggttatctttattatggtgtttgtcgccttcatgattggaatgttcaatctgtatagctattaccgcggtgccaagtataaccctgcattcaccacagtggaggagagtttcaagaccttattctggtctattttcggtctgtccgaggtaatttcagtcgtgctgaagtacgaccacaagttcattgaaaatatcgggtatgtgctgtacggcgtgtacaacgtcactatggtagtcgtgctactgaatatgctgattgcaatgataaataattcttatcaggaaattgaggaggacgccgatgttgaatggaaattcgcccgcgcaaaactctggcttagctatttcgatgaaggccggactctccccgctccctttaatttggtacctagccctaaaagtttttattacttgattatgcgaattaaaatgtgtctgattaagctctgcaaaagcaaagctaaaagctgcgaaaatgatctagagatggggatgctaaattccaagttcaagaaaacgcggtatcaagcaggcatgcgcaactcagagaatctgactgcaaataacaccttgtccaaacctaccagatatcagaagattatgaagaggcttattaagaggtacgtcctgaaggcccaggtcgatcgcgagaatgacgaggtgaacgagggagagttaaaggaaatcaagcaggatattagtagcctgaggtacgaacttctggaagaaaagtctcaagctaccggagagcttgcggacctgatacagcagctgtccgaaaagtttggcaaaaacttaaacaaggatcaccttagagtgaacaaaggaaaagacatttag

SEQ ID NO: 209203 - DNA, 2589 bp, synthetic construct
  misc_feature 1..2589: note = Description of Artificial Sequence: Synthetic coding sequence
  source 1..2589: mol_type = other DNA
atgctgcggaacagcaccttcaagaacatgcagcggcggcacaccacgctaagagagaaagggcggaggcaggctattagagggccagcctacatgttcaatgagaagggaacaagcctaacgccagaggaagagcgatttctagacagtgctgagtatgggaacattcccgtagtgcgaaagatgcttgaggagtccaaaacgttgaactttaactgcgtggattacatgggccagaacgctttgcaactagcagttggaaacgaacacctagaagtcactgagctcctgctgaagaaagagaacctggctagggtgggagatgccctgctgcttgccatttccaaagggtacgtaagaattgtcgaggccattctgaatcatcccgcgttcgcccaggggcagagacttacactctcccctctcgaacaagagctgcgcgacgatgatttctatgcctacgacgaagatggcacacgtttttctcatgacattacccccattattctcgccgcccactgtcaagaatatgagatcgtccacatccttctgctgaagggcgcccgtatcgagagaccccacgactacttttgcaagtgcaatgaatgtacagagaagcagcgaaaagactcattcagtcatagccgatcccggatgaacgcgtacaagggactcgcttctgccgcgtatctgagtctctcctcggaggatccagtgctaacggcattagagttgtcaaatgagctcgcacggctggctaacattgaaaccgaattcaagaacgactatagaaaactgagcatgcagtgtaaggatttcgtagtgggcgttctggatctatgccgtgacacagaggaagttgaggcgatcctgaatggggacgtgaattttcaagtgtggtccgatcaccaccggccctctctcagcagaatcaaattagccattaagtatgaggtcaaaaaattcgtagcccatccaaattgccaacaacagctactaaccatgtggtacgagaacctgagcggactgagacagcagtccattgcagtgaagttcctggctgtcttcggggtgagtattggcttgccatttctcgcaatcgcatattggatcgctccatgttccaagctgggtcggaccctgcggtcgcctttcatgaagtttgtggctcatgctgtctcttttactatttttctgggcctcctggtggttaacgcttctgaccgcttcgagggagtgaaaacgctccctaacgagactttcaccgactatccgaagcaaatattccgggtgaagaccactcagttttcctggaccgagatgctaatcatgaaatgggtgttggggatgatttggagcgaatgcaaggaaatctgggaagagggaccccgcgagtatgtccttcatctgtggaatctgctagacttcgggatgttgtctatttttgtggcatctttcacagcacggtttatggcttttctgaaggcaaccgaagcccagttatatgtggaccaacatgttcaggatgatacactgcacaatgtctcgttgccacccgaggtggcatatttcacatacgccagagataagtggtggccctcagatccacagattatctcagagggcctgtacgcaattgccgtcgtgctgtcattttctagaattgcatacatattaccggcaaatgaaagcttcggccccctgcagatatctttgggccggacggtgaaggacatttttaaattcatggtcattttcattatggtcttcgtggccttcatgatagggatgttcaatttgtacagctactataggggggcaaagtataatccggcctttaccactgtggaagagagcttcaagaccctcttttggtccattttcggcctttccgaagtcatctcagtagtgcttaagtacgatcataagtttatcgaaaatattggctatgtgttatatggtgtttataacgtcacgatggtcgtggtgttactgaatatgctgattgccatgatcaataatagctatcaggaaatcgaggaggacgctgacgttgagtggaagttcgcgagggctaaactctggctttcttactttgacgaagggagaacactgcccgccccatttaatcttgtcccctctccgaaatccttttattacttaatcatgcgtattaagatgtgcttaatcaagctctgcaagagcaaagccaaatcgtgcgagaacgatttggaaatgggcatgctgaattctaagtttaaaaagacccggtatcaggctgggatgaggaattctgagaacctcaccgccaacaataccctcagcaagcctaccagataccagaagatcatgaaacgcctcatcaaacgctacgttcttaaggcccaggtggacagagagaacgatgaagtgaacgagggagaactgaaggaaattaaacaggatatctccagtttacggtatgagctgttggaagaaaagtctcaggcaacaggtgagctagcagatttaattcagcagctgagtgaaaagtttgggaagaacctcaataaggatcatctccgggtgaataagggaaaagacatctag

SEQ ID NO: 209204 - DNA, 4350 bp, synthetic construct
  misc_feature 1..4350: note = Description of Artificial Sequence: Synthetic coding sequence
  source 1..4350: mol_type = other DNA
atggagcccagcgccctgcggaaggccggcagcgagcaggaggagggcttcgaaggactacctagaagggttaccgacctcggtatggtatccaatctgcgtcgaagcaattcctctttgttcaaaagttggcgtctccaatgccctttcgggaacaatgacaagcaagaatccctctcgtcttggatcccagaaaatatcaagaagaaagagtgtgtttattttgttgagtctagtaagctgtccgatgctggaaaagtggtgtgccagtgtggttatactcacgaacagcatctggaggaggccaccaagccccataccttccagggaacccagtgggaccctaagaagcatgtgcaggaaatgcctaccgacgcatttggcgacatcgtctttactggactcagccagaaggtcaaaaagtacgtgagggtttcccaggacacaccttcaagcgtgatataccacttaatgacacaacattggggacttgacgtaccaaatctactcatctcagtgacaggtggtgcaaagaactttaacatgaagcccaggttgaaatctatttttcgacgaggtttggtgaaagtggcccagactaccggcgcctggatcattaccggggggagccacaccggcgtcatgaaacaagtcggcgaggcagtgagagatttttcactgtccagctcgtacaaagaaggagagttgatcacaattggggtcgccacctgggggacagtgcatagaagagaaggcctcatccaccccacaggatctttcccagctgagtatatcctcgatgaagatggccagggaaaccttacatgcttggatagtaatcacagtcacttcattctggtagacgacggtactcatgggcagtacggagtagagatcccactgaggacacgactggagaaattcatatccgaacagaccaaggagcgaggaggcgttgcgatcaagattcccatcgtctgtgtggtgctggaagggggtcccggcaccctgcacaccattgataatgctacaaccaatggtactccctgcgtcgtcgtggagggtagcgggcgcgtggccgatgtgattgcacaggtggcgaacctgcccgttagcgatatcactatctcactgatccagcagaagttgtctgtatttttccaagaaatgttcgagacttttactgagtcccgcattgttgagtggacaaaaaagatacaggacattgtgcgaagaagacagctgctgacagtatttagggagggaaaagatggccagcaggacgttgacgtagccattcttcaggccctgctcaaagcttccaggagtcaagaccacttcggccacgagaattgggaccaccagttaaagcttgccgtcgcctggaacagagtagacatagcccgcagcgaaatattcatggatgagtggcagtggaagccctcggacctgcatccaacaatgactgcggccctcatttccaacaagcctgaatttgtaaagttattcctggaaaatggtgtccagttgaaagagtttgtgacttgggatactttactctacctctacgagaacctggatcccagctgtctcttccatagcaaactccaaatgcatcacgtggcgcaggtcctaagggagctgctgggggatttcacacagccactttacccacgccccagacacaatgatcggctgcggttgctgctgcccgtcccccacgtgaaactcaatgtacagggcgtcagccttcgtagtctttacaaacggtcctcggggcacgtaaccttcaccatggacccgatacgcgatctcctgatttgggctatcgtgcagaaccgcagggagctggcaggtattatctgggcgcaaagccaggactgcattgccgcggctcttgcctgtagtaagatcctgaaagagctgagcaaagaggaggaagatacagacagctctgaggaaatgctggcactggctgaagaatatgagcaccgtgctatcggcgtgtttacagagtgctacaggaaggatgaggaacgtgcgcagaagctgctgacgagagtgtccgaagcctggggcaagaccacatgcctgcaacttgcgctcgaggcaaaagacatgaagttcgtgagtcatggaggaattcaggcctttttgacgaaggtgtggtggggacaactctcagtggataatggactatggcgggtcacgctttgcatgctggcgttccccctccttctgactggtctgatctctttccgcgagaaaagattacaagatgttggaactcccgcagcacgcgcacgggccttcttcactgcccctgtggtagtgttccatttgaatatcctgagttactttgcttttctttgcctgtttgcttatgtactgatggtggatttccagcccgttccaagctggtgcgagtgtgccatctacctgtggttgttttcactggtgtgtgaagaaatgcgccaattgttttacgaccctgacgaatgtggactcatgaagaaagcggccttgtatttctccgatttctggaataaattggacgttggcgccatcctcctgtttgtcgctggcctgacgtgtaggctaatccctgccacattatatcctggtcgcgtgatccttagcttggattttattttgttttgcctgcgcttgatgcatatctttacaataagtaagactctcggccccaaaatcatcattgtgaagagaatgatgaaggacgtctttttttttcttttccttctagcagtctgggtggtctcatttggtgtcgcaaaacaggctatcctgatccataatgagagacgcgttgattggctgttccgcggcgccgtgtatcacagttatctaacaatcttcggccagattcccgggtatatcgatggcgtgaacttcaatcctgaacattgtagccccaatggaacagatccgtataaacctaagtgtcctgaatctgatgcgacccaacagaggccggctttccctgagtggctcacagtgctgctcctttgtctgtatctgctgtttaccaacattcttctccttaatttactcattgcgatgtttaactacacttttcaacaggtgcaagagcacaccgaccagatatggaaatttcagcggcatgaccttatcgaggaataccatgggcgacccgctgcccccccccctttcattttactgtcacacctgcagttgttcataaaaagagtggtcctgaagacgcctgccaagaggcataagcagcttaagaacaagctggagaaaaacgaggaagccgcacttctgagttgggaaatttatctgaaggaaaattatctgcaaaacaggcaatttcagcagaagcagcgcccagaacaaaagatagaagatatttcaaataaggtcgacgctatggtagacctcctggatttggacccactgaagcggtcgggcagcatggaacagaggttggcatcactcgaggagcaggtcgcccagacagcccaggcacttcactggatagtcagaacacttcgggcatctggattcagctctgaagctgacgtgcccactctggccagccagaaggccgccgaggaacccgacgccgaaccaggaggtcgtaaaaagactgaggagccaggggacagttatcacgtcaacgccagacacctgttgtatcccaattgcccggtaactcgctttccagtccctaacgagaaagtgccctgggaaaccgagtttctgatttacgatccccccttttatacagctgagcgcaaggacgcagcagccatggacccaatgggcgagaaccctatgggtcggaccgggctcagaggccgaggatcgctgtcttgcttcgggccaaatcacactctttatccgatggtaactagatggagacgaaacgaggatggggccatatgcaggaagagcatcaaaaaaatgctggaagtgctggtggttaaattaccactgtcagaacattgggctctgcctggtgggagccgggagcccggggagatgttacccagaaaactcaaaagaatactccgccaggagcattggccatctttcgagaatctgctgaagtgcggcatggaggtgtataaaggctacatggacgacccacgtaacactgacaacgcatggatcgaaaccgtcgcggtgtctgtgcactttcaagaccaaaacgatgttgagcttaacagactgaactccaacttgcatgcctgcgattctggcgccagtatacggtggcaggtcgtggataggcgcatacctctgtacgccaaccataagacacttctccagaaagctgctgccgagtttggagcccattactag

SEQ ID NO: 209205 - DNA, 4512 bp, synthetic construct
  misc_feature 1..4512: note = Description of Artificial Sequence: Synthetic coding sequence
  source 1..4512: mol_type = other DNA
atggagcccagcgccctgcggaaggccggcagcgagcaggaggagggctttgagggactaccaaggagggtaacagatctaggcatggtatccaatctccggagaagcaatagcagcctctttaaaagttggcgcctacaatgtccatttggaaataacgataagcaagagagtttgagcagctggataccagagaacatcaagaaaaaagaatgcgtgtatttcgtggagtcctctaagctgtcagacgctggcaaggtggtgtgtcagtgcggttacacacacgagcaacatctggaagaggccaccaaacctcacacttttcaggggactcaatgggaccccaagaagcatgttcaggagatgccgactgatgctttcggcgatatagtcttcacaggactgtctcagaaggttaaaaagtacgtgagagtaagccaggatacacctagttcagtgatctaccacttaatgacgcaacattgggggcttgatgtgccaaacctgctcatcagtgtaactgggggtgcgaaaaacttcaatatgaagcctcggctgaagtctatcttccgccgggggctcgtgaaagttgcccaaacaaccggggcttggataatcactggggggtctcataccggagtgatgaagcaggtgggggaagcagtccgggatttttcactcagttccagctacaaagagggggaactaattactatcggagttgccacctgggggacagtgcataggagggaaggcctgatccatcctacaggctcctttcctgcagagtatatcctggacgaagatgggcaggggaatctgacgtgtctggacagcaaccatagtcatttcatcttagtcgacgatggaacgcacgggcaatatggggtggagatcccactcaggacccgcttggaaaaatttatctccgaacaaacaaaggagcgtggcggggtggccattaagataccgatagtgtgcgtcgtgctcgaaggtgggcctggaaccttgcataccattgacaatgctactacgaacgggaccccatgcgtggtggtcgagggctccgggcgggtcgcggatgttatagcccaggtggcaaatctcccagttagcgacattacgatttccttgattcagcaaaaactgtcagtgttttttcaagaaatgtttgaaacgttcaccgagtcaagaatcgtggagtggactaagaagatacaagacatcgtccgacgccggcaactcttgaccgtgtttcgggaagggaaggatggacagcaggacgttgacgtcgccatactccaggccctcctaaaagcgtctagatcacaggaccacttcggtcacgaaaactgggaccaccaattaaagcttgccgtagcttggaaccgggtggatattgcccgtagcgaaatcttcatggacgaatggcagtggaagcccagcgatctgcatccaacaatgacggctgccttgatctcaaataaaccagaattcgtaaagctatttctggagaacggcgtccaactcaaggagtttgtgacatgggataccttgctttatctgtacgagaatctggatccgtcttgtctcttccattccaaactccagaaggtactggtagaggaccccgagaggccggcttgtgctccggctgctcctcgactacagatgcatcatgtcgcccaggttcttcgagaactgctcggagatttcacccagcccctatatccacggccaagacacaatgaccgacttcgactgctgttgccggtaccacacgtgaagctgaacgtccagggcgtcagccttcgcagtctttacaagcgtagctccggccacgttacctttactatggaccccatacgagatctattgatttgggccattgtgcagaaccgccgggaactagccggcatcatctgggctcaatcacaggattgcatcgctgctgccctagcatgctccaaaatcctaaaggaactctcaaaagaagaagaggataccgacagttccgaggagatgctggccctggcagaagaatacgaacatagggccatcggcgtctttaccgagtgttataggaaagatgaagaacgagctcagaagctgcttacacgcgtttctgaagcctggggtaaaacgacctgcttgcagctagccctggaagccaaggatatgaagttcgtttcccatggcggaatccaggctttcctgactaaagtgtggtggggccagctgtccgtggataacgggctgtggcgggtaaccttatgcatgctggctttcccgctgttgttgactgggttgatatcattccgggagaaacggctacaagatgttggaacccccgccgcgagagctcgagcattcttcaccgctcctgtagtcgtcttccatttaaatattctttcgtatttcgcttttctgtgcctgtttgcctacgttctgatggtggacttccagcctgtgccctcttggtgcgagtgcgctatttatctgtggctctttagccttgtatgcgaggaaatgcgccagctcttttatgaccccgacgagtgtggccttatgaagaaggctgctctttatttcagcgacttttggaacaaactcgatgtaggagctattcttcttttcgtggccggcttgacctgccggctgattccagccactctttatcccggccgcgttattctatccttggatttcatccttttttgcctacggctgatgcatatcttcacgatctctaagactcttgggcctaaaattatcatcgttaaaagaatgatgaaggatgtctttttcttcctgttcctgctcgctgtctgggtagttagttttggagtggccaagcaggcaattctgattcataatgagcgacgggtggactggttatttcgtggggctgtgtaccatagttatcttacaattttcgggcagatccctggatatatcgatggcgtgaactttaatcccgagcattgcagtcccaacggaacagacccctacaaacctaaatgtccagagtcagatgcaactcagcagcggcctgcgtttccggaatggctgacagtgttgttgttgtgcctgtacctcctctttactaatatcttactgctcaacctgctgattgctatgttcaactataccttccagcaggtccaggagcacacagaccaaatctggaagttccaaaggcatgacctcatcgaggagtaccatgggcgaccagcggcaccccccccattcatccttctgtcccatcttcaactgtttattaaacgagtggtcttgaagacgcccgctaaacggcacaaacaactgaagaataagcttgaaaaaaacgaggaagcagccctgttgagttgggaaatttacctgaaggagaactacctccagaaccggcaattccagcaaaagcagagaccagagcagaagatcgaggatatctctaataaagtcgacgcaatggtggatctgctggatctggaccccctgaaacggtcgggtagcatggagcaaaggctcgctagcctcgaagagcaggtggcccagactgcccaggccctgcactggattgtgcgcacacttagagctagcggattcagctcggaggccgatgtgccgaccttagcaagtcagaaagccgctgaagagcccgacgccgaaccggggggacgcaagaagacggaggaaccaggggacagttaccacgtgaacgctcgtcacctgctgtaccccaattgccccgtaactaggtttcccgttcccaacgagaaagtgccctgggaaaccgagtttcttatttacgatccccctttttatactgccgagcgtaaggacgccgctgccatggaccctatgggcgacacccttgagcctctttctaccatccagtacaacgtagtcgatggtctccgagacagaagatctttccacggcccctatacagttcaggccggcctgcctctgaaccctatggggcggactgggctgcgcggtagagggagcttatcctgttttggccccaaccatactctctaccctatggtcaccaggtggcgcaggaacgaggacggagctatatgtcgaaagtccattaaaaaaatgctagaggttctggtagtgaagctgcccttgtctgagcactgggcattacccggaggctctagggaaccgggcgagatgctgccccgcaagctgaaaaggatattacggcaggagcactggccctcctttgagaacttgctcaaatgcggcatggaggtgtataaaggatatatggatgatccgaggaacaccgacaacgcctggatcgaaacagtcgccgtgtctgttcacttccaggaccagaacgacgtggaactgaatcgcctgaacagtaacttacatgcatgcgactccggagcgagcatcaggtggcaggtggtcgatcgccggatccccctatatgcgaaccataaaactctccttcagaaggccgctgcggaatttggagctcactactag

SEQ ID NO: 209206 - DNA, 4512 bp, synthetic construct
  misc_feature 1..4512: note = Description of Artificial Sequence: Synthetic coding sequence
  source 1..4512: mol_type = other DNA
atggagcccagcgccctgcggaaggccggcagcgagcaggaggagggcttcgaaggactcccaaggagggttaccgacttgggaatggtgtcaaacctccggcgcagtaatagctctctgtttaagagttggcggcttcagtgtccgtttggcaacaacgataagcaggagagccttagctcttggatccctgaaaatattaagaagaaggagtgcgtatattttgtggaatcttccaagctttcggacgcaggcaaagttgtgtgccagtgtggttatactcatgagcagcacctcgaagaagccacaaagccccatacattccagggaactcagtgggatcccaagaagcatgtccaagaaatgcctaccgatgccttcggtgatattgtgttcaccggcctcagccagaaagtaaaaaagtatgtaagagtctctcaggacaccccatcctctgtgatttaccacctcatgactcagcattggggccttgacgtgccaaatctgctgatttccgtcactgggggggctaaaaattttaatatgaaaccccgcttgaagtcaatcttccggcgtgggttggtaaaagtggctcagacaacaggggcctggattattacgggcgggagtcacaccggggtcatgaagcaggtgggcgaggctgtgcgggacttttctctgtcgtctagctataaagagggggagctgataacgattggtgtggcaacctggggaactgtgcaccggagagaaggactcatccaccctaccgggagtttccctgctgaatacatcctggacgaagatgggcagggaaatttgacatgtctcgactctaatcactctcactttatcttagttgatgacggtacccacggacagtatggcgtagagattccacttcggaccagactggagaagtttatttctgagcaaactaaggagcgggggggggttgccatcaagattccaatcgtatgcgtagtactcgagggtggccctggaactctgcatactattgataacgcaactaccaacgggaccccatgcgtggttgtggaagggtctgggagggtggcagatgtaatagctcaggtcgcaaacctcccagtgagcgatattacgattagcctcatccagcagaaattgagtgtcttcttccaggagatgtttgaaacctttacagagagtaggattgtagagtggacaaaaaaaatccaggatatcgttagacggaggcagctactgaccgtgttcagagagggtaaggatgggcagcaggacgtggacgtggcaattctccaggcacttttgaaagcttcacgatcccaggaccacttcggtcatgagaattgggaccatcaactaaaactggcagtcgcctggaacagggtcgacattgctagaagcgaaatattcatggacgagtggcaatggaaacctagcgatcttcacccgactatgaccgcagctctaatctctaacaaacccgagtttgtgaaactcttcctggagaacggcgtgcagctgaaggagttcgtgacttgggatacactgctctatctgtacgaaaatctggatccctcttgcctgtttcacagtaagcttcagaaagtcctcgtcgaggaccctgagcggccagcttgcgccccggcggcccctaggctgcagatgcatcatgtcgcgcaagttctccgggaattgctcggggattttacccagcccctctatccacggccgaggcacaatgatcgtctacgccttctcctgcccgtccctcacgtgaaattgaatgtgcagggagtctctctcagatctctgtataagcggagctctgggcacgtgacgttcaccatggaccccatcagagatctattaatctgggctatagttcagaaccgccgggagttagccggaattatttgggcccagtcccaagactgcatcgccgccgcgctcgcctgctctaaaattcttaaagaattatccaaggaagaagaggacactgacagcagcgaggaaatgctagctttggcagaagagtatgaacatcgcgccatcggagtttttactgaatgttaccgtaaagatgaggagcgagcacaaaaattactcactagggtgtctgaagcatgggggaaaactacgtgtttacagctagctctggaggccaaagacatgaagtttgtcagccatggcggcatccaggcttttttaactaaggtctggtggggacagctttcagtcgataacggcctgtggagagtaacattatgtatgcttgcttttcctcttctgttgaccgggctgattagctttcgtgaaaagcgattgcaggacgtgggaaccccagctgcccgagccagagctttctttacggcacccgtggtagttttccaccttaatatcctgagctattttgccttcctttgtctgtttgcttatgtgctaatggtcgatttccagccggtccccagctggtgcgaatgcgcaatatatctctggctgttttcactggtttgtgaagagatgagacagttgttctatgatccggacgagtgcggtttaatgaaaaaagctgccctttacttttccgatttctggaataaactggacgtgggtgctattctgctgtttgtggctggattgacctgccggctgattcctgcaacactctacccgggtagagttatcttgtctctggacttcatcctgttctgtttaaggctgatgcacatcttcaccattagtaagacattgggcccaaaaatcattatcgtcaaaaggatgatgaaagacgtgttttttttcctgttcctcctggccgtgtgggttgtaagcttcggagttgccaaacaggccattttgattcataatgaacggagagtcgactggttattcagaggggccgtgtatcacagttacttgacaatatttggacagattcccggctatatcgacggcgtgaattttaacccagaacattgttccccgaacggcacagacccttataaacccaagtgtcccgaatcggacgctacacagcagagacccgcctttccagagtggctaacagtcctgctgctgtgcctgtacctcttatttaccaatatcttgctgctgaatctgctgatcgcaatgtttaactacacatttcagcaagtacaggagcacaccgaccaaatttggaagttccaaaggcatgacctcatcgaagaataccatggaagaccggcggccccgccaccattcatcctgctctcccacctgcagttgtttataaagagagttgtgctgaagactcctgcaaaacgccacaagcagctgaaaaacaagctagagaaaaacgaggaggctgctctactatcttgggaaatctacttgaaagaaaactaccttcagaatcgacaattccagcaaaagcagaggccggaacaaaagatagaggacatttcaaataaagtggatgctatggtcgatctgctcgacctcgaccctctgaagcgatccggctcaatggagcagaggttggccagcttagaagagcaggtcgcccaaaccgcccaggctctgcattggattgtgaggacgttgagggcatccggtttttccagcgaggcagacgtgccaacactggctagccagaaagccgcagaagaacctgatgcggagcctggaggaaggaagaaaactgaggagcctggcgatagttaccatgtaaacgcaagacatctgctgtaccctaattgccctgtgactcgattcccggttccaaatgaaaaggttccctgggaaacggaattcttgatctacgacccacctttttacacagccgaacggaaggacgcagcagctatggacccaatgggggatacactggaacccttatccacaatccagtacaatgtcgtggacggcctgcgggaccggcgatcctttcatggaccctacactgttcaggccggactacccctgaaccctatggggaggacaggactaagaggcagggggtcactgtcgtgtttcggccccaaccatacgctttatcctatggtgactagatggcgcaggaacgaggatggggctatttgtcgcaaatctatcaaaaaaatgctagaggtgttagttgtaaagctgcccctctcagagcactgggctcttcctggtgggagccgcgagcctggcgagatgctgcctcggaaactgaaacggatcctgaggcaagagcactggccaagcttcgagaatttactaaagtgcgggatggaggtttacaaagggtacatggacgacccccgcaataccgacaacgcatggatcgagaccgtggccgtgtccgtgcactttcaggaccagaacgatgttgagttgaaccgcctgaacagcaatttgcatgcctgtgattcgggtgcttctattagatggcaggtggtagatcgcagaattcccctgtatgctaaccacaaaactttgctccagaaggccgcggccgaattcggtgcccattattag

SEQ ID NO: 209207 - DNA, 435 bp, synthetic construct
  misc_feature 1..435: note = Description of Artificial Sequence: Synthetic coding sequence
  source 1..435: mol_type = other DNA
atggagcccagcgccctgcggaaggccggcagcgagcaggaggaggggtttgagggactcccaagacgggttacagatctcgggatggtgagcaacctgaggcgatccaacagttcactgtttaagtcctggagactccaatgcccctttgggaataatgataaacaggagtcactgagctcctggattcctgaaaatatcaagaagaaggagtgcgtgtacttcgtggaaagctctaagttaagcgacgccggcaaggtggtgtgtcaatgcggctacactcacgagcagcatctggaagaagccactaagccgcatacattccagggaacccagtgggatcccaaaaaacatgtccaggaaatgccgacagacgctttcggtgacattgttttcacagggctgtcccagaaagtgaaaaagtatgttagatag

SEQ ID NO: 209208 - DNA, 744 bp, synthetic construct
  misc_feature 1..744: note = Description of Artificial Sequence: Synthetic coding sequence
  source 1..744: mol_type = other DNA
atgctgagccgggagcaggaggaggacggcggcgccggccggcagtaccacgtcaacgccaggcacttgctttatccaaattgcccagtaaccagattccccgttccaaacgagaaggtgccttgggaaacagagttcttgatctatgaccctccattctacaccgccgagcgcaaggatgctgccgcaatggacccgatgggcgaaaatccaatgggaagaaccggtttgagaggcagaggttccctcagttgcttcggacccaatcataccttatatcccatggtaacaaggtggcggcggaatgaggacggagctatttgtcgcaaaagcatcaaaaaaatgcttgaggtccttgtcgtgaaattgcctttgtccgaacactgggctctgcccggggggtctcgagagcccggagagatgttgccgcggaagctcaagaggatcctgcggcaggagcactggccatctttcgaaaacctgctcaagtgcgggatggaagtgtacaaaggatatatggatgatccccggaacacagacaacgcttggatcgaaactgtggcagtgagcgtgcatttccaagaccagaatgacgtggaactcaaccgacttaactctaatcttcatgcctgtgattctggcgcttcgataaggtggcaggtggtggacagacgaattcccctttacgccaatcacaaaacgttattacagaaggccgccgccgagtttggcgcccattactag

SEQ ID NO: 209209 - DNA, 5136 bp, synthetic construct
  misc_feature 1..5136: note = Description of Artificial Sequence: Synthetic coding sequence
  source 1..5136: mol_type = other DNA
atgggcaagaagtggcgggacgccgccgagatggagcggggctgctccgatcgggaggataatgccgaatcccgccggcgcagtcgctcggcatcccgggggagatttgccgagagctggaagaggttgtcgagtaagcaagggagtactaagagatccggactccctagtcagcagacccccgctcagaagagttggatcgagagggccttttataagcgagaatgcgtgcacatcattccatccaccaaggacccacatcgctgttgttgcggacggctgatcggacagcacgttggattgacgccaagtataagtgtactgcagaacgagaagaatgagagccggctgtcaaggaacgatattcagtccgaaaagtggtctatctcaaagcatacccagctaagcccaaccgatgcttttggaacaatagagttccagggcggcggccacagcaacaaggctatgtacgtacgcgtaagctttgacacaaaacccgacctgctactgcacctcatgacaaaagaatggcagctggagctgcccaaactactgattagcgtgcatggcggtctgcagaacttcgaactccagcctaagttaaaacaagtctttggcaaaggtctgattaaggcggcaatgaccactggcgcctggatcttcacgggaggagttaacactggagtcatcaggcacgtgggggacgccctgaaagatcatgcatcaaagtcccgtggcaagatctgcacaattggcatagctccttggggcatcgtggagaatcaagaggatctcatcggcagggatgttgtacgaccctatcaaacaatgagcaatccaatgtccaaactaactgtgctgaattctatgcatagtcattttatcctagctgacaatggcaccacaggaaagtacggggcagaagttaaactaagacgacagcttgagaaacatatctccctgcaaaagatcaatactcggatcggccaaggagttccggttgtggcactgatcgtagagggcggaccaaacgtcatcagcattgtattagagtatctccgggatactccacctgtgccagtcgtggtttgcgacggcagcggccgtgctagcgacatactggctttcggccacaagtactccgaggaaggaggactcatcaacgagtctcttcgggaccagctgttggtcaccatacaaaagacctttacatacaccagaacccaagctcagcacctgtttataatcctaatggagtgtatgaaaaaaaaggagctgattacggtgttcagaatggggtcagagggacatcaggatatcgacctagccatcttgaccgccctccttaagggagcaaacgcttccgctcccgaccagctctcattggccctggcttggaaccgtgtggacatagctcggagccagatttttatatacggtcaacaatggcccgtgggtagcctcgagcaggcgatgctcgatgcgctggtccttgaccgggttgactttgttaagttgctgatagagaatggagtcagcatgcacagatttctgaccatctcacgtctcgaggaattatataacacaaggcacgggccctcaaacactctttaccaccttgtgagggacgtgaaaaagcgagagtatcccggatttgggtggatctattttaaagggaatctccccccagactatcgaatctccctgattgatattggactagtcatcgagtacctcatgggcggagcataccggtgtaactatacccgcaaacgcttcaggaccctttaccacaacctattcggccccaagagggacgacatacctctgcgtcgcggacgcaagactactaagaaacgtgaggaagaggttgatattgacctcgatgatcctgaaatcaatcatttcccttttcctttccatgaactcatggtctgggcagtactcatgaagaggcaaaagatggcactgttcttctggcaacatggcgaggaggcaatggccaaggcccttgtggcgtgtaagctatgtaaggcaatggctcacgaggcgagcgagaatgacatggtagacgacattagtcaggagttgaaccacaactcccgggatttcggccagctcgctgtggagctgctggaccagtcatataaacaggacgaacagctggctatgaaactgctcacttatgagctcaagaattggtccaatgcaacttgtctgcagctcgccgtggctgctaaacacagagatttcatagcacatacctgcagccaaatgttgctaaccgacatgtggatggggcggctccgtatgagaaaaaatagcggcctgaaagttatcctgggcatcctgctgccaccttcaattttgtccttagagtttaaaaacaaagatgacatgccttatatgagccaggctcaagagattcaccttcaggagaaggaggcagaggagccagagaagccgactaaagaaaaggaagaggaggacatggagctgacagctatgctgggacggaataacggggagtcctcacgaaagaaggatgaagaggaagttcaatccaagcaccgcctgatccctctcggacgcaaaatctatgaattctataacgcacctatcgttaagttttggttctacacactggcatatattgggtatctcatgctgtttaactacattgtcctggtcaagatggagcggtggccctcaactcaggaatggatcgtcatctcatacatcttcaccttgggaattgagaaaatgagggagatactgatgtctgaaccgggtaaattgttacagaaggtaaaagtgtggctccaggaatactggaacgtgacagatctcattgccatactactctttagcgtcggaatgatcctgcggctgcaggaccaacccttccggtctgatgggcgcgtgatttattgtgtcaacatcatctactggtacatccgactgcttgacatcttcggcgtaaacaaatatttaggaccatatgtgatgatgattggaaagatgatgatcgatatgatgtacttcgttataataatgcttgttgtgctgatgtccttcggggtcgctagacaggcaatcctttttccgaatgaagagccttcctggaagcttgcaaagaacatcttttacatgccttactggatgatttacggcgaggtgtttgcggaccagatcgacccgccttgtggacagaacgagaccagagaggacggcaagatcattcagcttcctccatgcaaaaccggcgcctggatcgtacctgcgattatggcatgctatctgctcgttgcaaacatccttctggttaacctgttaatcgctgtgtttaataacacatttttcgaggtcaagagcatttctaatcaagtctggaagtttcagcgctaccaactgattatgacctttcatgagcggcccgtattacccccaccgctgatcatattctcccacatgacaatgatcttccagcacctgtgttgccgctggcgcaaacatgagtccgatcccgacgagcgggattacggtttgaaactcttcatcacagatgacgagctgaagaaggtccatgactttgaagagcaatgcatcgaggagtactttcgcgaaaaggacgaccgatttaactcctccaacgatgagaggattcgggtgacctcagagcgcgtagaaaacatgtcaatgagactggaggaggtcaacgagagagagcactccatgaaagcaagcctgcagaccgtagacatccgtctcgcccagctggaagacctgatcgggagaatggccaccgccctggaaagactcactggactcgaaagagctgaaagtaataagattcggtcaagaacgtccagcgactgtacagacgctgcgtacatcgtgcgacagtcctcctttaattcccaggagggcaacacatttaaactgcaggagagtatagatcccgccggggaagagaccatgagcccgacgagcccaactctcatgccacgcatgagatcgcactctttttattccgtcaacatgaaagataaagggggaatcgaaaaactggagagtatcttcaaggaaagatcactaagtctgcatagggctacctcttctcattctgtggcaaaagaacccaaagcgcctgctgctcccgcaaataccctagctattgtgccggactctcgcaggccgtcttcgtgtattgacatttacgtgtctgcaatggatgagctgcattgcgacattgatcccctagacaatagtgtgaatatcctagggctgggagagccatccttcagtacccctgtaccgtccacggctcctagttcctccgcctacgctacgctcgctccaactgatcgaccaccctcccgaagtatagactttgaggatattacgtccatggatacgcgctcttttagcagcgattatacacacctacccgaatgtcagaatccgtgggacagcgaacctcctatgtaccacactattgagagatccaagtcctcacgctatctagctacaacgcccttcctgctggaagaggcccctatagttaagtcccattccttcatgttcagcccgtctcggtcgtactacgcgaactttggggtgcccgtgaagactgctgagtataccagcatcacagactgtattgacacaaggtgcgtgaatgccccgcaggcgatcgcagatcgcgctgccttcccgggcggtctcggtgacaaagtcgaggacctaacgtgctgccatccggaaagagaggctgagctgtctcacccgtcgagcgacagtgaagagaacgaggcgaaaggtcggcgggctacaattgccatcagttctcaggagggggacaattctgagcgaacattgtctaataatattacagtgccaaaaatagagagagcaaactcttattccgctgaagaacctagcgccccctatgcacacactagaaaatcattcagtatcagtgacaagttggatcggcagcgaaataccgcgtcactgcgcaatccattccagagaagcaagtcttccaagcccgaagggcgaggcgactctctgtccatgaggcgtctgtcccggaccagtgcctttcaatctttcgaaagcaaacataattag

SEQ ID NO: 209210 - DNA, 4710 bp, synthetic construct
  misc_feature 1..4710: note = Description of Artificial Sequence: Synthetic coding sequence
  source 1..4710: mol_type = other DNA
atgtacgtgcgggtgagcttcgacaccaagcccgacctgctgctgcacctcatgacaaaggagtggcagctggagcttccgaagctcctgatctccgtccatggcgggctccagaattttgagctacagcctaagctgaaacaggtatttggaaaggggctaataaaggccgctatgacaactggcgcctggattttcacaggaggcgtcaacacaggagtcatcagacatgtcggagacgccttaaaagatcacgctagtaagagtcgagggaagatttgcactataggcattgctccgtggggcatcgttgagaatcaggaggacctgataggccgcgatgtggttcggccgtaccagactatgtcaaatcccatgtctaaactgacggtgcttaacagcatgcactcacattttatccttgcagacaatggcacaaccggtaaatacggtgccgaggtgaagctccgccgtcaactggaaaagcatatctcactgcagaagataaataccagatgccttccattcttcagcctggactccaggctgttttacagcttctgggggtcttgtcagctggactctgtcggcatcgggcaaggcgtgcctgtggtggccctgatagtagagggcggacccaatgtaatatcaatcgtattggaatatctccgggatacaccaccggttcccgtcgtagtttgtgacgggagcggtagagctagtgatatcttggcattcggccataagtactcagaagagggaggtctgattaatgagtccctgcgagaccagctcttggtgactatccaaaagacttttacctatactcgcacacaggcccaacatctgttcattattctgatggagtgtatgaaaaaaaaggaactgattacagtctttaggatgggcagtgaagggcaccaagatattgacctagccatcctgactgctttattgaaaggagcaaacgcaagtgccccagaccaactgtctcttgccttggcctggaatcgggttgatatcgccagatctcagatctttatttacggccaacagtggccagtaggatccctggaacaggctatgttagatgcattggtgctggatagagtagatttcgtaaagttgcttatagagaatggcgtatctatgcaccgcttcttgactatcagccgtttggaggaactgtacaacacccggcatggtcccagtaacacactctaccatttggtgcgcgacgttaagaaaggaaacctgcccccagactaccgcatctccttgatcgatatcggcttagtgattgaatacttgatgggaggcgcatatagatgtaactatactcggaagagattcaggactttgtaccacaacctgttcggcccaaaacgggatgacattcctctccggcgaggccggaagactactaagaagcgggaggaggaagtggatattgatttggatgaccctgagattaatcattttcctttcccattccacgaactcatggtttgggcagtactgatgaagcgccagaaaatggctttgttcttttggcaacacggagaggaggccatggcaaaggcattagtggcctgcaagctgtgtaaagctatggctcacgaggcatcggagaatgatatggtggacgacatctcgcaggaactgaatcataattcccgggactttggtcagctggcagtggaactgctggatcagtcctataaacaggatgagcagctggctatgaaactactcacctatgagctaaaaaattggtcaaacgccacctgcctgcagctggcggtggccgcgaaacaccgggacttcattgctcacacctgctcccagatgctgctcacagacatgtggatgggcaggctcaggatgagaaaaaattccggactgaaggtgattctaggcatactgctgcctcctagcatcctttcactggagttcaagaacaaggatgacatgccttacatgtctcaggcccaggaaatccacctgcaggagaaggaggccgaggagcccgaaaagcccacaaaggagaaagaggaggaggacatggagctaaccgcaatgttggggaggaacaacggggagagcagtagaaagaaggatgaggaggaagttcagtccaagcacaggttaattccgctgggccgaaaaatatacgagttttacaatgctccgattgttaagttctggttctatactctggcttatattggctacctcatgctctttaactatatcgtgcttgtcaagatggagcgctggccaagcacacaggagtggattgtcatcagctatattttcaccttgggcatcgaaaagatgcgcgaaatcttgatgagtgagcctggcaaactgctccagaaagtaaaagtgtggctccaggaatattggaacgttaccgatctcatcgccatcttgctcttttccgtcggtatgatcctgcggctacaggaccaaccctttcgtagtgacggccgagttatctattgcgttaatattatttactggtatataaggcttcttgacatattcggagtcaacaaatacctgggcccatatgtgatgatgatcggcaaaatgatgattgacatgatgtattttgttattatcatgctagtagtccttatgagcttcggagtagccagacaggctattctgttcccgaacgaggagccatcctggaagctggcgaagaacattttttatatgccctactggatgatctacggagaagtgttcgcggatcagattgaccctccatgtggccagaatgagactcgtgaggacgggaaaatcatccaacttccaccgtgcaagactggcgcgtggattgttccagcaatcatggcatgctacctgctggtcgccaatattcttctggtcaatcttctcattgccgtgtttaataacactttctttgaggtcaagagtatttccaatcaagtgtggaagttccagcgctaccagctgataatgaccttccacgaaaggcctgtcctcccacctcctttaattatttttagccatatgacaatgattttccagcacttatgttgtcgctggagaaagcatgaatctgacccagatgaacgggattacggtctgaaactgttcataacggacgatgagcttaagaaggttcatgacttcgaggagcagtgtattgaggagtatttccgcgagaaagacgataggtttaactccagtaatgacgaacgaatccgcgtgacctctgagagggtcgaaaacatgtccatgaggctggaggaggtgaacgagcgtgaacattcaatgaaggcctctctccagactgtggacattcgtctggctcagctcgaggatttgattggtcgtatggccacagcgctggagcggctgactggtttagagagagctgaaagcaataaaatccgtagtagaactagctcagattgtactgacgccgcctatatagttcgacagtcctctttcaactcgcaagaaggaaacacattcaagctgcaggagtccatcgaccctgctggggaggaaacaatgagtcctaccagccccactttaatgcctcgcatgcgctcccactccttttacagtgttaacatgaaggacaaaggcgggattgagaaactggagtccatctttaaggaacgttcattgtctctgcacagagctacctcttcccattcagttgcgaaggagcctaaggctcccgcagctcctgccaacacattggccatcgtgcccgactctagacgaccgtcttcatgcatagacatctacgtgtctgctatggatgagctgcactgcgatatcgatccgctagacaacagcgtaaacattctggggctgggggagccaagcttcagcacccctgtgccaagtaccgctccctcatcttctgcctacgccacgcttgctcccactgacagaccacctagccgttcgatcgattttgaggacatcacatctatggacactaggtcattcagtagcgattacacacacctgcccgaatgtcaaaacccatgggactcagaacccccaatgtaccatactatcgagaggtccaaaagttcacggtacctggctaccaccccattcctgctagaggaggcaccaattgtgaaatcccactcttttatgttctctccatcacgtagctattacgctaacttcggggtgcctgtgaaaacagctgaatatactagtataaccgactgtattgacacccggtgcgtgaacgcgccacaggcaattgctgatagggcagcctttccaggtggcctcggagataaggttgaggaccttacctgctgccaccccgaaagggaggcagagctgtcccatcctagttcggatagcgaagaaaatgaggcaaaaggccggcgtgccaccatcgccatcagttctcaagagggcgataattcagaaagaacgctctctaacaatatcaccgtgccgaagatcgaaagagctaacagttattcggcagaagagcccagtgctccatatgcacatactagaaaatcattctcaatctccgacaagctcgacaggcaacggaataccgcgagcttgagaaacccgttccaacgatctaaaagctcaaaacctgaggggcggggggacagtctctcaatgcgcagactcagcaggaccagcgcattccagtcctttgagtcaaaacacaactag

SEQ ID NO: 209211 - DNA, 4710 bp, synthetic construct
  misc_feature 1..4710: note = Description of Artificial Sequence: Synthetic coding sequence
  source 1..4710: mol_type = other DNA
atgtacgtgcgggtgagcttcgacaccaagcccgacctgctgctgcatttgatgactaaagaatggcaacttgaacttcctaagcttctgatcagcgtgcatgggggtctgcagaacttcgagctccagcctaagctcaaacaagtcttcggcaaaggcttgattaaggccgccatgaccaccggggcctggatctttactggaggggtcaacacgggtgtcattcgtcacgttggcgacgccttgaaggaccatgcatccaagagccgcggaaagatctgcactatcggtattgctccttggggtattgtcgagaatcaggaggacctgatcggccgggacgtcgtgcgcccgtaccagacaatgagcaacccaatgtctaaactgaccgtgctgaatagtatgcactctcactttattctggcagataacggtactactgggaagtatggtgcagaggtgaaactccgacggcaacttgaaaaacatatatctcttcagaagatcaacaccagatgcttgcccttcttttctttggattccaggttattctacagtttctggggaagctgtcagctcgatagtgtcggaatcggtcagggagtgcccgtggttgccctgatcgttgaggggggacccaatgtgatttccatcgtactagaatacctgcgcgacacgccaccagtaccagtcgttgtgtgcgacgggtccgggagagcttcagatattctggcgttcggtcataagtactcagaggagggcggtctaattaacgagagcctcagagaccaactgcttgtgaccatacagaaaacattcacctatacaaggacccaggcacagcaccttttcatcatactgatggagtgtatgaagaagaaggaattgataactgtgtttcgtatggggtctgagggtcaccaggacatagacctggctatcctcaccgccctgttaaagggggcaaatgcctcagcacctgaccagctgtctctcgctctcgcttggaatcgcgtagacattgcgcgtagtcagattttcatatacggacagcagtggcctgtggggtcccttgagcaggcaatgctagatgcgctggtgctggaccgagtggatttcgtgaagctcttgatcgagaacggagtctccatgcataggtttttgaccatcagccgcctggaggagctctataacacacgccacggccctagtaatacactgtatcaccttgtgagggacgttaaaaaaggaaacctaccgcctgactacagaatcagcctgatagatattggtctggtcattgagtacctgatgggtggagcctatcggtgtaactatacaaggaaacgatttcgcactctatatcacaatctcttcggaccgaagcgggatgatatccctcttcggagaggcaggaagaccacgaagaagcgcgaggaagaggttgatattgacctagacgacccagagattaaccactttccatttccctttcatgagttaatggtatgggcagttttgatgaaacggcaaaagatggctttattcttctggcagcatggggaggaggccatggcaaaggctctggtcgcatgcaagctctgcaaggccatggcacatgaggcatctgagaacgacatggtggatgatatcagtcaggagctcaaccataattcacgcgactttggccagctggccgtggagttgctggatcagtcgtacaagcaagacgagcagttggccatgaagctattgacctacgaactgaaaaattggtctaatgctacttgtctgcagttggcagtggcagccaagcatagagacttcattgctcatacttgttcccagatgctgttgaccgacatgtggatgggccgtctacggatgagaaaaaacagcggactaaaggtgattctaggtatactgttgcccccctctattttatcactggaattcaagaacaaggatgatatgccgtacatgtctcaggctcaggaaatccacctgcaggaaaaggaagccgaagagccagagaaacctaccaaggagaaggaagaagaagatatggaactgactgccatgctgggccgcaacaacggcgaatcctccagaaagaaggatgaagaggaggtgcaatcgaaacaccgcttgatccccctgggacgcaagatttacgagttctataacgctccaattgttaagttctggttctatacgctggcctacatcggatatctcatgctttttaactacatcgtgttagtaaaaatggagcggtggcctagcactcaagaatggatcgttatttcatatattttcacccttggcatagagaagatgcgggaaattctaatgtccgagccaggcaagctgctccagaaggttaaggtgtggcttcaggagtattggaacgtaacagatttaatagctatcctcttgttctcagtcgggatgattctgagactgcaggaccaacccttcaggtcagatggtagagtcatctattgcgtgaacattatttactggtatattagacttctcgatatttttggagtaaacaagtacctcggtccttatgttatgatgattggcaaaatgatgatcgatatgatgtatttcgtgattatcatgctggtagtgttaatgagtttcggggtggcaaggcaagccattctgtttccaaacgaggaaccaagctggaagttggcgaaaaatatattttatatgccctactggatgatttatggtgaagtgtttgccgaccagatagatcctccctgcggccaaaatgagacacgagaggacggtaagattatccagctcccaccttgcaaaacaggcgcttggatcgtccctgccattatggcctgctaccttcttgttgcaaacatcctattggtgaacttactgatcgctgtcttcaataataccttttttgaagtcaaatctatctccaaccaggtgtggaagtttcagagataccagctcatcatgaccttccatgagaggccggttctcccacctcctctgattatcttcagtcatatgactatgatatttcaacatctctgttgtaggtggcgtaagcacgaaagcgaccccgacgaaagagattatggcctgaaactgtttattacggatgacgagctgaagaaagtgcatgatttcgaggagcagtgcatcgaggagtactttcgcgagaaggatgaccgcttcaattcatcaaatgatgaacgtattagggtgacatcagagcgggtggagaatatgagtatgcgcctcgaagaagttaatgagagggaacatagcatgaaggcatcactgcaaacagtggacatacggctggctcagctggaggacctcatcggcagaatggctactgcactggaacggttgacaggactggagcgcgcagagtcaaataagatacgaagtagaacttccagtgactgcactgatgctgcgtacattgtgcgccagtcctcctttaattcccaggaaggcaatacctttaagctgcaggagagtatcgaccctgcaggtgaagagacaatgtccccgacctctcctacattaatgcctcggatgaggtcccactctttctattcagtcaatatgaaggataagggcgggatcgagaagctagagtccatcttcaaggagcgcagcctctcactgcatagagctacctccagccattccgtggccaaagagcccaaagcaccggccgccccggccaacaccctcgccatagtcccggactcgcggcgccccagcagctgcattgatatctatgtgtcagcaatggacgaactgcactgtgatatcgatcccctcgataacagtgtcaacatcctcggcctgggcgaacccagcttttccacacctgtcccgagcacagccccctccagcagtgcctacgctaccctcgctccaactgatcgcccaccctccagatctatcgacttcgaggatatcacgtccatggatactcggtctttttcctctgactacacccacttacccgaatgtcagaacccctgggatagcgagcctccgatgtaccatactattgagcgcagcaaatccagccgctacctggctactacaccctttctgctggaagaggctcctatcgtaaaatcacactcattcatgttttccccaagccgctcatactatgcgaactttggggttccagtcaagacagcagagtacaccagcatcacagactgtatcgacacacggtgtgtgaatgccccacaggctattgccgacagggcggcttttcccggcggtctcggcgacaaggttgaggacctgacatgctgtcacccagagcgggaggcagagctgtctcatcctagctctgatagcgaggaaaatgaagccaaggggagaagggcaactattgccatttcatctcaggagggagacaactctgagagaaccctttctaataacataactgtgcctaagatcgagcgtgccaattcctatagtgccgaggagccaagcgccccatacgcacatacaagaaagagcttttctattagcgataagctggacaggcagcgtaatacagcaagtctgcggaaccctttccagagatctaagtcctcaaagcccgagggcaggggggattcgttgtccatgagacgcctaagtagaacatctgcctttcagtctttcgaaagcaagcacaattag

SEQ ID NO: 209212 - DNA, 4701 bp, synthetic construct
  misc_feature 1..4701: note = Description of Artificial Sequence: Synthetic coding sequence
  source 1..4701: mol_type = other DNA
atgtacgtgcgggtgagcttcgacaccaagcccgacctgctgctgcatctgatgaccaaggaatggcaactggagttaccgaaactattaatctcggttcacggaggtctacagaattttgagctgcagcctaaattaaagcaagtgtttggcaaaggccttattaaagccgcaatgaccactggggcttggatcttcacaggaggggtaaacaccggcgtgattaggcacgtcggggatgcactgaaggatcacgcatcaaagagccgtggcaaaatctgtacgatcggaatcgcgccttggggtattgtagagaatcaggaggatctcattggccgggacgtcgtgaggccctatcagactatgtctaaccccatgtctaaactgacggtccttaactcaatgcacagtcattttatactggcggataatgggaccacaggaaagtatggagctgaggtgaaactcagaaggcagctggagaaacacattagcctgcagaagatcaacacccgtattggccagggggtgcccgtggtggcgttgatcgttgagggggggcccaatgtaatcagcatcgtgcttgagtacttgcgcgacacacccccagtcccggtggtggtgtgcgatggctccgggagggcatccgacatcttagcctttggtcacaagtatagcgaggagggtggccttatcaacgagagtctgcgcgatcagctactggtgaccattcagaagacttttacatatactcgtacccaggcccagcacctgtttattattttgatggaatgtatgaaaaagaaggagctgatcactgtcttccgcatgggaagcgaaggccaccaggatattgatctggcaatactgacagctctgctgaaaggagcaaacgcctcagcccccgatcagttgtccctagctctggcttggaaccgtgttgatatcgcccgcagccagatctttatctatggacaacaatggccagtcgggtccctagagcaggccatgctagatgctctcgtgcttgaccgggttgactttgtgaagctgctcattgagaacggcgtatcgatgcacagatttctgactatttctcggcttgaggaattgtataacacaaggcacgggccttctaatactctgtatcacctagtgcgggacgtgaaaaagcgcgagtaccccggattcggctggatttactttaaagggaacctgccaccagattatcggatcagcctgatcgatatcggactggtgatcgaatacttaatgggaggggcatatcggtgtaactatacccggaagagattccgcaccttgtatcacaacttgtttggacccaaaagaccaaaggccttaaagttgctggggatggaggacgacatccctctgagacgcggtagaaaaaccacaaagaaacgagaggaagaggttgacattgacttagacgaccctgaaattaaccattttccattccctttccatgagttgatggtctgggcagttttgatgaagcggcagaagatggccctgttcttctggcaacacggcgaggaagcgatggctaaagcgctagtagcctgtaagctgtgcaaggcaatggcacacgaggcatccgagaatgacatggttgacgacattagccaggagctgaaccacaattcccgggattttggtcagctcgccgtcgaactcttggaccagtcatataagcaggatgaacaactcgctatgaagctactaacatatgaattaaaaaattggagcaatgctacatgcctgcaattggctgtggctgccaaacaccgggactttatcgctcacacctgctctcagatgctgctgacggacatgtggatgggtcgcttgaggatgcgcaaaaattcgggcttgaaggtcatcctgggaattttgctcccaccttctatactgagcctagaatttaagaataaggatgatatgccgtacatgagtcaggcacaggagattcacctccaggagaaggaagcggaagagcccgagaaaccaactaaggagaaggaagaggaggacatggaactgacggccatgctgggaagaaataacggtgagtcatccagaaaaaaagacgaagaggaggtgcagtccaaacacagactgatacctcttggccgtaagatctacgaattctataacgcacccattgttaaattttggttctacaccctggcttacattgggtacttgatgctttttaattatatcgtgttggtcaagatggagagatggccctctacacaggaatggattgtaattagctatatcttcacactcggcatcgagaagatgagagaaattctcatgtcagaacccggcaagctactccagaaggttaaggtgtggctccaggagtattggaatgtcaccgatctcattgccatcctgcttttttctgtgggcatgatcctgcgcctacaggaccaaccctttcgctccgatggcagggttatttattgtgttaatataatttactggtatatccgtcttctggacatttttggcgtgaataagtatctgggaccatacgtgatgatgattggcaagatgatgatagatatgatgtacttcgtgatcatcatgttggttgtcctgatgagctttggcgtcgctcgacaggccatcctgttccccaatgaagaacctagctggaaacttgcaaaaaatatcttctatatgccctattggatgatctatggcgaggtgtttgctgatcagatcgatccgccttgcggccagaatgaaactagggaggatggtaagattatacaactgcctccttgtaaaacgggcgcatggatcgttccagccatcatggcctgctatttactagtggctaacatcctcctcgtgaatctactaatcgccgtcttcaataataccttcttcgaggtcaagtccattagcaaccaggtgtggaaatttcagaggtaccagctcatcatgacattccatgagcgacctgtgcttccccctccgctgatcatattctcccacatgaccatgatcttccagcacctctgctgtcgatggcgcaagcacgagtccgacccagacgagagggattacggtttaaagctcttcatcactgatgatgagctaaaaaaagtacatgattttgaggaacagtgtattgaggaatactttagagaaaaggacgacaggtttaatagcagcaacgacgaaagaatacgggtcacgtcggagagggtggagaacatgagtatgaggcttgaggaggttaacgaaagggagcatagcatgaaagcatccctccagactgtggacattagattggcacagcttgaagatttgattggacgaatggcaaccgccctcgaaaggctcacaggcctagagagagccgaatctaataaaatcaggtctcgcacgtcttccgattgcactgatgccgcttacatcgtcagacagtcctctttcaactcacaggagggcaatacctttaaactgcaggagtccatcgaccctgccggagaggagaccatgtcacccactagccccacactgatgcctcggatgcggtctcactccttctactcagtaaatatgaaagacaaaggaggcatagaaaagctggagtcaatatttaaagagagatcactgtccttgcaccgcgccacaagcagtcattcagtggcaaaggaacccaaggcgcctgctgcccctgccaataccctggccatagtccccgactctcgtaggcccagcagctgcattgacatttacgtcagcgcaatggacgaactccattgtgacatcgacccactagacaattctgtgaacattctgggactgggcgaaccctccttcagcacacccgtgcctagtacagccccttccagcagtgcctacgcaaccttggcgcccactgaccgacctccctctagatcaatcgactttgaagatatcacctctatggatactcgatctttctcctcagattatacccatttacctgagtgtcagaatccatgggacagcgagccccctatgtatcatacaatcgagcgtagcaagtcctctcgctatctggccacgacgccttttctcctcgaggaggcccctatcgtgaaatctcacagctttatgttttctccaagtcgctcatactacgctaattttggggtaccagtcaagacggcggagtatacgtcaattaccgattgtatagacacccgctgcgtcaacgcacctcaggctatcgcagacagggccgcttttcccggaggtttgggtgacaaagtggaggacctgacttgttgtcaccctgagcgcgaggccgagctgtctcaccccagttctgattccgaagagaacgaggctaaaggtaggcgggccaccattgcaataagctcacaggagggcgacaacagcgagaggactctatctaacaacattaccgttccaaagatcgaaagggccaattcttattctgctgaggagccctctgccccctacgctcacacccgaaaatccttttccatttcggacaagctcgaccgccagcgcaacaccgctagcctgcgcaacccctttcaaaggtcaaaatcctctaagccagagggcagaggggattcactttctatgcgaagactgtcccgtactagcgcgttccagagcttcgaaagcaagcacaattag

SEQ ID NO: 209213 - DNA, 4740 bp, synthetic construct
  misc_feature 1..4740: note = Description of Artificial Sequence: Synthetic coding sequence
  source 1..4740: mol_type = other DNA
atgtacgtgcgggtgagcttcgacaccaagcccgacctgctgctgcatctgatgacaaaggagtggcagctggagctgccaaaactcctgatttcagtgcatggaggactgcaaaattttgagttgcagcctaagctaaaacaggtctttgggaaggggcttattaaagctgcaatgacaacgggggcatggattttcacaggcggtgtcaacactggagttatcaggcacgttggggacgctctaaaagaccatgctagcaaaagccgcggaaagatttgtaccatcggaattgcaccgtgggggatagtcgaaaaccaggaagaccttattgggcgagacgtagtgagaccttaccagaccatgtcaaaccccatgagcaaacttaccgtcctgaattccatgcatagtcattttattctcgccgacaatggaactacaggtaaatacggcgccgaagtgaagcttcggcgtcaacttgagaaacacatcagcctgcagaagatcaatacacggtgtcttcccttcttttccctggactcacggttattctactctttttgggggagttgccagctcgactcagtggggattggtcagggagttccggttgtggcgctcatcgtggaagggggaccaaatgtgatttcgatcgtgttagagtatctgcgcgacacaccccccgtaccagttgtggtgtgcgatggctccggacgagcgtccgacatccttgccttcgggcataaatacagtgaagagggagggcttattaatgagtctcttcgagaccagctgctagtaaccatccaaaaaaccttcacatacacaagaacgcaggctcagcatctgtttatcatcctcatggaatgcatgaagaaaaaagaacttatcacggtttttagaatgggatccgaggggcaccaagatattgacctggcgattcttactgcgcttctcaaaggcgcaaacgccagcgccccggatcagctaagtcttgcactcgcctggaatagggttgatatcgctcggtcacagattttcatttatggtcagcagtggcccgtgggaagtcttgaacaagccatgctggacgccctggtgttggaccgtgttgactttgtcaaactcctgatcgaaaatggggtgtccatgcataggttcctgacgatttcccgcctcgaggaactatacaacacccgacacgggccgtccaacacgttgtatcatctggtgcgtgacgttaaaaaagggaatcttccaccggattataggatcagtttaatagacataggactggtcatcgagtatctgatgggtggggcttaccgatgcaattacaccaggaaacgcttccggactctgtaccataacctctttggacctaagagacctaaggctctgaaattacttggaatggaggacgacatacctctgaggagaggacggaagacaactaagaaacgggaggaggaggtcgatatcgacttggatgatccggaaatcaatcacttccccttccctttccacgagcttatggtgtgggccgttctcatgaagagacagaagatggcactttttttctggcagcatggggaagaggccatggctaaggccctggtcgcctgtaagctctgtaaggccatggcccacgaagcatccgaaaatgatatggtggatgacatcagccaggagctgaatcataacagtcgtgactttggccagcttgctgttgagcttctcgatcagagctataaacaggacgagcagctggcaatgaaactgctgacatacgaactgaaaaattggtctaatgcaacatgcttgcagcttgccgtcgctgccaagcatagggactttattgcgcacacttgcagtcaaatgctcctgactgatatgtggatgggtagactgaggatgaggaagaactctggattgaaagttatcctgggaatactgttgccgccctctatcctgtctttagaatttaagaataaggatgatatgccttatatgtcccaagcacaagaaatccacttacaggaaaaggaagcggaggagccagagaagccaaccaaggaaaaggaggaggaagacatggagctgactgcgatgctaggcagaaacaatggagaatcatcacggaagaaagatgaggaggaagtacagtcaaagcaccgcctgatccccctagggaggaagatatatgagttttacaatgcccctatagtcaaattttggttttacacccttgcttacatcgggtatctgatgcttttcaactatatagtgctggtgaaaatggagcggtggcccagcacccaggagtggattgttattagctacattttcacattggggattgagaaaatgagagaaatcctgatgtccgagccagggaagctgctccagaaggtcaaggtctggctgcaggaatactggaatgtgaccgacctcattgctatcctgctgttctctgtggggatgattttaagactgcaggaccaacccttccgatctgacgggcgggttatttactgcgtcaatattatctactggtatatcagattacttgatatatttggtgtcaataagtatctgggcccttatgtcatgatgatcggcaagatgatgatcgacatgatgtatttcgtgattatcatgctagttgtgctcatgtccttcggtgttgccaggcaggccatactctttcccaatgaggagccatcatggaagctggcaaagaacattttttatatgccctattggatgatctacggagaggtctttgccgaccaaatcgacccaccatgtggccagaacgagacccgtgaagacgggaagattatccagctcccgccttgcaaaactggtgcatggatagtgccagctatcatggcctgctatctcctagttgccaatatcctcttggtgaatctcctcatagccgttttcaataacacattctttgaggtcaaatctatctccaatcaggtgtggaaattccagcgctaccagcttataatgactttccatgagcggcctgtcctgcccccacccctgataatcttctctcatatgaccatgatctttcagcatctgtgctgtagatggcggaaacacgaatctgaccccgacgaacgcgactacggattgaaattattcattaccgacgacgagctgaagaaagttcatgattttgaggagcagtgcatcgaagagtatttccgggaaaaggacgataggttcaactctagtaacgatgaacggatccgggtgacatcagagcgtgtggagaacatgagcatgcgcttagaagaggttaacgagagggagcactccatgaaggcctctctacagacagtggatatcagactggcacaactggaggaccttattggccgaatggctactgcattggagcgattaactggacttgagagagcagaatccaacaagattagatcccggactagctcagattgcactgacgctgcttacatcgttcggcagtccagtttcaacagccaggagggcaacacattcaagctgcaggaatccattgatcctgcaggcgaggagactatgagtccgaccagccccactcttatgccgagaatgcgctcccacagtttttactctgtaaatatgaaggacaaaggtggaattgagaaactagaatcaatcttcaaggagaggagcttgtcgctgcaccgagcaacctcctctcacagtgtggctaaggagccgaaggctcctgcagctccagccaacaccctcgcaattgtacccgattcccgccgacccagcagctgcatagacatatacgtgtcagctatggatgaactgcactgtgatattgaccccctggacaactcagttaatatcctcggcttgggagagccatccttttctacccctgtaccaagtacagctccttcctcaagtgcctatgcaaccttagctcccaccgatcgacccccgagtaggtccattgactttgaggacataacaagcatggacactcggtcattctcttctgactacacccatctgccagagtgccaaaacccctgggactcagaaccaccaatgtatcataccattgaaagatcaaagagcagtcgctatttggctacaactccctttcttcttgaagaggcgcctatcgtcaagtcccatagctttatgttctccccgtcccgatcatattacgccaatttcggagtgcccgttaagactgccgagtacactagcatcactgattgtatcgacaccagatgcgtgaacgcaccacaggctattgccgaccgggctgcatttcctggcggtttgggggataaggtcgaagatctgacctgttgtcaccccgagcgcgaagccgagctctcccacccgtcaagtgattccgaagaaaatgaagccaaaggtaggagagccactattgccatttcatctcaggagggagacaatagcgaacggaccttatccaataacattaccgtcccaaaaatcgagagagccaattcttattccgccgaagaaccgagcgctccatacgcgcacactaggaagtcgttttctatatccgataagttggatagacagcggaatactgcatccctccgaaaccccttccagcggtctaagagcagcaaacccgaaggcaggggtgactctttatctatgagacgtctcagtagaacgtccgccttccagtccttcgaatccaagcacaattag

SEQ ID NO: 209214 - DNA, 5124 bp, synthetic construct
  misc_feature 1..5124: note = Description of Artificial Sequence: Synthetic coding sequence
  source 1..5124: mol_type = other DNA
atgcccgagccctggggcaccgtgtacttcctgggcatcgcccaggtcttcagcttcctgttctcttggtggaatctagagggggtcatgaaccaagccgacgcccctcgccccctgaactggaccatcagaaagctatgtcatgctgccttcctccctagcgtgagactgctcaaagcacaaaagagttggatcgagcgtgccttttataaacgggagtgcgtgcacatcattccaagcactaaagacccccatcgctgctgttgtggcaggctgatagggcaacatgtaggccttaccccctctatttcagttttgcagaacgagaaaaatgagagtaggctgagccgtaatgatatccagtcggagaagtggtcaattagcaagcatacacagctgagtcctacggatgcttttggtacaatcgaatttcaaggtggaggtcacagtaataaagcgatgtacgtgagggtgtcatttgacacaaaaccagatctcttactgcatctgatgactaaagaatggcagctggagctgcccaagctcctaattagcgtccacggcggactgcagaattttgaactacagcctaaactgaaacaggtattcggcaagggactgattaaggctgctatgactaccggcgcttggattttcaccggcggggtgaatacaggagtgatccgccatgttggagacgcgctgaaggatcatgcttccaaatccagagggaagatctgtaccattgggattgctccctggggcattgttgagaaccaggaagatttaataggccgagatgtcgttcggccatatcaaaccatgagcaacccgatgtccaaactgaccgtgcttaatagtatgcacagccacttcatcctggccgataatggaacaacagggaagtatggcgcggaggtcaagctgcgtcgccagctcgagaagcacatttcactacagaaaataaacacccgcattgggcagggcgtgcccgtcgtggcactgatcgttgagggaggacccaacgtgatatcaatcgttcttgagtaccttcgagacaccccgccagtgcctgtcgtggtctgcgatggaagcggcagagccagcgatattctggccttcggacacaagtatagcgaagagggggggctaataaatgaatccctgagggaccagctgttggtgactatccaaaagaccttcacttatacaaggacccaggcacagcatctgttcatcatccttatggaatgcatgaaaaagaaggaactgatcactgtgttcagaatggggtcagaaggacatcaggatatcgatctcgctattttaacagcacttctcaagggggcaaacgcttctgcacctgatcagttaagcctggccttggcttggaacagggttgacatagccaggtctcaaatcttcatttacggccaacagtggccagtggggtccttagaacaagctatgcttgacgcactcgtactagaccgcgtggatttcgtgaaattgttgattgaaaatggcgtttcaatgcaccggttcttgaccatctcccggctcgaggagctctataacacccgccatggaccgagtaacacactgtatcacctggtccgagacgtaaagaaagggaacctgccacctgattacagaatctctctcattgatatcggccttgttattgagtatcttatggggggcgcctatcgctgcaattatacccgaaagcggtttcgaaccctctaccataacctttttggacccaaaaggccaaaggctcttaagctgctgggcatggaggacgatattcccctgcgccgcggaagaaaaaccactaagaaaagagaggaggaagtagatatcgatctggacgacccagagatcaaccattttcctttcccattccatgagctgatggtttgggctgttctcatgaaacgtcagaagatggcactcttcttttggcagcacggggaggaggcgatggcaaaggccctggtggcctgtaagttatgtaaagcaatggcgcacgaagcttcggagaacgatatggtggacgatattagtcaggagctgaatcacaattcacgtgattttggccaacttgcagtcgagctcttggatcagtcttataagcaggacgagcagctcgcgatgaaactgctgacgtatgaactaaagaattggagcaacgccacctgcctacagctcgcagtagccgctaaacacagagatttcatcgcccacacatgctcccagatgttgctgactgacatgtggatggggcggctgcgaatgaggaagaattcaggcctgaaggtcatcttaggcattctgttgcccccctcaattctcagtctggagttcaagaacaaggatgacatgccctacatgtcccaggcacaggagatccacttacaggaaaaagaagccgaggagccagagaagccaactaaggaaaaagaggaggaggacatggagttaacggctatgctggggagaaacaatggggagtctagccgaaaaaaggacgaagaggaagtccaaagcaagcaccgcttaatcccactgggccgaaaaatctatgagttctacaacgccccaatcgtgaagttttggttctacactctcgcatatatcgggtacttgatgctatttaactatattgttctcgtgaaaatggaacgatggccgagtacgcaggagtggatcgttatttcatacatttttactttgggaatagagaagatgcgggagatcctaatgtccgagccgggcaagctgctgcaaaaagttaaggtatggctccaggaatattggaatgtgaccgatctgattgccattctgttattctccgtcggaatgatcttgcgacttcaggaccaaccctttcgatctgacgggcgggtcatttattgcgtgaatataatttattggtacattcggcttctggatatttttggagtcaacaaatacttggggccttacgttatgatgataggaaagatgatgattgacatgatgtactttgtcattatcatgctggtggtactgatgtcgttcggggtggcgcgccaggctatcctcttccccaatgaggaaccatcctggaaacttgctaagaacattttttacatgccctattggatgatctatggagaggtgtttgctgatcagatagacccgccctgcggacagaatgagacaagagaggacggaaaaatcatacagctgcccccatgcaagactggggcatggattgtccccgccatcatggcatgctacctcctggtggcaaatatcctgctggtgaatttgcttattgcagtctttaataatactttcttcgaagtgaaatctataagcaaccaggtgtggaagtttcagcgttaccaattaatcatgacgttccatgaacgacccgtgcttccgccacctctgattatttttagccacatgacaatgatttttcaacacctttgttgtcggtggcgcaaacatgagagtgatccggatgaacgggactatggtctgaagctgtttattacagatgacgagttaaaaaaggttcacgattttgaggagcagtgcatcgaagagtattttcgcgagaaagatgataggtttaactctagcaacgatgagcggatccgagttacctctgagcgcgtggaaaatatgagcatgaggttggaagaggtaaacgagagggaacatagtatgaaggcatcactgcagactgtcgatatcaggctggcacagctcgaagatttgattgggcgcatggctaccgctctcgaacgtctgaccggactggagcgtgctgagtcaaacaagattagatctcgtacttcgagtgactgcactgacgcagcctatatcgtgcgccagtccagctttaatagtcaggagggcaacacatttaagctgcaggaatctattgacccagctggcgaggaaacaatgtccccaacatcaccgacattgatgcccaggatgcgttcccatagcttctattctgtgaatatgaaagacaaaggcgggattgaaaaactggaatccatcttcaaagagcgctcactctctctccaccgcgctacgagtagtcactccgtagctaaggagccaaaggcacctgcggctcctgccaataccctggccatcgtacccgattctcggaggccaagtagctgcatagacatttacgtatcggctatggatgagctacactgcgacattgaccctctagacaactccgtgaacattctgggtctgggcgagccatcattctcgactccggtgcccagtactgccccctctagcagtgcctacgccacattggctccaaccgataggccaccctccagatcaatcgacttcgaagacattacgagtatggacaccaggtctttttcaagcgactatactcatctgcctgaatgtcagaacccctgggactcagagccccctatgtatcacactattgaacgtagcaagtcctcacgttatcttgcaaccacaccgtttttgctggaggaagcccctattgtcaagagtcatagtttcatgtttagcccttctaggtcctactacgcaaatttcggtgtccccgtgaagacggcagaatatacctcaatcaccgattgtatcgatacacgatgtgtgaatgcgccccaagcaatcgcagaccgggctgcctttccgggcggattgggagacaaggtagaggatctgacatgttgtcatccagaacgcgaggctgaactcagccatccgtcaagcgacagtgaggagaacgaggctaaggggagacgcgccacgattgccatctcctctcaggagggagacaattcggagaggacactgtcgaataacatcacagtgccaaaaatcgaaagagcaaactcctatagtgccgaagaacctagcgccccctacgcccacactcgtaagtctttttctatctctgataagctcgaccgtcagagaaacacggcatcacttcgaaacccttttcagaggagcaaaagctcgaaacctgagggacgaggtgactctctgagcatgcggagactgtctcgcactagtgcattccaaagttttgaaagcaagcacaactag

SEQ ID NO: 209215 - DNA, 3978 bp, synthetic construct
  misc_feature 1..3978: note = Description of Artificial Sequence: Synthetic coding sequence
  source 1..3978: mol_type = other DNA
atgcccgagccctggggcaccgtgtacttcctgggcatcgcccaggtatttagcttcctcttctcatggtggaatttggagggagtcatgaatcaggccgacgcacctaggcccctcaactggacaattcgcaagctctgccatgctgcatttctcccttccgtacgtctgctgaaggcccaaaaatcctggattgagcgggccttctacaaacgcgagtgcgtgcatatcatccctagtacaaaggaccctcaccgttgctgctgtggcaggttaattgggcagcacgtgggtttgacaccgtctatcagcgtcctgcagaatgaaaagaatgagtctcggctctccagaaatgacattcagtctgaaaaatggtccatatctaagcacactcagctgtcaccaacagacgcttttgggacaattgagtttcaagggggcggccatagtaacaaagctatgtacgtgcgggtctcattcgacactaagcccgacttgctgctgcatctgatgacgaaggaatggcagctggagctcccaaagttgctaatttctgtgcacggagggttacaaaatttcgaactgcaaccgaagctgaaacaggtgttcggcaagggtttaattaaagccgcaatgactactggtgcatggatctttaccgggggtgtcaacactggcgttatacgacatgtgggcgacgctctgaaggatcacgcttccaagtctcgtgggaagatctgcaccattggcatcgctccttggggcattgtggagaaccaggaagatctaatcggacgcgatgtcgtccgtccctatcagacaatgtccaatcccatgagtaagttaacagtgctcaattcgatgcactcacactttattttagctgacaacggcaccacaggtaaatacggtgccgaagtcaaactgaggaggcagctcgaaaaacacatatccctccaaaagattaacacacgaattgggcaaggcgttcccgtcgtggccctgatcgtagaaggaggccccaacgttattagtatagtgctcgagtatctgcgtgacaccccgcctgttccagtggtagtgtgtgacggatcaggcagggctagcgatatcctggcatttgggcacaagtattctgaggaaggaggcctcatcaatgaaagcctccgcgaccagctgctcgttaccatccagaaaacattcacttacaccagaacacaggctcagcaccttttcatcattctcatggagtgcatgaagaagaaggaactgattaccgtcttcaggatggggtccgaagggcatcaggatattgacctcgcgatacttacagctctgctgaagggtgctaacgcgtctgcacctgaccagctctccttagcccttgcgtggaatcgcgtagacatcgcccgatcccaaatttttatttacggacagcagtggccagttggctcgcttgagcaggcaatgctggacgctctggtattggatagagtggatttcgtgaaactgctaatagaaaacggtgtctctatgcatcggtttctcacgatcagccgtctggaggaactctacaatacccgacacggcccttccaacacattatatcacttggtcagagacgtgaagaaaggcaacctgcctcctgactacaggatctcccttattgacattggcctggtcatagagtacctgatggggggagcatatagatgtaactacacaagaaagcgcttccgaacgctgtaccataacctttttggccccaagaggcctaaggccctgaaactgctcggtatggaggatgacatcccccttcggcgcgggagaaaaacaacaaagaaacgtgaagaggaggtcgacatagaccttgatgaccctgagatcaaccactttccattcccttttcatgagctaatggtatgggctgtgctgatgaaacgacaaaaaatggccctgtttttttggcagcacggcgaggaggccatggctaaagctctcgtcgcatgcaagctgtgcaaggccatggcccacgaggccagcgaaaacgacatggtcgacgacattagccaggagctgaatcacaattcccgcgatttcggtcaattagctgtcgagctcctagatcagtcttataagcaggatgaacagctggcaatgaagctccttacctacgaactgaaaaactggagcaatgctacttgccttcagttggctgtggccgctaaacatagagactttatagcccatacttgttctcagatgctgctgaccgacatgtggatgggacgactgagaatgcgcaagaattcggggctgaaagtcatactgggcatcttattaccaccttctattctcagtctggaattcaagaacaaggatgatatgccctacatgagccaggctcaggagatccatctgcaggaaaaagaggccgaagagccggagaaacctaccaaagagaaggaggaggaggacatggagctgactgctatgttaggtcgaaacaacggcgagagctctcggaaaaaagatgaggaggaagtccaatctaaacaccggcttattcccctgggacggaagatctacgagttctataacgctcctatcgttaaattctggttttatacactggcctatatcggctatctgatgctttttaactacattgtgttagttaaaatggagaggtggccgagcacacaggaatggattgtaatcagttatatctttaccctcgggattgaaaagatgcgagagatactcatgtctgagccgggaaagttgctgcaaaaagtgaaagtctggctacaggaatattggaatgttactgaccttattgccatcctgcttttttctgtgggcatgatcttgagactccaggatcagccttttagatcagatggaagagtgatatattgcgtcaatattatttattggtatattcgattactcgacatctttggcgtgaacaagtacctgggcccatacgtgatgatgattggcaaaatgatgatagatatgatgtattttgtcatcatcatgctggtggtgttgatgagcttcggcgtggcgcggcaagcaatactctttcccaacgaagagcctagttggaaactcgcgaagaatattttctacatgccgtactggatgatctacggcgaagtcttcgccgaccaaatagatcctccttgcggacagaacgagacacgggaagacggtaagatcatacagctcccgccctgtaagactggcgcttggatcgtcccggcaatcatggcctgctacctcctggttgcgaatattttactcgtgaacctgctcatcgctgtcttcaataacaccttcttcgaagtaaagagcatctccaatcaagtctggaagtttcagcgctaccagctgattatgactttccacgagcggccagtactgccaccacctttgataatattctcacacatgacaatgatcttccaacatctatgctgccggtggagaaaacatgagtctgacccagacgaacgtgactacggcctgaaactcttcatcacggatgacgaattaaaaaaagttcacgactttgaggagcagtgtattgaagagtacttccgggagaaggatgatcgttttaattcctctaatgatgagcggatcagggtgacgtctgagcgcgtggagaatatgagcatgcggctagaggaggtgaacgagcgcgaacactccatgaaggccagccttcaaactgtggacatccgattagcccagctcgaggatcttattggacgcatggctactgctctggaacgacttaccggtcttgaacgggctgagtctaacaaaatccggagccggacctcatctgactgtacggatgcagcctatattgtacgccagtctagctttaatagccaggagggcaatacctttaagctgcaggagtccattgaccctgcagagcaccctctctattccgtgtag

SEQ ID NO: 209216 - DNA, 4671 bp, synthetic construct
  misc_feature 1..4671: note = Description of Artificial Sequence: Synthetic coding sequence
  source 1..4671: mol_type = other DNA
tgatacgtgcgggtgagcttcgacaccaagcccgacctgctgctgcacctgatgaccaaggaatggcagttagaacttcctaaactgctcatttctgtgcacggcggtttacaaaactttgagctgcagcccaaactcaagcaggtcttcgggaaaggtttgatcaaggccgccatgaccactggcgcctggattttcacaggcggagtgaatactggggtgattagacatgtgggagacgcgctaaaagatcacgcgagcaaatctagaggcaaaatctgtactatcggcatcgccccttggggaatcgtggaaaaccaggaggatctgataggacgcgatgttgttagaccatatcagaccatgagtaaccctatgagtaagcttacagtgctgaactcaatgcattctcatttcatcttagctgataatggcacaacgggcaagtatggagccgaagttaagttacgccggcagctggaaaagcacatctccttgcagaaaattaatacgcgcataggccagggggtgccagttgtggcactgattgtggaaggcggccctaatgttataagtattgttcttgagtatctacgggacactcctcccgtccccgttgtagtgtgcgacggctctgggcgtgccagcgacatcttggccttcgggcataagtatagcgaagaaggaggtctgataaacgaatctctgcgggatcagttgctcgtaactatccagaagacatttacctatacccggacacaggcccagcatctgttcatcattttgatggagtgcatgaaaaaaaaggaacttattactgttttccggatggggtcagagggacaccaagatattgatctggcaatccttaccgctctcctcaaaggagccaacgcgtcagctccagatcagctgagccttgccctcgcatggaaccgggtggacattgctcggagccagatcttcatctatggacagcagtggcctgttggtagcttggagcaggccatgctggacgctttggtactggatcgtgtggattttgtaaagttactgatcgaaaacggcgtgagtatgcatcggtttctgacaatatcgcggttagaggaattgtataacactaggcacgggccctccaacacgctgtatcacctcgtcagggacgtgaaaaaacgcgagtaccccggcttcggctggatatactttaaggggaacctccccccagactatcgcatttcattaatcgacatcggactggtcattgaatacctgatggggggggcctatcggtgtaattacactcgaaaacgtttccgaaccttataccataatctctttggcccaaagagggatgacattccactgagacgaggccgaaagacgacaaagaagagagaggaagaggtggacatagacttagacgacccagagatcaatcacttccctttcccgttccacgaacttatggtgtgggccgtgctgatgaaaagacaaaagatggccctcttcttctggcagcacggggaggaggcaatggcaaaagctctagttgcctgcaaattgtgtaaagccatggcacacgaggcttcagaaaatgacatggtagacgacattagccaggagctaaaccataacagcagggatttcggccaacttgctgtggaattgctggaccaatcctataagcaggacgaacaactggccatgaagctgcttacttacgaactaaaaaactggtcaaatgctacctgccttcagctcgctgtggctgccaagcaccgggattttattgctcacacatgtagccagatgttactgacagacatgtggatggggcggcttaggatgcgtaagaatagcggactgaaggtcatcctggggatcctgcttcctccaagtattcttagcctggagttcaagaataaggatgatatgccttacatgtcccaagcgcaagaaatccacctgcaggaaaaagaagctgaggagccagaaaagcccactaaggagaaggaagaggaagatatggagcttacagccatgctgggtcgaaacaatggggagtccagccggaaaaaggacgaggaggaggtgcagtctaagcatcgactcattccattagggcggaaaatctatgaattctacaacgccccgatcgtcaaattctggttctacaccttagcctatattggatatcttatgctgttcaattacattgttttggtcaaaatggagaggtggccaagtacacaggagtggatcgtgatcagctacatcttcactcttggcatcgagaagatgcgtgaaattttgatgagcgaacctgggaagctgctccagaaagtgaaggtgtggctccaagagtactggaacgtgacagatctcatcgccatccttctcttctcggtaggtatgattttgcgcctgcaggaccaaccattccggtccgatggaagggtgatctactgcgtcaatatcatctactggtacattcggctgctcgacatcttcggcgtcaacaaatatctgggcccctacgttatgatgattggcaaaatgatgatcgacatgatgtacttcgttattataatgcttgttgtgcttatgtcatttggtgtggccaggcaggctatccttttccccaatgaagaacctagttggaagctcgctaaaaacattttctatatgccctactggatgatctatggagaagtatttgccgatcagattgacccgccttgtggccagaacgaaactagagaggacgggaagattattcaactgcccccttgtaagaccggtgcctggattgtgcccgcaattatggcttgttatctgctggtggccaacatcctgcttgtgaatctgttgatcgctgtgttcaataacaccttcttcgaagtcaagtcgatctctaatcaagtgtggaaatttcagcgctatcaactgattatgactttccacgagcgaccggtgctgcccccgccactgatcattttttcacacatgacgatgattttccagcacctctgttgtcgctggagaaaacatgaatctgaccctgacgagagagattacggacttaaactgtttatcaccgatgacgagctgaagaaggtccacgacttcgaggaacaatgcatcgaagaatattttagggagaaggacgaccgctttaacagttccaatgatgaaaggattagggtcacatcagagcgggtggagaatatgtctatgaggctcgaggaggtcaacgagcgggagcacagcatgaaggcttctcttcagacagtggatattcgcctggcccagctggaggacctgatcggtcggatggccactgccctcgagcgattaaccgggttggagcgggccgagagtaacaaaattagatctcgcacatcctcagactgtaccgacgccgcctatatcgttagacaatcatctttcaactcccaggaagggaatacctttaaattgcaggagtctattgatcccgcaggagaagagactatgtctcctaccagcccaacactgatgcccaggatgaggtcccactccttctactccgtgaacatgaaggacaagggcgggattgaaaaactcgagagtatcttcaaggagcggtccctatctctgcaccgcgcgacaagtagccattccgtcgcaaaagaacctaaggctcctgcagctccagccaatactctggcaattgtccccgattctcgtcggcccagctcttgcatcgacatatacgtgtcagccatggatgaattgcattgcgatattgatccgctcgacaatagcgtaaacattctgggattgggtgagccttctttttcaacaccggttccgagcactgcccccagctcaagcgcctacgcaaccctcgctccaacagaccgcccgccttctcggtccatcgatttcgaagacatcacaagcatggatacccggtccttcagctccgattacacgcaccttccagagtgtcaaaacccctgggacagcgaaccaccaatgtaccacactatagaaaggagtaaatctagtaggtacctcgctactacccctttcctgctggaggaggctccgattgtcaaaagccacagttttatgttttctccgagcagatcgtattacgccaattttggcgtgccagtgaagacagccgagtatacaagcatcactgattgcatagacactaggtgcgtgaacgcaccccaagccatagccgatagggccgcatttcccggaggcctgggcgataaggtggaggatctgacctgctgtcatcccgaaagagaagcggagctgtcccaccccagctctgattccgaggaaaacgaggcaaaggggcgacgcgccacaatcgcaatcagtagccaggagggcgataattcagagagaactctcagtaacaatatcacagtccccaagatcgagagggcaaattcgtactcagccgaggaacccagtgccccgtacgcccacacccgaaaatcatttagcatatctgacaagctagacaggcaaaggaacactgcatcgctgcgcaacccgttccagagatcaaagtcctccaagcctgaaggtcggggcgatagcttatctatgaggcgtctaagcaggacatctgcttttcagagtttcgaatccaagcacaactag

SEQ ID NO: 209217 - DNA, 4701 bp, synthetic construct
  misc_feature 1..4701: note = Description of Artificial Sequence: Synthetic coding sequence
  source 1..4701: mol_type = other DNA
atgtacgtgcgggtgagcttcgacaccaagcccgacctgctgctgcacttgatgacgaaggagtggcagttagaactccccaagctccttatttccgtgcatggaggcctccaaaatttcgaactgcaacccaagctcaaacaggttttcggaaagggactcatcaaggccgctatgaccactggcgcatggatttttacgggaggcgtgaacaccggggttatcaggcacgtcggtgatgctcttaaggatcacgcgtccaaatcacgaggtaagatttgtacaattggcatcgccccttggggaattgtggagaaccaggaagatttgatcggtagggacgtggttcgcccctatcagaccatgagtaacccgatgagtaaactgacagtcctcaactctatgcatagccacttcatcctcgctgataacggtactactggtaagtacggagcagaggttaaactgagaagacagcttgagaaacacatttctctgcagaagatcaacacacgcattggacaaggcgtgcctgtcgtcgcccttatcgttgagggaggaccaaacgtcatatctatagtcttggagtatttgagagacacaccccccgtccccgtggtggtgtgcgacggtagcgggcgggcatccgacattcttgcattcggccacaagtattctgaagaaggcggccttatcaacgaatcattgcgggaccagctgttggtcaccatacagaaaaccttcacatacacccggacccaggctcaacatctgttcattattctaatggaatgtatgaagaagaaagagctgataacagtttttcggatgggtagtgaaggccatcaggacatagatctcgcgattctgactgcactgttgaagggcgctaacgcttctgcgccagaccagttaagccttgctctcgcatggaatagagtggacatagcaaggtcccagatcttcatctatggtcagcagtggcccgtcggctctctggaacaggcaatgctggacgcgctagtgcttgacagggtagacttcgtgaagcttttgatagaaaacggcgtctctatgcacagatttcttacgattagtagactggaagaactgtataatactcggcatggcccttccaacacactttatcacttggttagagacgtgaagaaggggaatttgccaccggattacagaatttcgcttattgatatcggcttagtgatcgagtatctgatgggtggggcctataggtgtaactatactcggaaaagattccggactctgtatcataaccttttcggccctaagaggccaaaggcattgaagctcctggggatggaggacgacattcctcttagaaggggaagaaagaccacgaagaaaagagaggaagaggtcgatatcgatctggatgacccagaaatcaaccactttccgttccccttccacgaacttatggtgtgggccgtcctgatgaaacgacagaaaatggccttgttcttctggcaacatggcgaggaggcaatggccaaagcacttgtagcgtgtaagttgtgtaaagcgatggcccatgaagcgtccgaaaatgatatggtcgacgatatctcccaggagttgaaccataattcgagggacttcggccagctcgctgttgagctcctggaccaatcatataaacaggatgagcaacttgctatgaagctgctaacatacgagttgaagaactggtcaaacgctacctgcctgcaactcgcagtcgccgccaagcacagagatttcatcgctcacacctgttcccaaatgcttctgaccgacatgtggatgggccgactccgcatgcgcaaaaatagcggactcaaggttatccttggaatactgttgccccccagtatactaagtctggaattcaaaaataaggatgacatgccctatatgagccaggcccaagagatacacttacaggaaaaggaggcagaagagccggaaaagcccactaaagagaaggaagaagaggacatggagctgaccgccatgctggggcggaacaacggtgagagcagcaggaagaaggatgaagaggaggtgcagtccaagcatcgtctcattcctttggggcgcaagatttacgagttttacaatgctcccattgtcaaattttggttctatacactcgcatacattggctacctaatgctgttcaattatattgtcctggtaaagatggaaaggtggccgagcacacaggagtggatcgttatttcctatatttttactctgggcattgagaaaatgagagagatcctcatgtccgaaccgggcaaactactccagaaagtgaaggtgtggctgcaggaatattggaacgttaccgacctgatcgccatccttctcttttcagttggcatgatacttagactgcaggaccagccctttcgctcagatgggagagtaatatattgcgttaatatcatttattggtacatccggctcttagatatttttggtgtgaataagtacctgggcccttatgtaatgatgataggaaagatgatgatcgacatgatgtactttgtgatcataatgttggtcgttttaatgagcttcggagttgctcgacaagctatcctttttcccaacgaagagcccagctggaagctagctaagaacatcttttatatgccatactggatgatttatggtgaggtattcgccgaccagatagatagaaagcaggtctatgactcacacaccccgaaaagcgccccctgtgggcaaaacgaaacccgcgaagacggaaagattattcagctacccccctgcaaaacaggagcctggattgtacctgctatcatggcgtgttatctgcttgtggccaacatccttctcgtgaacctcctaatagcagtcttcaacaacacgttcttcgaagtgaagagtatatctaaccaggtctggaaatttcagcgctaccagctcatcatgacattccatgaaaggcctgttttgcctcctccgttgatcatcttctcccatatgacaatgattttccagcacttatgttgcaggtggcgtaagcatgaaagtgaccctgacgagcgcgattatgggctaaaactgtttataaccgacgacgagcttaagaaagtccacgactttgaggaacaatgcattgaggagtattttcgtgaaaaggacgatcgcttcaacagctcgaacgatgagcgaattcgggtaacatctgagcgggtggagaacatgtcaatgcgcctcgaggaggtgaatgaacgagagcattccatgaaagccagtttacagacagttgatatacgattggcacaacttgaggatttgattgggaggatggccaccgctctcgaaagactcacgggactcgaaagagccgagtctaacaagataaggtctaggacaagcagcgattgcaccgatgcggcctacatcgtgcgccagtcgagctttaactctcaggaaggtaacactttcaagttgcaggaaagtatagaccccgccggcgaagagacaatgagtcccacctcaccaactttgatgccccgtatgaggtcacatagcttctattctgtcaacatgaaagacaaaggcggcatagagaaattggaatcaattttcaaggaaaggtctctttccctgcaccgagccacgagcagtcacagtgtggccaaagaaccaaaggcgccagccgctcctgcgaatactttagctatcgtccctgatagcagacgcccatcgtcttgcattgatatctatgtgtctgccatggatgagctgcactgcgatattgaccctctggataactccgtaaacatcttgggactaggcgagccgtcttttagcacgcccgtgccaagcaccgctccttcctccagcgcttacgctacactggccccgaccgaccgtccaccgtcaagatccattgattttgaggacattacctctatggatactcgctctttctcttcagactatacccatcttcccgagtgtcagaatccctgggacagcgagccccctatgtatcatactattgagcgaagcaagtctagcagatacctagccacgaccccgtttcttctagaagaggcccctatcgtgaaaagtcactccttcatgttctcaccatcgagatcgtattacgccaattttggagtcccggtcaagacagccgagtatactagtataaccgattgcatcgatactcgatgcgtcaatgccccacaggcgatcgctgatcgtgccgcatttcctggggggcttggcgacaaagttgaggatctgacctgttgtcaccccgaaagagaagcagaactcagccatccttcgagcgactctgaggaaaatgaggccaaaggaagaagagcgaccattgccatttctagccaggaaggagacaacagtgaacgcacactgagcaataatattaccgtccccaagatcgagagggctaatagttacagcgccgaagagccctcagcgccttatgcccatactagaaaaagtttttccatctccgataagctcgatagacaaagaaatactgcaagtcttagaaaccccttccagagaagtaaatcctctaagcccgaggggaggggcgatagcctgtctatgcgcaggctttcgcgtacatccgcctttcagagtttcgagtccaaacacaactag

SEQ ID NO: 209218 - DNA, 4740 bp, synthetic construct
  misc_feature 1..4740: note = Description of Artificial Sequence: Synthetic coding sequence
  source 1..4740: mol_type = other DNA
atgtacgtgcgggtgagcttcgacaccaagcccgacctgctgctgcacctcatgactaaagagtggcaacttgagttgcccaaactgttgatcagcgtgcacggtgggctacagaacttcgaacttcagccgaagttgaaacaggtctttggcaaaggacttatcaaggctgctatgaccaccggcgcgtggatcttcactggaggagtgaatacaggcgtgattcgacatgtcggtgacgccctgaaggaccacgctagcaagtctcggggtaaaatctgcactatcggcatagccccctggggaatagtggaaaaccaggaagatctcattggacgagacgtggttcggccctaccaaaccatgagcaaccccatgtccaaattaaccgttttgaacagcatgcattctcatttcattctggccgacaatggtacgaccggtaaatatggtgctgaagtgaaactacggcgtcagctggaaaagcacatttctctgcaaaaaattaacacgagatgtctgccttttttttctctagacagccgcctgttctacagcttctggggaagctgccagctcgatagtgtgggaattggtcagggcgtgccggtagtggcacttatagtggagggcggccccaatgtcatctcgatagtattggagtatttacgtgacacaccccccgtgcccgtggtggtctgtgacggatctggccgcgccagcgatatcttagccttcggacacaaatactccgaagagggcggcctgatcaatgagtccctgcgggatcagctcttggtgacgattcaaaaaacttttacctacactcggactcaggcacagcacctgttcatcatcctgatggagtgcatgaagaaaaaggagctgatcaccgtatttagaatgggctccgaaggtcaccaagatatcgacctggctatcctgacggctctgctcaaaggggcaaatgcaagtgcccccgaccaactgagcctggcactcgcgtggaacagagtggacattgcacgctctcagattttcatttatggacagcagtggccagtgggctctctggagcaggctatgctggacgctctagtgctggacagagttgatttcgtcaagctcctgattgaaaacggagtgagtatgcatcggtttctcacaatttctagactggaagaactgtataacacacggcacggtccatcgaacaccttataccatctcgtccgagacgttaagaagggaaacctcccccctgactacaggatctctcttatagatattgggctcgtcatcgaatacttaatgggcggcgcttatcgctgcaactatacacgcaagagatttcgcaccctgtaccacaatctgttcggccctaaacggccgaaggctttaaaactgctcggcatggaagatgatatacccctccggagaggaaggaagacaactaaaaaacgcgaagaagaggtggatattgacctcgacgaccccgaaatcaatcatttcccgttcccattccacgagctcatggtttgggcagtgctaatgaaacggcagaagatggctttgttcttctggcagcacggtgaagaggccatggcgaaggctctcgtggcatgtaaactgtgtaaagctatggcacacgaagcttctgagaacgacatggtagacgacatttcccaagagctgaaccacaatagccgcgactttggacaactcgctgttgaactgctcgatcaatcctataagcaagatgagcagcttgcaatgaagctattaacctatgaattgaagaactggtctaatgctacatgtctgcagctcgccgtcgccgccaaacaccgtgattttatcgcgcacacttgttcccagatgttgttgacagacatgtggatgggccgcctcaggatgcggaagaatagtggcctgaaagtgatactgggtatcctcttgcctcctagtattctgtccttagagttcaaaaacaaagatgatatgccctacatgtcacaggcacaggaaatccatctgcaggagaaggaagcagaggagcccgagaaacctaccaaagaaaaggaggaagaagatatggagttaacagccatgttgggaaggaataacggagagagttctcgcaaaaaggatgaagaagaagtgcagtcgaaacatagactgatccctttggggaggaagatctacgagttttacaatgcacccatcgtgaagttctggttttacacactagcctacattggctacctaatgttgtttaattatattgtcttagtgaaaatggagcgatggcctagtacccaggagtggatcgtaatctcgtacatctttaccctcggcatcgaaaaaatgcgggagatcctgatgtcggaaccagggaagctgctgcagaaagttaaggtgtggcttcaggagtattggaatgtgacggacctgatcgccattctcctcttcagtgtaggcatgatactgcgtttgcaggaccagccctttcgctccgacgggagggtgatctactgcgtaaacattatatactggtacatccgcctgcttgatatctttggagtaaacaagtatctggggccttatgtgatgatgatcgggaagatgatgatcgacatgatgtacttcgttatcatcatgctggtcgtcctgatgagttttggcgtggcacggcaggcaattctctttcccaatgaggaaccgtcctggaagctggccaaaaacatcttctacatgccctattggatgatctacggggaggtgttcgcagatcaaatagatccgccatgtgggcagaacgagacccgcgaggatggtaagatcattcagttacctccttgtaagacgggcgcttggattgtgccagccatcatggcttgctacttgctggttgctaatattctccttgtaaacctgttaatcgccgtgtttaataacactttttttgaggttaagagtatttcaaaccaagtgtggaagtttcagagatatcagctcattatgacttttcatgaacggcctgtgctccctccaccgcttattatcttctctcacatgactatgatttttcagcatttgtgttgccggtggagaaaacatgaatcagaccccgacgagagggactacggtctgaaactctttattacagatgacgagcttaagaaggtccacgatttcgaggaacagtgtatcgaagagtactttcgtgagaaagacgatagattcaattcctctaacgacgaaaggatccgggtgaccagcgagcgcgtagaaaatatgtcgatgagactggaagaggttaacgaacgggaacatagtatgaaagcctccctgcagactgtagacatacgactggcccagctcgaggatttaatcggacggatggcaaccgccctcgagaggcttactgggctggagagggctgagtcaaataaaattcggagtagaacttcttccgattgcacagacgctgcttacattgtgagacaaagctcttttaactctcaggagggtaatacctttaagcttcaggagtcgatagaccctgctggcgaggagacaatgtcacccacatcgcctaccctgatgcccaggatgcggtctcatagcttttactcggtgaatatgaaggataagggcggcatcgagaagctggagagcatcttcaaagagcgaagcttgtcacttcacagagcgactagtagtcacagcgtcgcgaaggagcccaaagctccagcagcccccgctaacacgctggcgatcgtccccgattcccgacgaccaagttcgtgcatcgacatctacgtgtccgctatggacgagctgcattgcgacatagacccattagacaattcagttaacatcctgggccttggtgagccttccttctctacgcctgtgccttccaccgcacccagctcctccgcctatgcaacattggccccaactgatagaccaccatctcggtcaatcgacttcgaagatattaccagtatggatactcgatctttcagcagtgactacacccatctgccagaatgccagaacccatgggactctgagccacccatgtaccataccattgagcgctccaagtcctcccgttacctggccacaacgccgttcctgctcgaagaggcaccgatcgtgaagagtcacagcttcatgttttccccatctaggtcatattatgcaaacttcggggttcctgtgaagacggctgaatacacctctataacagactgtatcgacaccagatgcgtgaacgccccgcaagccatcgccgatcgagctgcgttccctggggggctgggagataaggtggaggacctcacatgctgccatccggaaagagaggccgaacttagccacccatcctcagattcagaggagaacgaggctaagggcaggcgtgccaccatagccatatcaagtcaagaaggcgacaattcagagcgcaccctgtccaacaacatcactgtccccaagattgagagagccaacagttattccgctgaggaacctagcgctccctacgcccacactcgaaagtctttcagcatctctgataaactcgaccgtcagcggaacacagctagcctgagaaaccccttccagaggagcaagtcatccaaaccagaagggcgtggagactccctatctatgcggagactatctaggacctctgcctttcagtcatttgagtccaagcacaattag

SEQ ID NO: 209219 - DNA, 4701 bp, synthetic construct
  misc_feature 1..4701: note = Description of Artificial Sequence: Synthetic coding sequence
  source 1..4701: mol_type = other DNA
atgtacgtgcgggtgagcttcgacaccaagcccgacctgctgctgcacctgatgactaaggaatggcagctggagctgccaaaactgcttatttccgtccatgggggactacagaattttgaacttcagcccaagctgaaacaagtcttcgggaagggcctgatcaaggccgcaatgaccacgggggcctggatcttcacagggggcgtaaacacaggggtcatccggcacgtcggagatgcactcaaagatcacgctagtaagtcaaggggcaaaatctgcacaatcggaatcgccccttggggtatcgtagagaaccaggaagatctgatcgggagggacgttgtcagaccttatcagacaatgtccaatcccatgtccaaactcactgtgctgaattcgatgcacagccacttcatcctggcagataacggcacaaccggcaagtacggcgccgaggtgaagctccgacggcagttagaaaagcatatttctttacaaaagattaacactcggatcggtcagggcgtgcccgtggtggctctgattgtcgagggcgggcccaatgtcattagtattgtgctggagtatctgagggacacgccccccgtcccggttgtggtgtgcgatgggtccggtcgggccagcgacatattggcttttggacacaagtatagtgaggaagggggattgatcaatgaaagtttgcgggatcaactgttggtcacaatccagaagacattcacctatacccggacccaggcacaacacctgttcattatcctgatggagtgcatgaagaagaaggagcttataacagtattccgaatgggcagcgaaggacaccaggatatcgaccttgcaattctgacagccctcttaaagggagctaacgcttccgctccagaccagctgtcgctagctctagcctggaatcgggtggatatcgcccggtcccaaatattcatttacggtcagcaatggccagtgggatcgcttgagcaggcgatgctggacgccctcgtcctcgatagggtcgatttcgtgaaactgctaatcgagaacggagtctccatgcacaggtttctgacaatttctcgcctcgaggagctctacaatactagacatggtccgagcaataccctctatcacctggtgagggacgtaaagaaaagagaataccccggattcggctggatttactttaaggggaatttgcctccagattaccgcatctcacttattgatattgggttagtgattgaatacctcatggggggtgcctatcggtgtaattatacgagaaagagattccggacactgtaccacaacctctttggccctaagagacccaaagccttgaagttgctgggaatggaagatgacattccactcaggcggggacgcaagacgacaaagaagcgggaggaggaagtggacattgacctggacgatcctgaaattaatcactttccttttccatttcatgaattgatggtgtgggccgtgctgatgaagagacagaagatggcactctttttctggcagcacggggaggaggctatggcgaaggccttggtggcttgtaagctgtgcaaagctatggctcacgaagcttctgagaacgacatggtagacgatatatctcaggaacttaatcacaattcacgggactttggccagttggccgtggaactgctggatcagtcgtataagcaggacgaacagcttgctatgaagctgttgacctacgaactgaaaaattggtctaacgccacctgccttcagctggctgtcgcggccaagcatcgcgatttcatcgcgcacacatgctcccagatgcttcttacagacatgtggatgggccggctccgtatgagaaagaacagcggtctgaaggtgattctgggaattctcctgcccccctctattctcagccttgaatttaaaaacaaagacgatatgccctatatgtcacaagcacaggagatccatttgcaagagaaggaagctgaagagcccgagaagcccaccaaggagaaggaagaagaggatatggagctcaccgcaatgctcggacggaacaacggagaatccagtcggaaaaaagacgaggaggaggtacaatcgaaacatagactaattccactaggacgaaagatctacgagttttataacgctcccatcgtcaagttttggttctacaccttggcctatatcggctaccttatgctgtttaattatatcgttcttgtgaagatggaaagatggccctctactcaagagtggattgtgatatcctacatatttactctcggtatcgagaagatgcgagagatcttgatgtccgagccgggcaaactgctgcagaaggtcaaggtgtggctccaggagtactggaacgtgacagacctgatcgctatcctcctgtttagcgtgggtatgattctccgtctgcaggaccagccttttagaagcgatgggagggtaatctactgcgtcaacatcatctattggtatattcgtcttctagacattttcggagtgaacaaatatctggggccctacgttatgatgatcggcaaaatgatgattgacatgatgtatttcgtgatcattatgctggtagtcttaatgtccttcggcgtggctcgacaggccatattgtttccaaatgaggaaccatcctggaaacttgcaaaaaacatcttctatatgccttactggatgatctatggtgaggtctttgcagaccagatcgacccgccctgcggacaaaatgagactcgagaagatggcaagatcatccagttgcctccatgtaagactggcgcctggattgtccccgccataatggcttgctatctgttggttgcaaatattttactggtgaatctgctaatcgctgtgttcaacaacacctttttcgaggtcaagagtatttcaaatcaagtttggaagttccaaagataccagcttatcatgacgttccacgaacgccccgtgctcccaccgccgttaatcatcttctcacatatgaccatgatatttcagcacctttgttgcagatggcgaaagcacgagagtgatcctgacgaacgggattacggtttgaaactgttcataacagacgacgagttgaaaaaagtgcacgatttcgaggaacagtgcattgaagagtattttagagagaaggacgacaggtttaactcgtctaacgatgagaggattcgggtcacaagcgagcgagttgaaaatatgagcatgcgccttgaagaagtaaacgagagggaacactctatgaaggcctcgctgcagaccgtcgacattaggctggcccagctcgaagaccttatcggccgtatggccacggctctggaaagactcactggactggagcgcgctgaaagcaataagattcggtcccgcacctcaagcgactgcacggatgccgcgtacatagtcagacagtcaagcttcaatagtcaggaagggaacactttcaaattgcaggagtcaatcgacccagcaggtgaagaaaccatgtcccctacctcgccaacccttatgcctcggatgcggtcacattccttctatagcgtaaacatgaaggacaagggagggatcgaaaagttggagtccatctttaaggaacgaagcctttccctccaccgcgcgacatcttctcactctgtggcaaaggaaccaaaagcccccgccgccccagccaacactttggctatcgttccagacagccggaggccatcatcctgcatagacatttacgtgagcgccatggatgaacttcactgtgatattgatcctctcgacaactcagtgaacatccttgggctgggtgagccctcctttagtacccctgtcccttccacagccccttcttccagcgcatatgcaacgctagctcccaccgacagacctccaagccgatccatcgactttgaggatatcacatcaatggacacacgtagctttagttctgactacacacacctcccagagtgccagaacccttgggatagcgaaccacccatgtaccacactattgagcgctcaaagtcttcccgttatttggctacaacacccttcctgcttgaggaggcaccaattgtcaagtcccattcattcatgttttccccttctcgatcctattatgctaattttggggtgccagttaagactgccgaatatacttcaattacagactgtatcgatacacgctgtgtgaatgccccacaggcgatcgcagatagagcggcatttcctggcggactaggagacaaagtcgaggatctcacttgttgccacccggaaagagaagcagagctgagtcacccttcgagtgactcagaggagaatgaggctaaggggcgtcgggccacaattgctatttctagccaggagggggataatagcgagaggacattgtcgaacaatattactgttccaaaaatagaacgggcgaactcctactctgctgaggagccaagcgctccctacgcacatacacggaagagcttttcaatcagcgacaaactagaccgccagcgcaataccgcatccctccgcaaccccttccagcgcagtaagagctccaaacctgaaggacggggagacagcctcagcatgcgcaggctctccaggactagtgccttccagtcattcgagagcaagcataattag

SEQ ID NO: 209220 - DNA, 5205 bp, synthetic construct
  misc_feature 1..5205: note = Description of Artificial Sequence: Synthetic coding sequence
  source 1..5205: mol_type = other DNA
atgggcaagaagtggcgggacgccgccgagatggagcggggctgctccgacagggaagataacgctgagtctaggaggcggagtcgatctgcctctcgtggccggtttgcagaaagttggaagagactaagttcaaaacaggggtccactaagagaagtggccttccctcacagcagacaccagctcagaagtcatggatcgagcgggctttttacaagagagaatgcgtgcatatcattccatcaacgaaagacccacaccgatgttgttgtggccgactgatcgggcagcacgtgggcctcactcccagcatttccgttttgcagaacgagaagaatgaatccagactcagtcggaatgacatccaaagtgaaaagtggtctattagtaaacacactcaactaagccccactgatgccttcgggactatcgagttccaaggcgggggacacagcaataaagcgatgtacgtgcgagtatccttcgatacaaagccagacttgttacttcacttaatgaccaaggagtggcaacttgagcttccaaaactcctgatttccgtgcacggggggctccaaaattttgaactgcaaccaaaactgaaacaagtattcggtaaggggctcataaaggccgccatgaccaccggcgcctggattttcacggggggagtgaacaccggcgtgatccggcacgttggcgacgccttgaaagatcacgccagcaaatcccggggcaagatctgtacaatcggcattgccccgtgggggatcgtggaaaaccaggaggacctgattggtagagatgttgtccggccctaccagacaatgagcaaccccatgagcaagttgacagtcttaaattcaatgcactcccattttattctggccgacaatggcactacaggcaagtatggcgccgaagtgaagttgcgtagacagctcgaaaagcatatcagcttacagaagatcaacactaggtgtctgcccttctttagcctggacagtcgcctgttttactctttttggggctcctgccaattggacagcgttgggattggtcagggcgtgcctgtggtggcactgatagtggagggggggccgaacgtgatcagcatcgtgttagaatacctaagggatacaccacccgtccctgtggttgtctgcgatggctctggacgggcatcagacatactggctttcggccacaaatactccgaggagggaggccttatcaatgagtcactcagagaccagctgctggtcaccatccagaagactttcacatatacacgaacgcaggcccagcacctatttattattttgatggagtgcatgaagaaaaaggagctcataactgtgttcagaatgggcagtgaaggccatcaggatattgatcttgctatcctgacggcactacttaagggagccaacgcatccgcgccagaccagctgtccctcgccttagcgtggaacagagtcgacattgcccggtcacagattttcatctacgggcaacaatggcccgtcggctcacttgaacaggccatgctggacgccctggtcctcgacagagtcgactttgttaagctgctgatcgaaaacggagtttccatgcatcggtttctaaccatcagcaggttggaagaactttataatacccggcatggtcctagcaatacattgtatcacctggtcagggacgtgaaaaaaggaaatctgccaccagactatcggatatcccttattgatatcggactggtgattgagtatctgatgggcggggcttatcgctgcaattacactcgtaaaagattccggactctgtatcacaaccttttcgggcctaaaaggcccaaagctctgaagttgcttgggatggaggatgatattcccctgaggcgggggaggaagactaccaagaaaagggaggaagaggttgatatcgatcttgacgacccagaaattaatcattttccgttcccgtttcacgagctcatggtgtgggccgttcttatgaagcgccagaaaatggcattgttcttttggcagcacggcgaggaggccatggccaaagcactggtggcctgtaagttatgcaaagcaatggcgcacgaggcatccgagaatgatatggtggatgatattagccaggaactgaatcacaacagtagggatttcggccagttggccgtcgaactgctggaccagtcttacaaacaagatgagcaattggccatgaagcttctgacctacgagttaaaaaattggtccaatgcaacctgtcttcaattagctgtcgctgcaaagcaccgcgattttattgcgcatacatgtagccagatgctgctgacagatatgtggatgggtaggctacgcatgaggaaaaacagtggtctcaaggttattctcggcattttgttgccaccatcaatattaagcctggaatttaaaaacaaagacgatatgccatacatgagccaagcacaggagatccacttacaggagaaagaggccgaggagccagagaaacccacaaaggaaaaggaagaggaggatatggagctcacggccatgttgggcagaaacaacggggagtcctcccgtaagaaggacgaggaggaggtgcagtctaagcatcgtctcatacctctgggccggaagatttatgaattctacaacgcgcccattgtcaaattttggttttacaccctggcgtacatcggctacctcatgctgttcaactacattgttctcgtcaaaatggaaaggtggccgtccactcaggagtggatagtcattagttatatctttactttaggcatcgaaaaaatgcgggaaatcctgatgagcgagccaggaaaactgctgcagaaggtcaaggtctggttgcaggaatattggaacgtgaccgacttgattgctattcttttattctccgtggggatgattttgcggctccaagatcaaccttttaggagcgacgggcgagtgatttactgtgttaatataatttactggtatatccggctcttggatattttcggtgtgaataagtacctcggcccgtatgtgatgatgatcggaaagatgatgatagacatgatgtactttgtgatcatcatgctggtggtgctgatgagtttcggagtggccagacaggccatattgtttcccaacgaagagccatcatggaaactggcaaaaaatatcttctatatgccttattggatgatctacggtgaggtgtttgctgaccaaattgatccaccctgtggtcagaatgaaacccgagaggacgggaaaattattcagctaccaccctgcaaaaccggcgcatggattgtgcctgctatcatggcatgttatctcctcgtggcaaatatcttactcgtgaatctcttgatcgcagtgttcaacaatacattttttgaagttaagtccatcagtaaccaggtgtggaaattccagaggtaccagttgatcatgaccttccacgagcgacctgttctgccacccccccttataatttttagtcacatgaccatgatttttcagcacctttgctgtcggtggcggaagcacgagtctgacccggacgagcgggactatgggctaaagttgtttatcactgacgacgaactgaaaaaggtgcacgacttcgaggaacagtgcatcgaggagtactttagagaaaaagatgaccgcttcaactcaagtaacgacgaaaggatccgcgtgaccagtgaaagggtcgagaatatgtctatgagactggaggaggtgaatgaacgggagcattcgatgaaggcctctcttcagactgtggatataaggctggcccagctagaagatctgataggtaggatggcaacagctctggagcgtctcacgggcctagaacgggctgagtccaataaaatccgttcgcggacctcttctgactgcacagacgcagcgtatatcgtgcgccaatctagttttaatagccaagaaggcaatactttcaagctgcaggagtccatcgatccagccggagaggaaaccatgtctcccacaagtcctacgctgatgcctcgaatgagaagtcactctttttactccgtcaatatgaaggataagggtggtatcgagaagctggaaagtatctttaaggagagatccctgagcttacaccgggccacatcttcgcattccgtggccaaagaaccaaaggctcctgcagcccccgcaaatacactagctattgttccagattcccggcggccctcgagctgtattgatatctacgtttcagccatggacgagctgcactgcgacattgaccctctggacaacagtgttaacatactcgggctaggcgaaccgtccttttccaccccagtgccctctaccgctccctcatcaagcgcgtatgcgacgttggcgcctacagatcggccaccttcccgctcgatcgactttgaggatatcacaagtatggacacccggtccttttcaagtgactatacccacctgccagaatgccagaatccatgggactcggagcccccaatgtatcacaccatagagagaagtaagagcagtcggtacttggcaactacgccttttctgctcgaggaagcaccaatcgtgaagtcccattctttcatgttttcaccttctcggtcttactatgccaacttcggcgtgccagtaaaaactgccgaatatacttccataaccgactgtatcgacacccggtgcgtcaatgcgccacaggcaattgcggaccgagctgcattcccaggagggctaggagacaaggttgaagatctgacatgttgtcatcctgagcgcgaagcggagctaagtcatccatcttctgatagtgaggaaaacgaggccaagggtagacgcgccacgatcgcaatctctagtcaggaaggcgacaacagcgaaaggacgctgagtaataatattactgtgcctaagattgagcgagctaattcttactccgcggaggagccctctgccccttacgcgcacacacgcaaatctttctctatttctgataaattagatcggcagcgtaataccgccagtctgagaaatcccttccagcggagcaagagcagcaagcctgaaggacgaggcgatagcttatctatgagacggctgtccaggacttcagcatttcagtcttttgaatctaagcacaattag

SEQ ID NO: 209221 - DNA, 645 bp, synthetic construct
  misc_feature 1..645: note = Description of Artificial Sequence: Synthetic coding sequence
  source 1..645: mol_type = other DNA
atgtacgtgcgggtgagcttcgacaccaagcccgacctgctgctgcatctgatgaccaaagaatggcaactagagttgccaaaactgctgatttcggtccatggaggcttgcagaatttcgagctccaaccaaagctcaaacaggttttcggcaaagggttgataaaggctgcaatgaccacaggtgcttggatctttacaggaggtgtcaacactggagtaatccggcacgtgggggacgcgctgaaggatcacgcctcaaagagccgaggcaagatttgcactatcggaattgctccctgggggattgttgagaaccaagaagatctcatcgggcgagatgtggttcggccataccagaccatgtcaaatcctatgtccaaactgacagtgctgaattctatgcacagccatttcatcttagctgataacggcaccaccggtaaatatggggctgaggtcaaactcaggcgccagctagagaagcacatcagcctccaaaagatcaatactagctttcactcatataaaactgcccatgtagacttacaggacaaacgtcaagtaaaaacagcacttgaacaggctgaatggcagcccggtagaggaatgttcgaccatgacaatctaatgcaaagcacatag

SEQ ID NO: 209222 - DNA, 3645 bp, synthetic construct
  misc_feature 1..3645: note = Description of Artificial Sequence: Synthetic coding sequence
  source 1..3645: mol_type = other DNA
atggtggtgcccgagaaggagcagagctggatccccaagatcttcaaaaagaagacatgtactacatttatcgtagactctaccgacccagggggtactctgtgccaatgcgggcgtccccgcactgctcaccctgcagtggccatggaagacgctttcggcgcagccgtcgtgactgtctgggattcagacgcacatacgacggagaaacctaccgacgcttacggagagttggacttcactggagctgggagaaagcactctaatttcctacggctttccgacagaactgaccccgcagcagtgtactccctcgtgacaagaacttggggattcagagcgccaaacctggtcgtttccgtactgggcggcagcggtggtcccgttctgcagacttggctccaggatctcctacggcgaggcctggtgcgcgccgcacagtcaacaggcgcctggattgtgaccggcggattgcatacagggatcgggaggcacgtcggcgtggcagtgcgcgaccaccagatggcaagcaccgggggcacaaaagttgtggctatgggcgtggcaccctggggagtggttagaaatcgggacaccttgattaaccctaagggatcatttcccgcacgatacaggtggcgcggggatccagaggacggtgttcaattccctctagactataattatagcgccttcttcctggtcgacgatggaacacatggctgtctagggggagaaaatcggtttcggttgcgcctggagagctatatcagccagcagaaaactggagtcgggggtaccgggattgatatccctgtgttactcttattgatcgatggtgacgaaaagatgctcacaagaattgaaaatgccacacaagcgcagctaccgtgcctcctggtcgctggcagcggcggcgctgccgattgtctggccgaaacgctggaagataccttagcaccaggaagcggcggcgcgagacagggcgaagccagagatagaattagacgctttttccccaaaggggacctggaggtcttgcaggcccaggtcgagagaattatgacgaggaaagaattgcttacagtgtactcttctgaggacggttcagaagaatttgaaacaatcgtattgaaagccctggtcaaagcttgtgggagtagcgaggccagcgcctacctggatgagctgagactggcggtcgcttggaatagggtagacatcgcccagtctgagttgttccggggggatattcagtggcgtagcttccatttggaggcatccctgatggacgcactactcaatgatcggcccgaatttgtccgcctgttaatctcccatggactgtcactggggcattttctgactccaatgagactggctcagctttatagtgctgcaccctcaaactccctcatccggaatctgctggatcaggcctcccactcggccggcaccaaagcaccagctctgaagggaggcgctgccgaactaaggcctccagacgtgggccacgttctgcgcatgctcctcggcaagatgtgcgcccccagatatccttcagggggcgcatgggacccccaccctggccaagggttcggggaatccatgtatctcctcagcgacaaagccacctctcccctatccttggatgcaggactgggtcaggctccttggtcagacttacttttgtgggccttgttgctgaatagagcacagatggctatgtacttctgggagatgggaagcaacgcagtgtctagtgccctcggtgcatgcctcctgttgagagttatggctcgtttggaacctgacgccgaagaagcagcgcgtaggaaggacctggccttcaagttcgaaggtatgggcgttgatttgttcggagaatgctacaggtctagcgaggtgcgagctgcgaggcttctcctgagacgctgcccactttggggtgacgccacctgcctgcagcttgccatgcaggctgatgctagggctttctttgctcaagacggcgttcagtctttgttgacacaaaaatggtggggagacatggcgtctacaacgcccatctgggcactggtgctggcatttttctgtccccccctcatttacaccaggttgatcacgtttcgaaagtccgaggaggagcctacccgggaggagctggagttcgacatggactccgtgattaatggtgaaggcccggtcggaactgcggatcccgcggagaaaacccctctcggggtccccaggcaatcaggtcggccgggatgctgcggcggacggtgcggggggcggagatgtctgcgccggtggtttcatttctggggcgcacccgtcactatttttatgggtaacgtcgtgtcctacctgctttttctactgttgtttagtagggtgctgttggtggatttccagcccgcccctcctggctccttagagctgttactatacttctgggcatttacacttctttgtgaagaacttcgccaggggctctcgggaggtggcggttcactagcatcaggcggacccggcccgggccacgcatcattgagccagcggttgaggctttacctagcagattcttggaatcagtgtgacctcgtcgccctgacatgttttctgctgggggtcggttgccggttgactcctgggctgtaccatctaggacgcacagtgctgtgtatcgactttatggttttcaccgtaagattgctacacatttttaccgtcaacaaacagttgggtccaaagattgtcattgtgtccaagatgatgaaagatgtcttctttttcctgtttttccttggggtctggttggtcgcatacggcgtggctacagagggactgctgcgcccacgggatagcgattttccctccatcctgcgccgcgtgttttatcgaccctacctgcaaatctttggacagattccgcaggaggacatggatgtggccctgatggaacacagcaattgttcctccgagccagggttctgggcccatcctcccggggcacaggctggaacttgcgtatcgcaatacgccaattggctcgtggtgctgctgctggtaatctttcttctcgtagccaacatccttctcgtcaatctgctaatcgctatgtttagctacacttttgggaaggtgcagggaaactcggatctgtactggaaagctcagcgttatcgtctcattagagagtttcacagccgcccagcgttggccccccccttcattgtgatttcacacctgagactgctcctaagacagctgtgtagacggcctcggtcaccacagccaagcagtcctgcactcgaacactttcgtgtctatctttctaaggaggcagagcggaagctgctcacatgggagtctgttcataaagagaacttcctgttggccagagcgcgcgataaacgtgaaagcgatagtgagcgtctgaaaagaacatcccaaaaggtggatctggctctgaaacaattgggccacattagggaatacgagcagcgcctgaaggttctggagcgcgaagtgcagcaatgctctcgcgtgcttggttgggttgctgaagccctcagccgctcagcacttctgccacctgggggccctcctccccccgatctgcctgggagcaaggactag

SEQ ID NO: 209223 - DNA, 2583 bp, synthetic construct
  misc_feature 1..2583: note = Description of Artificial Sequence: Synthetic coding sequence
  source 1..2583: mol_type = other DNA
atgctgacccggatcgagaacgccacccaggcccagctgccctgccttctggtcgcagggtccggaggcgcagcggattgtctggcagagactttagaagatacacttgccccaggatccggaggagctagacagggcgaagccagggacagaatccggagatttttccctaagggtgatttggaggtgcttcaggctcagagtttccatcttgaggccagtttgatggatgctctgcttaacgatcgccccgagtttgtgaggctgctgatctcccatggtttgtcactcggtcacttcctgacgcctatgcgactggctcagctgtatagcgccgcaccgtctaatagtcttatcagaaatctgctggaccaagcgtcgcatagcgccggcaccaaagccccagcgttgaaagggggcgccgcagagctcagacccccagatgtcgggcacgtcttgaggatgttactgggcaagatgtgtgctcctcgctatccaagcggtggagcttgggacccacatcctggccaggggttcggtgagtccatgtatttactcagcgataaagctacctcacccctttcgcttgacgccggcctcggccaagccccgtggagcgacctcctgctttgggcactgctcttgaaccgggcgcaaatggcaatgtatttctgggagatggggagcaatgcagtctccagcgccttaggagcctgtctgctgcttcgcgtgatggcgcgcctggagccagacgccgaagaggctgctcggcggaaggatctggcgttcaagtttgaggggatgggcgtagacctgttcggggaatgctatcgctctagtgaagtgagagcggcgagacttcttctcaggagatgcccactttggggagatgccacctgcctgcagcttgccatgcaagcagatgctagagctttttttgctcaggatggggtccagtctctactgactcagaagtggtggggggacatggcctctaccacccccatatgggcccttgtgttagctttcttctgcccccctctcatatacacacgactgataaccttcaggaagtcagaagaagaaccaacgcgtgaagagctggaattcgatatggacagcgtgatcaacggcgagggacccgtcggcaccgccgatccggccgaaaagactcccttaggcgtgccacggcagtcgggaaggccagggtgttgcgggggaagatgcgggggcagacgttgcctgagaagatggttccatttctggggagctccagtcactattttcatggggaacgtggtgtcctatctactcttcctcctactattcagccgcgtcctattggtagacttccaaccggcccccccaggttctttggagctgctgttatacttctgggcattcactctgttgtgcgaggagctgaggcaaggcctgagcgggggggggggctcactagcttccgggggccccggtcccgggcatgcaagtctgtcccagcgactgaggctctatctggcggacagctggaatcaatgtgacctggtagcgctaacttgctttctcctgggtgttgggtgtcgccttacccctgggttgtaccacctcggtcgcacagtcctgtgtatcgactttatggtcttcaccgtgagactgttacacatcttcaccgtcaacaaacaactgggcccaaaaatcgttattgtttcgaaaatgatgaaagacgtgtttttttttcttttttttctaggagtgtggttggttgcttatggtgtggcgactgaaggtctgctgagaccaagagactccgacttcccatcgattttaaggagggttttttaccgcccatatctgcaaatattcgggcaaatcccacaggaagacatggacgttgccctgatggagcactctaactgcagctcagagccgggattctgggcccaccctcccggcgcacaggcgggcacctgtgtgtcgcagtatgccaactggctcgttgtcctgctcctggtcatttttctgctggtggcaaatattctcctggtgaatctgctcatcgcgatgtttagctatacgtttggtaaagtacaagggaacagtgacctgtactggaaggcccaacgatacagactaatcagagagttccactcaagaccagcccttgcacccccttttatcgttatctcacatctccgcctgctcctgcgacagctgtgtcgacgcccccggtcccctcaaccctctagcccagcactggagcacttccgtgtatacctatcaaaagaggcggagcgcaaactgctgacttgggaatcagtgcataaggagaacttcctgctggcacgggcaagggacaaaagggagtccgatagcgagcggttgaagaggacctcacaaaaggtggacctcgctctcaagcagctggggcatattagggagtacgaacagcggctcaaagttctggaaagagaggtgcaacaatgttccagagttttgggatgggtggctgaggcactgtcccgcagcgcactcttaccccctggggggccccctccacctgaccttccgggttctaaagattag

SEQ ID NO: 209224 - DNA, 3210 bp, synthetic construct
  misc_feature 1..3210: note = Description of Artificial Sequence: Synthetic coding sequence
  source 1..3210: mol_type = other DNA
atggtggtgcccgagaaggagcagagctggatccccaagatcttcaaaaagaagacctgtacaactttcatagttgatagtactgacccaggaggaaccctgtgtcaatgcggcagaccccgaactgcacaccctgcggtggcaatggaggatgcatttggagccgctgtcgtgaccgtgtgggattccgacgcccacaccaccgaaaaacctactgacgcctacggagaactagacttcaccggcgctggacgcaagcattccaattttttgaggctgtcagaccgcacagatcctgcagccgtgtacagtctggtgacaaggacgtgggggtttcgcgcccctaacctggtggtatcggtgctgggcggctctgggggtccagttctccaaacctggttacaggaccttttaaggagaggccttgtccgggccgcccagagcactggagcatggatcgtcacaggaggcctccataccggcattggcagacacgtgggggtcgccgtaagggatcaccagatggcttctacaggcggaacaaaggtggtcgccatgggagtggcgccctggggagtggtccgaaatcgtgacacgctgataaaccctaaaggtagtttccccgcgcgctaccgctggcggggtgatccagaggacggcgtccagttccccctggattataactacagtgcatttttcttagtggacgatggcacccacggatgcctgggcggcgaaaatagattccgactgcggcttgaatcttacattagtcagcaaaaaacaggggttggaggtactgggattgacatccccgtgctgcttctcctgatcgacggcgatgaaaaaatgctgacacgtatcgaaaatgctacccaggctcagctgccttgcctgttggtggctggatccggcggggcagctgactgtcttgcagaaaccttggaggacactttagctcccgggtccggcggagcccggcagggcgaagctcgggaccgcattcgcaggttcttcccaaaaggagaccttgaagtgctgcaggctcaggtggaaagaatcatgaccaggaaggaactcctgaccgtttatagttcagaggatggttccgaagagttcgagacaattgtgctgaaggccctggttaaggcatgtgggagctcagaggcttcagcctacttggatgagctgaggttagccgtcgcatggaaccgggtggacatagcccaatcagaactgttccgcggcgacatacaatggcgaagtttccacttggaagcatcgctcatggatgccctgctgaacgatagacccgagttcgtgaggctccttatttcccatggtctgagccttggacactttcttacccctatgcgtctggcgcagctatacagcgctgcgccctctaacagtctcattcgtaatctgctggatcaggcttctcattcagcagggacgaaggcgccagcgctcaaaggaggtgccgccgagctcagacccccagacgtgggacatgttctcaggatgctgctgggcaagatgtgcgcccccagatatccatccgggggagcatgggacccccaccctggacagggctttggcgagagcatgtacctcttaagcgacaaggctacaagtccgctatccttggacgctggactgggccaggccccatggtcagacctgttgctttgggcactgttgttgaaccgcgctcagatggcgatgtacttttgggaaatgggctctaatgccgtttcaagcgcgctgggggcatgcctgttgcttcgggttatggcaaggctcgagcctgatgcagaggaggcagcacggagaaaagacctggcctttaagttcgaaggcatgggggtagacttgttcggcgagtgttatagatcctctgaggttagggcggcacggcttttactgcggagatgccctctgtggggggacgccacctgtcttcaattggctatgcaagcagatgctagggcctttttcgcccaggatggcgtccagagccttctgacccagaagtggtggggtgacatggcctctactaccccaatttgggcactcgtactggccttcttttgcccccccctgatctacacccggctgattactttccggaaatcagaggaggagccaacccgggaagagctggagttcgatatggacagtgtcatcaacggagaaggtcccgtgggcctgacgcccggactttaccacctggggcggactgtcctctgcattgattttatggtgttcaccgttaggctgctccacatcttcactgtgaacaaacagctcggacctaagatcgtgattgtctcaaaaatgatgaaagatgtctttttttttctgtttttcctcggagtatggttggtcgcatacggcgtagccactgagggtctgctcaggccaagagatagtgatttcccctctatcttgcgcagagttttctaccggccctatctgcagatttttggccaaatcccacaggaggacatggatgtggcactgatggaacattccaactgtagcagcgagccagggttttgggcgcaccctccaggcgcccaagccggtacttgcgtcagtcagtatgccaattggctagttgtgctgttgcttgttatatttctgttggttgcaaatatcctgctagttaatttgttaattgcaatgttttcatataccttcggcaaggttcagggtaactccgacctgtactggaaagctcagaggtacagattgatccgagaattccacagccggcctgcactggcacccccctttattgtcataagtcacttgaggctcctcctgcggcagctctgtaggcggcccaggtctccgcagccaagcagcccggcgcttgagcattttcgcgtatacctctctaaagaggcagagcgtaagctgctcacctgggaatccgtgcataaagagaacttccttctggccagagcgagagacaagcgggagtccgattcagaaaggttgaagcggaccagtcagaaggtggacctggccctcaagcaactgggccatatccgtgaatatgagcagaggcttaaggtgctggagagagaagtgcagcagtgtagccgcgtgctagggtgggtagctgaggctctgtcccggtccgccctcctccccccaggcggaccacccccacccgatctcccaggctcaaaggattag

SEQ ID NO: 209225 - DNA, 3498 bp, synthetic construct
  misc_feature 1..3498: note = Description of Artificial Sequence: Synthetic coding sequence
  source 1..3498: mol_type = other DNA
atgcaggacgtgcagggcccccggcccggcagccccggcgacgccgaggaccggagagagctgggacttcataggggggaggtaaacttcgggggctccggtaagaagcggggcaagtttgtgcgtgtgccatcaggggtcgccccgtccgtccttttcgatcttttactggcagagtggcatctgccggcacctaacctagtggtatccttggttggagaggaacaacccttcgctatgaagagttggctccgcgatgtgcttcgtaaaggattggtaaaagccgcgcagagcactggtgcatggatactgactagcgccctacgcgtgggcctggcccgccatgttggccaggcagtgcgggaccattctctcgcctccactagcactaaggttcgggtggtggcggttggaatggcctctttgggaagggtgttacataggcgaatcctggaagaggcccaggaggactttccagtgcactaccccgaagacgatgggggaagccaggggcctctttgttctctggactctaacttgtctcattttattctggtcgagccaggaccacctggcaaaggggacggcctgaccgaactacgcctgaggctggagaaacatatttccgagcagagagctgggtacggaggtaccggatcaattgagatcccagttctttgccttctagtcaatggtgacccaaacacacttgaacggatctcacgggcagtcgaacaagcagccccatggctgatacttgtgggaagcggtggtatcgcagatgtcctggccgcactggtaaaccagcctcatttgctggtccccaaggtcgcagagaagcagtttaaggagaagttcccctccaaacatttctcttgggaggacattgtgcgctggaccaagcttctgcagaatattacatcccatcagcatttacttacagtctacgacttcgagcaggagggcagtgaagaactggatactgtgatcctaaaagccttggtcaaagcctgtaagtcgcattcgcaggagcctcaggactacctcgacgagctcaaactcgccgtggcttgggaccgagtggacatcgccaagtctgagatctttaatggagacgtcgagtggaagtcttgcgacctcgaggaggtgatggtcgatgcattggtgtccaacaagccagaattcgtgcgtctcttcgtcgacaatggtgcagacgtggccgactttctcacatatggaaggctgcaggagctgtatcgcagcgtgtctaggaaatccttattattcgacctcctgcaacgaaaacaggaggaagctagactgactctcgcaggcctcgggacccaacaggcccgggaaccacccgccggccctccggccttctcgctccatgaagtttcccgggtgttgaaggacttcttgcaggacgcgtgcagaggcttttatcaggatgggagacccggcgaccgccggcgggccgaaaaaggcccggccaagagacctactggacaaaaatggctgctggacctcaaccagaaatccgaaaatccctggagggatctgtttctctgggccgtgttgcaaaacagacatgaaatggctacttatttttgggccatgggtcaggagggggtggcagctgcccttgctgcctgcaaaatactgaaggaaatgagtcacctggagaccgaggccgaggctgctagggctaccagggaggcaaaatacgagcgtctggctcttgatctgtttagtgagtgctacagcaacagcgaagcccgagcctttgcactactcgtccggaggaaccggtgttggagtaagaccacctgccttcacttggcaactgaggccgacgctaaggccttttttgctcatgatggagtccaggcattcttgacgcgcatttggtggggcgacatggccgctggaactcccattctgagactgcttggagccttcctgtgcccggccttagtgtacacaaacttgatcaccttcagtgaggaagccccactgcgtacaggtctcgaggacctccaggatctggactctctggacacggagaaatcacccctgtacggcctgcaatcccgggttgaagaactggtggaggctccgcgcgcccaaggggatagaggccctcgagcagtcttcctgctgacaagatggagaaagttttggggggcaccggtcacggtgttcctgggcaatgtcgttatgtacttcgcattcctctttctctttacatatgtgctcctcgtggactttcgaccacccccgcagggcccatccggtcctgaggttaccttgtatttctgggtgtttactctggttctggaagagatccgccaggggttcttcacggacgaggatacccatttggtcaagaaattcacattgtatgtcggcgacaactggaacaaatgcgacatggtagctatattcctgttcattgtgggtgtgacttgcaggatgttgccatccgcttttgaggcaggtcggaccgtgctggcaatggactttatggtctttactctgaggctgatccatattttcgccatccataagcagctgggaccaaaaataatcgttgtggagcgaatgatgaaggatgtcttttttttcttgttctttctctcagtctggcttgtcgcttacggcgttacaacgcaagccctcttacacccccacgacggtagacttgagtggatctttaggcgggttctataccgcccctacctccaaatctttggccagattcccctggacgaaattgatgaagctagggttaactgttccacgcaccctttgctactggaagattcacctagttgtccatctctgtacgcaaattggcttgtgatcctgctgctagtaaccttcctgttggtgacgaatgttttattgatgaatttgttaatcgccatgttctcctacaccttccaggtcgtgcagggcaacgccgacatgttctggaagtttcagaggtacaacctaattgtggaatatcacgaacgtcccgcactcgcccccccctttatcctcttgtcacacctttccctcacgcttagacgcgtatttaaaaaagaagctgagcacaaaagagagcacctggagcgggacctgcccgatccattggaccagaaggttgtgacatgggagactgtccagaaagaaaattttctgagtaagatggagaaacggaggagagattccgaaggggaagtgctcaggaaaacggcacatagagttgacttcatcgctaagtatcttgggggactcagggagcaggagaaacgaatcaagtgtttagaatcccaaattaactactgctctgtgcttgtctcaagtgttgcagatgtgctggcgcaagggggcggaccacgaagcagtcagcactgcggagagggcagccagctggtggcagccgatcaccgcggcggattggatggctgggagcagcccggcgccggccaaccaccaagcgacacatag

SEQ ID NO: 209226 - DNA, 2619 bp, synthetic construct
  misc_feature 1..2619: note = Description of Artificial Sequence: Synthetic coding sequence
  source 1..2619: mol_type = other DNA
atgcaggacgtgcagggcccccggcccggcagccccggcgacgccgaggatagacgggaattgggtttgcatagaggggaagtcaacttcgggggatccggaaagaagaggggaaagttcgtgcgagtgccgagcggggttgcaccttctgtgctgtttgaccttcttttggctgagtggcacctaccggccccaaacctagtggtgtctctggtgggagaggaacagcccttcgccatgaaatcttggttacgggatgtactgcgtaaggggctggtgaaagctgcccagtccactggcgcgtggattttgacctccgccttacgggttggactggctagacacgtgggacaggcagtgagagaccacagcttagccagcacttccactaaggtgagggtcgtggcggtcggtatggcttctctgggccgcgtacttcacaggagaattctcgaggaggctcaggaggacttcccagtgcattatcccgaggatgatggggggtctcaaggccctctctgtagcttggactccaatctctcacacttcattctcgtggaacctggcccacctggtaagggagatgggcttaccgaactgcggctcaggctcgaaaagcacatcagtgagcagcgcgccggctacggcgggaccggatccattgagatcccagtactatgtctcctagtgaatggcgatcctaatactcttgagagaattagccgggctgtggaacaggccgctccatggctgatcttggtcggaagcggcggtatcgctgatgtgctggctgccttggtcaatcagccccacctgcttgtgccgaaggtagctgagaaacagttcaaggaaaaattcccctctaagcactttagttgggaggacatcgtgaggtggacaaagttgctgcagaatatcacttcccaccagcacctgcttacagtctacgatttcgagcaggagggtagtgaggaactagatacagtgattctgaaagccctggtgaaggcctgtaaatcccatagtcaagagccacaagattacctggatgagctgaagttagcagtggcttgggatagagtggatattgccaagtctgagatcttcaacggtgacgtggagtggaagtcctgcgacctggaagaggtcatggtggacgccctcgtgtcaaataagccggagtttgttcgactgttcgtagataatggagcagatgtcgcggactttttaacatacggtagacttcaggaactttacaggagcgtgagcaggaaaagtctgctgttcgacctgctgcagagaaaacaagaagaggccagactaactctggccggactgggaacacagcaggcaagggagcctcccgcgggaccccctgccttcagtctgcatgaggtaagtcgagttttgaaagattttctgcaggacgcttgtagaggattttaccaggacggccgacctggcgaccgcagacgggccgaaaaaggccccgcaaaacgcccgacggggcagaaatggctgctagacttgaaccagaagagcgaaaacccctggagagatcttttcctgtgggcagtgctgcaaaaccgccatgagatggccacgtatttctgggcgatgggacaggagggggtggccgcagccttggctgcctgtaaaattttaaaagagatgtcacacctcgagacggaagccgaggcagcgagagccactagagaagccaaatatgagaggttggctttagacctgttctctgagtgctattcaaactcagaggctagagccttcgccttgctggtacggcgcaacaggtgctggtcgaagaccacctgtttacacctcgcaacagaggcagacgccaaggcttttttcgcccatgatggagtccaagcgttcctgaccagaatctggtggggtgacatggcggccgggaccccaatcctgaggcttttgggcgctttcctgtgtccagctttagtgtacaccaatctgatcacatttagtgaagaggcgccgctgcgcactggtctcgaggaccttcaggacctcgactcgctggacaccgagaagtcacccctgtatggtctgcagagcagggtggaggaactagtggaggctccgcgcgctcagggtgatcgcggtccccgagctgtgttcctccttacaagatggcgtaagttttggggagcgcccgtcacggtgttcctgggcaatgtagtcatgtattttgcctttttgttcctgtttacttacgtgttgttggtggacttccggccgcctccacaggggccgtcaggcccggaagtgacgctatatttctgggtattcacacttgtactggaggagattagacaggggttcttcactgatgaagacacgcacctggtcaagaaatttacactctatgttggcgataattggaataagtgtgacatggtggccatctttctgtttatcgtaggagttacatgcagaatgttacctagcgcgttcgaggccggacggacagttctggctatggacttcatggtattcaccctgaggctgattcacatctttgctatccataaacagctgggtcccaaaataatcgttgtagagagaatgaagccagtatag

SEQ ID NO: 209227 - DNA, 3504 bp, synthetic construct
  misc_feature 1..3504: note = Description of Artificial Sequence: Synthetic coding sequence
  source 1..3504: mol_type = other DNA
atgcaggacgtgcagggcccccggcccggcagccccggcgacgccgaggacaggagagagttgggcttgcaccggggcgaggtcaatttcggcggatccggtaagaagcgcggtaaattcgtgcgggtgccctctggcgtcgcaccatcagtattgttcgacctactgttggccgagtggcacctgccagcccccaaccttgtcgtctctctggtgggggaggagcagccttttgcgatgaagagctggctaagggacgtgctacggaaaggtttggtgaaagcagcccaaagcacaggcgcttggatattgacgtccgccctgcgcgttggtttagcgagacatgttgggcaggctgtgcgggaccactctctggcaagtacatctacgaaagtccgagtcgtggccgttggtatggcctcgctgggtagagttctgcatagacggatcttggaggaggcacaagttcacgaggacttccccgtacactacccagaggatgatggcggctcccaggggccactctgctccctcgactcaaacttatctcactttatcttagtcgagcccggcccaccaggaaagggagatggcctgaccgaactccggttgagactggaaaaacatatttctgagcagagagccggctacgggggtacgggatccatcgaaatccctgttctatgcctactggtgaacggcgaccccaatacactggaacggatctcaagggctgtggagcaagcagctccttggctgattctcgtcggaagtggcggcatagccgatgtgctggctgcactggtgaatcaaccgcatctcctagtacccaaggtggccgagaaacaattcaaggagaaatttccatccaagcatttctcctgggaggacattgttcggtggactaaacttttacagaatatcacaagtcaccagcacctcctgaccgtttacgatttcgaacaggaggggtcagaagagctggacacggtaattttgaaggctctggtgaaagcttgcaagtcacattctcaggaaccccaggactatctcgatgaactcaagctcgcagtcgcttgggatagagttgacatagcaaagtcggaaatcttcaatggcgacgttgaatggaagtcctgtgatctcgaggaagtcatggtcgatgccctcgtgtcaaacaagcccgaatttgtcagactgtttgtggacaatggggccgatgtagcagacttcctcacctatggtaggctgcaggagctgtatcggtctgtcagccgtaagtccctcttgttcgacctcctgcagaggaagcaggaggaagctcgactgaccctggccggactcggcacgcagcaggctcgggagccgccagctggacctccagccttctcactacacgaggtgagcagagtgctcaaggatttcctgcaggatgcctgcaggggtttctatcaggatggccgtcccggcgataggcggagagcagagaagggtccagccaaaagacccacaggtcagaagtggctgctcgaccttaatcagaagtcagagaacccatggagagatctcttcctgtgggcggtccttcagaacagacacgagatggctacttacttttgggcaatgggtcaagaaggggtggcagctgctctggcggcttgcaaaattctcaaggagatgtcccacttggaaaccgaggctgaagccgcccgggccacacgggaagcgaaatacgagcgtcttgccctggatctattttcggagtgttatagtaacagcgaggcccgggcattcgcgctgctagttcggcggaaccgctgctggagcaaaacgacctgcttgcatcttgctactgaggcagacgctaaggcctttttcgcccatgacggcgtacaggcattcctcactcgaatctggtggggtgacatggctgctggaacccccatcctgcggttactgggcgcctttctgtgtcccgcattagtgtacaccaatctgataacgttttctgaggaggctccactgcgaaccggtctcgaggacctgcaggacctcgatagcctcgacacagagaaaagtccactgtacgggctccagtctcgagtggaagaactagtggaggcgccccgcgcccagggcgaccgcggaccacgagctgtgttcctcttgacgagatggcgcaagttttggggggcaccagtgacggtcttccttggaaacgtggtgatgtattttgcattcctgtttttatttacctacgtcctactggtcgactttcgcccgccaccccagggtccctcaggccctgaggtgactctatacttctgggtcttcactctggtcctggaggagataagacaggggtttttcacagacgaagacacacacctcgtgaaaaagtttacgctctatgttggggacaattggaataagtgcgacatggtcgcaatctttctttttatcgtaggggttacatgccggatgctgccatctgctttcgaagctggcaggaccgtgctggccatggacttcatggtctttactctgcgcttgatacatatcttcgcaatccacaagcaactcggtcccaaaattattgtcgtggaacgaatgatgaaggacgtgttttttttcctcttcttccttagcgtgtggctggttgcatacggggtcaccacccaggcccttctacaccctcacgacgggcgcctggagtggatcttcagaagagtgctgtatagaccgtacctgcagatcttcggacagattccactggacgagattgacgaggctcgggtgaactgctcgacacaccccctgctgcttgaagatagccccagttgcccctccctttacgctaactggttggtgatcctgcttctggttacattcctcttggttacaaatgttctgctgatgaacctccttatcgccatgttcagctacacattccaggtggtccagggcaatgccgatatgttttggaagttccaaagatataacctcattgtggagtaccatgagcgaccagctcttgccccgccatttattctcctcagccacctcagcttgactttacgccgggtcttcaaaaaggaggcagagcacaaaagagagcatttagagagagatctacctgaccccttggaccaaaaagttgtcacatgggagacagttcagaaagaaaacttcctgagcaaaatggaaaagcgccgccgggactccgagggcgaggttctccggaaaactgcccatcgagtagacttcattgccaaatacctgggaggccttcgggaacaggagaaaagaatcaaatgtctcgaatcccagatcaattactgtagcgtcctggtcagctctgtggccgatgtgctggcacaagggggagggcccagatcgtcccaacattgcggggagggaagccaactcgtcgccgccgatcacagaggagggctggatggctgggagcagccaggtgcaggccagcctccttccgacacctag

SEQ ID NO: 209228 - DNA, 3480 bp, synthetic construct
  misc_feature 1..3480: note = Description of Artificial Sequence: Synthetic coding sequence
  source 1..3480: mol_type = other DNA
cccggcagccccggcgacgccgaggaccggcgggagctgggcctgcaccgcggagaggttaatttcggaggaagtgggaaaaagcgagggaagttcgtgagggtaccatcgggggttgctccgagcgtcctctttgatctgctgcttgcagaatggcatctgccagcaccaaacttggttgtttccttggtcggagaagaacagcctttcgctatgaagagctggctgcgggacgtgttaaggaagggtctggttaaggctgcccagagcacaggcgcctggatcctcactagcgcgctgagggtgggtttagctcgccatgtggggcaggccgttcgtgaccattccctcgcatctacaagtacaaaggttcgtgtcgtggctgtgggcatggctagcctgggtcgggtgcttcaccgtcggatactggaagaggcccaggttcacgaggacttccctgtacattaccccgaagatgacggaggttcccagggacctctttgttcactagatagtaacctgtctcattttatactggttgaacccggtcccccagggaagggcgatggcttgacagagctgaggttgcggctggagaagcacatcagcgagcagcgagctggttatggtgggacagggagcatcgagataccagtgctgtgcctgctggtgaacggcgatcccaacacactcgaaagaatcagcagagctgtggagcaggccgcgccgtggctcatactcgtaggctccggcgggatcgcagatgtactggccgccctggtgaaccaaccacacctcttggttccaaaagtggctgagaagcagttcaaggagaaatttccatcaaaacacttcagttgggaggatattgtgcggtggacgaaacttttgcaaaacatcacatcccaccaacatcttctcactgtgtacgatttcgagcaggaagggtctgaagagctagataccgtgattctgaaagctctggtcaaggcttgcaagagccattcccaggagcctcaggattatttggatgagctgaagctggccgtcgcttgggaccgcgtcgatatcgcgaaaagcgagatattcaacggcgatgtggaatggaaaagctgtgacttggaagaggtaatggtggatgctttggtgtctaacaaacccgagtttgtgcgtctttttgtggacaacggtgcagacgtggccgactttctgacttacgggcgcctgcaggaactgtacagatcggtgtcaagaaaaagcctgcttttcgacctgttgcagagaaagcaagaagaggcacgcctgactttggctgggctcggcactcaacaggctagggaaccaccagccggaccgcctgccttcagccttcacgaagtgtctagggtgctgaaggacttcttgcaggatgcatgtagggggttttaccaggatggccgcccgggcgaccggcgacgtgctgagaagggccccgctaagagacctaccggccaaaagtggttgcttgatctcaatcagaaaagcgaaaatccttggcgtgatctctttttatgggcggtgctgcaaaacagacatgaaatggccacttacttttgggctatgggccaggaaggggttgctgcagcactagctgcttgcaagatccttaaggagatgtcacacctcgaaaccgaagctgaggccgctcgtgctacccgggaagccaagtacgagcggctggccctggacctgttttcagagtgttacagcaactctgaggcccgggcattcgccttgttggtgcggcgaaaccgatgctggagcaaaaccacttgcctccacctggcaactgaagcagatgctaaagccttctttgctcacgatggggtgcaagcctttcttaccagaatttggtggggggatatggccgccggaacgccaatcctaaggctgctcggggcattcctgtgccctgcactcgtgtatacgaatcttataacgtttagcgaagaagcgccgctcagaactgggctggaggatctccaggacctcgactccctcgacaccgaaaaatccccactgtacggcctccagtctagggtggaagaattagtcgaagcccctcgcgcccagggggacagaggccccagggcggttttcctcctaacccggtggcggaagttttggggcgctccagttacagtgttcctaggaaatgtcgtcatgtactttgctttcctctttttgtttacctacgttctgctggtggatttccggcctcccccacaggggccttctggccctgaagtgacactatacttctgggtgttcaccctggtcctcgaggagattcggcagggctttttcacggacgaggatacacacctcgtcaagaagtttacactgtacgtaggcgacaattggaacaagtgcgatatggtcgccatctttttgtttatcgttggcgtgacttgcaggatgttacctagcgccttcgaggcagggcggacagtgctcgccatggactttatggtgttcacacttcggctgatccatatatttgcgattcacaaacagttgggccctaaaataatagtggtagagagaatgatgaaagatgtattcttcttcctgtttttcctaagtgtgtggctggtggcgtatggcgtgaccacgcaggctctgctgcatcctcacgacggaagactagagtggatttttcggcgcgtactgtacaggccttaccttcaaattttcggacagatacctctggatgagattgatgaggcaagagtcaattgcagtacccatcccctgttgcttgaggactccccctcgtgcccctcactgtacgccaattggctcgtcatcctgctgctggtcacgtttctcctagtgaccaacgtattgcttatgaacctgctgatagccatgttcagctacaccttccaggtagttcagggcaacgctgacatgttctggaaattccagcgctacaatctgattgtggaataccacgaaaggccagcactcgctccaccttttattctactcagccacctttccctcactttgaggagagtgttcaagaaggaggctgaacataaacgggaacatctggaacgcgatctccctgaccccctcgatcaaaaggtggtgacatgggaaaccgtgcagaaggagaactttctctccaagatggagaaaaggagacgggatagtgagggtgaagtacttaggaagactgcccatcgtgtggactttattgcaaaatatctcggaggactgagagagcaggagaaaagaattaagtgcctcgaaagtcagatcaactattgcagcgtgctggtgtctagcgtagcagacgtgcttgcccagggcggggggccccgttcttcccagcattgtggagaaggaagccagctggtggcggctgatcaccgcgggggacttgatggatgggagcaaccaggtgcagggcaacctccatccgatacttag

SEQ ID NO: 209229 - DNA, 3402 bp, synthetic construct
  misc_feature 1..3402: note = Description of Artificial Sequence: Synthetic coding sequence
  source 1..3402: mol_type = other DNA
atgctgcggccccaggtgaaggaggagatcatctgcatgatccagaacacgtttaatttttctctgaagcagagcaaacacctgtttcagatactgatggaatgtatggtccacagggattgtatcactatcttcgacgctgattccgaggagcagcaggatttggatctcgccatccttactgccctgttgaaaggcacaaatctttcagcatcagagcagctgaacctagctatggcctgggatagagtcgacatagctaagaaacatatccttatctatgagcagcactggaagcccgacgccctcgaacaggcaatgtctgatgcgctcgtaatggaccgcgtggatttcgttaagctgctcatagagtatggcgtaaatcttcacagattcctcacaatcccgagacttgaggagctgtataatactaagcagggtccaaccaatacactattgcaccatctcgtgcaagacgtgaaacagcataccctcctatcaggatatcgaataactcttatcgacatcggcctggtggtcgagtacttaatcgggagggcttataggtccaactacacccggaagcatttccgcgcattatacaacaacctttaccgcaagtacaagcatcagagacactcttccggcaaccggaacgaaagcgccgagtcgaccctccacagccagtttatcaggaccgcccagccttataaatttaaagaaaaaagcatcgtccttcacaaatcacggaaaaagtccaaggagcagaacgttagtgacgaccctgaaagcacgggcttcctgtacccatacaacgacctgctggtatgggctgtccttatgaagagacagaaaatggctatgtttttctggcagcacggtgaggaggccaccgttaaggcagtcatcgcttgtatactataccgcgcaatggctcatgaagccaaggagagtcatatggtagatgatgcaagtgaggagcttaaaaactactctaagcaatttggacagcttgcattagacttgcttgagaaagcattcaaacagaatgagcggatggcaatgaccctgctgacctacgagttgcgtaactggagcaacagcacgtgtctcaaactggcagtgagtggcggattgcggccgtttgtgtctcatacctgtacccaaatgctactgacagatatgtggatgggcaggctgaaaatgagaaagaacagctggctgaaaattattatatccattatcctcccaccaaccatcttgaccttggaattcaagtccaaggccgagatgtcccacgttcctcagagtcaggattttcagttcatgtggtattactccgatcaaaacgcttcatccagcaaggaatccgcatcggtaaaggaatacgacctggagcgcgggcatgatgagaagctggacgaaaaccaacattttggactggagtccggacatcagcaccttccttggacgcggaaggtctatgaattctactctgcacccatagttaaattctggttctatacaatggcctatctcgctttcctgatgctattcacttatacagtcctcgtggaaatgcagccccagccttcagtgcaggagtggctcgtctcaatttacatcttcactaacgctatagaggtcgttcgggaaatttgtatctcggagccagggaagtttacccagaaggttaaggtctggatctcagaatactggaatctgaccgaaaccgtggccatcgggctcttcagcgcaggtttcgttcttcggtggggcgatcctccctttcacacagcagggcgcctgatttactgcatcgacattattttctggttctcccgattgcttgatttttttgccgtgaatcaacacgctggtccttatgtgactatgattgctaaaatgacagctaatatgttttatatcgtgatcataatggcgattgtccttctcagcttcggggtagctcgcaaagccattctgagccccaaagagcctcccagttggagcttagctcgtgacatagtcttcgaaccatactggatgatttatggcgaagtgtatgctggggagatcgatgtatgcagttcccagcccagttgcccaccaggatctttcctgactccgttcttgcaggctgtgtatctctttgtgcagtacataataatggtaaatctgctgatcgcttttttcaacaacgtctacctggacatggagtctatcagtaataacctgtggaaatataatcgctatcggtacatcatgacttaccacgagaagccctggcttcccccaccactgattcttctgtctcacgtgggactgttgctgagacgcctgtgctgccacagagcgccacacgatcaggaggagggtgatgtgggtctgaaactttatctctcaaaggaagatctcaagaaactgcacgatttcgaggagcagtgtgttgagaagtatttccacgaaaagatggaagacgtaaattgttcatgcgaggagcggataagggtgacctccgaacgcgtaaccgaaatgtatttccagctgaaggagatgaacgaaaaggtgtcttttattaaggatagccttctgtctttggacagtcaagtgggacatctccaggatctctccgctctgaccgtcgatactcttaaggtgctgtcagcagtggacactctgcaggaggacgaggctctactggctaagcgaaagcactccacttgcaagaagttaccgcattcctggtccaatgtaatttgcgcagaagtcttagggtctatggaaatagcgggcgagaagaaatatcagtactattcaatgccctcgtcgcttctccgcagcctggccggcgggcgtcatccccctagagtccagcgcggcgccctcctggagatcaccaacagcaagagagaagccactaatgtccggaacgaccaggagcgccaggaaacgcagtccagcatcgtcgttagcggcgtcagtcccaacaggcaggcccattccaagtacggacaatttctgctggtcccctcaaatcttaagcgcgtcccattttctgcagaaactgtcctgccgctgtcccgaccgagcgtgcctgacgtgctggccacagaacaggacatacagacagaggtattggtccacttaactgggcaaaccccagtagtgtcagattgggcctctgttgatgagccaaaagaaaagcatgaaccaattgcacatttgctggacggccaggacaaggccgaacaggtgttgccaacattatcatgcacccctgagccaatgactatgagttctccactgaggaggtatcgcccatttgcaagatcccattcatttagatttcataaagaggaaaaacttatgaagatctgtaagattaagtcaaaagagtag

SEQ ID NO: 209230 - DNA, 912 bp, synthetic construct
  misc_feature 1..912: note = Description of Artificial Sequence: Synthetic coding sequence
  source 1..912: mol_type = other DNA
atgaaggagcagcccgtgctggagcggctgcagagccagaagagctggatcaaaggcgttttcgacaagcgggagtgctcaaccataatcccctcttcgaaaaatccccacagatgcactccagtttgtcaagtgtgccaaaatctgataagatgttactgcggaagactcataggagatcacgctggaatcgactattcctggacaatctctgcagctaaaggcaaggagagcgagcaatggtcggtggaaaaacatacgaccaaatcaccgacagacacctttggcacgattaacttccaggatggcgaacatacccaccacgcaaaatacattaggacatcctatgatacaaagctcgaccatctgttacatcttatgttaaaggagtggaagatggaactgcctaaattagtaattagcgtccatggaggcattcagaatttcaccatgccgtccaaatttaaagaaatttttagccaaggcttggtcaaggctgccgagacgactggagcctggataattacagaaggaattaacactggagtgtcaaaacacgtcggagatgcactcaaatctcacagttcgcattctcttaggaagatctggactgtgggtatccctccttggggcgttatcgagaaccaacgggacctgatcggaaaggacgttgtgtgtctctaccagaccttagataatccactaagcaagttgacaaccctcaacagcatgcattcccacttcattctctccgatgacggaaccgtggggaaatacggcaacgaaatgaaattaagaaggaacctggagaagtacctaagtctgcagaagattcactgtcgagagtatcatcgggggtccgtaactcagagtggctgccggcctgccgaggtatttcacgggctgccatag

SEQ ID NO: 209231 - DNA, 6069 bp, synthetic construct
  misc_feature 1..6069: note = Description of Artificial Sequence: Synthetic coding sequence
  source 1..6069: mol_type = other DNA
atgaaggagcagcccgtgctggagcggctgcagagccagaagagctggatcaagggggtctttgacaaacgtgagtgctccacaattatcccgtcatccaaaaatcctcatcgatgcacacctgtgtgccaagtgtgtcaaaatcttattcgctgttattgtgggcgcttaatcggtgaccacgcaggaatagactacagctggaccatctctgccgcaaaaggcaaggagtccgagcagtggtcagtggaaaaacatactaccaagagcccaacagacaccttcggtaccatcaactttcaggatggagagcacacacaccacgccaaatatatccggacctcctatgacacaaagctggatcacttgcttcacctcatgttaaaagaatggaaaatggagctacccaagctggttatttctgtgcacggaggtattcagaactttacaatgccctcaaagttcaaagagattttcagccagggactggttaaggccgccgaaactacaggagcgtggattatcactgagggaatcaatactggcgtctctaaacatgttggcgacgccttaaagagccacagttcccacagtttgcggaagatttggaccgttggtatccccccatggggggtaattgagaaccagagagatctgatcggcaaagacgtggtatgtctctatcagaccctcgacaaccccctgtccaagttgacaacattgaatagcatgcattcgcacttcatcctgtccgacgacggcaccgtgggtaagtacggtaacgagatgaaactgaggcgcaacctagagaagtatctgtcccttcagaaaattcactgcagatccagacagggggtgccagtcgtcggacttgtggtcgaaggaggtccaaatgtcatcctatcagtttgggagactgtgaaggataaagaccctgtagtcgtgtgcgaagggaccggacgggccgcagacctgttggcatttacacataagcatcttgcggacgaaggcatgctcaggcctcaagtgaaagaggagattatctgcatgatacaaaacacatttaatttctccctgaaacagagcaaacatctgtttcaaattctgatggagtgtatggtgcatcgggattgcatcaccatttttgacgctgactctgaggaacaacaggacctcgaccttgcgatcttgaccgccctactgaagggcacaaacctttcagcctcagagcagctgaatctcgccatggcctgggaccgggtagacatcgcgaagaaacatatccttatttacgagcaacactggaagccggatgccctcgaacaggctatgtcagacgcgctggtgatggatcgggttgacttcgtaaaactgctgattgagtatggcgttaatctgcaccggttcctgaccatcccacggctggaagagctctacaacaccaaacagggtccgactaacacccttcttcatcaccttgtccaggacgtcaaacaacacacactgttgagtggttatcggattacgctcatcgatatcgggcttgttgtggaatacttaatagggagggcctatagatccaattatactcgtaaacactttagagcattgtataataatctgtatagaaagtataagcatcagcggcattcgtcgggcaacagaaatgagagcgcagagagtaccctgcactctcagttcatcaggacggcacaaccttataagtttaaagaaaaaagtatcgtgctccacaagtctcggaagaagtcaaaggagcagaacgtctctgatgatcctgagagcaccgggttcttgtatccctacaacgacctcttggtgtgggcggtactgatgaagcgccagaagatggctatgttcttctggcagcacggggaagaggccaccgtgaaggccgtcattgcctgcatcctgtaccgagctatggctcacgaagccaaggagagtcacatggtggacgacgccagcgaagaactcaagaattactcgaaacagttcggccagcttgcactagatctgctggagaaggcctttaagcagaacgagcgcatggccatgaccctgcttacttatgaacttagaaattggtctaactcaacctgtctcaaactggccgtgtctgggggccttagaccgtttgtgagccacacatgcacccagatgctattaaccgacatgtggatgggcagacttaagatgagaaagaattcatggctgaagattatcatctccataatcctccctcctacaatactgacactcgagttcaagtccaaagccgagatgagccacgtgccgcaatcacaggactttcagttcatgtggtattacagtgatcagaacgcttcatctagcaaagagagtgcctccgtgaaggagtatgatctggaacgcggccacgacgaaaagctagacgagaatcagcacttcgggttagagagcggacaccagcatttaccatggacccgaaaggtgtatgaattttacagcgccccgattgtgaagttttggttctacacaatggcttaccttgcctttctcatgttgtttacatataccgtactggtggagatgcagcctcagccatccgtgcaggagtggttggtatccatttacatatttacaaacgccatcgaagttgtgagggaaatttgtatctctgaacctggaaagtttacacaaaaggtgaaagtgtggatcagtgaatattggaacctaactgaaaccgtggctatcgggctgtttagtgctggatttgtactgagatggggggacccaccgtttcacacagcggggcgcttgatctactgtattgacataatcttttggtttagcagattgctggattttttcgctgtgaaccaacacgccggcccctatgtgacaatgatcgcaaagatgaccgccaatatgttttatattgtcattattatggccatcgtactgctgtccttcggtgtggcacgaaaggccattcttagcccaaaagaaccaccttcgtggtcactggcacgcgacatagtgtttgagccctactggatgatctacggcgaggtgtatgccggtgaaatcgatgtgtgctccagccagcccagctgccctcctggatccttcctgacaccttttctgcaggctgtgtatctcttcgtgcaatacatcatcatggttaaccttctgatcgctttctttaataacgtttatctagacatggagtcaatatccaataacctttggaaatacaatcgatatcgttacatcatgacataccatgaaaaaccctggctgccacccccactgatcctgctcagtcatgtggggctgctgctccgtaggttgtgctgtcatcgtgccccacacgaccaggaagaaggggacgtcggtctgaagctgtatctctctaaagaggaccttaagaaactacatgatttcgaggagcagtgtgtcgagaaatacttccacgaaaaaatggaggatgtcaactgctcctgcgaggagcgaattcgggtaacatcagagcgcgtgaccgagatgtactttcagcttaaagaaatgaacgagaaagtttccttcatcaaggattccctgttgtcactggattcacaagttggacacctccaagatctgtctgccctgaccgtggacaccctaaaggtgctgagcgccgtggacacccttcaagaagatgaagctctgctggccaagaggaagcatagtacgtgtaagaagctccctcattcttggtcaaatgtcatatgtgctgaagtcctgggcagcatggagatcgccggagaaaagaagtaccagtactatagtatgccttctagtcttttgcgtagcttagccggtggacgacaccctccgcgcgtccagagaggtgcgttgcttgaaattaccaactcgaagcgcgaggcaactaatgtgcggaacgatcaagaaaggcaagaaacccagagtagcatcgtagtgtctggcgtctccccaaatagacaggcccatagcaagtacgggcagttcctgctcgtgccgtccaaccttaagcgagtgcccttcagcgcagaaacagtgttgcctctcagcaggcccagcgtgccagacgttctggccaccgagcaggatatccagacagaggtgctcgtgcaccttacaggccaaaccccggtcgtatccgattgggcctcagtagatgagcctaaagagaagcatgagccgatagcccaccttcttgatggtcaagacaaagccgaacaagtcctgcccaccttatcctgtaccccagagccgatgacaatgtcgtcacctctttctcaagctaagatcatgcagaccggtgggggttacgtgaattgggcgttctcggagggggatgagaccggagtcttctcaataaagaagaaatggcagacgtgcctgcctagtacctgtgattcagatagcagtcgtagtgagcagcaccagaagcaggcacaggacagctccttgagcgacaactccacgcggtctgcccaaagctctgaatgctcagaagtcggcccctggctgcagccaaatactagcttctggattaatccactcaggagataccgacctttcgcacgctctcactccttccgctttcataaagaagaaaaactgatgaagatttgcaaaattaaaaacttatccggctcttccgagatcggtcaaggagcgtgggtcaaggccaagatgttgaccaaagatcgacgactttccaaaaagaagaaaaatactcagggactgcaggtacccatcataactgtgaacgcttgttctcagagcgatcagctcaatccagagcctggcgaaaattctatctctgaagaggagtactcaaagaactggttcacagtctccaagtttagccataccggagtggagccgtacatccaccagaagatgaaaactaaagagatagggcagtgcgccattcaaattagtgactacttaaaacaaagccaggaggatctttccaagaactccctgtggaatagcaggtcaacaaatctgaaccggaactccctgctgaagtcatctattggagtggacaagattagtgccagcctgaagtccccacaggaaccccaccaccactactcggcaattgaaaggaacaacctcatgaggctctcacagactatcccttttactccagtgcagctctttgcgggcgaggagatcacagtttaccgactggaagagtcgagcccactgaacctcgataaatctatgtcatcatggtctcagagaggaagagccgccatgatccaggtgctctctcgggaagaaatggacggcggtcttcgcaaggcaatgcgggtggtgagtacatggtccgaagacgacattttgaaaccaggtcaggtcttcatcgtcaaaagcttcttaccagaggttgtcagaacgtggcataaaatctttcaagaaagcaccgtacttcacctgtgtctgcgcgagattcagcagcagcgcgcggcacagaaattgatctacacatttaaccaagtaaaaccccagaccatcccttacactccgcggttcctcgaagtgttcctcatatactgccattccgccaatcaatggttaacaattgagaagtacatgacaggagagttccgaaaatacaataataacaatggggatgaaatcacacccacaaataccctggaagaactgatgctcgcttttagtcattggacatacgaatatactaggggcgaactgctggtgctcgatctgcagggcgtgggcgagaaccttaccgatccctccgtgattaagccagaggtaaagcagagtaggggcatggtgtttgggccagcaaacctaggagaggatgctattcgaaattttattgcaaagcaccactgcaactcatgctgccggaaattgaagcttcctgacctgaagcggaacgattactcccctgaaagaattaacagtacttttgggctggagatcaagatcgagtctgctgaagagccaccagctagggaaaccgggagaaattcaccagaagatgatatgcagctgtag

SEQ ID NO: 209232 - DNA, 6054 bp, synthetic construct
  misc_feature 1..6054: note = Description of Artificial Sequence: Synthetic coding sequence
  source 1..6054: mol_type = other DNA
atgaccgcccccgtgaccagccagaagagctggatcaagggcgtgttcgacaagcgcgaatgttcaaccattatcccctccagcaagaacccccatcggtgcaccccagtgtgtcaggtgtgtcagaacctcatacgttgctactgtgggcgcctgatcggggatcatgccggcattgactactcctggactatctcagctgctaaaggcaaagaatcagaacaatggtctgttgaaaagcacacgactaaatccccaacagacacatttggcaccatcaacttccaggacggggaacatacccatcacgcaaagtatataagaacttcttatgatacaaaactggatcacctactgcacctcatgcttaaggagtggaaaatggagctgcccaagctcgttatctccgttcatggcgggatacaaaatttcacaatgccatcaaaatttaaagagatatttagtcaaggcctggtgaaggctgctgagactactggagcctggataataacagaaggcatcaataccggcgtaagtaagcacgtcggagatgctctgaaatcacattcttcccactcactgagaaagatttggactgtggggatccccccgtggggtgttatcgaaaatcagcgtgacctcattggaaaggatgtagtctgtctgtatcagacattagataacccgctcagcaagctcacaaccctgaattccatgcattctcatttcattctgagcgacgacggcaccgtaggaaaatatggtaatgagatgaagctgagacggaacttggagaagtacttgtccctgcagaagatacactgtcgcagcaggcagggagtcccggttgtcggcctggtggttgaaggtggccccaacgttatccttagcgtgtgggaaacggtcaaagacaaagaccccgttgtggtctgcgaaggtactggcagggccgcagacctgctggctttcacacacaagcatttggccgatgaggggatgcttcgaccccaggtgaaagaagagatcatatgtatgattcagaacacattcaactttagcctgaagcagtctaaacatttattccagatcctcatggaatgtatggtgcatagagactgcatcaccatcttcgatgcagacagcgaagagcagcaggacctggacctggctattctgacggcattactcaagggcactaacctctctgcgagcgagcaactgaaccttgcgatggcctgggaccgagtcgatatcgcaaagaaacacattttaatttacgagcaacattggaagccagacgccctggagcaggctatgtctgacgctttggtgatggaccgtgtggattttgtgaagctgctcatcgagtacggggtaaacctccataggttcctgacaatcccacggctggaggagctttacaacactaaacaaggtccgacaaataccttgttgcatcaccttgtgcaagatgttaagcagcacaccttactttcgggctaccggattaccctgatagacattgggttggtggtagagtatttaataggcagggcctacagatccaattatacaagaaaacattttagagctctctacaataatctctatcgtaagtacaaacaccagaggcattcctccgggaaccgtaacgaatctgctgagagtacactgcatagccagttcatcaggaccgctcagccatataagtttaaagagaagtctatagtactccataaatccagaaaaaagtcaaaggagcagaacgtgagcgacgatcccgaatccacaggtttcctgtatccatataacgacctcctcgtttgggcagtgcttatgaaaaggcagaagatggcaatgttcttttggcaacacggtgaggaagcgaccgttaaggccgtgattgcctgtatcctgtatcgggcaatggcccacgaagcaaaggagagccacatggtggatgacgcctcggaagagctcaagaactactccaagcagttcggacaactcgcgttggatctgctcgagaaagccttcaagcagaacgagagaatggccatgacactcttgacctatgagctgcgaaattggtctaattcaacatgcctgaagctcgctgtttccggggggcttagacccttcgtgtctcacacgtgtacacagatgctgctgaccgacatgtggatggggcgcttaaagatgcggaagaacagctggttgaagatcattatcagcatcatcttaccgcctaccatcctgacacttgagttcaagtctaaagccgagatgtcccatgtcccacagtcccaggattttcagttcatgtggtattattcagatcagaacgcctcctcaagtaaagagtctgcctctgtgaaggaatacgaccttgagcgcgggcacgatgagaaactggatgagaatcagcacttcggactggagagcgggcaccagcacttgccctggactaggaaagtatatgaattttactccgcgccgattgtcaagttttggttttataccatggcttacctggctttcttgatgctgtttacctacacagtcctggtcgaaatgcagccacaaccaagcgtgcaggagtggcttgtgagcatatatattttcacaaacgcaatcgaagtcgtgagggagatatgcatcagcgagccaggaaaatttactcaaaaggtgaaagtgtggatcagtgaatattggaacttaacggaaactgtggcaataggactctttagcgctggcttcgttttacgatggggcgatccaccgttccatactgcaggccgcctgatctactgcattgacattatcttctggttctcccggctcctggatttctttgctgtgaaccagcacgcaggcccgtatgtgacaatgatcgcaaagatgacagccaacatgttttacatcgtcatcatcatggcaatagtacttttatcttttggcgttgcgcgcaaggcgattctgagtccgaaagagcccccttcttggtcccttgcccgcgacatcgtgttcgaaccatattggatgatctatggagaggtttatgccggggagatcgatgtgtgctcatctcagccttcttgtcctcccggaagtttcctgacacctttcctgcaggctgtctatttgtttgtccagtacattatcatggttaacctacttatagccttttttaataatgtgtatcttgatatggaatctatctcaaacaatctgtggaagtacaaccgatataggtatattatgacctaccacgaaaagccatggcttccaccgcctttgattcttcttagccatgtcggcctgctcctgcgccgattgtgttgccacagggcaccccacgaccaagaggagggtgacgtggggcttaaattgtacttaagcaaagaggatctcaaaaaactccatgactttgaggaacagtgtgttgagaaatacttccacgagaaaatggaggatgttaattgttcttgcgaagaacgcatcagagtgacttccgagcgagtcaccgaaatgtactttcagcttaaagagatgaatgagaaggtgtccttcatcaaagacagtctgctgtctcttgacagccaggttgggcatctccaagatctgtcagcccttactgtggacacgttgaaggtcctgtctgcagtagacaccctccaggaggacgaggccttgctcgcaaaaagaaaacatagcacatgtaaaaagctgccccattcctggtctaatgtgatctgtgccgaagttctgggctccatggaaatcgccggtgagaagaagtaccagtattactcaatgccatcctcattactgaggtccctggccgggggaagacacccccctcgagtgcaaaggggggccttgctcgaaatcacaaacagtaaaagagaggctacaaatgttagaaacgatcaagaacgacaagagactcagagctctattgtggtgtcgggcgtgtcccccaacagacaagcgcatagtaagtacggacagttcctgctggtgccgtccaaccttaagagggtccccttctcagcagaaaccgtgctgccactgtctagaccaagcgtacccgatgttctggcaaccgagcaggacatccagaccgaggtgctggtacacttaacaggtcaaactcccgtggtgagtgattgggcctccgtggatgagcctaaggaaaaacacgagcccattgcacatcttttggatgggcaagataaggccgaacaagtgctgccaactttgtcatgtacaccagagcctatgaccatgtctagcccgctcagtcaggccaaaatcatgcaaaccggaggaggatatgtgaactgggccttctctgaaggcgacgagaccggcgtcttttctatcaagaagaagtggcaaacttgtctcccaagcacatgcgactcagacagctctcgatctgagcaacatcagaagcaggcgcaggactccagcctgtcagacaactccactcggtccgcgcagtcttctgagtgctcagaggtcggcccgtggcttcagcctaataccagcttttggattaacccgctgagacgatacagaccattcgccaggtctcattcattcagattccataaagaggagaaactcatgaaaatatgtaaaatcaaaaatctttcaggcagcagcgaaattggtcagggggcatgggtaaaggccaaaatgctgaccaaggaccgcaggctatcaaagaagaagaaaaacactcaagggcttcaggtacctatcatcaccgtcaatgcatgttcccagagcgatcagctgaacccagaacctggagagaactctatcagcgaagaggagtactccaagaattggttcaccgtgtcgaagtttagccacacaggcgtggagccctacatccatcagaaaatgaaaaccaaggaaattggacagtgtgccatccagatctcggactacttgaaacaatcccaggaagacttaagtaaaaacagcctctggaattcccgatcaaccaaccttaaccggaatagtttgctcaagtcgagcatcggtgtggataagattagtgccagtctaaagagcccccaggagccccaccaccactattcagcaattgagcgtaataatcttatgcgtttgtctcagacgatccccttcactccagtacagttatttgccggagaagaaatcactgtctatcgactggaggagagcagccctctaaatctcgacaaatccatgtcaagctggagtcaacgagggcgcgccgccatgattcaggtcctgtcacgcgaggagatggacggtggccttcggaaggctatgagagtggtctcaacatggtccgaggacgatattctgaagcccggccaggtttttatcgtgaagtcttttttacccgaagtcgtccgcacctggcataagatttttcaagaaagtacagtgctgcatctgtgtttacgggagattcagcagcagagggcagcccaaaaactgatctataccttcaaccaggttaagccccaaactattccatatactccacggttcctggaagttttcctgatctactgccacagtgctaaccagtggctgactatagagaaatatatgacgggcgagttccggaagtacaacaataataacggcgatgaaatcacgcccactaatacactggaagagctaatgcttgcgtttagccattggacttacgaatatactagaggtgaacttctagtgctcgacctccagggcgttggcgagaatctcaccgatccgagtgtaatcaaaccggaggtgaagcagagtagaggaatggtcttcgggccggcaaatcttggggaggatgccatcaggaatttcatagcgaagcaccattgtaattcctgttgtcgaaagctgaaacttcccgatctgaagagaaatgactacagcccagaacgcattaactctaccttcggactggagatcaaaattgagtccgccgaagagccccccgcgcgggagacgggtcgaaactcacccgaggacgatatgcagctctag

SEQ ID NO: 209233 - DNA, 5844 bp, synthetic construct
  misc_feature 1..5844: note = Description of Artificial Sequence: Synthetic coding sequence
  source 1..5844: mol_type = other DNA
atgaaggagcagcccgtgctggagcggctgcagagccagaagagctggatcaagggggtcttcgataaaagggaatgctcgacgattataccctcttcaaagaatccacaccgatgtactccagtttgtcaggtgtgtcagaacctgatcaggtgttactgtggtcgcctgatcggcgaccacgcggggattgactattcctggacgatatcagcagccaagggaaaggaatccgaacaatggtccgtcgagaagcatactacaaagagccccaccgacaccttcggtacaattaactttcaggacggtgagcacactcaccacgctaaatacatccgaacgtcctacgacaccaaacttgaccacctcttacacttaatgcttaaagaatggaagatggaacttccaaaattggttatttccgtgcatggtgggatacagaatttcaccatgccatccaaatttaaggagattttctcacaggggctggttaaggctgccgaaactacaggcgcatggataattactgagggcatcaacactggagtcagtaagcacgtgggcgacgccttaaaatcccatagcagccactccctcagaaaaatttggactgtcggaatccccccctggggagtcattgaaaatcaaagagatctgattggcaaagacgttgtctgtttgtaccagaccctggacaaccccctaagtaagttgactaccctcaatagcatgcactcgcatttcattttgagcgatgacggcacggtcgggaagtatggaaacgaaatgaaactccgccgcaatctggagaagtatctgtctctgcaaaagatccactgccgctcacggcagggcgtgcccgtggttggccttgtcgtggagggtggcccaaatgtaattctttccgtttgggagaccgtgaaagacaaggaccccgtcgtggtgtgtgaaggtaccggtagagcagccgacctgctagcgttcactcataagcaccttgccgatgaagggatgttacggccacaggtaaaggaggagatcatatgcatgattcagaataccttcaattttagcctgaagcaatcaaaacatctgtttcaaattttaatggagtgtatggtgcatcgtgattgtataactatctttgacgctgattctgaggagcagcaagatctcgatctagccattttaaccgccctgttaaagggcacaaacctgtccgcctcagaacagctaaacctggctatggcatgggacagggtggatatagcaaaaaagcatattctgatatacgagcagcactggaagcccgacgccctggaacaggctatgtccgatgccctcgtaatggacagggtcgattttgttaagctcctgattgagtacggtgtcaacctgcataggttcctgacgattccccgactcgaggagctgtataatactaagcaaggtccaacaaacaccctcctgcaccacctggtgcaggacgttaaacagcatactctactcagcggctacaggatcaccctgattgacataggtctggtggtggaatatctgattggccgagcatatcgcagcaactacaccagaaaacattttagagccctgtataacaatctgtaccggaaatacaagcaccaacgccattctagcgggaacagaaacgagtctgccgagtcaactctgcacagccagttcatccgaaccgcccagccctacaagttcaaggagaaatctattgtgctgcataagtcgagaaaaaaatccaaagagcaaaacgtcagcgacgatccggaatctacaggttttctctatccttacaatgatctgttggtctgggcggtgttgatgaaaagacagaaaatggcaatgttcttctggcaacatggcgaggaagccactgtgaaggccgtcattgcatgtatcctgtatcgcgcaatggctcacgaggctaaagaatcccacatggtggacgacgccagcgaggaactgaagaactattccaagcagttcggtcagttggcactggatctgttagagaaggcgtttaagcagaatgaacggatggcaatgactcttttaacctatgaattgcggaattggtcaaactcaacttgcctgaagcttgctgtgagtggtggactgcgtccctttgtgtcacatacgtgcacccagatgcttctgacagacatgtggatgggacgtctaaagatgagaaaaaactcctggctgaaaataattataagcatcatcctgccgcccaccatcctgacccttgaatttaaatccaaagccgaaatgtctcatgtccctcagtcccaggactttcagttcatgtggtactactctgaccagaacgcctcgtcctctaaagaaagtgcctctgtcaaagagtatgatctggagcgcggacacgacgaaaagctggacgaaaatcagcattttgggttggaatctggccaccaacacctgccatggacccgcaaggtgtacgagttctactctgcccccatagtaaagttttggttttataccatggcttatctagctttcctgatgttgttcacatatacggtccttgtcgagatgcagccacagccctcagtgcaggagtggttggtatctatctacatatttacaaatgccattgaagtcgtgcgtgagatctgcattagtgaaccaggtaagtttacacagaaagtaaaagtctggattagcgagtactggaatctaactgaaaccgtggccatcggtctcttttcagccggtttcgtcttacgctggggcgatccccccttccacacagccggaagactgatttactgtatcgatataatcttctggttttcacggctgctggacttcttcgccgtgaaccagcatgctgggccatacgtaaccatgattgccaagatgaccgcgaatatgttttacatcgtaatcattatggcgattgtactattgagctttggggtggcgcggaaagctattctctcccccaaagagccaccttcctggtcactcgcacgcgatattgtgtttgaaccctattggatgatctacggagaggtctacgccggagaaatcgacgtgtgctcctcccagccctcttgcccaccgggttccttcttaacaccctttctccaggcagtttacctctttgtccagtatattattatggttaacctgttgatagccttcttcaataacgtgtatctcgacatggaaagcatcagcaacaacctgtggaaatacaatcgttatcgctatattatgacttaccacgagaagccttggctgcccccccccctcattctgctaagccacgtagggttgctcctcaggcgcctgtgttgccacagggccccgcacgaccaggaagagggtgacgtgggcctgaaactttacttaagcaaggaagacctgaagaaactgcatgacttcgaagaacagtgcgttgaaaagtacttccatgagaagatggaagacgtcaactgttcttgtgaagagcgcattcgggtgaccagcgagcgagttacagaaatgtactttcagctgaaggagatgaacgagaaagtgagctttatcaaggatagtctgctgtcgctggatagtcaagtgggccacttgcaggacctcagtgctcttaccgtggataccctgaaggtgttgagcgccgtcgacacactacaggaagacgaagccctgctcgctaaacgcaagcattcaacttgtaaaaagcttccgcattcctggagcaacgtgatttgcgcagaagtgttggggtctatggagatcgccggggagaaaaagtatcagtattatagtatgcccagcagtctgcttcgctctttagcgggcgggcgccacccaccacgagtgcagaggggtgccctgctggagattaccaattctaagcgggaagcgaccaacgtcaggaacgaccaggagcgacaggaaacccagagctccatagtggtttctggggtaagcccaaaccggcaggctcactccaagtacgggcagtttctgctggtgcccagcaatctgaagagagtgcctttttcggcagagactgtgcttccattaagtaggccgagcgtgccagatgtgctcgccacagagcaggatatccaaacagaggtgctcgttcatctaactgggcagaccccagtggtttccgattgggcaagcgttgatgagcctaaggagaagcacgagcccattgcccacctgctggacggccaggacaaagctgagcaggtgctacctactctgtcttgcactccagagccaatgactatgtcttcccccctaagtcaggcaaagatcatgcagactggagggggctatgtgaactgggctttttccgagggcgacgagaccggagtgttcagcataaagaagaaatggcaaacctgtctgccctctacttgcgactcagactcctctcggagtgagcagcaccagaagcaggcccaggattccagcctgtccgacaattccactaggagtgcccagagttccgaatgctccgaggttggaccatggcttcagccgaacacaagtttctggattaatcctctccggaggtatcgcccctttgcccgatctcactccttccgattccataaggaggagaaactcatgaagatatgcaaaataaaaaatctgagcgggtcctctgagattggacaaggcgcctgggtgaaagctaagatgctgacaaaagatcggaggctgagcaagaagaaaaagaatactcagggactgcaggtaccaattattaccgtgaacgcatgctcgcagtcagaccagcttaatccggaaccaggggagaactcaatctctgaggaggaatactctaaaaattggtttacagtctccaaattttcacatactggggttgagccctacatccatcagaaaatgaagaccaaagaaatcggccagtgtgcgattcagatcagcgactacttaaaacagagccaggaggatttaagcaagaattctctgtggaactcccgatccacaaacctgaaccgcaatagcttacatgtcattaagatgcccatctcctctctgatttccgaaatctccgcttcactaaagagccctcaagaaccacaccaccactattccgctatcgagagaaacaatctcatgagactgtcgcagaccataccgttcaccccagtgcagctgttcgccggagaggagattaccgtttatcgactcgaggagtcatcccccctcaatcttgacaaatcaatgagcagttggtcacaacgcggacgtgctgccatgatccaggtcttatctcgcgaggaaatggacggaggcctgaggaaggcaatgagagtcgttagcacttggtccgaagacgatatactgaaaccaggtcaagtcttcatcgtgaagtcttttcttcccgaagtagttcgaacgtggcacaagatttttcaagagtcaacagttctacatctgtgtctcagagagatccagcagcagcgagcggcccaaaaacttatttacaccttcaaccaggtgaaaccacagactattccgtatacaccaaggttcctggaagtttttcttatatattgccacagcgccaatcagtggcttacaatcgagaagtacatgacaggtgagttcaggaagtataacaacaacaacggggacgaaattaccccaacaaacacactggaagagctgatgctggcgttctctcattggacttacgagtatacacgcggtgaattgttagtgctggacttgcaggccctgtggttttgggactccatgctgaaagcgcgtctgggtggttggcgaatgtag

SEQ ID NO: 209234 - DNA, 1707 bp, synthetic construct
  misc_feature 1..1707: note = Description of Artificial Sequence: Synthetic coding sequence
  source 1..1707: mol_type = other DNA
cgggagagcccccaccccgccctgctgcagagccagaagagctggatcaaaggggtatttgacaagcgggaatgcagcacgatcatcccatcgtcgaaaaacccccaccgatgcactcccgtctgtcaggtctgccagaatttgattaggtgttactgcggcaggctgattggagatcacgctggtatcgattattcctggactatttccgcagccaaggggaaggaaagcgagcagtggtctgtggagaaacacaccacaaagtcgccaacagatacctttgggaccatcaactttcaggatggcgagcacacccatcacgcaaaatatatccgaaccagctacgacaccaaactggaccatctgctgcatctgatgttaaaagagtggaaaatggagctgccaaagctcgtgatatctgtccatggtgggattcagaactttactatgccctctaagtttaaggaaatctttagtcagggcctggtcaaggcagccgaaactactggagcctggataataaccgagggaataaacaccggagtaagcaaacatgtcggggacgcattgaaatcacactccagtcactctctgcggaagatatggacagtgggcattcccccctggggggtgatcgaaaaccaacgcgacttaattggaaaagatgtggtgtgcctctaccagacgctcgataacccactgtcgaagctgacaaccctaaactccatgcactctcactttatactcagcgacgatggaactgtcggaaagtacggcaatgagatgaagctgagaagaaacctggagaagtatctgagccttcagaagatccactgccccggtgaagagattactgtctaccgtctggaggagtccagcccactcaacttagataaaagcatgtcctcatggtctcagcgcggcagagccgccatgattcaagtgctgagtcgggaggaaatggacgggggattaaggaaagcgatgcgtgtggtctccacttggtctgaggacgacatattaaaacccggacaggtgtttatcgtgaaaagctttctaccagaggtggtgcgtacctggcataagatatttcaggagagtacagtgcttcacctgtgcctgcgtgagattcagcagcagcgtgcagcccaaaaactgatttacacattcaaccaagttaagccacagacgatcccttacacccctcgcttcctggaggtctttttgatttattgccactccgcgaaccagtggttaacgatcgaaaaatacatgacaggggagtttaggaagtataataacaataacggcgacgagatcacccccacaaataccttagaggagttgatgctagcgtttagccactggacgtatgaatatactcggggggagctcctggtgcttgacctacagggagttggggagaatttgacagacccatccgttatcaaaccagaggtgaagcagtctcgaggaatggtcttcgggccagcaaacctgggggaggacgctatcagaaatttcatcgctaaacaccactgtaactcgtgctgtaggaagcttaaattgcccgacctgaaacgcaatgattacagccctgagaggattaactccacgtttggtctggaaattaagatcgaatccgcagaagagccgccagcgcgcgaaactggacggaatagtcctgaagatgacatgcagctatag

SEQ ID NO: 209235 - DNA, 2580 bp, synthetic construct
  misc_feature 1..2580: note = Description of Artificial Sequence: Synthetic coding sequence
  source 1..2580: mol_type = other DNA
atgaaggagcagcccgtgctggagcggctgcagagccagaagagctggattaaaggcgtttttgacaaacgggagtgcagtacaattattccatcatctaaaaaccctcatcgctgtactccagtgtgccaggtatgccagaacctgatacggtgctactgcggccgtctaattggagaccacgcaggcattgattacagctggacgatctcagccgcaaagggcaaggagtccgagcagtggtcggtggaaaaacatactactaaaagtccaaccgacacgttcggcacaatcaactttcaggatggggagcacacccaccacgctaaatatattcggacgagctatgacaccaaactggatcaccttctacatctaatgctcaaagagtggaaaatggaactgcccaagctggtaatatccgtgcacggtggcatccagaacttcaccatgccatctaaatttaaggaaatcttctcgcagggtcttgtgaaagctgcagaaaccaccggcgcgtggataattacagaaggaatcaatacaggggtgtccaagcacgtgggggacgcactcaagtctcactcctcccatagtctgcgaaaaatttggactgtcggtatcccgccatggggagtgatcgagaaccaaagggacttgattggaaaagacgtcgtgtgtctctaccagaccctggataatcccctgagcaaactcaccaccctcaatagtatgcatagccactttatcctgtccgacgatgggactgttggtaaatacgggaatgagatgaagctccggcgcaacctagagaaatacctgagtttgcaaaagattcactgtagaagccggcagggggtgcccgtcgtcgggctcgttgtggagggaggccctaatgtcatcctcagtgtgtgggaaaccgtgaaggataaagaccccgttgttgtgtgtgagggcacggggagggccgcagacctgctggccttcacccacaagcatcttgcggacgaggggatgcttaggcctcaggtaaaggaagaaattatctgcatgattcagaatacattcaatttttcactgaagcagtcaaaacacttgttccaaatattgatggagtgcatggtccaccgtgattgtatcactatctttgatgcagattcagaggaacaacaagacctcgatctggcaattctcaccgctcttcttaaaggaacaaatttgagtgcgtccgagcagcttaatctggcgatggcctgggacagggtggatatagctaaaaaacacatccttatctacgagcaacattggaaacctgacgctctagaacaggctatgagtgatgctctggtaatggaccgcgtggattttgttaaactcctgattgaatatggcgtcaatcttcatcggtttctcacaataccacggttagaggaactttataacaccaaacaaggccccaccaatacgcttctgcaccatctggtacaggacgtgaaacaggatctgtctaagaatagcttgtggaacagcagaagcacgaacctgaatcggaacagcctgcacgtaatcaagatgcctatcagtagcctgatcagtgagattagtgctagtctaaagagcccacaggagccccatcatcattactcagccatcgaaaggaataacctgatgagactttcccagaccattccattcactcctgtgcagctgttcgcaggggaggagatcacagtctacagattagaggagtcctctccgcttaatcttgataaaagcatgtccagctggtcgcagcggggacgcgccgccatgatccaggtgctgagtcgcgaggagatggatgggggactccgaaaggccatgcgggttgtgagcacttggtcagaggacgacatcctgaaacccggacaggtttttattgtaaaaagttttctgcccgaggtagtacgcacatggcacaaaattttccaagagtccacagtccttcatctctgtctacgtgagatccaacagcagagagccgcgcagaagctaatttacactttcaaccaagtgaaacctcagacgatcccttacacaccccggttcctggaggtctttcttatctactgccatagtgccaaccagtggctgacaattgagaagtacatgactggcgagttccgtaagtataataacaacaatggagacgagatcacgccaaccaatacactggaggaactcatgttggccttctcccattggacctatgagtacacgcgcggggagctgctggtgcttgatcttcaaggcgttggtgaaaacttgactgacccgtccgtgattaaacctgaggtgaagcagtcccggggcatggtttttggtcccgctaatctgggggaagacgccatcagaaacttcattgcgaaacaccactgtaattcatgctgccggaaactgaaacttcccgacttaaagcggaacgactactcgcccgaaaggattaacagcaccttcgggctggaaattaaaatcgaatccgcggaggaaccccccgctagggagacaggacggaacagccccgaggatgacatgcagctgtag

SEQ ID NO: 209236 - DNA, 2934 bp, synthetic construct
  misc_feature 1..2934: note = Description of Artificial Sequence: Synthetic coding sequence
  source 1..2934: mol_type = other DNA
atgaaggagcagcccgtgctggagcggctgcagagccagaagagctggattaagggtgtttttgacaaacgcgagtgctcaactataatcccatcaagcaaaaatccccatcggtgtacacctgtttgccaggtgtgccagaacctgatccggtgttactgtgggcggctaatcggcgatcacgcaggaattgattacagttggaccattagcgcagcaaaaggtaaggagtcagagcagtggagtgttgagaaacataccacaaaaagtccgaccgatacctttggcacgataaacttccaggacggcgagcacacccatcacgccaagtatattaggaccagttatgatactaagctcgatcatcttttgcatcttatgctgaaggaatggaagatggagttgcctaaactggtaatttccgtgcacggaggtattcagaattttacgatgccctcgaaatttaaggagatcttctctcagggactggtaaaggccgctgaaacaacaggcgcttggattattacagaggggattaataccggcgtttccaaacacgtgggagatgctctcaaaagccacagctctcactccctgcgtaaaatctggacggttggaatccccccatggggggttatcgagaatcaacgagaccttatcggtaaagatgtggtgtgtctgtatcagaccctggacaatccattgagcaaacttacgacactgaacagtatgcactcacacttcatcctgagcgatgatgggacagtggggaagtacgggaacgagatgaaattacgcaggaacctggaaaaatacctttcactacaaaagatacactgtaggagtcgccagggcgttcctgtggttggcctagtggtagaaggcggcccgaacgtgattttatccgtgtgggaaacagtgaaggacaaggacccagtggtcgtttgcgagggtaccgggcgagcagccgacctcctggcgttcacccataagcatttggccgacgaaggcatgctgcgccctcaggtcaaggaagagattatctgtatgattcagaacacattcaatttcagccttaaacagtctaagcacctattccagatactgatggagtgtatggtacatcgggattgtattactattttcgacgcagactccgaagagcagcaggacctggatctcgccattctgacagctctactgaagggcactaatctgagcgcgtcagagcagctgaatctcgccatggcatgggacagagtggatattgcaaagaagcatatattgatttatgaacagcattggaaacccgatgccttggagcaggccatgtcagacgccctcgtaatggaccgcgtggattttgtgaagttacttatcgagtatggcgttaacctgcaccgttttctcactatcccgagactggaggaactgtataatacaaagcagggacccacaaataccctgctacaccacttagtgcaggacgtcaaacaacacactcttctttctggctatagaattaccctgatagacattggcctggtggtagagtatctgattggccgggcttacaggtcgaactacacgcgtaaacacttcagggctctgtacaacaatctctaccgaaaatacaagataataaccgtcaatgcctgttcccagtccgatcagcttaatcctgaacctggagaaaattccatatctgaggaggaatactctaaaaattggttcacagtgagtaaattctcgcatacaggggtagagccttatatacaccagaaaatgaagaccaaggagatcgggcaatgtgctatccagatctccgattatctgaaacagagccaagaggatctgagcaaaaactccctgtggaactcacgctccaccaacctgaaccgcaacagtctacacgtcattaagatgcccatttcaagtctgatttccgaaatctccgcctccctgaaatctccccaagaaccacaccaccactatagtgccattgagcgtaacaatttaatgagactatctcaaaccataccctttaccccagtgcagctcttcgccggtgaagagatcaccgtgtacagattggaagagagcagccccctcaacctggacaaaagcatgtcatcatggtcccagcggggtagagcagccatgattcaggttctcagtcgcgaagagatggatggaggcctccggaaggccatgagagtcgttagcacctggtccgaagacgatatcctgaaacccggccaagtttttattgtgaaaagtttcctgccagaggtggtgcgcacgtggcataaaatttttcaggaatctactgtattacacttgtgcttaagggaaattcagcagcagcgcgctgctcaaaagttaatttatacgttcaatcaagtcaagccgcagacaattccttacacacctcgtttcctggaggtgtttctgatctattgtcacagtgctaaccagtggctgacgatcgagaaatatatgaccggcgagtttagaaaatataacaataacaacggcgacgagataacacccactaatactcttgaagagctgatgctggccttctcgcactggacatatgagtatacccggggcgagctgctggtgctggatctgcaaggcgttggagagaacttaaccgacccgagcgtcatcaagcctgaggttaagcagagccggggtatggtgttcggtcccgcaaaccttggcgaggatgctatccgaaatttcatcgcaaagcatcactgcaactcatgttgtcgtaaactcaagctgccagacctcaagcggaacgattatagccctgaacgtattaatagcacttttggtctggaaattaagattgagtctgcagaggagccacctgccagggagaccggccggaactcccccgaagatgatatgcagctatag

SEQ ID NO: 209237 - DNA, 3402 bp, synthetic construct
  misc_feature 1..3402: note = Description of Artificial Sequence: Synthetic coding sequence
  source 1..3402: mol_type = other DNA
atgctgcggccccaggtgaaggaggagatcatctgcatgatccagaatacatttaatttttcgctaaagcagtcgaagcacctgttccagatcctgatggaatgtatggtgcatagggattgcatcaccatatttgatgctgattctgaagagcagcaggacctggatctcgccatactgaccgctcttctgaagggaaccaatctttccgcaagcgaacagctgaacttagcaatggcctgggaccgcgtcgacatcgcgaagaaacacattttaatttacgagcagcactggaagccagacgctctcgaacaggcaatgtcagacgccctggttatggatcgggtcgacttcgtgaagctcttaatcgagtatggcgtcaatctccaccgttttctgactatacctcgtcttgaggagttatataacacaaaacagggaccaacgaatactctactccaccaccttgtgcaggacgttaaacagcacaccctcctgagcggctatagaattaccctgatagatataggcctggtggtggaatatctgataggccgggcataccgcagcaattacacaaggaaacacttccgggctctctacaataacctgtatcggaaatacaaacaccagcgccattcttccggtaacaggaatgagtctgctgagagtacactgcattcgcagtttatcaggacagcgcagccatataagttcaaggagaaaagtattgttctgcacaagtctcggaaaaaatccaaagagcagaatgtttccgacgacccagaatcgacggggtttctatatccttataacgacttgctagtgtgggccgttctgatgaaacggcaaaagatggctatgttcttctggcaacatggggaggaggcaaccgtgaaggccgtgattgcttgtatcctctatagggccatggcgcacgaggccaaggagagtcacatggttgatgacgctagtgaagaattgaagaactactccaaacagtttggtcagctagcactcgacctgcttgaaaaggcttttaagcagaatgaaagaatggcaatgaccctgctaacctacgagctccgcaattggtcgaacagtacgtgtctgaagctcgccgtgtcgggaggcttgcgaccattcgtatcacatacatgcactcagatgctgctcacagacatgtggatgggccgactgaagatgcgtaaaaattcatggctcaagataattatttcaattatcctgccaccgacaattctgacacttgagtttaagtccaaagccgagatgtcacacgttcctcagtctcaggatttccagtttatgtggtactacagcgaccagaatgctagctctagcaaggagagtgcttcggtgaaggagtatgacttggagagagggcacgacgagaagctggacgagaaccagcattttgggctggaaagcggccaccagcatctcccctggacaaggaaagtctatgagttctacagtgctcctatcgtgaagttctggttctacaccatggcgtatctggctttcctgatgctttttacctacacagtattggtagaaatgcagcctcagccatccgtacaggaatggttggtgtcgatctacattttcacgaatgccatcgaagttgtgagggaaatctgcatcagtgagccgggaaagttcactcaaaaggtcaaggtctggatctctgagtattggaaccttactgaaacagtcgccatcggattgttcagcgcaggatttgtcctgagatggggcgaccctccttttcatacagccggccgtcttatctattgcattgacatcatcttttggttttctcgcctgctggactttttcgcagtaaaccagcatgcaggtccgtatgtcaccatgatcgcaaagatgaccgccaacatgttttatatcgtgattatcatggccattgtcctgttatcatttggagtggcaagaaaggcgatcttgagtcctaaggaaccccctagctggagtctggcccgggatattgtcttcgaaccgtactggatgatttacggcgaggtgtatgctggagaaattgatgtctgtagtagccaaccgtcttgtccccctggtagctttctgacgccatttctgcaagctgtctatcttttcgtgcagtatattataatggtcaatttgctgattgcgttctttaacaatgtgtatttagacatggaatccatctctaacaatctgtggaagtataacaggtatcggtatatcatgacctaccatgagaaaccctggttacccccaccactgatactgctctcccacgtgggtctcctgttgcgacggctttgttgccaccgggctccacacgatcaggaggaaggcgacgtaggattgaaactgtacctgagtaaggaggatttgaagaagctgcatgattttgaggagcagtgcgttgagaagtattttcacgaaaaaatggaggatgtcaattgctcttgcgaggagaggatccgcgtcacttctgagagggtgacggaaatgtacttccagctgaaagaaatgaatgagaaagtttcttttattaaagattcgctgttgtcattggattctcaggtagggcatctgcaggatctttcagccctgactgtggacacactgaaagttctgtccgctgttgataccctccaagaagacgaggccctccttgccaagcgtaaacattccacatgtaagaaacttccccactcctggtccaacgtcatctgcgccgaagtgttgggttccatggaaatcgcaggcgagaagaagtatcaatactactcaatgcctagcagcctgttacggagcttagccggaggcagacacccacctcgggtgcagcggggggccctgctggaaataactaactctaagagggaagcaacaaacgtcagaaatgatcaggagagacaggagactcagtccagtattgtggtatcgggagttagtcccaaccggcaggcccacagcaagtacgggcagttcttgttggtgcctagtaatctgaagcgagtgcccttttccgctgagaccgtattgccactgagtaggccttccgtacccgacgtgctcgccactgagcaagacatccaaacagaggtgctcgttcatctgaccggtcagacacctgttgtgagcgactgggcttcggttgacgaacccaaggaaaagcatgagcccattgctcacctcctggacgggcaagataaagctgagcaggttcttcccactctcagctgtacacctgagccgatgaccatgtcctcacccctgtcacggtataggccttttgcaaggagccactcctttcggttccataaggaagagaaactgatgaaaatctgtaaaatcaaaagcaaggaatag

SEQ ID NO: 209238 - DNA, 6054 bp, synthetic construct
  misc_feature 1..6054: note = Description of Artificial Sequence: Synthetic coding sequence
  source 1..6054: mol_type = other DNA
atgatcatcctgagcaagagccagaagagctggatcaagggcgtgttcgacaaacgagaatgctccaccatcatccccagctccaaaaacccccacaggtgcacccctgtgtgccaggtgtgtcaaaatctcataagatgctactgcggcaggctcataggcgatcatgccggaatcgactacagttggacgattagcgccgcaaaagggaaagaatcggagcagtggtccgtggagaagcacacgaccaagagccccacagatacctttggtacaattaacttccaggatggggaacacactcaccacgccaagtacatcaggaccagttacgatactaaactcgaccatctcctccacctgatgctgaaggagtggaaaatggaattacctaaattggttatcagtgtgcacggcgggattcagaattttacaatgccaagcaagttcaaggaaatcttttcccagggcctcgtgaaggcggccgaaactacgggcgcctggatcattacggagggcatcaatacaggggtgtctaagcacgtgggggacgccctcaaatcccattctagccatagcctgaggaagatttggacagtgggaatacctccctggggggttatcgaaaaccagcgagacctgattggaaaggacgtggtatgcctgtatcaaacactcgataatccactctccaaactgaccaccttgaactctatgcattcccatttcatcctgagtgatgacggcactgtcggcaaatatggcaacgaaatgaagctgaggcgcaacttggagaagtatctctccctgcagaaaattcactgccgcagtagacagggcgtgcccgttgtgggtctggttgtcgaaggcggacctaatgtgattctgagcgtatgggaaaccgtcaaggataaggaccccgtggtagtctgtgagggcactggaagagcagcagaccttttagcttttactcacaagcatctggccgacgagggaatgctacggcctcaggttaaggaagaaatcatctgtatgattcaaaatacatttaacttctccctcaagcagtctaagcacctttttcagatattgatggaatgcatggttcatagagactgcatcaccatctttgatgccgatagcgaggaacagcaggaccttgatctcgctatcttaacagcacttctgaagggcacaaatctctctgcaagtgagcaactgaacttagcaatggcctgggatagggtggacatcgccaaaaaacacatcctcatttatgaacagcattggaagcccgacgctctggaacaggccatgtcagacgccttggtcatggacagagttgactttgtcaagcttttaatagaatacggggtcaatctccaccggttccttaccatccctagactcgaggagttgtataacacaaagcagggacctaccaatacactcttgcaccacctggtacaggacgtcaaacagcacactctcttgagcggataccggatcactctcattgatattggtctggtcgtagagtacttgatcggaagagcctaccggtccaactatacccggaagcactttcgggctttgtacaacaacttatacagaaagtacaagcaccagagacactcctccgggaacagaaatgagtccgccgagtctacactccactcgcagtttattcgcaccgcccagccttacaagttcaaagaaaagtctatcgtcctgcataagtctagaaaaaagagtaaagaacaaaacgtgtccgacgatccggagtcaaccggatttctgtacccctataacgacttgctggtgtgggcagtgctaatgaaacggcagaaaatggcgatgtttttctggcagcatggtgaagaggctacggtaaaagcagtcatcgcctgcattttataccgggccatggcccacgaggctaaggaaagtcacatggtggatgatgcctctgaagagctgaagaattatagcaaacagttcggccagttggccctggatttacttgagaaggccttcaaacagaatgaaagaatggccatgactctactgacgtatgagttgaggaattggtccaatagcacgtgcctgaaactggcggtgtctggcggattgcggcccttcgtctcccacacttgtacgcagatgctgctgaccgatatgtggatgggccgtctaaaaatgcgtaagaactcatggctcaagattatcatctctattatccttcctcccacaatcctgacgttagagttcaaatctaaagccgagatgtcccatgtcccacagtctcaggattttcagttcatgtggtactatagcgatcagaacgctagtagtagtaaggaatcagcgtcagttaaagagtacgacctcgagcgcgggcacgatgaaaagttggatgaaaatcagcatttcggccttgaatcaggacatcagcacctaccatggacacggaaagtgtatgaattttatagcgcaccaatagtcaagttttggttctatacaatggcctacttggcctttttaatgctctttacctatacagtactagtggaaatgcagcctcagcccagcgtccaggaatggctggtgtcgatctacattttcacgaacgccattgaggtcgtccgggaaatctgcattagtgagccgggcaagttcactcagaaggtcaaggtgtggatctccgagtattggaatctcaccgagacagtggctattggcctgttcagcgccggctttgtgctgagatggggggaccctcccttccatacagctggccggctgatctattgcatcgatatcatattctggttttccagactgctggacttctttgctgtgaatcagcacgcgggaccctatgtcactatgattgctaagatgacagccaacatgttttatattgtaatcattatggctattgtgctgctctccttcggcgtcgctcggaaagccatcctttctccgaaggagccaccctcttggtccctggccagggatattgtttttgaaccctattggatgatctacggtgaggtctacgctggcgaaatcgatgtatgtagcagtcagccgtcctgtccccctgggagttttctcacgccctttttgcaagctgtctacctctttgtgcagtacataataatggttaatctcctcattgcctttttcaacaacgtttatctggatatggagtcaatctccaacaacctgtggaagtacaacagataccgctacataatgacttaccatgaaaagccttggcttcctcctcctctcatcctgctttcacacgttggtctgctccttaggcggctttgttgtcaccgggctccccatgatcaggaagaaggggatgttggacttaagttgtatctgagcaaagaggacctgaaaaaactgcatgatttcgaagagcagtgtgtggagaaatacttccacgagaaaatggaagatgtgaactgttcctgcgaagaacgcatccgtgtcacctctgaaagggtgaccgagatgtattttcagttaaaggagatgaatgagaaggtgtccttcattaaggacagcctgcttagtttagatagtcaggttgggcacttgcaggatctcagcgctctgaccgtggatactctgaaggttctaagtgccgtggacaccctacaggaggatgaggccctattggccaaaagaaagcacagtacctgtaagaagctgccacactcctggtctaacgtgatatgtgctgaggtgttaggttccatggaaattgcaggggagaaaaagtaccaatattattcgatgccctcttctctattgagaagtctcgccggcggacgccacccaccccgcgtgcagagaggagccctcttggaaataacaaattccaaaagggaggctacaaatgttagaaacgatcaggagagacaggagacacagtctagtatcgtagtatctggcgtatcacctaatagacaggcccattctaagtacggccagttcttactcgtgccctcaaatttgaaacgcgtcccattttccgcagaaaccgtgcttcctttgtctaggccctccgttccagacgtgctggcgaccgagcaggatatacagaccgaagtcctggtacatctcacaggacagactcctgttgtgagcgactgggctagcgtggacgagccgaaggaaaagcatgagccgattgctcatctgctggatggacaggacaaagccgagcaagtattaccgactttgtcatgcactcccgagccaatgactatgagctcgccactcagccaggccaaaattatgcagactggcggaggttatgtaaactgggcattctccgagggagatgaaactggagtttttagcatcaagaaaaagtggcagacatgcctccccagtacgtgtgattctgattcgagtcgatccgaacagcatcagaagcaggctcaggatagcagcctgtctgacaacagcaccagatccgctcaaagcagcgagtgtagtgaggttggcccgtggctgcagccgaatacttctttttggattaacccactgcgtagatatcggccttttgcgaggtctcatagttttcggtttcataaagaagaaaagctgatgaagatatgcaaaatcaaaaatctttctgggtcctccgaaatcggccagggagcttgggtcaaagcaaagatgcttacaaaggatcgtaggctgagcaagaaaaagaaaaacacgcagggcctgcaggtgcctattatcacagtaaatgcttgttcacagtccgaccagctgaatcctgaacctggtgaaaattccatcagcgaagaggagtacagcaaaaactggttcactgtgtccaagttttcccacacgggggtcgaaccctacatccaccagaaaatgaagaccaaggagattgggcaatgtgccatccagatctccgactatcttaaacagagtcaggaagatctttctaaaaacagcctttggaattctcgctctacaaacttaaaccggaactcactgctaaagtcctccataggagtagataaaattagtgcaagtttgaagtccccacaggaaccccatcaccactattcagctatagaaaggaacaacttaatgcgtttgtcacagacgatcccctttaccccagtccagctgttcgctggagaggagatcacagtatatcggctggaggagtcatctcccttgaacctggacaagtccatgagttcgtggtcccagcggggcagggcagctatgattcaagtcttgtcccgagaagagatggatggagggctccgcaaagccatgcgagtagtgtccacttggtctgaagatgatatattaaaacctggccaagtgtttatcgtcaagtcctttctgccggaagtggttcgtacgtggcacaagatcttccaagagagtacagtgctccacctctgtttgcgggagattcagcagcagagggctgctcagaaactgatttacacttttaaccaagtcaaacctcagacaatcccctataccccacgattcctggaagtgtttctcatttattgccacagcgccaaccaatggctgacaatcgaaaagtacatgacaggggagttccgtaagtacaataacaataacggggatgagatcacgcctactaacaccctggaggagctcatgcttgctttctcccactggacatatgaatacacaagaggcgaactactcgtgctagatttacaaggggtgggagagaatctgaccgatccgagcgtgattaagcccgaagtcaaacagtctcgaggcatggtgtttggtcctgccaacttaggggaggacgctattcggaattttatagcgaaacatcattgtaacagttgctgccgcaaattgaagctgcccgacctgaaacggaacgattactcccctgagcggataaacagcactttcgggctggagattaaaatcgagtctgctgaagagcccccagcccgcgagacaggacgcaactcacccgaagatgacatgcagctgtag

SEQ ID NO: 209239 - DNA, 6081 bp, synthetic construct
  misc_feature 1..6081: note = Description of Artificial Sequence: Synthetic coding sequence
  source 1..6081: mol_type = other DNA
atgaaggagcagcccgtgctggagcggctgcagagccagaagagctggatcaagggtgtgttcgacaagagggaatgttcgaccattatcccttcatctaaaaaccctcacaggtgcactccagtgtgtcaggtatgccaaaatttgattcggtgctactgcggaagactcatcggggaccacgcaggcatcgactacagctggaccatcagtgccgcaaaaggcaaagagagtgagcagtggagcgtggagaagcacactactaagtctccaaccgacaccttcgggaccatcaattttcaggacggggaacatacccaccacgccaaatatatccgcacttcgtacgacacaaaactcgatcacctactccacctaatgctgaaggaatggaagatggagttgcccaaactggtgatctccgtgcacggagggatccagaatttcacgatgccgagcaagtttaaggaaatcttcagtcaaggcctagtgaaagcggccgaaacaacgggagcatggattatcacagaaggaatcaacaccggggtctctaaacacgtaggcgatgccctgaaatcccacagctcacacagtctccgcaaaatttggacggtgggtatcccaccctggggcgtgattgaaaaccagcgggacctgattggcaaggacgttgtgtgtctgtaccagacactggataaccccctctctaagcttacaaccttaaactctatgcactcccactttatcctgtcagatgacggcaccgttggtaagtatggcaacgaaatgaagttacgacggaacctggagaagtatttgagtctccagaaaatccattgccgctcccgccagggggtgcccgtggtcggattggtggtcgaaggtggtcccaacgtgattttatctgtctgggagaccgtcaaggacaaagatcctgttgtcgtgtgtgagggaacagggagagctgccgacctgcttgcttttacgcataaacacctagcagacgaaggtatgctgaggcctcaagtgaaagaggagattatctgtatgatccaaaatacctttaacttctccctcaagcagtccaagcacctgttccagatcttgatggaatgcatggtccaccgcgattgtatcactatattcgacgccgactctgaagaacagcaagatttagatcttgcaatcttgacggctctgctgaagggaacgaatctcagcgcctctgaacaactgaatcttgccatggcttgggatcgcgtggacattgccaagaaacacatccttatctatgaacagcattggaaacctgacgctctagagcaggctatgtccgacgctctcgtaatggatagagtggactttgtgaaactgctaatagagtacggagtcaacctgcaccgattcttaaccatccccaggctggaggaactgtataacactaaacagggacccacgaacacgctgctccatcacctcgttcaagatgtgaaacaacatacgctcctctctgggtaccgaatcactctgatagacatcgggctcgtggtggagtatttgattggcagagcctatcgcagtaattacaccagaaagcattttagggcgctgtataacaacctctatcggaaatacaagcatcagcgtcattccagtggcaacaggaatgaatcagccgagtccacacttcactctcagttcattaggacggcccagccttataagttcaaggagaaaagtatagtgttgcacaagagtagaaagaaatcaaaagagcaaaatgtgagcgatgaccctgagtcaaccggatttctgtacccttacaacgatctcctggtgtgggccgtcctcatgaagcgtcagaaaatggcaatgttcttttggcagcacggagaggaagcaaccgtcaaggcggttatagcctgcatcctgtatagggcaatggctcatgaggccaaggagagtcacatggtcgatgatgcctccgaggagcttaagaactactccaagcagttcggacaattagcgctggacttactcgagaaggccttcaagcagaacgagcgcatggcaatgactctcctaacatacgaacttcggaattggagcaactcaacttgcctgaaactggccgtgtctggaggcttgcggccatttgtaagccatacttgcacccagatgttgctgacagatatgtggatggggagactcaagatgcggaagaacagctggctgaaaattatcatatccatcattctccccccaaccatcctgaccctcgagttcaaatctaaggccgagatgagccacgtgcctcagtcccaggactttcagttcatgtggtactactccgatcagaatgcatccagctcgaaagagtctgcctctgtgaaagaatacgacctggagagaggtcacgacgaaaagcttgacgaaaatcagcacttcggcctcgagagcgggcaccagcatttgccctggacacggaaagtttatgaattctactccgctcctatcgtcaagttctggttctatacgatggcctatctggcattcctaatgctcttcacttatacagttctggtagaaatgcaacctcagccttccgtccaggaatggcttgtgagcatttatatcttcaccaatgcgattgaggtggtgagggaaatatgtatctcagaacccgggaagttcactcagaaggtgaaagtttggattagtgaatattggaatctaacagaaaccgttgccattggcctattctccgcaggatttgtgcttcgctggggtgatccacccttccacacagcaggacgtctgatctactgcatcgacataattttctggttctcaaggttactggacttcttcgcggtgaatcagcacgctggcccctacgttacaatgatcgccaagatgaccgccaatatgttctatatcgtgatcataatggctatagttttgttatctttcggggtagcaagaaaagctattttgtcacctaaagaacctccatcttggagcttggctagggacatcgtgtttgagccttactggatgatctatggagaggtgtatgccggagagatagatgtctgcagctcgcagccctcgtgtcctcctggatcttttctgacaccattccttcaggcagtatatctctttgtccaatacattattatggtcaacctcctcatagcctttttcaacaatgtttacctggacatggagagcatcagcaataacctttggaaatataatcgttatcgatatataatgacctatcatgaaaagccttggctgcccccacctttgattttgttgagtcacgttggcctcctcctacgcagactgtgttgtcatcgggccccacatgaccaggaagaaggtgacgtgggtcttaagctctacctttccaaggaagaccttaagaagctgcacgactttgaggaacagtgtgtagagaaatactttcatgaaaagatggaagatgtcaactgctcatgtgaggaacggatcagggtgacctcagagagagtaactgagatgtactttcagctgaaggagatgaacgaaaaggtcagcttcatcaaggacagtcttctctcactggactcccaggtgggtcatctgcaagacctgagtgcattgactgtggacaccctaaaagtgctctcggccgtcgacacactccaggaggatgaggcactgcttgcgaaacgcaagcacagcacctgcaaaaaactaccacatagctggtctaacgttatttgtgctgaagtgttaggcagcatggagatcgccggagagaagaaataccagtattatagtatgccatcctcgcttttgaggagtctggcaggtggacggcatccccctcgggtgcagaggggcgctctgctcgaaattacaaattctaaacgtgaggctacgaacgtgagaaacgatcaagaacgccaggagacgcagagttccatagtagtatccggggtgtcccccaatcggcaagcacactcgaaatacggccagttcctgctcgtgcctagtaacctcaagagggtcccttttagtgctgagacagtgctgcccctgtcgcgtccaagcgtgcccgacgtgctcgctaccgagcaggacatccagaccgaggttttggtgcacttaaccggccagactccagttgtctcagactgggccagcgtggacgagcctaaggagaagcacgagccaattgcacatctgctcgatggtcaggacaaagcagaacaagtactgccaacattgagttgcactccagagcctatgactatgtcgagtccactgagtcaagcaaaaatcatgcagacaggcggcggctacgtgaattgggccttctcagaaggggatgagacgggggtcttttctattaagaagaagtggcagacatgtcttccctcgacatgtgactccgactcgtctagatctgagcaacaccagaaacaagctcaagactcttcccttagcgacaactccacccggtcagctcagtcttccgaatgtagtgaagtgggcccttggctgcagcccaataccagcttttggatcaaccccttacgtaggtaccgccccttcgccaggtcccacagctttcggttccataaggaggaaaagctgatgaaaatctgtaaaattaaaaacctcagtggttcttcggagatcggccagggcgcatgggtcaaagctaaaatgctcaccaaggaccggaggctgagcaagaagaagaaaaacactcagggcctccaggttcccatcatcaccgtaaatgcttgctctcagtcagatcagctcaatccagaaccaggagagaactctatttctgaggaagagtacagcaagaactggttcactgtgagcaagttcagtcacacaggtgtggagccctatatccaccagaaaatgaaaacaaaggagattgggcagtgtgctatacagatttcagactacctcaagcagtctcaggaagacctgtctaaaaactctctctggaactcccggtcaactaacttgaataggaacagcttgcacgtgattaagatgccaatcagctccttaatctctgagatatccgcctctttgaaaagcccccaggagccccaccaccactatagcgccattgagaggaacaatctgatgagactcagtcagacgattccattcactcccgtgcagctgttcgctggcgaggaaattacggtctaccgactagaggaatctagtccgctgaacctggacaaatccatgtctagctggagtcagcgcggccgggctgccatgatccaggtgctgtcacgtgaggagatggatggcggactgcgcaaggccatgagagtggtgtccacttggagcgaagacgatatcctgaaacccggtcaggtattcattgttaagtcttttcttccagaagtcgtgaggacctggcataagatctttcaggagagcacggtacttcacctgtgtctcagggagatccagcagcagagagccgcccaaaaattaatctatacattcaaccaagtaaagcctcagacgatcccttacaccccccgcttcctggaagtgttcctcatctactgccactcagcaaaccagtggcttaccatagagaaatatatgaccggggagtttcggaaatataataacaacaacggagacgaaatcacccctaccaacaccctggaggaacttatgctggccttctctcattggacttatgaatacaccagaggtgaattactcgtccttgatctgcagggggtgggagaaaatcttactgaccctagcgtcataaagcccgaagtcaagcagtcccggggcatggtgttcggccctgccaatctgggcgaagacgccattcgcaattttatcgcaaagcaccactgtaatagttgctgccggaagttaaaactgcccgatctaaagaggaatgattatagcccggagcgcatcaactcaacatttggtctagagattaagatcgagtctgctgaggagccacctgctagggagactgggcgtaatagccctgaggacgacatgcagctctag

SEQ ID NO: 209240 - DNA, 5598 bp, synthetic construct
  misc_feature 1..5598: note = Description of Artificial Sequence: Synthetic coding sequence
  source 1..5598: mol_type = other DNA
atgagccagaagagctggatcgagagcaccctgaccaagcgggagtgtgtgtatattatccctagctcaaaagaccctcatcgctgccttcctggctgtcagatctgccaacaactggtgaggtgcttctgcggccgactggtcaagcagcatgcctgctttacagcaagcctcgccatgaagtattctgatgtaaaactcggcgaccactttaaccaggccatcgaagagtggagtgtggagaaacacacagagcagagccccactgacgcgtacggggtgataaacttccaaggcggatcgcactcttacagagctaaatatgtccgcttatcgtacgacactaagcctgaagtcatcttacagctgttactaaaggaatggcaaatggagctaccaaaactggtcatctcggtacatggaggaatgcagaagttcgaactgcatccaagaatcaaacagctcctcggaaagggattaatcaaggctgcagttaccaccggtgcctggatattgacaggtggtgtaaacaccggggtggcaaagcacgtgggcgatgcgctgaaagaacacgcctctcggagcagtagaaaaatttgcacaattggcatcgcaccatggggtgttatcgagaacaggaatgacttggtgggcagggatgtggttgccccataccagacactgctgaaccccctgtcaaagctcaacgtgctgaataatctgcactcacattttatactcgtggacgacggcacagtcgggaagtatggtgcggaggtgaggctccgtagagaactcgaaaaaacaatcaaccagcagaggatccacgccaggattggccagggcgtcccagttgtggcattaatttttgaagggggaccaaacgtcatcctaaccgtgttggagtacctgcaggaatctccgcctgtccctgttgttgtgtgcgaaggcacaggacgggctgcagatctacttgcttatatccacaagcagacggaggagggtggcaacttaccggatgctgccgagccagacattatcagcactattaagaagacatttaatttcggccaaaatgaggctcttcatttgtttcaaactttgatggagtgtatgaaacgcaaagagcttataaccgtattccacattggctccgatgaacaccaggacatcgatgtggccattctgacagccctccttaaggggacaaatgcgtcagctttcgaccagctgatactcacgttagcttgggaccgggtggatattgctaaaaatcatgtgtttgtatacggtcagcagtggcttgttggttcactagagcaagctatgttggacgcactcgtcatggatagggtggctttcgtgaaactgctgattgagaacggggtgtcgatgcacaaattcctaacaattccaagacttgaagaactttacaacacaaagcaagggccgaccaatcctatgttgttccatctcgtgagagacgttaagcagggcaacctacctccaggctacaaaatcacattaattgatatcgggttagtgatcgagtacctgatgggcgggacttacaggtgtacatacaccagaaagcgtttcaggcttatctacaacagcttgggaggcaacaataggaggagcggtcgtaatacctcttccagtaccccacagctgcgcaagagccatgagagcttcggaaatcgggctgacaagaaggagaagatgagacataatcatttcataaaaacagcacaaccttataggcctaaaattgacaccgtgatggaggaggggaagaaaaagcgcacgaaggatgaaatcgtagatattgacgatcctgaaacgaaaaggttcccttatcccctaaacgaattactgatctgggcgtgcctgatgaagagacaggtaatggccaggttcctatggcaacacggagaagagtctatggctaaggcacttgtggcatgtaagatttatcgttccatggcatatgaggcgaagcaatccgatctagtcgacgatacatcggaagagttaaagcagtattccaacgatttcgggcagctagccgtcgagctgctggagcagagtttcagacaggatgagactatggcgatgaaacttctgacatatgaactcaaaaactggtccaattctacatgtctgaagctcgccgtcagcagtaggctgaggccctttgttgcccacacctgtacccaaatgctactttcagacatgtggatgggccgattgaatatgcgaaaaaatagttggtacaaggtgatccttagcatcctggtaccccccgccattctgctcctggagtataagacaaaggcagagatgagccacatcccacagagccaagacgcccatcagatgacaatggacgattcagaaaacaatttccaaaatattaccgaggaaattcctatggaggtcttcaaggaggtgcgcattctcgacagtaacgaaggaaaaaatgagatggagatccagatgaaatctaagaagctgcctatcacccgcaagttttacgcattttatcacgcgcctatcgtgaaattttggtttaatacactggcttacctgggcttcctgatgctgtatactttcgtcgtgctcgtgcagatggagcaactgccttcagtccaagagtggattgtcatcgcatacattttcacatacgctattgaaaaagtcagggagatctttatgtctgaggccggcaaagtgaaccagaaaattaaagtctggttttcagactactttaatatttctgacactattgcgatcatcagctttttcatcggctttggactgagattcggcgcgaaatggaacttcgccaacgcgtacgacaatcatgtcttcgttgccggaagactaatttattgtctgaacatcattttttggtacgtacgactgctggattttctggctgttaatcagcaagcgggcccttatgtgatgatgattggcaagatggtcgctaacatgttttacattgtcgtgatcatggcactggtactgctttcattcggcgtgccaaggaaggccattctttacccacacgaagcccccagctggacactggctaaagatattgtgtttcatccttactggatgatctttggagaagtatacgcctatgagatagacgtatgtgcgaacgactctgtgatccctcagatctgtggtccagggacatggctgactccattcttgcaggcggtatacctattcgtccagtacataattatggtgaacctgctcatcgctttctttaacaacgtttacctacaggtcaaagccatttctaatatcgtgtggaaataccagcggtaccatttcatcatggcttaccacgagaaacctgtcctcccaccaccgttgatcatcctctctcacattgtaagtctgttctgctgcatctgcaagcgcagaaaaaaggataagacttccgacggccccaaactgtttctaacagaggaagaccagaaaaaactgcatgatttcgaggaacagtgcgtggagatgtacttcaacgagaaggatgacaaattccattccgggagcgaggagcgcatcagagtgaccttcgagcgcgtcgagcagatgtgcatccagattaaagaggtgggagaccgggttaactacattaagcgtagcctccagtccctagatagccaaatagggcacttacaagacctgtccgcactgactgttgatacgctgaaaaccctgactgcacaaaaagcttcggaggccagcaaggtgcacaatgaaatcacccgcgagctgtcaattagtaaacatttggcgcagaatttgattgatgatggaccagtgcgaccctctgtgtggaaaaagcatggagtcgtaaacacactgtctagctcccttccacagggagatctggaaagcaataacccctttcattgcaatatcctgatgaaagatgacaaggacccacaatgcaatatctttgggcaagatttgcccgccgtgccccagcgcaaagagtttaactttccggaggcgggaagttcatcaggcgcactgttcccatccgccgtctcacctcccgagcttcgccagcgtctgcatggcgtggaacttctgaagatttttaacaaaaatcagaaacttggttcgagctcaacaagcatccctcatctttcatcccctccgacgaagttttttgtgtcgaccccctcacagccaagctgtaagagtcacttagaaacggggaccaaagatcaggaaaccgtgtgctcaaaggccacagagggcgacaacacagagttcggagcatttgtgggccaccgggactcaatggatctccagaggttcaaagagacttcgaacaaaatcaaaatcctgtccaataataacacttcagaaaataccttaaagcgggtgagtagcctcgcagggtttaccgactgccacaggaccagcatccccgtgcactcgaagcaggctgaaaaaatatctcgaaggccctctactgaggacacgcatgaagtggactccaaagccgccttgattcccgactggctccaggatagaccttctaatcgggagatgccttctgaggaaggcacattgaatgggctaacttcgcccttcaaacccgctatggatacaaactattactattctgcggtagagcgcaacaatctgatgaggcttagtcagagtataccttttaccccagtgcctccccggggtgagcccgtcactgtgtatcgcttggaagaatctagcccaaatattctgaacaacagcatgagctcttggtcccaactcggactgtgcgcgaagattgaatttttgagcaaagaagagatggggggaggcctgcggagagcagtgaaagtgcagtgcacttggagtgaacatgatatcttgaagtcgggccacctgtatatcattaagtctttcctcccagaagttgtcaacacctggtccagcatttacaaggaagacacagtgctgcatctgtgcctccgcgagatacaacagcagcgggcggcccagaaacttactttcgcttttaaccaaatgaagccgaagtctatcccctattcaccaaggtttctggaggtatttcttctgtattgccatagtgctggacagtggttcgccgttgaagaatgtatgacaggcgagttcaggaaatataacaataacaatggtgatgagatcattcccaccaatacactcgaggaaatcatgctggccttctcccattggacttacgagtacaccaggggcgagttgctggtgctggacttacagggggtgggagagaatctcactgaccctagcgtgattaaagcggaggagaagagaagctgtgacatggtgttcggcccagctaacctgggagaagacgctatcaaaaacttcagagccaagcatcattgcaacagctgttgtcggaagttgaagctccctgatttaaaacgcaacgactacactcccgacaagataatctttccacaggacgaaccctccgacctcaatctgcagccgggcaatagcaccaaagagtccgagtccacaaacagcgtgagattaatgttgtag

SEQ ID NO: 209241 - DNA, 3315 bp, synthetic construct
  misc_feature 1..3315: note = Description of Artificial Sequence: Synthetic coding sequence
  source 1..3315: mol_type = other DNA
atgagcttccgggccgcccggctgagcatgcggaaccggcggaacgataccctggattcaacgagaacgctgtactcttctgcctctcgcagcacggacctgagctactccgaaagcgatctggttaactttatccaggcgaattttaaaaaacgtgaatgcgtcttcttcacaaaggattcaaaagctacagagaacgtgtgcaaatgtgggtatgcgcagtcccagcacatggaaggaacccagatcaaccagagcgagaagtggaactacaagaaacacaccaaagagttccccacagacgcgtttggcgacattcaatttgaaactttaggcaagaaagggaaatacattagattgtcttgcgatacagacgccgagatcctctacgagttgcttacgcagcactggcacctgaaaacccccaacctggtaatcagtgtcactggtggggctaagaattttgctcttaaaccacgtatgagaaagatctttagcagactgatttatattgcccaaagcaagggggcatggatcctcactgggggcacacattatgggcttatgaaatatatcggagaggtcgtgagggacaacaccatctcgcgcagcagcgaggagaatattgtggcgataggcatagccgcctggggtatggtgtcgaaccgcgacaccctgatccgcaactgtgatgctgaaggttacttcttagcccagtacctaatggacgattttaccagagaccctctgtatattctagacaacaatcatacacatcttttgctcgttgataatgggtgtcacggacaccctactgtcgaggctaagcttcggaatcaactagagaagtacatatccgaacgtactatacaggattctaattacggcgggaagatccctattgtatgtttcgcacaggggggtgggaaggagacgctgaaggccattaatacttctataaagaataagataccctgcgtcgtggttgagggctctggacagatagcagacgtgatagcttccctcgttgaagtggaggacgccctgaccagtagcgcagtgaaggagaagctggtgcgcttcttgccacgaactgtctctcgactccctgaagaggagaccgagagttggattaagtggctcaaggaaatccttgagtgcagccacctgcttacagtgatcaagatggaagaggctggggatgagattgttagcaatgccatttcctatgctctgtacaaagcattttcaactagcgagcaagataaggataactggaatgggcagctgaagcttctccttgaatggaaccagctggacctggcgaacgacgaaattttcactaacgataggaggtgggaatctgcggacctgcaagaagtgatgtttaccgccctgataaaagaccgaccgaagttcgtgcgactctttcttgagaacgggctcaatctgcggaaattccttacccacgatgtactgaccgagctattttcaaatcacttctctactctggtttatcggaatctgcagatcgcaaaaaacagctacaacgacgcattacttactttcgtgtggaaactggtggccaattttcgccgagggttcagaaaggaggatcggaacggcagggacgaaatggacattgagctccacgatgtgtcccccatcaccagacacccgctccaggcattgttcatatgggcaatcctgcagaacaaaaaagaactctccaaagtgatctgggaacagactagggggtgtacattggccgctcttggcgcaagcaagctgctgaaaaccttagcgaaagtcaaaaacgatatcaacgctgctggcgaatccgaggaactagccaacgaatatgagactagggccgtcgaattgttcaccgagtgttactccagcgacgaggatcttgcagagcagttgttggtgtacagctgtgaagcctggggtgggagcaattgtcttgagcttgccgtcgaggctacggatcaacattttatagcccagcccggagtgcagaattttctgagtaagcagtggtacggtgaaatcagcagggacaccaaaaattggaagattatcctgtgtctcttcattattccacttgttgggtgtggcttcgtctcctttaggaaaaagcctgtcgacaagcacaagaagcttttgtggtattacgtggcgttcttcacgtcaccctttgtggttttttcctggaacgtagtgttctatatcgcattcctattgctctttgcttacgtcctgctgatggactttcactccgtgccacacccccccgagctggttctgtactccttagtgttcgtgctgttttgtgacgaggtcagacaatggtatgttaacggggtgaactacttcaccgatctgtggaatgtgatggacacgcttgggttgttttactttatagcggggatagtgtttcgtttgcactctagtaataagtcatcgctgtattccggccgcgttattttttgcttggattatataatcttcactctgcgactgatacacatttttacagtctcccggaatttgggtcccaagattataatgttacaacgcatgctgattgacgtattcttctttctcttcctgttcgccgtctggatggttgcttttggagtggcgagacaaggaattctacgacagaatgaacaacgctggagatggatatttcgttccgttatatacgagccatacttagccatgttcggccaggtcccttctgatgtagatggcaccacttacgactttgcacattgtaccttcacgggcaatgagagcaaacccttgtgcgtcgagctggacgaacacaacctgccccgtttccccgaatggattacgatccccttggtgtgcatttacatgctatctacgaacattcttttagtaaacttacttgtggcaatgttcggctataccgtcgggactgtgcaggaaaacaacgaccaggtttggaaatttcagagatacttccttgtccaggaatactgcagccggcttaacatcccctttccatttatcgttttcgcctatttctatatggtggtgaaaaagtgtttcaaatgctgctgcaaggagaagaatatggagtcttctgtctgctgctttaaaaacgaggataatgagacactggcatgggaaggcgtaatgaaggaaaactatttagtcaagatcaacacaaaggcaaacgacacttccgaggagatgcggcataggtttcgccaactggacaccaagctgaacgatcttaaaggcctgcttaaggaaatagctaataagatcaagtag

SEQ ID NO: 209242 - DNA, 579 bp, synthetic construct
  misc_feature 1..579: note = Description of Artificial Sequence: Synthetic coding sequence
  source 1..579: mol_type = other DNA
atgaagagcttcctgcccgtgcacaccatcgtgctgatccgggagaatgtttgtaaatgcggatacgcacagagccagcatatggaaggaacccagataaaccagtctgaaaaatggaactacaagaagcatacgaaagaatttcctaccgatgcctttggagatattcagtttgagactcttggaaaaaagggaaagtacatccgcctgtcctgtgatacagatgcggaaatcctgtacgagcttctgacccagcactggcatctcaaaactcccaatctggtgatatcggtgacaggaggtgccaagaacttcgcacttaagccaaggatgcgcaaaatcttctcacgtctgatctacatcgcccagtcaaaaggagcctggattctgaccggcggtacccactacggcctgatgaaatacataggcgaggtggttcgggataatactattagcagaagcagtgaagagaacatcgtggccatcggaattgcagcctggggcatggtttctaacagggatacactcataagaaactgtgatgccgaggtccctgtgggccaagaagaggtgtgctag

SEQ ID NO: 209243 - DNA, 498 bp, synthetic construct
  misc_feature 1..498: note = Description of Artificial Sequence: Synthetic coding sequence
  source 1..498: mol_type = other DNA
atggagggcacccagatcaaccagagcgagaagtggaactacaagaagcataccaaagagtttcccaccgacgcatttggggacattcagtttgagaccctcggaaagaaagggaaatacattcgccttagctgcgacactgatgcggagattctctatgagctgctgacccagcattggcacttaaagacccccaatctagttatttccgttaccggcggcgccaaaaactttgctcttaagccacgaatgcgcaaaatcttttcccgcctgatctatatcgcccaatctaaaggtgcttggattctgacagggggaactcactatggacttatgaaatacattggggaggttgtgagagataacaccatcagcaggtcttcagaagagaatatcgtggcaataggcatcgcagcttggggcatggtcagcaatagagacactctaatccgtaactgcgatgccgaggtgcctgtcgggcaggaggaggtttgttag

SEQ ID NO: 209244 - DNA, 2049 bp, synthetic construct
  misc_feature 1..2049: note = Description of Artificial Sequence: Synthetic coding sequence
  source 1..2049: mol_type = other DNA
atgcaggccatcaacaccagcatcaagaacaagatcccctgcgtggtggtcgaaggcagcggccagattgctgatgttatcgcttctctcgttgaggtagaggacgcactgacaagcagcgccgttaaggaaaagctggtgagatttcttcctcgaaccgtgtcccgactacccgaggaggaaaccgaaagttggataaagtggctgaaagagatcctcgaatgcagccacctactgaccgtcatcaagatggaggaagcaggggatgagatcgtaagtaatgccatctcttacgcattgtacaaagccttctcaacatcagagcaagataaggacaattggaacggccagttgaagctgctgctggagtggaatcagttggatctggctaacgacgaaatttttacaaatgatagacgatgggaatcagctgacctgcaggaggtgatgtttacagcactgatcaaggataggcccaagtttgtgcgcctattccttgagaacggacttaatctacgcaagttcctgacccatgacgtgctcacagaactgttttcgaaccacttcagtacactagtgtatcggaatttacaaattgctaagaactcatacaacgacgcactgctgacgttcgtgtggaagcttgtggcaaattttaggcggggattcaggaaggaagaccgtaacggtcgggacgaaatggacattgagttacatgacgtctctccaattacacgtcacccactccaggctctcttcatctgggctatccttcaaaacaaaaaggagctgtctaaggtgatctgggagcaaacgagagggtgcaccctcgcagcacttggggcatctaagctgctcaaaactctggccaaggtcaaaaatgatatcaatgccgcgggcgaatctgaggaacttgctaacgaatacgagaccagggctgttgagctgttcacagagtgctactcttctgacgaagaccttgccgagcagcttctcgtctattcttgcgaggcatgggggggtagcaattgtttggagctggctgtcgaggctaccgaccagcatttcatagcccagcctggcgttcagtggtatgttaatggcgtcaactatttcaccgatctgtggaacgtgatggatactctgggtctcttttattttatagccggaattgtattcaggctgcatagttccaacaaatcctcattatactcagggagagtaattttctgccttgactacattatctttacattgagattgattcacatttttaccgttagcaggaacctgggacctaaaattattatgctgcagcgaatgctgatcgatgtcttcttcttcctgttcctgttcgcggtgtggatggtggcctttggcgtcgctcgccaaggaatccttaggcagaatgagcagcggtggcgctggatatttcgatccgtgatttatgaaccctacctagccatgttcgggcaggtgccctccgacgtagacgggaccacatacgatttcgctcactgtaccttcaccgggaatgaaagcaagccactttgtgtcgaactggatgagcacaacctgccacggtttcccgaatggatcactatcccactcgtctgcatctatatgctgagtacaaacatcctactagttaacctgctagtcgccatgtttggctacacggtcggaaccgtccaggaaaacaacgaccaggtttggaaatttcaacgctactttctagtgcaagagtattgctctagactcaacattccattcccctttatagtgttcgcctacttctatatggtggtgaagaagtgtttcaagtgttgttgtaaggagaaaaatatggaaagctccgtttgctgttttaagaatgaggataacgagaccctagcatgggaaggtgttatgaaagaaaactatctcgtcaagataaacacaaaggctaacgatacgtctgaggaaatgaggcatcggttccggcagctggatacgaaactcaatgacttgaagggactgttgaaggaaatagctaataagatcaaatag

SEQ ID NO: 209245 - DNA, 2514 bp, synthetic construct
  misc_feature 1..2514: note = Description of Artificial Sequence: Synthetic coding sequence
  source 1..2514: mol_type = other DNA
atggagaccctgacccccggccacctgcagcccagccccagcagcccgagaccacgcgctgcccccggctccttgggtagggtgacaaggcgccgactctccagatggatcgccctcacccgtaaagtgtcttggacacctgccaggccctctcagtcagccctattgtcacctagccgaggacaggaaacagctccccctgtcccaggctgttgtcctcgcacactctctcccccagcacctaggcggccctccgggtctatgattgccggtgtttcactgaagccactgctcaggatcacggcccgaatttggcgcgcatgctgctcaagttgcagaagagctcggagcacttcacaaactacctcatctaaggtggcacctgcgctgggttctggccgggcgccagctcttgcctgcccagaccctcccctctgcctctccgatccagagacggggaaaacttgtctcctcaaagccatgttgaatctccatgatggccagaacacaacgatcccacttctgctggagattgctaggcaaactgacagtctgaaggaactggtcaatgcctcctatactgactcttactataaaggccagactgctttgcacatcgctattgaaagaagaaacatggccctcgttaccctccttgtggagaatggcgccgatgtccaagcagctgctcacggcgatttctttaagaaaactaaggggagaccaggtttttactttggagagctccccttgtccctagcagcctgtaccaaccagcttggcatcgtgaaattcttattgcagaattcctggcaaacagctgacatcagtgcgcgcgattccgttggaaacactgtactgcatgccctcgtggaagtggctgataacaccgcggacaataccaaatttgtgacgtctatgtataatgaaattctaatgcttggtgccaaactgcatccaaccttaaagttggaggaactaacaaacaaaaaaggaatgacgcctctggctctcgctgctggtacaggcaaaatcggtgtacttgcgtacatcctgcagcgggaaattcaggaacccgaatgccgccatctgagccgaaaattcaccgagtgggcatatgggccagtgcattcaagcctatacgacctgagctgcatcgacacctgcgaaaagaattctgtgctggaagtcatcgcttactccagctctgagaccccgaatcgtcatgatatgctgctggtggaacccctgaaccgattactacaagataaatgggatcgattcgtgaagaggatcttttactttaattttcttgtttattgcctatacatgattatcttcacaatggcagcctattatcggccagtggacggactccccccatttaaaatggaaaaaacgggggattactttagggttaccggggaaatactgtctgtcctcggcggtgtgtacttcttctttaggggcatccagtactttcttcagcgccgcccatctatgaagaccctgtttgtggatagctatagcgagatgttgtttttcttacagtccctgtttatgctggccacagtggtgctttacttcagccatctcaaagaatatgtggcctccatggtgttcagcctggcactcggctggactaatatgctgtattatacacgcggtttccagcagatgggtatttatgccgtaatgatagagaagatgatcctgcgtgacctgtgtaggttcatgttcgtgtatatagtattcttgttcggcttctctacagctgttgtgacgctgatcgaggacgggaaaaacgactcactacctagcgagtcaaccagtcatcgttggcggggcccagcatgccgccccccagattccagttacaactcactatattctacatgcctggaactcttcaagttcactattgggatgggtgatcttgagttcactgagaattatgactttaaggccgttttcatcatactcctgctggcctacgtgatcctgacctatattctcctgcttaacatgcttattgcccttatgggggaaaccgtaaacaagattgcacaggagtccaagaatatttggaaactgcagcgggcaataaccattctcgataccgagaagtctttcctcaagtgcatgcggaaggctttccgatcgggaaaactgcttcaggtgggatatacacccgacggcaaggatgattatcgatggtgctttcgagtcgatgaagtgaactggacgacgtggaatacaaatgtgggcatcatcaacgaggacccaggaaactgtgagggcgtcaaacgtaccttgtccttttccttgcgctcctcacgggtaagcggacgtcattggaagaacttcgcactggtccccctgctgagggaggcgagtgcccgggacaggcagtccgctcagccagaggaggtgtacctgcggcagtttagcggcagcctcaagcccgaggacgccgaggtgtttaaatcaccggccgcttctggtgaaaagtag

SEQ ID NO: 209246 - DNA, 2340 bp, synthetic construct
  misc_feature 1..2340: note = Description of Artificial Sequence: Synthetic coding sequence
  source 1..2340: mol_type = other DNA
atgaagaagtggagcagcaccgacctgggcgccgccgccgaccccctgcagaaggatacctgtcctgatccattggacggagatcctaatagtcgcccaccaccagcaaaacctcaactgtccactgcgaaaagccgtacccggctatttgggaagggcgactcggaagaggcctttccagtggactgtccccatgaggagggtgaactggactcttgtccaactattaccgtttcccctgttattacaatacagcggccaggcgatgggccaactggcgcccgtctgctaagtcaggacagcgtggcggcatccaccgagaagacactgagactatacgatagacggtctatttttgaggcagtcgcccaaaacaattgtcaagacctggagtcattgttgctgttcttgcagaagtcaaaaaagcatctaacagacaatgagttcaaggaccctgagaccgggaagacttgtctactgaaggcaatgttgaacctccacgatgggcaaaacacaactatccccctgctgctggaaatcgctaggcaaaccgattctcttaaagaactggtcaacgcaagctacaccgattcttactataaaggacagacagccttgcatatagccattgagaggcggaatatggcattagtgactctactggtggaaaacggagccgacgttcaagcagccgcccacggcgactttttcaaaaaaactaaaggacgccccggattttatttcggggagcttcctctctcgttggctgcttgtaccaaccaattaggaatcgtgaaatttctgctgcaaaattcttggcagacggcagatattagcgctcgggactcggtcggaaacacagtgctgcacgctttagtggaggttgctgataacaccgctgataacaccaagtttgtgacgtcaatgtataacgagatcctgatgctgggagccaagctgcaccccaccttgaagctcgaagaactgaccaataagaaagggatgacccctcttgccctcgccgccggaacaggcaagattggaaatcgtcacgacatgctcctcgtggagcctctgaatagactcctgcaggacaagtgggataggtttgtgaagcgcatcttttactttaatttcctcgtgtattgcctgtacatgatcatttttaccatggccgcctattatcgccccgtcgatggcttgccgccttttaagatggaaaaaacaggggactatttccgagtaacaggcgagatactgtctgtgctgggaggggtctacttctttttccgggggatccaatacttcctacagcgcagacctagcatgaagacactttttgtggattcctacagcgagatgctgtttttcctacagagtctgttcatgctggctaccgtggtcctctatttttcccatctcaaagaatatgtggcaagcatggtcttttcgctggcactgggctggaccaacatgctgtactacacacgtggattccagcagatgggcatttatgcagtcatgatcgagaagatgattcttcgggatctctgccggtttatgtttgtctacattgtgttcctgttcggctttagtactgcagtggtgaccttgatagaggatggcaagaatgactcactgccttcagaatccaccagtcacagatggcgcggacctgcctgcaggcccccagacagttcctataacagtttgtactcaacatgtctcgaactgtttaagtttacgattggaatgggagatctggaattcactgagaactatgatttcaaggccgtctttattatcctgttgctcgcatacgtgattttgacttacatactgctgctcaacatgctaattgctttaatgggtgaaacagtcaacaaaatcgctcaagaatcgaaaaatatatggaagttgcagcgagccattactatcctggatacggaaaagagcttcctgaaatgtatgcggaaggctttccggtccgggaagcttctgcaggttggctatacccccgacgggaaagacgactaccggtggtgcttccgcgtggacgaggtgaactggacgacatggaatacgaacgtcggcatcattaatgaagaccctggcaactgcgagggtgtgaagcgcactctgtctttctcgctgcgctcaagccgcgtttctggccgacactggaaaaatttcgctctcgtgccattactgcgggaggctagcgccagggaccggcagtcagcacagccagaagaagtgtatctgcgacagttctctgggtccctaaaacccgaggacgcagaggtgtttaagtccccagcggcaagcggggagaaatag

SEQ ID NO: 209247 - DNA, 2520 bp, synthetic construct
  misc_feature 1..2520: note = Description of Artificial Sequence: Synthetic coding sequence
  source 1..2520: mol_type = other DNA
atgaagaagtggagcagcaccgacctgggcgccgccgccgaccccctgcaaaaggatacatgcccggaccccctggatggtgatcctaacagcagacccccccctgccaagccacagttatccaccgcaaagagccggactcggctgttcggaaaaggggactcagaggaggcctttcccgtggactgtccacatgaagaaggagagctggattcttgcccaacgataacagtgtcccctgttatcactattcaaagaccaggggacgggcccacgggcgcccgtctcctgagtcaagattccgtggccgccagtactgaaaaaactcttcgcctgtacgaccggcgtagcatctttgaggccgtggctcagaataactgtcaggacctcgagtcactcctgctctttcttcagaaaagtaaaaaacatctgactgataacgaatttaaagaccccgagacagggaaaacatgcctgctgaaggccatgttaaacttacacgatggccagaatactacaatccctctgctgctggagatcgcacgacagacagacagtctgaaggagctcgttaacgcttcctataccgactcctactacaagggacaaaccgctctgcacatcgccattgagaggcgaaacatggccctcgttactctcttggtggagaatggcgcagacgtgcaagcggccgcccacggagacttcttcaagaagaccaaaggaagacccggcttttattttggtgaactccccctgagtctcgcagcttgtacaaatcagcttggaatcgtcaaatttctcttacagaatagctggcagactgccgacataagcgcccgagattccgtcggaaatactgtcttgcacgcactggtggaggttgctgataacactgctgataatacgaagtttgtgacgtccatgtacaatgaaatcctgatgttgggcgcgaagttgcacccaaccttaaagttagaagaactgacaaacaaaaagggcatgactcctctggcccttgcggcagggacagggaaaataggtgtactcgcatatattctgcagagggaaattcaggaacctgaatgtcggcatctcagtaggaaattcactgaatgggcctacggccctgtgcacagctccctatacgacctgagctgtatcgacacatgtgagaagaattcagttctagaggtcattgcatactctagtagtgaaactccaaatcgccacgatatgctgcttgttgagcccttgaataggctgctccaagataagtgggaccgctttgtgaaacgcatcttttacttcaattttttggtctattgtctgtacatgatcatcttcacgatggccgcatattataggccggtggatgggctcccacccttcaagatggagaaaactggggactattttagagtcactggcgaaattttgagtgtattaggtggcgtatacttttttttccgaggaatccaatattttctgcagagaagaccctctatgaaaaccttgtttgttgattcctatagcgagatgttattcttccttcagtctttgtttatgctagcaactgtggtactgtacttttcccaccttaaggaatacgtcgcatctatggtgttcagccttgctctgggatggactaatatgctttactatacacgaggttttcagcagatgggaatctatgccgtaatgatcgaaaaaatgatcctcagagacctgtgcagattcatgttcgtttatattgtatttctttttggtttcagtaccgctgtcgtgacgttgattgaagatggcaagaatgactccttaccgagtgaatctacaagccatcgttggaggggacctgcctgccgcccgccagactcctcttataatagtctgtactccacgtgtctggaactctttaagtttaccatcggcatgggggacctggagtttacagaaaactacgacttcaaggccgtcttcattatcctgctgctcgcctacgtgatattaacctacatcctcctcctgaatatgctaatcgccctgatgggagagaccgtgaacaaaatagctcaggagtcgaagaatatctggaaattgcaacgtgcaatcacaattctggacactgagaaatcttttctgaagtgcatgaggaaggcctttcgcagtgggaagctcctccaggtcggctacactcctgacggcaaagacgattaccgatggtgctttcgagtggacgaggtgaactggacaacttggaacaccaatgtggggatcatcaatgaggatcctggcaactgcgaaggagtcaagcggacgctctcctttagtctccgcagtagcagggtaagtggcagacactggaaaaattttgctcttgtacccttactgcgtgaggcttcggcacgagataggcagtctgcgcagcccgaagaagtgtaccttcgtcagttctcaggatctttgaagcctgaggatgctgaagtatttaaatccccagcagcatccggcgagaaatag

SEQ ID NO: 209248 - DNA, 2520 bp, synthetic construct
  misc_feature 1..2520: note = Description of Artificial Sequence: Synthetic coding sequence
  source 1..2520: mol_type = other DNA
atgaagaagtggagcagcaccgacctgggcgccgccgccgaccccctgcaaaaggacacatgccctgaccccctggatggagaccccaacagtaggccccctcccgccaagccacagctttcaacggccaagagcagaactcgcctcttcgggaaaggcgatagcgaagaagcattccctgtggattgtccccacgaggagggggagttagatagttgccctactattaccgttagcccagtgattaccattcaaaggccaggagatggccccactggggccagactactaagccaggacagcgtggctgccagcacagagaagaccttgcgcctgtacgatcgccgatctattttcgaggctgtggctcaaaataactgccaggacctggagtcgctgctgctgttcctgcagaagtccaaaaagcacctcacggataatgaatttaaggatcccgagaccggtaagacctgtctactgaaagccatgctgaacttgcacgatggtcagaatacgaccattccattgttgctcgagattgcccgtcagacagacagcttgaaggaactggtgaatgccagctacacagattcatattataaagggcagaccgcacttcatatcgctatcgagagacgaaacatggctttagtcaccctcctggtggagaacggggcagacgtgcaggccgccgcccacggagacttttttaagaagaccaagggaaggcccggattctactttggggaactgccccttagtctcgccgcctgcacaaatcagctcggaatcgtgaaatttctcctacaaaatagttggcagacggccgatattagtgcccgtgattctgttggaaataccgtgctgcacgctcttgtggaggttgcagataatacagccgataatacaaagttcgttacaagcatgtacaatgagatcctcatgctcggtgcaaaattgcaccccacattaaagctcgaggagcttaccaataaaaaggggatgacaccacttgccctggccgctgggactggtaagattggggtcctcgcttacatactgcagcgcgagatacaggagccagagtgtagacacctcagccgtaagttcacagaatgggcctacggcccggtgcattctagcctgtatgacctgtcatgcatcgacacatgtgagaaaaattccgtactcgaagtgattgcttatagttcttcggaaacgccaaatcggcacgacatgctcctggtggaaccactcaaccgccttctgcaggataagtgggatcgcttcgtgaagcggattttctattttaatttcttagtgtactgtctgtacatgattatttttacaatggctgcctactacagacctgtagacggcctgccaccgttcaaaatggaaaaaaccggcgactacttccgcgtaactggcgagattctgtctgtcctcgggggagtttactttttcttcagggggatacaatatttcctgcagcgaagaccgagtatgaagactctcttcgttgatagttatagtgagatgctgtttttccttcagtccctgtttatgctagccactgtagtcctttacttcagccaccttaaggagtacgtggcatctatggtgttctccttggcactgggctggactaacatgctttattacacccggggattccagcagatgggcatctacgctgtgatgattgaaaaaatgatcttgcgggacctctgtaggttcatgttcgtgtacattgtgttcctgttcggattcagtacagcagtggtgacattaatagaggacggcaaaaacgacagtctgccttctgagagcacaagccatcggtggcgaggacctgcttgtagacctcctgactcaagctataatagcctttatagcacgtgtcttgagttgtttaaattcaccatcggcatgggcgatttggagtttacagagaattatgactttaaggctgtgttcattattctgcttctggcttacgtgatcttaacctacatcttactgcttaatatgcttatcgccctaatgggcgaaaccgttaataaaatcgcacaggaaagcaagaatatctggaagctgcagagagcgatcactattctggacaccgagaaatccttcctcaaatgcatgcgcaaggcttttcgcagtggcaaactattgcaggtcgggtatacgcccgacggcaaggatgattatcgctggtgctttcgggtagacgaggtcaattggactacgtggaacactaacgttggaatcatcaacgaggaccccgggaactgtgaaggcgtgaaacgaacactctccttcagcttgaggtcgtctcgggtgagtggaagacactggaagaattttgctctggttcctttactccgggaggccagtgcccgcgacaggcagtcagcacagccggaagaagtgtatctgcgacaattcagcgggagtctgaagcccgaggatgcagaagtgtttaaatccccggccgcaagcggagagaaatag

SEQ ID NO: 209249 - DNA, 2553 bp, synthetic construct
  misc_feature 1..2553: note = Description of Artificial Sequence: Synthetic coding sequence
  source 1..2553: mol_type = other DNA
atgaagaagtggagcagcaccgacctgggcgccgccgccgaccccctgcagaaagatacctgccctgacccactggatggcgatcccaattccagacctccccctgcaaagccccaactgagcaccgctaaatcaaggaccaggctcttcggaaaaggagacagcgaagaggcctttcccgtggactgcccacacgaggaaggggagctggactcctgcccaactattacagtgtcgcccgtgataactattcaacgcccaggagacggccctactggggcccgcttactctcccaggattcagtagccgcaagcaccgagaaaactctacggttgtacgaccgacggagtattttcgaagccgtcgcccagaataattgccaagacctcgaaagcttgctactgttcctgcaaaagtcgaaaaaacatctcactgacaatgagtttaaagaccctgaaacaggaaaaacatgcctcttgaaagccatgctgaacctgcatgacggacagaacacaaccatcccattgctgcttgagatagctagacagacagactccctcaaggagcttgtcaacgcatcttatacagattcttactacaagggtcagacagcactgcatatcgccatcgaacgtagaaatatggcactggtaaccctcctcgtggagaatggcgccgatgtgcaggccgccgctcatggcgacttttttaagaagactaagggccggccaggattttatttcggagagctgccactgagtttagccgcgtgcaccaatcagttagggatagtcaagtttttactgcagaatagctggcaaaccgctgacatttctgctcgagacagcgtgggaaataccgtattacatgcgctggtggaagtggctgataatacggccgacaatacgaagttcgtgacttccatgtataatgaaatcctgatgctcggagcgaagctccacccgacgttaaagcttgaggagctgaccaataaaaagggtatgactccactagcattagctgcaggcactgggaagataggggtgatcgaaaacggaccccctctgagtttcatggtcctagcttacatactccaaagagaaattcaggagccagagtgtagacacctctctcggaaatttactgaatgggcttacggtcccgttcacagcagcctatacgacctgtcttgtatcgacacgtgcgagaagaacagcgttctagaggttatagcatattcttcctcggagacaccaaaccgtcacgacatgcttctcgtggaacccctgaaccggctactccaggataagtgggatagattcgttaagaggatcttttacttcaacttcctcgtctattgtctctatatgataatctttacaatggccgcttactataggccggtggatgggctacccccctttaagatggaaaaaacgggagactacttccgcgttacgggcgagatactgtcagtgctgggcggcgtgtattttttcttccgcgggatccagtatttcttgcaacgaaggcccagcatgaagaccttgttcgtcgattcctattcagaaatgctcttcttcctgcagtctttattcatgcttgcaactgtggttctctacttctcccatttgaaggagtatgtagcatccatggtgttttctcttgcactgggctggactaatatgctctactacactaggggattccagcaaatggggatctacgccgtcatgattgagaagatgattctccgagacctgtgtagattcatgttcgtctatatcgtgttcctgttcgggttcagcaccgccgttgtgactcttatcgaggacgggaagaacgattctctgcctagcgagagtactagccatcgatggcggggccccgcttgccgcccgccagactccagctataacagcctctacagtacctgtctggagctgtttaagtttacaattggaatgggagacttagagttcactgagaattacgatttcaaggcagtgttcattatactcctacttgcttacgtgatcctgacttacatccttctactgaacatgctgatcgcccttatgggcgagactgtgaacaagatcgcgcaggagagcaagaatatttggaagctgcagcgcgctataactatcctcgacactgaaaaaagctttctcaagtgcatgcgcaaagcttttcgctctggtaagcttctccaggtcgggtatacgcccgatggcaaggacgattaccggtggtgctttagggtggacgaggtcaactggacgacctggaacaccaatgtcggaatcattaatgaggacccgggaaattgtgagggcgttaaacgaacactctctttctcactccgatcgtcccgggtgtcaggcaggcattggaagaacttcgccctagtgcctctgctcagagaagcctccgcacgcgatagacaatccgcccagcccgaggaagtctacctacggcagttctctggttcactgaagccagaagatgcagaggtcttcaagtctcccgctgcctctggagagaagtag

SEQ ID NO: 209250 - DNA, 2295 bp, synthetic construct
  misc_feature 1..2295: note = Description of Artificial Sequence: Synthetic coding sequence
  source 1..2295: mol_type = other DNA
atgaccagccccagcagcagccccgtgttccggctggagaccctggacggtgggcaagaagatgggtcagaggcagaccgtgggaaacttgatttcggttccgggctacctcctatggaaagccagttccagggtgaggacagaaagttcgcccctcagatccgcgtcaatttgaattaccgaaaaggcacaggcgctagccaacctgatcccaaccgattcgacagggaccgactgttcaacgctgtgtcacgtggcgtaccagaagacttggccggcctcccagaatacttgtctaagacttccaaatatctaaccgactcggaatataccgagggttctacaggaaaaacctgtcttatgaaagctgttcttaatttgaaggatggcgtaaatgcttgtattctgcctctactgcaaattgaccgcgattcggggaacccgcaaccattagtaaatgcccagtgcacagatgactattatagggggcactcagccctccacattgctatcgagaaaaggtccttacagtgtgtaaaattacttgtggaaaacggtgcgaatgtccacgctagggcatgtggaagattttttcagaaaggccaggggacatgtttctatttcggagaactccccttatccttggccgcatgtactaagcaatgggacgtcgtgtcctacctcctcgaaaaccctcatcagcctgcctcattgcaggcaacagactcacagggaaatacggtgctgcatgccttagtgatgatctcagacaatagtgcggagaatatcgccttggttaccagcatgtacgatggcctgcttcaggccggagcccgactttgtcctacagtgcagctcgaagatatccgaaacttgcaagatttaaccccactaaagctcgctgccaaggaaggcaagatagagattttccggcacatactccagcgggaatttagcgggttgagtcatctctctagaaagttcacggaatggtgctatggccctgtgcgtgtcagtctttatgatctcgcttcagtggacagctgtgaagaaaactctgtgctggagatcatcgcgttccactgcaagtccccgcatcggcaccgcatggtggttctcgagccactcaacaaactgctccaggccaaatgggacctcctgatccctaaattcttccttaactttctgtgcaaccttatttacatgtttatttttacagccgtagcgtatcaccagcccaccttgaagaaacaggccgctcctcatttgaaagccgaggtagggaactcaatgctgttgacgggccatatcctgattctgctgggggggatctatctgctggttggtcaactgtggtacttttggagaaggcacgtcttcatttggatcagtttcatagactcatatttcgagatactcttcttattccaagccctgctcaccgtggtctcccaggtgttgtgtttcttagctatcgaatggtacctccctctgctcgtcagtgcactggttcttgggtggttgaacctcctttactacacgaggggatttcagcacaccggaatttattccgtaatgatacagaaggtaattctaagagatctgttacgcttcttactgatttatctagtattcttgtttggcttcgctgtcgctttggtcagtttgtcacaggaggcatggcggcctgaagcccccaccggccccaatgcaacggaatcggttcaacctatggaaggccaggaggacgaagggaatggggcccagtaccggggtattctggaggcctccctcgaactcttcaagtttaccattggtatgggcgagttggccttccaggagcagcttcatttccggggcatggttctcttgctgcttctggcctatgttttgttgacatacatcctcctactaaacatgctgatcgcccttatgagcgaaacagtaaacagtgtggcaactgactcttggtccatatggaagctgcaaaaagccatcagcgttctcgaaatggagaacgggtactggtggtgtcgcaaaaagcagcgcgcgggagtcatgctgactgtggggaccaagccagatggcagtccagacgaacggtggtgcttccgagttgaggaggtcaactgggctagctgggaacagacgttacctacactatgcgaagatccaagtggagccggtgtgcccagaacactggaaaatcctgtacttgccagcccccccaaagaggacgaagacggcgcctccgaagaaaactacgtccccgtgcagctcctccagtcgaactag

SEQ ID NO: 209251 - DNA, 801 bp, synthetic construct
  misc_feature 1..801: note = Description of Artificial Sequence: Synthetic coding sequence
  source 1..801: mol_type = other DNA
tgagacttcagcctgggcgtgcccagctggtggtgcctgatctgcttcaatatcggtccctccgtaggcccatctcagcccgatccaaaccgttttgaccgggatcggctgtttaacgcagtgagtcgaggcgtgcctgaagatttggcgggtttgccagagtacctgtccaagacctccaagtacttaactgattcagagtacaccgaaggcagcacaggaaaaacttgcctgatgaaagcggtattgaacttgaaggacggcgtcaacgcttgcatccttccactgctgcagatcgatcgcgacagcggaaacccacagccattagtcaacgcccagtgcactgacgactattatcggggtcatagcgccctgcacattgctatcgagaagaggtcactccagtgtgtaaagttgctcgtggaaaacggcgctaacgttcacgcgagagcctgtggtaggtttttccagaaaggccagggcacttgtttttacttcggagagctgccactttccttggctgcttgcactaagcagtgggatgttgtttcgtacctgctcgaaaacccccatcagccagcttcacttcaggcaacagactcccagggcaacaccgttctccacgccttagtgatgatttcggacaattctgccgagaacattgctctagtaactagcatgtacgatggtctactccaagccggtgcgcgcctgtgccctaccgtccaactggaggatattcggaacctccaggatctcacgcctctgaaactggccgccaaggagggcaaaatcgaatag

SEQ ID NO: 209252 - DNA, 2373 bp, synthetic construct
  misc_feature 1..2373: note = Description of Artificial Sequence: Synthetic coding sequence
  source 1..2373: mol_type = other DNA
atgaaggcccaccccaaggagatggtgcccctgatgggcaagcgggtggcagctcctagtggaaatcccgccatactccccgaaaagcgtcccgctgagattacccccacaaagaagagcgcccacttcttcctggagatcgaaggcttcgaacctaacccgacagtggctaaaacatcacctcccgtcttctcaaagcccatggactccaatattcgccagtgcatcagcgggaattgcgacgacatggattcaccacagtccccacaggacgacgtgaccgaaacccctagcaatccgaacagtccatccgcacagttggccaaagaggagcagaggcggaagaagcgacgcctgaagaaacggatcttcgcggcagtctcagagggttgcgtggaagaactggtagaactgttagtggagttgcaggagctatgtcgaagaagacatgatgaggacgttccagattttctgatgcacaagctaaccgcctcagacactgggaagacatgtcttatgaaagcccttctgaatattaatcccaacaccaaggaaattgtgagaatcctgctggccttcgccgaggaaaacgatattttgggacgattcattaatgcggagtacaccgaagaggcatacgaaggccaaacagcgttgaacattgccatcgaaagacgccagggtgacattgcagcacttctgattgccgcaggcgctgatgtgaacgcccacgctaagggcgcttttttcaatcctaaatatcaacatgaaggattttactttggcgagactcctctggcactcgctgcctgcacaaatcagccggaaattgtgcagctcctgatggagcacgagcagacagatattacgagtcgggatagtaggggcaacaacatcctgcatgccttagtgaccgtggctgaagacttcaagacccagaacgacttcgtcaaaaggatgtacgatatgattcttctcagaagtggcaattgggaacttgagacaacccgcaacaacgacgggctcacccctctgcagctagcagccaagatgggcaaggcagaaattctcaaatacattttgtcccgcgagatcaaggaaaagcggctgaggtcattatcacgtaaatttaccgactgggcttacggcccagtgagcagcagcctctatgatctaaccaatgttgacacaacaacggataactctgtgttggagatcactgtttataacacaaatatagacaaccgccatgaaatgcttactctggaacctctgcacacactgcttcatatgaaatggaaaaagttcgccaagcacatgttcttcctgagtttctgcttttactttttctacaacatcacactgaccctggtctcctattatagacccagagaggaggaggcaattccccatccccttgccctgactcacaaaatgggctggctgcagctactggggaggatgttcgtgctgatttgggcaatgtgtatttctgtaaaagaaggcatcgcgatttttctgctgagacctagtgatctgcaaagcatactgtctgatgcctggttccactttgtgtttttcatccaggccgtgttagtgatcctgagcgtcttcctgtatctctttgcctacaaagagtatctggcatgcctggtgctggccatggctcttggctgggctaacatgttatactacacccggggcttccagagcatgggaatgtacagtgtgatgatccaaaaggtgattctgcatgacgtgctgaaattcttgttcgtgtacatagttttcctcctggggttcggcgtggctctcgctagcctgatcgagaagtgtcctaaagacaacaaagattgctcaagctacggctctttttcagatgctgtcctcgagctattcaagctgacaatcggactcggagaccttaacatccagcagaacagcaaataccccattctgtttctattcctgctgattacctatgtgatcctgacattcgttctcctcttaaacatgctcattgcactcatgggggagaccgtcgaaaatgtgtctaaggaatccgagagaatctggcggctacagagagcgcgcactattctggaattcgagaaaatgctgccagaatggcttcggagccgttttcgaatgggtgagctgtgtaaggtggccgaggacgactttcgcttatgtcttaggataaacgaagtgaaatggactgagtggaagactcatgtctcttttctgaacgaggatccaggccccgtgcgaaggacagactttaataagatacaggactcctctcgcaataattctaagaccacccttaatgcttttgaagaggtcgaagagttccctgaaacctctgtgtag

SEQ ID NO: 209253 - DNA, 2376 bp, synthetic construct
  misc_feature 1..2376: note = Description of Artificial Sequence: Synthetic coding sequence
  source 1..2376: mol_type = other DNA
atgaaggcccaccccaaggagatggtgcccctgatgggcaagcgggtcgctgcaccctctggcaatcctgctattctacctgagaagcgccctgccgaaattacgcctaccaagaaatccgcccacttttttctggagatcgaggggtttgaaccaaaccctaccgtcgctaagacttcacctcctgtgttctccaaacctatggacagcaatattcgccagtgtatctctgggaactgcgatgacatggacagcccccaatcgccccaggacgatgtgactgagactccaagcaacccaaacagtccgtccgctcagcttgctaaggaagagcagagacgaaagaagcgccgcttgaagaaacgaatcttcgccgcagtgtccgaggggtgcgtagaagagttggtggagcttttagtagagcttcaggaactgtgtaggcgccggcatgacgaggatgtccctgacttcttgatgcacaaattgactgccagtgatacgggcaaaacgtgccttatgaaggccttactgaatataaaccctaatacaaaagaaatagtccggatacttcttgcctttgccgaagaaaatgatatcctcggacgattcattaacgcggagtacaccgaggaggcttatgaagggcagacagcattaaatattgcaatcgagagacgccagggcgacatcgccgcactgctgattgcagcaggcgccgatgtgaacgcccatgccaagggggctttcttcaacccgaaatatcaacacgaaggattctattttggcgagacacctcttgcgctggctgcctgtactaaccagccagaaattgtgcagttgctgatggaacatgaacagactgacatcacgagcagagatagccgaggcaataatattctgcatgccttggtaacagttgcggaggattttaagacacagaacgactttgtcaagaggatgtacgacatgatcttgttacgatccggaaattgggagcttgaaacgacccggaacaacgacgggctgacaccactccagcttgccgccaagatgggtaaggctgaaattctgaagtatatcctttcccgcgaaataaaagaaaagaggcttcggtctcttagccgcaagtttaccgactgggcctacggacctgtctcttcgtcactgtatgacctgaccaacgtcgataccacgaccgataacagcgttctggagattacagtatataacaccaatatcgacaataggcatgaaatgcttaccctggagcccctgcataccctactgcacatgaagtggaaaaagttcgcaaaacatatgttttttttatcattctgcttctactttttctataacatcaccctcacactggtatcctactatagaccgagggaggaagaggccatcccccaccctctcgctctcacacacaaaatggggtggctgcagctcttgggcaggatgttcgttctcatctgggctatgtgcatctccgtaaaagagggtattgccatattcttgctacggccaagcgatctccaatccattctgtccgacgcttggtttcacttcgtcttcttcattcaggctgtgctggtaattctgagtgtgtttctgtacctctttgcttacaaggaatatttagcatgcctggtattggcaatggctctaggctgggccaatatgctgtactatactagaggttttcaaagtatgggcatgtactccgtgatgattcagaaagttattctgcacgacgttctaaaattcctattcgtctacatcgtgtttttacttggcttcggggtggcactcgcgagcttgatcgagaagtgccctaaagataacaaggactgctctagttacggttcgttcagcgacgccgtgttagagctatttaagctaactattggcctgggcgaccttaatatccagcagaactcaaagtatcccattctgttcctgtttcttctcatcacctatgtcattcttacgttcgttctactgctgaatatgttaattgcactgatgggggaaacggtcgagaatgtaagcaaagagtccgagcggatctggaggctgcagcgagcccgcaccattttagagttcgaaaagatgctgcccgaatggctcagaagtaggttcaggatgggcgaactatgcaaggtagccgaggatgacttccgcctatgtctccgtatcaatgaggtgaaatggacggagtggaagacacacgtctccttcctgaacgaggacccaggacctgtccgcaggactgctgattttaataaaatacaggactcctcaagaaacaatagcaagacaacactcaatgcatttgaggaagttgaagagttccccgagactagtgtatag

SEQ ID NO: 209254 - DNA, 2328 bp, synthetic construct
  misc_feature 1..2328: note = Description of Artificial Sequence: Synthetic coding sequence
  source 1..2328: mol_type = other DNA
atgagccaccacacctggcccagccccgccctgaacctggacttcgccacgtacctcttacgcgatttgggtgctcattttttcctggagatagagggcttcgagcccaatcctaccgttgcaaaaacgagccccccagtttttagtaagcctatggacagcaacatccgtcaatgcatttctggaaattgcgacgatatggattccccgcagtccccccaggacgacgtaactgagacaccatctaatccgaactctccgtccgcacaattggccaaggaggaacagcgcaggaaaaaacgacggctgaagaagcggatcttcgctgcagtgtccgaaggatgcgtagaggagctagtcgaattacttgttgaattacaagagctgtgccggcgccgacatgacgaagatgtcccagactttctgatgcacaagctcacagcttctgacacaggaaaaacctgccttatgaaagccctcctgaacattaacccaaacaccaaagagattgtgcggatccttctggcttttgctgaggagaacgatatattagggagattcattaatgcggagtacactgaggaagcctacgagggtcagactgcactcaatatcgctattgagcggcgacagggtgacatcgctgctctgctgatcgcagcaggcgctgacgtcaacgcccacgctaaaggcgctttcttcaaccctaagtaccagcatgagggcttttactttggagagactcctctagccctggccgcttgcacaaatcagccagaaattgtccagttgctgatggagcacgagcagacagatatcacatcaagggacagtcgagggaataatatactccacgcccttgtcactgttgcagaagactttaaaactcaaaacgatttcgtgaagagaatgtatgatatgatcctcctgcgctctggaaattgggagctggaaacgacacggaataatgatggcttgaccccactccaattggctgctaagatggggaaggccgagattctaaagtatattttgtcccgggagatcaaggagaagcgccttcgctccctgagtcgtaaatttaccgactgggcatacggacctgtctctagctctctttacgacttaaccaacgtagacaccaccacagataacagcgtcctggaaattacagtttacaacaccaacatcgacaatcggcacgagatgctgacgttggaacctctccatacccttctgcacatgaagtggaaaaaatttgctaagcacatgtttttcctgagcttttgcttctattttttttataacatcacattaacactcgtaagttactacaggccaagggaggaagaagccatacctcacccactggcactgacacataagatgggatggctgcaattgctgggaagaatgtttgttctgatatgggccatgtgtatctctgtgaaggaaggcatcgccatattcctgttgcggccctcagacctccagagcatcctgtctgatgcgtggttccattttgtcttcttcatccaggctgtcctcgtcatcctaagcgtctttctatacctttttgcctacaaggagtatttggcctgtttggtgctggcgatggcattgggctgggcaaacatgctttactataccagaggcttccagagtatggggatgtattccgtgatgattcagaaggtgattctgcacgacgtgctcaagttcctcttcgtgtacattgtctttttactcggatttggtgtggcattggccagcctcattgaaaaatgcccgaaagacaataaggactgctcctcctacggaagcttttctgacgcggtcctggaactattcaaactcacaattgggctcggggacctcaacatacagcagaactcgaaataccccatcctttttttattcttgctgattacttacgttattcttactttcgtgttgctgcttaacatgcttatcgccctgatgggcgagacagttgagaacgtgtccaaggaaagcgagagaatatggaggctacaacgtgcacggacaatactagagttcgaaaagatgctgccagagtggctgcgcagccgttttcgtatgggagagctgtgtaaggtggcagaggatgatttccgactgtgtcttaggatcaatgaagtaaagtggaccgagtggaagacacatgtcagttttctcaatgaggatcctgggcccgtcaggagaaccgcagacttcaacaaaattcaggacagcagtcgcaacaattcaaagactacattaaatgctttcgaagaggttgaagaattcccagagacatcagtgtag

SEQ ID NO: 209255 - DNA, 2616 bp, synthetic construct
  misc_feature 1..2616: note = Description of Artificial Sequence: Synthetic coding sequence
  source 1..2616: mol_type = other DNA
atggccgacagcagcgagggcccccgggccggccccggcgaggtggccgagttaccaggggacgagagcggcacgccgggaggcgaagcgttcccgctgtcctcattagccaatctcttcgaaggcgaagacggtagcctgtcaccgtcaccagcagatgcgtcccgaccagctggcccaggcgacggcagaccaaatctacgcatgaagttccagggagcctttcgaaagggcgttccaaaccctattgatctactggagtctaccctttatgaatcttctgtggtgccgggtcctaaaaaggcacctatggacagtctcttcgactacgggacctaccgacaccactctagcgacaataagcggtggagaaaaaaaatcatagaaaaacagcctcagagtccaaaggccccagctcctcaaccacctcctatcctgaaggtgtttaatagacccattctgtttgacatcgtctcccgtgggtctaccgccgatcttgacggtctgttgcccttcttgcttacccacaagaaacgtctcacagacgaggagtttcgagagccatctacaggaaaaacctgtctacctaaggccctgcttaacttgtcaaatggtcggaatgataccatcccagtgctgctcgacattgctgagcggacaggtaacatgagggagttcattaacagtcccttccgtgatatctattacagggggcagactgccctgcatattgccatagagagaaggtgcaagcactacgttgaactattagtggctcagggtgcagatgtgcacgcccaggctagagggcgattttttcaacctaaggatgagggtggctacttctactttggggagctccctcttagcctagccgcctgtaccaatcagccccatattgtgaattatttgacagagaatcctcacaaaaaagccgacatgcggaggcaagattcgcgtggaaatacggttctccatgctctggtggctattgctgataatacaagggagaacaccaagtttgtgactaagatgtacgacctgctgctgttgaagtgcgccaggttgttccccgactctaatctggaggctgttctgaacaacgacggcctgtcacctcttatgatggctgccaagaccggcaagattgggatattccaacatatcattcgacgcgaagttacagatgaggatactaggcacctctctcgtaaattcaaggactgggcttatggccccgtttatagtagcctgtacgacctgtcctcactcgatacatgcggggaggaggcgagcgtcctggaaattctggtctacaacagtaagatcgaaaacagacacgagatgctggctgtcgaacccattaacgaattactgagggataaatggcgaaaatttggcgccgtgagcttttacatcaacgtggtgtcgtatttgtgcgccatggtcatctttaccctgactgcgtactaccagccactcgagggcacccccccatacccttaccgaactactgtggactaccttagattggctggggaggtgattaccctgttcaccggtgtgctgtttttcttcaccaacattaaggatctgtttatgaaaaagtgccctggcgtgaatagcctctttatagatggaagctttcagctgttgtattttatttatagcgtgttggtgatagtgagcgccgcactgtatcttgctgggattgaggcataccttgcagtgatggtgtttgccctagtccttggctggatgaacgctctctacttcacaaggggacttaagctgactgggacgtactccatcatgattcagaaaatcctgtttaaggatttattccgcttcctgctggtgtacctgttgtttatgattggctacgcatccgcactggtgtcgctgctcaacccatgcgccaatatgaaggtgtgcaatgaagatcagacgaattgcaccgtgccaacgtacccctcctgcagggattctgagacattctctacattcctgctggacctgttcaagttgaccattggaatgggcgatctggagatgctgtcctcaacgaagtatcctgttgtcttcattattcttcttgttacttacatcatacttaccttcgtactcctgctcaacatgctgattgctcttatgggagaaactgtcggtcaggtaagtaaggagtctaagcacatctggaaactgcagtgggccacaaccatcctcgacatagaacgctccttcccggtgtttctgagaaaagcttttcgatccggggaaatggttaccgtcgggaagagcagcgacggtactccggacagaagatggtgctttagggttgacgaggttaattggagccactggaaccagaacttggggattattaacgaagaccccggaaagaatgagacctaccaatattacggattctcccacacggttggccggctgaggagagaccggtggtcatccgttgtgccacgggtggtcgagctgaacaagaattctaaccccgatgaagttgtcgtgcctttagacagcatgggaaaccccagatgtgatggacatcaacagggatatcccaggaaatggcgaactgacgatgcgcccttatag

SEQ ID NO: 209256 - DNA, 2436 bp, synthetic construct
  misc_feature 1..2436: note = Description of Artificial Sequence: Synthetic coding sequence
  source 1..2436: mol_type = other DNA
atggccgacagcagcgagggcccccgggccggccccggcgaggtggccgagctcccgggagacgaatctgggacccccgggggcgaagccttcccgctgtcctctctggcaaatcttttcgaaggtgaggacggctctctctcccccagtccagccgacgccagccgccccgctggtccaggggatggcagacctaacctgagaatgaagtttcagggcgcgtttcgaaagggggtaccaaacccgatagaccttctggaatcaactctttacgaatcctcagttgttcccgggcccaaaaaagcacctatggattcattgtttgattacggcacgtataggcaccattcttccgataacaagcgctggaggaagaagatcatcgagaaacaaccacaaagtcccaaagcacctgcccctcagcctcctcctatcctgaaagtctttaaccgacccatactgttcgatattgtgtcacgtgggagtaccgccgatctggacgggttgttaccttttctccttacccacaagaaacggcttaccgatgaagagtttcgtgagccttctaccgggaaaacttgtctccctaaggcacttcttaatctctctaatggccgtaacgatactatacctgtcttgctggatatcgccgagaggacaggaaatatgagggaattcataaactcgccattcagagacatctactatcgtggtcaaacggctttgcatattgccatcgagagacgttgtaagcattacgtcgagttgctggtggcgcaaggcgccgacgtgcacgctcaggctaggggacgcttttttcagcctaaagacgaaggcggatacttctactttggcgagctcccactctcactggcggcctgtaccaatcagccacatattgtcaattatttgacagagaaccctcataagaaggcggatatgcgcaggcaggactcacgtggaaatactgtccttcatgcactcgtcgcaatcgcagataatactagagagaatacaaaattcgtgaccaaaatgtacgacttactgctgctaaagtgtgcaagactgtttcccgattccaatctagaagcagtgctgaacaacgacggcctttcacccctcatgatggccgcaaaaacgggtaagattggcaacaggcacgagatgctcgcagtcgaaccgatcaacgagcttctgagggataagtggcggaagtttggcgccgtatctttctacattaatgttgtctcctatctgtgtgccatggttatatttaccctgactgcctattatcagcctctagagggcaccccgccgtacccatacaggactaccgtcgactatttgcgtctcgctggcgaggtaattaccttgtttaccggcgtgctgtttttctttactaacatcaaagatctcttcatgaaaaagtgccccggtgtcaatagtctgtttatcgacggttcctttcaattgctttacttcatctatagtgtgttggtgatcgtgtcagctgctttgtatctagcagggatcgaagcctacctcgcggtgatggtcttcgcattagtcttaggatggatgaacgctctctacttcactaggggcctgaagctcaccggaacctacagcattatgatccaaaaaattctgtttaaggatctcttccgcttcctgctggtctacttactgtttatgattggctatgcctcagccctggtatctttgctgaacccttgtgcgaatatgaaggtgtgtaacgaagaccagaccaattgcaccgtgcccacatatccttcttgccgagatagcgagaccttctcaacatttctgctagatctcttcaagctcactataggaatgggtgacctggagatgctgagctccacgaaatatcctgttgtgtttatcatactgctggtaacttacattatcttgacgtttgtgcttctccttaacatgttgatcgctctcatgggtgagaccgtgggtcaggtgagcaaagagagtaaacacatctggaaacttcaatgggccacaaccattctggatatcgagcgatctttccccgtgttcttgcgaaaagcctttcgatctggcgaaatggtgacagtcggcaaaagttcggatggcacaccagataggcgctggtgcttccgggtggacgaagttaactggtctcactggaatcagaatctaggtattattaacgaggatcctgggaagaatgagacctatcaatactatgggttcagtcacacagtcggccgcctgcggagagatcgttggtcgagtgttgtgcccagggtggtggagctgaataagaactctaatccagacgaagtggtggttccgttagattcaatgggaaaccctagatgcgacgggcatcagcagggctaccccagaaagtggcgcaccgacgatgctccattatag

SEQ ID NO: 209257 - DNA, 2475 bp, synthetic construct
  misc_feature 1..2475: note = Description of Artificial Sequence: Synthetic coding sequence
  source 1..2475: mol_type = other DNA
atggccgacagcagcgagggcccccgggccggccccggcgaggtggccgagctcccgggagacgagtctggtacaccaggtggcgaagcttttcctttgagctccttggcaaacctgtttgagggggaggacggatccctttctccctctccagccgatgcgagccggccagctggacctggtgacgggagaccaaatctcaggatgaagttccagggcgccttcagaaaaggggtgccaaatccaatagacctgctggagtctacactgtacgagtcgtcagtggtgccaggccccaaaaaggcacccatggacagcctgttcgactacggaacatacaggcatcacagcagcgacaacaagaggtggcgcaagaagataatcgaaaagcagcctcagtcccctaaagcccctgccccacagcccccgccaatcctgaaagtctttaatcgacctatcttatttgatattgtgtctcgcggatcaacagccgacctggacggtctgttgcctttcctgctgacacataaaaagcgcctgaccgatgaagaatttagagaaccttcgactgggaagacatgcctcccaaaagcgttactgaacctgtctaacggccgcaatgacaccattcccgtgctgctggacattgcggagaggaccggtaatatgcgcgaattcattaatagccccttcagggacatatactacagaggcgaactcccattgagcttagcagcctgcactaaccagccacacattgtcaactaccttacagagaatccacataagaaagcagatatgcggcgccaggattctcgaggcaatacggtcctgcatgctctggtggccatagctgacaatactagagaaaatactaaatttgtgaccaagatgtatgatctgttattgcttaaatgcgctcgactttttccggactcaaatctggaggctgtgctcaacaacgacgggctaagccctttgatgatggcagcaaaaacgggaaagatcggaatctttcagcacattattagaagggaggtgacagatgaggatacacgtcacctatcccggaagtttaaagactgggcttatggcccagtgtatagcagcttatacgatctgtcatcactggatacctgtggggaggaggcctcagttctggagatcctggtttacaacagcaaaatagaaaatcggcatgagatgctcgctgtagagcctatcaatgagcttctgcgcgacaagtggcggaagttcggcgctgtgagcttctacattaatgtcgtgtcttatctttgtgctatggttatttttaccctcacagcttactaccagcctctggagggcacgcccccatatccgtaccgaactacggtcgactacttacggctggcgggtgaagtaattactctgtttacaggcgtgctgttcttcttcactaacatcaaggacctcttcatgaagaaatgcccaggagtgaatagcttattcatcgatggatctttccaactgctatactttatttactccgtcttggttatcgttagcgccgctctctaccttgcaggaatcgaagcatatctggctgtaatggtctttgctctggtgctcggatggatgaacgcactctatttcaccagagggcttaagttaaccggtacatattcaattatgattcagaagattctgttcaaggacctgtttcggtttctgttggtctacctgctgtttatgataggatacgcgagtgcacttgtatctctgttgaacccatgcgcaaatatgaaggtgtgcaacgaggaccagacaaattgtacagtgccaacttaccccagctgtcgcgatagcgaaacattctcaacctttctcctcgatttattcaaactgaccataggaatgggtgatctggagatgttatcctcaaccaaatatcccgtggttttcatcatcctgcttgtcacctacattattctgacgttcgtgcttcttctgaatatgctgatcgcactaatgggtgaaacggtagggcaggtgtccaaagagagcaagcacatctggaagctccaatgggcaaccaccatcctggatatagaacggtccttccccgtatttctgcggaaggcattccgttccggcgaaatggtgactgtgggcaagtcctctgacgggacacctgaccggcggtggtgctttcgggtagatgaggttaactggtcccactggaaccaaaaccttgggattataaatgaagaccccggcaagaacgagacgtaccagtactacggattcagtcacaccgtgggtaggctgaggcgtgataggtggtcttccgttgttcctagggtggtggagcttaataagaacagtaatccagatgaggtggttgtgcccctggacagcatgggcaatccccggtgcgacgggcaccaacagggttacccgcgaaagtggagaacggacgatgcccctctatag

SEQ ID NO: 209258 - DNA, 2616 bp, synthetic construct
  misc_feature 1..2616: note = Description of Artificial Sequence: Synthetic coding sequence
  source 1..2616: mol_type = other DNA
atggccgacagcagcgagggcccccgggccggccccggcgaggtggctgaactaccaggagacgagtccgggacgcccggcggagaagccttccctctatcctctctagccaatctatttgagggagaagatgggagcctgagtcctagcccggccgacgcttcccgtccagccggaccgggggacggtcggccgaaccttcggatgaagtttcagggagccttccgcaaaggggtgccaaacccaattgatttgctggaatccactctgtacgagtccagcgtggtgccagggcctaagaaggctcccatggattctctgtttgactatggaacatatagacaccacagtagtgataacaagcgatggcggaagaagattatcgagaaacagccacaaagccctaaagcaccggcaccacagcccccacccatattgaaagtgttcaaccggcccatcctgttcgacattgttagccgaggcagcacggcagatttggacgggctactgccctttctactgacacacaagaagcggctcactgacgaggagtttcgcgagccctccaccggcaagacctgtctgcctaaagctctcttgaacctctcgaatggtcgtaacgacacgatacccgtgctgctagatatcgctgaacgcaccgggaatatgagggagttcattaacagcccattccgcgacatatactacagaggacagacagcacttcacatcgcgatcgaacgcagatgcaagcactacgtggagctgctcgtagcccagggcgccgacgtgcatgcccaggcgaggggcagatttttccaaccgaaggatgagggtggttacttctatttcggagagcttccccttagtctagctgcctgcacaaatcagccacatatcgtcaactatctcacagaaaatcctcataagaaagccgacatgcggaggcaggattcaagaggaaacacagtgttgcacgccttggtggcgattgccgacaatacaagggaaaataccaagttcgttactaaaatgtatgacttgctcctcctgaagtgcgcacggcttttccctgactcgaacctggaagcagtcttgaacaacgatggtctgtctccactgatgatggccgcgaaaaccgggaaaattggcatattccagcacattatccgaagagaagtgaccgatgaagacacccgacatctgtcaaggaaattcaaagactgggcctacggacccgtgtatagcagcctttatgacctatcttcgttggacacatgtggtgaggaagcatcagtgcttgagatcctggtgtacaactctaagattgaaaatagacatgaaatgcttgccgtggagcccatcaatgagctgcttagggacaaatggcggaaattcggcgcggtaagcttctacattaacgtcgtgagctatctgtgcgcgatggtgatctttacactgacggcctattaccagcctctagaaggcacccctccctatccatataggaccacggttgattacctgcggctggcaggagaggtgattacactttttacaggcgtactctttttcttcaccaacatcaaggatctgtttatgaaaaagtgccccggcgttaactccctgttcatagacggctctttccagctgctttactttatttacagcgtattagtgatcgttagcgcagccttatatttagcaggaattgaggcctacttggccgttatggtgttcgcgctggtattgggctggatgaatgctctgtatttcactcgtggtctgaaacttaccggcacgtactctattatgatccagaagattctttttaaggatttgttcagattcctcctcgtctacctacttttcatgattggctatgcaagcgccctggtttctctattgaatccctgtgccaatatgaaagtatgtaatgaagatcagacaaactgcacagtaccaacctacccaagttgcagagatagcgaaacgtttagcacctttctgctggacctctttaaactgacaatcgggatgggcgatctagaaatgttgtcctccactaagtacccagtggtgttcataattctgctcgtgacctatatcatattaaccttcgtgctgttactgaacatgcttatcgctttaatgggcgagacggtcggtcaggtctctaaggaatccaagcacatctggaagttgcagtgggcgaccactattctggacatcgagaggtcttttcccgtgttcctgcgcaaggcctttcgcagcggggagatggttactgtcggcaagagtagtgacgggaccccagatagaaggtggtgcttccgggtagatgaggtgaactggagccactggaatcaaaaccttggaataatcaacgaggatcccggtaagaatgagacctatcagtattacggattcagccacaccgtgggccggctaagaagggaccgctggagctcggtcgtgcctagggtggtggaactcaataagaatagcaatcccgacgaagtcgtggtgccactggattctatgggtaacccacgatgcgacggtcatcagcagggatacccaaggaagtggcggacggacgacgcacctctctag

SEQ ID NO: 209259 - DNA, 2514 bp, synthetic construct
  misc_feature 1..2514: note = Description of Artificial Sequence: Synthetic coding sequence
  source 1..2514: mol_type = other DNA
atggccgacagcagcgagggcccccgggccggccccggcgaggtggccgagctgccgggggatgagtcagggacacctggagacggccgacctaatctccgcatgaaatttcagggcgcctttaggaaaggcgtgcctaacccaatcgacctgctggagtccactctgtacgaaagttctgtggtgccggggcccaaaaaagccccaatggacagcctcttcgattatggtacatacagacatcattcgagtgataataaaagatggcgtaagaaaatcatcgagaaacaaccccagagccccaaagcccctgcgcctcagcccccccccatccttaaggtcttcaaccgcccaatcctcttcgacatcgtgtctcgaggctccactgcagacctggatgggctcctgccctttctgctcacccataaaaaaagactcactgacgaggaattcagagaacccagtactgggaaaacatgcctccccaaggctttactcaacttgagcaatggcaggaatgacacaataccagtgctcctggacattgccgagagaactggcaacatgagagagttcatcaacagcccatttcgcgatatatactatcgaggccagacggctttgcatatcgcaattgaacggcggtgtaaacattatgtagaactgctggttgcacaaggtgcggatgtgcatgctcaggctaggggcaggttttttcagcctaaagatgagggaggttatttttattttggtgagctgcccctgtctttggctgcatgcaccaaccaaccacacatcgtgaactatttgactgagaacccccataagaaagcggacatgcgccgccaggacagcaggggcaacacagtactgcacgcgcttgtggcgatagccgataataccagggaaaacaccaaattcgtgactaagatgtacgacttgctactcctcaaatgtgcacgcctgtttcctgactccaacttggaggccgttctcaacaacgacggactgtctccactgatgatggctgccaagacaggtaaaattggtattttccagcatattattaggcgggaggtgacagacgaggatacgaggcacctaagcagaaagttcaaggactgggcatacggcccagtctattcttcgctgtatgatctcagctcgctcgatacatgtggcgaagaagcgagcgttctcgagatccttgtgtataactccaaaatcgaaaaccggcacgagatgctcgccgttgagccaatcaatgaactgctgcgcgataaatggaggaagttcggagccgtctccttctatattaatgttgttagctatctgtgcgccatggtcattttcacgctgactgcatactatcagccattggagggaacccctccttatccataccggaccacagtggactatttacgattggctggtgaagtgatcaccctgttcaccggcgtgttattcttttttactaatatcaaggatctgttcatgaagaagtgtcccggcgtcaatagtctcttcatcgatggctcgttccaactactctattttatctacagcgtccttgttatcgtgtctgccgcactctaccttgccgggatcgaagcctatttagccgtgatggtcttcgcactcgtgctgggttggatgaacgctctgtacttcacccgtggcctgaagctgactggaacttattctattatgatacaaaagatactctttaaggatctcttcaggttcttgctggtgtatctccttttcatgataggttacgcatccgccctggtcagcctcctcaacccgtgtgccaacatgaaggtctgcaatgaagaccaaaccaattgcactgtgcctacgtacccatcctgtagggatagtgaaaccttcagcacttttcttcttgatttattcaagcttaccatcggcatgggcgacctcgaaatgctatcttccaccaagtatcctgtcgtgtttataatccttctcgtcacatacatcatactgaccttcgtcctcctgttgaacatgctgatcgcccttatgggggagaccgtgggccaggtgtcgaaggagtcgaaacatatctggaaactgcagtgggccaccactatcctcgatattgagagaagctttcctgtgtttctgaggaaggctttcaggagtggagagatggtgactgtagggaagtcctctgacggcacaccggataggaggtggtgcttccgagtcgatgaagtgaactggagccactggaatcagaatctgggcatcatcaacgaagaccctggtaaaaacgaaacataccagtattatggattctctcacaccgtaggccggctgcgcagagatcgctggagctcagtggttcccagagtggtcgaactgaataaaaattcaaatcccgacgaagtcgtggttcccctggattcaatgggaaatccgcggtgtgatggccatcaacagggatatcccagaaagtggaggaccgacgatgcacctctttag

SEQ ID NO: 209260 - DNA, 2436 bp, synthetic construct
  misc_feature 1..2436: note = Description of Artificial Sequence: Synthetic coding sequence
  source 1..2436: mol_type = other DNA
atggccgacagcagcgagggcccccgggccggccccggcgaggtggctgagttacctggcgacgaaagcggaaccccgggcggagaagccttcccccttagttctctggctaacctgtttgagggagaagatggaagtctctcaccatccccagcagacgcatctcggccagccgggcctggcgatggcaggcccaacctccggatgaaatttcagggcgctttcagaaagggagtgcctaacccgattgacctcctggaaagtactctatacgagtcatcagtggtgccaggcccgaaaaaggccccaatggatagtctgttcgattatggcacttatcggcaccattctagtgacaataagcgatggaggaagaagatcatagagaagcagccccagtccccaaaagcgcctgctccccagcccccaccaattttgaaggtgtttaatcgacctattttgttcgacattgtgtctcggggcagtacagccgacctcgacggcctactgccctttctgctcacgcacaagaaaagactgacagatgaagagttcagggaacctagtactgggaagacttgcttgccgaaggccctgctgaatctcagcaatggaaggaacgataccatacccgtcctgctggatatagccgaacgtacagggaacatgagggaatttataaattccccattccgggacatctattaccggggacagaccgcgctgcatatcgctatcgaacgaaggtgtaagcattacgtcgagttgctggtggcgcagggagcagacgtgcacgcccaggctagaggccgcttcttccaacccaaggatgagggaggatacttctacttcggcgagctgcccctgagtctggctgcctgtacaaaccagccccacatcgtcaactacctgacggaaaacccccacaagaaagctgacatgagacggcaggacagcaggggcaatactgtgctacacgccctcgtagctatagctgataatactagagagaacacaaaattcgtcactaagatgtacgacttgctcctgctcaagtgcgctcgactgtttcctgattctaatcttgaagccgtattgaataatgatggattgtctcccctcatgatggctgcaaaaacaggaaagattggtaatcggcacgaaatgttagctgtggagcccatcaatgagctgctgagggacaagtggcgaaaattcggtgccgtctccttctacattaatgttgtatcttacctctgtgcaatggtaattttcaccctcactgcttactaccaacccctggaaggtaccccaccctatccatatcgtacaacagtggactaccttagacttgcaggcgaggtcatcaccctctttacaggggttctgtttttcttcactaatataaaggatctgttcatgaaaaaatgtcccggggttaacagcctttttatagacggctcttttcagttactgtatttcatatacagtgtcttggtgatcgtgagcgccgcactgtatctggccgggatagaggcctatctggccgtgatggttttcgcattagtacttggctggatgaatgcactttacttcactcggggattgaaattgacaggaacatacagcattatgatccagaagatactctttaaggacctcttccgctttctcctcgtgtacctgttatttatgattgggtacgcatctgccctggtttcactactgaatccctgcgccaacatgaaggtgtgtaatgaggaccagactaactgtactgtgccaacgtacccatcatgtcgggattccgaaaccttcagcacttttctactggacttgtttaaactaaccattggaatgggcgatctcgagatgctctcaagtacaaaatatcctgtggtgttcatcattttactggtcacttacataattctgacattcgtcctgctcttaaatatgctaatcgccttaatgggggaaacagtggggcaggtatccaaggagtccaaacacatctggaagctgcagtgggcaacaacaatcttggatatcgagagatcatttccagtcttcctgagaaaggcctttcgaagcggggaaatggtgacagtcggcaagtcgagcgatgggactcctgatcggagatggtgctttcgggtagatgaggtcaactggtcgcattggaatcagaacctgggcattattaacgaagacccgggcaagaacgaaacctaccaatactacggctttagtcatactgtggggcggcttcgccgtgaccggtggtcttcggtcgtccctagggttgtagagctgaacaaaaatagcaaccctgacgaagttgtcgtgcccttggactcgatggggaacccaagatgtgatggccaccaacagggctatccgcgaaagtggaggaccgacgacgcccccctgtag

SEQ ID NO: 209261 - DNA, 2475 bp, synthetic construct
  misc_feature 1..2475: note = Description of Artificial Sequence: Synthetic coding sequence
  source 1..2475: mol_type = other DNA
atggccgacagcagcgagggcccccgggccggccccggcgaggtggctgaactgcctggggatgagagtggaaccccaggtggcgaggccttcccgctgtcgtcattggcgaacctgtttgagggggaagatggttccctgagtccttcaccagcagatgcctcccgccctgccgggccaggcgatgggcggccaaatttaagaatgaaatttcagggcgcctttcgtaagggggtgccaaatccaattgacttgcttgagagcaccttatacgagtcatcggttgtgccgggtcctaaaaaagcccccatggattccctgtttgattatgggacatacagacaccactcttcagataacaagaggtggagaaaaaagatcatagaaaagcagccgcagtcccccaaggcccccgcccctcagccaccccccatcttgaaggtctttaatcgccccatcctgttcgacatcgtgagtcgtggaagcacagccgacctcgatgggctattaccctttctgcttacgcataagaaacgtttgactgatgaagaattccgcgaaccttctacaggaaagacctgtctccccaaagccctgctgaacctgagcaatggccgtaacgacaccattcccgtactgctggatattgccgaacgaacaggcaacatgcgggagttcattaattcacctttccgcgacatctactaccggggagaactcccactgagtctggccgcctgcaccaaccagccacacattgtgaactacttaactgagaatccgcacaagaaggctgacatgcgtaggcaagactcccgtggaaataccgttctccacgcactggtcgctatcgctgataatacgcgggaaaacactaagttcgtaacaaaaatgtatgacctgctgctcttaaagtgcgcccgacttttcccagactcgaacttggaagctgtcctgaacaatgatggcctatctcctttgatgatggcagctaaaacaggaaaaatcgggatcttccagcacataataagacgcgaagttacagacgaggacacgagacaccttagtagaaagtttaaggactgggcatacggccctgtgtactcatctttgtatgacctgagttctctcgatacctgtggcgaggaagcatccgtgctcgaaatactcgtttataactccaagattgaaaatagacacgaaatgctagcagtggagcccattaatgaactactgagggataagtggagaaagtttggagcggtgagcttttatatcaatgtcgtctcttatctgtgtgctatggttatctttaccctaacagcttattaccagcctctagagggtacaccgccctatccgtataggaccactgtggattatctgaggctcgcaggggaagtcattactctttttaccggcgtactctttttcttcaccaatatcaaggacctgtttatgaaaaagtgtcctggtgtcaacagcttgtttatcgacgggtcatttcagctgctgtacttcatttactcagtactcgtgattgtctccgccgccctgtatctagccgggatcgaagcttatttagcggttatggtttttgctttggttctgggatggatgaatgcactctattttactcgaggcttaaagctcacaggcacctactctattatgatccagaagattttgtttaaggatctgtttagatttctactggtatatttattgttcatgataggctatgctagtgcactcgtgtccttactcaacccatgcgccaacatgaaagtttgcaatgaagatcagacaaactgtaccgtgccaacctaccccagctgtagggactctgagaccttctccacttttttgctagacttgttcaaattgacaatcggaatgggggatctggaaatgctgtcatcaacaaaataccccgtggtgttcattatcttgctcgtcacatacattatcttaacatttgtgcttctgctaaacatgctgatcgcgctgatgggcgagacagtcggtcaagttagtaaggagtccaaacatatttggaagctccagtgggccactacgattctggatattgagaggagtttcccggtgttcctcagaaaagctttcagaagcggtgaaatggttaccgtagggaagtcatccgacggtacccctgaccgccgctggtgtttcagagtagacgaggtaaattggtcccactggaaccagaacctgggtataatcaacgaagacccgggaaagaacgagacttaccaatactacggcttttctcacacggttggccgcttgagaagggaccgctggtctagtgttgtgccacgggttgtcgagctgaataaaaactcaaatcctgacgaggtcgtcgtgcctctggacagcatgggcaacccacggtgtgacgggcatcaacaagggtaccctcggaaatggagaactgatgacgcccccctgtag

SEQ ID NO: 209262 - DNA, 2295 bp, synthetic construct
  misc_feature 1..2295: note = Description of Artificial Sequence: Synthetic coding sequence
  source 1..2295: mol_type = other DNA
atggccgacagcagcgagggcccccgggccggccccggcgaggtggccgaactgcccggagacgagtctggtactccaggtggggaggcgttcccgctcagctctctggctaatctgtttgaaggagaggacggctccctgagccctagtccagcagatgctagccgcccggccggtccgggagatgggcgacctaacctgcgaatgaagtttcagggcgcctttcgaaaaggagtcccaaatcctatcgacctgctggaaagtaccctctatgaatcttcagtcgttcctggcccaaagaaagctcccatggatagcctattcgactatggcacctacaggcatcatagcagtgacaacaaacgctggaggaagaagatcatagagaaacagccgcagagtcctaaagcccccgctcctcaaccaccgcctatccttaaggtgtttaacagacctatactgttcgatatagtcagcagaggcagcacagccgacctggacggccttctcccctttctgctcacacacaagaagcggttaacagacgaggagtttcgcgagccctctacagggaagacctgtctgcccaaagcactcctgaatctgtctaatggtaggaacgatacaatcccagtgctgctggacatcgccgagaggaccggcaacatgagagaatttattaattccccatttcgtgacatttactaccgaggggaactgccactttccctggcagcttgtaccaatcagcctcacatcgtaaattaccttaccgaaaatccgcacaagaaggccgatatgagaagacaggactcaagaggcaacaccgtgctacacgctctggtggctattgccgacaatacacgagagaatactaaattcgtgaccaaaatgtacgacctccttctgcttaagtgtgccagattgttccccgactcaaacctggaggccgtccttaataatgatgggctcagcccccttatgatggctgcgaagacaggtaagattgggaaccgccatgagatgcttgcagtggagccaatcaatgagttacttcgcgataagtggagaaaatttggcgcggtctcattttacattaacgtggtgagttatctgtgcgctatggttatctttactctgacagcatactatcagcctctggaagggacaccaccctatccctacaggacaactgtggactacctccggctagccggtgaggtgatcaccctctttaccggcgtactctttttcttcacaaacataaaagatctgtttatgaagaaatgcccaggagtgaactctctctttattgacggaagctttcagcttctgtactttatctactctgtactcgtgattgtttctgccgccttatatctggctggcatcgaggcatatctcgccgtgatggttttcgctctagttctaggatggatgaacgctctttactttacgagagggctgaaattaacggggacatactccatcatgattcagaaaatactctttaaagacctgttccgcttcttgctggtgtatctgctgttcatgatcggctacgctagtgccttggtgtcactgcttaacccttgcgccaacatgaaagtctgtaatgaggatcagaccaactgtaccgtccctacttaccctagctgtcgggacagcgaaaccttcagcacattcctgctcgacctgttcaaacttacaattgggatgggagatcttgaaatgctttcttccaccaagtatccagtcgtattcataattctgttagtaacttacattatcctgactttcgttctgctcctgaatatgctgattgcactcatgggtgagacggtcggccaagtaagcaaggagagtaaacatatttggaaattgcagtgggccacgaccatactggacatcgagcggagctttcctgtctttctgaggaaagccttccgctccggagagatggtgacagtgggaaagagttcagacgggactccagacagacgctggtgcttccgggtcgatgaagtaaactggagccattggaatcagaacctcggcattatcaacgaggatcccggtaaaaacgagacctatcagtactatggtttctcacacactgtgggaagactgcggcgggatcgctggtcatctgtggtgcctagggtagtcgagctaaataaaaactcaaatcctgacgaggtcgtggtccccctcgactccatgggcaatcctagatgtgacggacaccagcaggggtaccccaggaaatggaggactgacgatgcccctctctag

SEQ ID NO: 209263 - DNA, 2190 bp, synthetic construct
  misc_feature 1..2190: note = Description of Artificial Sequence: Synthetic coding sequence
  source 1..2190: mol_type = other DNA
atgggcggcttcctgcccaaggccgagggccccggcagccagctgcagaagctgctgccctcgtttctggtgcgtgaacaggattgggatcaacatctggacaagctgcatatgcttcagcagaagagaattcttgaaagtcccctgctgcgggctagtaaggagaacgacctgagcgttctgcgtcaactgctgctcgattgcacctgtgacgttagacaacgcggcgccctcggcgagacagccctgcatattgccgccctgtatgacaacctggaagccgcccttgtgctgatggaagccgcccctgagcttgtgttcgaacccacaacttgtgaagctttcgcgggacagactgccctgcacattgccgtggtaaaccagaatgttaatctggtgagggccctcctgacccggagggcaagtgtgtcggcccgtgctaccggcacagcatttcggaggagcccaaggaatctaatctatttcggagagcatccattaagtttcgcagcatgcgtcaacagcgaggaaatcgtgaggctattgatcgagcacggggctgacatccgggctcaggactcactcgggaacacggttctgcatatacttattctgcagcctaataagacattcgcatgccagatgtacaatcttctcctgtcttatgacgggcatggggaccacctgcagcctctagatctggtgcctaatcaccaagggctcacgcccttcaaactggccggcgtcgaagggaatacagttatgttccagcatcttatgcaaaaacggcgccacattcagtggacatatggccccctgaccagtattctttatgatctcactgagatcgacagttggggagaagagctgtcctttctggaactggttgtgtcttctgacaagcgggaggctcgtcagatcctcgagcaaacaccagtcaaggaacttgtaagcttcaagtggaataagtatggtaggccatatttttgtatccttgcagccttatacctattgtacatgatatgttttaccacatgctgtgtctataggcccctaaagttccgcgggggcaacaggactcacagcagggacatcacgattctccagcagaaattgttgcaagaagcatacgaaacccgggaagacataatccggctagtgggagaactggtcagcattgtcggtgccgttattattttgctcttggaaatcccagatatttttcgcgtcggtgcatctcggtattttggaaaaaccatccttggcggacctttccacgttattatcataacctatgctagccttgtccttgtcactatggtgatgcgattgaccaacaccaacggcgaggtagttcctatgagctttgcattggtgctggggtggtgcagcgtgatgtatttcacgcgaggtttccagatgctggggcccttcaccatcatgattcagaagatgatttttggggacctgatgcgtttctgctggctgatggccgtggtaatactcggattcgctagcgccttttacattatctttcaaactgaggatccaacatcactaggacagttttatgattacccaatggctctctttacgacttttgaacttttcttgacggtaatcgacgcaccagccaattatgacgtggacctgccttttatgttctcaatcgtaaatttcgcatttgccataatcgctactttactgatgcttaacctgtttatagctatgatgggagacacccactggcgggtggcccaagagcgggatgagttgtggcgggcacaagtcgtggccaccaccgtgatgctagaacggaagctgccaagatgcttgtggccaagatctggtatatgcgggtgcgagtttgggctcggcgatagatggtttttgcgtgtggaaaatcataatgaccagaaccccctccgagtgcttcggtatgttgaagtttttaagaactctgataaagaggacgaccaggaacacccctctgaaaaacagcccagcggggccgagtcggggactcttgcccgtgctagcctcgccctgcctacgtcttccttgtcccgaacggcatcacagagctcctcccacagagggtgggaaatcctacgccagaacacactggggcatctgaatttagggctcaacctgtcagaaggagatggcgaagaagtgtaccatttttag

SEQ ID NO: 209264 - DNA, 1146 bp, synthetic construct
  misc_feature 1..1146: note = Description of Artificial Sequence: Synthetic coding sequence
  source 1..1146: mol_type = other DNA
atgggcggcttcctgcccaaggccgagggccccggcagccagctgcagaaactcctgcctagttttctcgtaagagaacaggactgggaccagcacctcgacaagctgcatatgcttcagcaaaaaaggatcctcgaaagtccgttgttaagggcttcaaaggagaacgacctgtctgtgctgagacagctattactcgactgcacttgcgatgtgagacaacgcggggctctgggggagacagccctgcacatagctgcactttatgacaatctggaggcagccctggtgcttatggaggccgcccccgaacttgtctttgaaccaaccacctgtgaagcatttgctggtcagacagctctgcacatcgcagttgtcaaccaaaacgtcaatttggtgcgggctcttctaacgagacgagcatccgttagcgcccgggcaacagggacagctttcaggcgctcccctaggaatctcatatattttggggaacaccccctgtcgtttgcagcatgtgtgaattcagaagagattgtgagattgttgatcgaacacggagcagatatccgcgctcaagactcactggggaatactgtactgcacattctgatactgcagcccaataagacatttgcatgccagatgtacaacctcctgctgagctacgatggacatggggaccatcttcaacccctggatctggtgccaaatcaccaaggcctgacacctttcaagttggctggcgtcgagggcaacacagttatgttccaacacctcatgcagaaaagacggcatatacagtggacttatggcccactcactagcattctctacgatctgacggagattgattcttggggggaggaactaagctttttggagctcgtcgtctcgtctgataagagggaagcacggcagatcctcgaacagactcctgtgaaggagcttgtgtccttcaagtggaacaaatatggcaggccgtatttctgcatactggccgccctgtatctgctttacatgatttgtttcactacatgttgcgtgtacaggccactgaaattcaggggcgggaacagaacacacagccgggacatcaccattctgcagcaaaagctgctccaggttatcctcctccgccgggggtag

SEQ ID NO: 209265 - DNA, 1674 bp, synthetic construct
  misc_feature 1..1674: note = Description of Artificial Sequence: Synthetic coding sequence
  source 1..1674: mol_type = other DNA
atgggcctgagcctgcccaaggagaagggcctgatcctgtgcctgtggtcaaaattttgtagatggttccaggactctttaggcaacacagtactgcatatcctcatcctccaaccgaataagacatttgcatgccagatgtacaacctgctcctgtcctatgataggcacggggatcacctgcagcctttggacctggtgccaaatcaccagggtctcacccccttcaagctggctggcgttgaaggaaacaccgtgatgttccaacatttaatgcagaaacgcaagcacacgcagtggacctacggccctctgacatcaaccctgtacgatcttaccgagattgacagtagcggagatgagcagagcttactggagctcattatcaccacaaaaaagagagaagccaggcagatcttagaccagactcccgtcaaagaactggtcagcctgaagtggaaacgctatggtaggccgtatttctgtatgcttggggccatttacttactttatattatctgcttcactatgtgctgtatatataggccgctcaaaccaaggaccaataatcgaacctcgcctcgcgataatacactcctgcagcagaagctgctccaggaggcctatatgacccctaaggacgatatccggctggtgggagaattggtaaccgtgataggggccatcattatacttcttgttgaggtacccgacatcttcaggatgggcgtcaccagattctttgggcagacgatactggggggccctttccacgtgctgatcatcacttatgcattcatggtgctggtgactatggtgatgagactcattagcgcaagcggcgaggtggtgcccatgtcattcgccctggtcctgggatggtgcaacgtgatgtattttgctcggggctttcagatgctcgggcccttcacaataatgattcagaagatgatattcggcgatctgatgcggttctgctggcttatggctgtcgtgatcctcggatttgcaagcgccttctatattatattccaaaccgaagaccccgaggaactgggccatttttacgattatcccatggcacttttctccacctttgagcttttcctgaccatcatcgatggccctgccaattacaacgttgatcttccttttatgtattcgatcacttacgccgccttcgcgatcatcgcaacactgctgatgctgaacctgctcatcgccatgatgggcgacactcattggcgagtggctcacgagagggatgagctgtggagggcccagatcgtggccaccacggtaatgctggaaaggaagctgccccggtgcctgtggcctagatccggcatctgcgggcgcgaatacggactaggtgaccggtggttcctcagagtggaagaccggcaggacctgaaccgccaaaggattcaaagatatgctcaggcttttcacacccggggaagtgaggacctggataaagattcggtggagaagctagagctggggtgtccgttctccccacatttgagcctcccaatgcctagcgttagtcggtcaacctctaggtcctctgctaattgggaacgactgcggcagggaaccctgcggagggacctgcggggcatcatcaatcgcggtctcgaggatggagagtcctgggagtatcagatctag

SEQ ID NO: 209266 - DNA, 2178 bp, synthetic construct
  misc_feature 1..2178: note = Description of Artificial Sequence: Synthetic coding sequence
  source 1..2178: mol_type = other DNA
atgggcctgagcctgcccaaggagaagggcctgatcctgtgcctgtggtccaagttctgtaggtggttccagcgccgcgaatcttgggcacaatcaagagacgaacaaaacctgctacagcagaaaaggatttgggaaagccccctcctcctggcagcaaaagacaacgatgtccaggccctcaataaactgctgaagtatgaagattgtaaagttcatcagcggggggcgatgggagagaccgccttgcatatcgcagccctgtatgataatctcgaagccgctatggtccttatggaagccgcacctgaacttgtcttcgaacccatgacaagtgaactctacgaaggccagaccgccctgcacatcgctgtggtcaaccagaatatgaacctggtacgggccttgcttgctcgcagggcctctgtgagtgcgagagccacaggcactgcgtttcgcaggtctccctgcaacttgatctacttcggagaacatcccctgtcattcgcagcgtgtgtgaactcagaggaaattgttcgtctcctgatagaacacggcgccgatatcagagcccaggatagtcttggaaatactgtgctgcacatcttgatccttcaaccgaataagacattcgcgtgtcagatgtataacctcttgctctcttatgatcgacatggcgatcacctgcagcctcttgacctcgttcccaatcatcagggtctgactccattcaaactcgccggcgtcgaggggaatactgtcatgtttcagcacctcatgcagaaacgaaaacacactcagtggacctacgggcccctgaccagtacactctacgatctgaccgagatagactccagcggagacgagcagtcgctccttgagctgatcatcactaccaaaaagagagaagcaagacaaatacttgaccagacaccagtcaaggaacttgtttcactgaaatggaagcggtatggcagaccatacttctgcatgctgggggccatttacctcctgtatatcatctgctttacgatgtgttgtatctaccggccactcaaaccccgcacaaacaaccggacaagccctagggataacactctcctgcagcagaagctcttgcaagaggcctacatgacccctaaagatgatatccggctcgttggggagctcgtgacagtcatcggggcaatcatcattctgctcgtcgaagttcccgatatcttccgtatgggcgtgacaaggtttttcggccaaactatcctcggaggtccattccatgtactcataatcacctatgcctttatggtgttggtgactatggttatgaggctgatcagtgcctctggagaggtcgttcctatgtcatttgccttggtgctgggctggtgcaacgttatgtacttcgctcggggattccagatgctggggccatttacgatcatgatccagaaaatgatctttggcgacctcatgcggttctgctggctcatggccgtggtcattcttggattcgcgagcgccttttacataatcttccagaccgaggatccggaagagctcgggcatttctatgactaccctatggcattattctcaacattcgaattgttccttaccatcattgatggcccggcaaattacaatgtggatctccctttcatgtattcaataacctacgcggctttcgcgattattgcgactcttctcatgctgaacctcttgattgcaatgatgggcgacacacactggagggtggctcacgaacgggacgaactgtggcgtgcccagatcgttgccacgaccgttatgttggagaggaagctccctcggtgcctgtggccgcggtcgggaatttgcggcagagaatacggacttggagataggtggttcttgagggtcgaggaccggcaggatctgaaccgccagcggatacagagatacgcccaagccttccacaccagagggtctgaagacctcgataaggatagcgttgaaaagcttgaactcggttgccctttctctcctcatttgtcactgcccatgccaagcgtgagccggtcaacatctcgctcgagcgccaattgggagagacttcgacaagggaccctgaggcgggaccttagaggcatcataaacagaggactggaggacggcgaatcatgggaataccagatttag

SEQ ID NO: 209267 - DNA, 168 bp, synthetic construct
  misc_feature 1..168: note = Description of Artificial Sequence: Synthetic coding sequence
  source 1..168: mol_type = other DNA
atgagcaccagccggaagctgaagagccacggcatgcggcggagcaaatccagatcaccacacaagggcgtgaagcggggcggctctaaacggaaatatcggaagggtaatctcaagagccggaaaagaggggacgatgcaaacagaaattaccgttcccatctatag

SEQ ID NO: 209268 - DNA, 417 bp, synthetic construct
  misc_feature 1..417: note = Description of Artificial Sequence: Synthetic coding sequence
  source 1..417: mol_type = other DNA
atggacacccagacccacagcctgcccatcacccacacccagctgcattctaacagtcaacctcagagccgtacttgtacccgacattgccaaaccttttcccaaagctgccggcagtcgcatcggggatcaaggtcccagtcaagctcccagagtcccgcttctcaccgcaacccaacaggtgcccacagttcgtctgggcaccaaagtcaatcccctaataccagccctccgcccaaaagacacaaaaaaacaatgaattcgcaccattccccaatgcggcctacaatcctgcattgtaggtgccctaagaatcgcaagaacctggaaggcaagctgaaaaagaaaaagatggcgaaaagaatacagcaggtgtataagaccaagaccagaagtagtggctggaagtccaattag

SEQ ID NO: 209269 - DNA, 1731 bp, synthetic construct
  misc_feature 1..1731: note = Description of Artificial Sequence: Synthetic coding sequence
  source 1..1731: mol_type = other DNA
atggccgtgctgttcttccacaccatgcggtacaagagccaggaccctcggaacccccataacgatcggtttgtcttgtccaaaggccatgcagctccgatattatacgccgtgtgggcagaggcaggatttctagccgaggcagaacttcttaacctgaggaagatctccagcgacctggacggccatcccgtcccaaaacaggcttttaccgacgttgccacaggaagcttagggcagggactgggtgcagcctgcggaatggcctacaccggaaaatactttgataaagcgtcctatagagtgtactgtctactgggagacggcgagttgtctgaaggatcagtgtgggaggcaatggcttttgcttcgatctataagctggataacctcgtggccattctggacatcaatagacttggacagtcggaccccgccccactgcaacaccaaatggacatttatcagaaaagatgtgaggcgtttggatggcatgcaatcatcgtagatgggcattccgtcgaggagttgtgcaaggcctttgggcaggcaaaacaccagcccacagcaatcatagcaaagaccttcaagggcagagggatcacgggtgtagaggataaggagtcttggcacggcaaacctctgcctaagaatatggccgaacagattattcaggaaatatatagccagatccagtcaaaaaagaagatcctggccacccctccccaggaagacgcaccctctgtagatattgccaacatccgaatgccctctttaccctcatacaaggtgggcgataaaattgcaacacgaaaagcatatggccaagcactggcaaagctcggccacgcttctgaccgaataattgcactcgatggtgatacaaaaaactccacgttcagcgaaatattcaaaaaggagcaccctgaccgcttcatcgagtgttacatagcggagcagaacatggtttccattgccgtgggctgtgctacacgcaaccggacagtacccttctgcagcacttttgccgcattctttacccgggcgtttgatcagatcaggatggcagcaatctccgaaagtaatattaacttgtgtggaagtcattgtggagtcagtattggagaggatggtccgtctcagatggctctggaggacctggcaatgtttaggagcgtgcctacctccacagtcttctacccctctgatggcgtcgccactgaaaaagcagtcgaattagccgccaataccaagggtatatgtttcattcgtacctctagaccagagaacgccatcatctataataacaatgaggactttcaggtgggtcaggcaaaggttgtcttgaagtctaaggatgaccaggtgactgtgatcggcgctggcgtgacgttgcatgaagccctggctgctgccgagctactgaaaaaggagaagatcaacatccgcgttcttgaccctttcacaattaagcctttggaccggaaactgatactggattcggcacgggcaaccaagggaaggattttgacggttgaggaccattattacgagggaggcattggggaggccgtgtcctcagccgtggtaggagagcccggaattacagtcacccatttggcagtgaatcgggttccgagatctggaaagcccgccgagctgctgaagatgttcggcatagacagagatgcaatcgctcaagctgtgagaggcttaattacaaaagcatag

SEQ ID NO: 209270 - DNA, 1374 bp, synthetic construct
  misc_feature 1..1374: note = Description of Artificial Sequence: Synthetic coding sequence
  source 1..1374: mol_type = other DNA
atggccttcgccagcatctacaagctggacaacctggtggccatcctcgatatcaacagactcggccagagcgatcccgcccccctgcagcaccagatggatatctatcagaagagatgcgaagccttcggatggcatgctatcatcgtggacggtcactccgtggaggagttgtgtaaggcattcggccaagctaagcaccagccaacggccattatagctaagacgtttaagggtagaggtattacaggcgtcgaggacaaagaatcgtggcatgggaaacctctgccaaaaaacatggccgagcagatcatccaagaaatttactctcagattcaatctaagaagaagatactggctacacctccccaagaagatgcccctagcgtagacattgccaatatcagaatgcccagcctgcctagctataaggtgggcgacaaaatcgctactcggaaagcttacggccaggccttagctaagctgggtcatgcttcggatcgaattatcgcactagatggcgataccaaaaattcaacctttagcgagatctttaaaaaggaacaccctgataggtttatcgagtgttatattgcggagcagaatatggtgagcattgctgttggctgcgcaaccaggaatagaaccgtacctttctgcagcaccttcgccgcctttttcactcgagcctttgaccagattagaatggcggccatcagcgaaagcaacattaatctgtgtgggtctcattgcggtgtatctataggcgaggacggaccaagtcagatggccctggaagacctggccatgtttcggtcagtgcccacaagcaccgttttttacccttccgacggggtggccaccgagaaggccgtcgagctcgccgccaacaccaaggggatatgctttatcaggacttctcgaccggagaacgcgataatctacaacaataacgaggattttcaggtgggacaggccaaagtggtgttgaagagtaaggatgaccaagtcacagtgattggcgcaggggttacactacacgaggcactggctgccgcggagcttttgaaaaaggagaagattaatatacgcgtgctggacccattcactatcaagcccctggatcgtaagctgattttggactctgctcgcgccacgaagggacggatattaaccgtcgaggaccactactacgagggaggaatcggcgaggccgtaagttctgcagtggttggggaacccggtattacggtcacccatttagccgttaacagagtgccccgtagtggaaaacctgcagaactactgaaaatgttcggtattgatcgcgacgctatagcccaggctgtgcgcggtttaattacgaaagcatag

SEQ ID NO: 209271 - DNA, 1872 bp, synthetic construct
  misc_feature 1..1872: note = Description of Artificial Sequence: Synthetic coding sequence
  source 1..1872: mol_type = other DNA
atggagagctaccacaagcccgaccagcagaagctgcaggccctgaaagacaccgctaatcggctgcgaattagctcgatacaggcaaccaccgccgccggatctggccaccctacaagctgctgcagcgctgcagagattatggcagtgctgttcttccacactatgagatataaatcacaggatcctaggaacccgcacaatgatcgatttgtgctgagcaagggtcacgccgcacccatcctgtatgccgtgtgggccgaggctggattcctggcagaagcggagctcctgaatctgcgcaagatctcaagtgacctggatggccaccctgtgccgaagcaggctttcaccgacgttgcaaccggctcactgggccaggggttgggagcagcatgtggaatggcctatacaggtaagtattttgacaaagcatcctaccgcgtgtattgcttgctcggggacggcgagctttctgaggggagtgtttgggaggccatggcattcgcctcaatctataaattggacaacctggtggctatactggatatcaaccggctgggccagagcgaccccgctcctctccagcatcagatggacatttaccagaaacgctgcgaggcttttgggtggcacgctataatcgttgacggacactctgtggaggagttatgcaaagcattcggacaggccaagcaccagcctacagccatcatcgcaaaaacattcaaaggtaggggaatcacaggcgtagaggacaaagagtcgtggcacggaaagcccctcccaaagaacatggccgaacagattatccaggaaatctactcccagatccagtctaaaaagaagatcctggcaacccccccacaggaggacgctccatcagtggacattgctaacattcggatgccgtcactgccatcatataaggtgggagacaagatcgcaaccagaaaggcctatgggcaggcactggcaaaattaggccatgcttcagaccggattatcgcccttgatggagatacaaagaatagcacattctcagaaatatttaaaaaagaacacccagataggttcatcgagtgttacatagccgagcagaacatggttagtatcgctgtcgggtgcgcaactcggaacagaacagtgcctttctgcagcacctttgcggcattctttacccgcgccttcgaccaaattcggatggctgcgatctccgaatccaatatcaatctgtgcggttctcattgcggagtgtccatcggcgaagacggcccaagccagatggccctcgaggatctggcgatgttcagaagtgttcctacctccaccgtgttttacccctcagatggggtggctaccgagaaagcagtggagctggccgctaatacaaaggggatctgttttatacggactagccggcctgaaaacgctattatttataataataatgaagattttcaggtcggacaggccaaggtcgtactcaagtctaaggatgaccaggtgacggtaatcggagccggtgtgaccttacacgaagcattagccgcagcagagctgctcaaaaaggaaaaaataaacattcgagtgttagaccccttcaccattaaaccactggatcgaaaactcattctggacagcgcacgggccacgaagggcaggatattaacggtggaagaccattattatgagggcggcatcggggaggctgtctcatctgccgtggtcggggaacctgggataacagtgacacacttggcagtcaaccgcgttccccggtccggtaagcctgcggaactcctgaaaatgttcggcatcgatcgggatgcgatcgcacaggcagtcagggggctgattacaaaagcgtag

SEQ ID NO: 209272 - DNA, 1872 bp, synthetic construct
  misc_feature 1..1872: note = Description of Artificial Sequence: Synthetic coding sequence
  source 1..1872: mol_type = other DNA
atggagagctaccacaagcccgaccagcagaagctgcaggccctgaaggacaccgccaatcggctaaggatcagttctatacaggcgacaaccgccgctgggagtggccaccccacgagttgttgttccgccgccgagattatggccgtactgttcttccacaccatgcgttataagtctcaggatcctcggaatcctcacaatgataggttcgtcctgtctaaaggtcacgccgctcctatcctatacgctgtgtgggctgaagccgggttcctggccgaggcggaactgctgaatctacgcaagatctccagtgaccttgacggtcacccggtgcctaaacaggcctttacagatgtggccaccggtagtctcggtcaaggtctaggggcagcttgcggtatggcgtacacgggcaaatacttcgacaaggcttcttacagagtgtattgcctgctgggcgacggtgagctgagcgaggggagcgtgtgggaggccatggctttcgcatctatatataagctggacaatctggtagctatcttagatattaatcggctggggcaatcagatccagctcccctgcagcaccaaatggatatctatcagaaaagatgcgaagccttcgggtggcatgccatcatcgtcgacggccattcggtggaggagctttgcaaagcatttgggcaggcaaagcaccagccgactgctataattgcaaagacctttaagggacgcgggataacgggtgtggaggacaaggaaagttggcatggaaaacccctcccaaaaaacatggcagagcaaatcatacaagaaatctacagccagatccaatctaaaaaaaagatcttagccactcctccgcaggaggacgccccctctgttgatatagccaatattagaatgccctctctccccagttataaggtgggggacaagattgccaccagaaaggcatacggccaggcccttgccaagcttggccacgcctctgaccgaattattgccctcgatggcgacaccaagaatagtactttcagtgagatcttcaaaaaagaacaccccgaccgttttatagagtgttatatcgctgagcagaatatggtgtctattgccgtgggctgtgcaacgcgcaaccgcactgtacccttctgctcaaccttcgcggccttcttcaccagggccttcgatcagatacggatggctgctattagcgagtctaatatcaacctgtgcggtagccactgcggcgtttcaatcggcgaggacgggccatcacaaatggccctggaggatcttgctatgtttcgatctgtccctacgtcaactgtcttttatccttcagatggggtggccaccgagaaagcagtggagctcgctgctaatactaaaggcatatgtttcattagaacatctagaccggaaaacgcaatcatctataataacaatgaagatttccaggtagggcaagcaaaggtggttctgaaaagtaaagacgaccaggtcaccgttataggcgccggcgtcacgctccacgaggcactcgccgccgctgagctccttaagaaagaaaaaatcaatattcgggtcctggatccatttactattaagccgctggaccgaaagctgatacttgactcagcccgtgctacaaaaggccgcatcctgacagtggaggaccactactatgaaggggggatcggcgaggctgtgagtagcgctgtggtgggcgaacctgggatcacagtgacacatctggccgtcaacagggttccccgctcaggcaaaccggcagagctcttgaagatgtttggcatcgatagggacgcaatcgcccaagctgtgcggggtttgatcacgaaggcctag

SEQ ID NO: 209273 - DNA, 1896 bp, synthetic construct
  misc_feature 1..1896: note = Description of Artificial Sequence: Synthetic coding sequence
  source 1..1896: mol_type = other DNA
atggagagctaccacaagcccgaccagcagaagctgcaggccctgaaagatactgctaataggctgcgcatcagttcaatccaagctacgactgccgctggcagcgggcatcccacctcctgttgcagcgccgcggaaatcatggccgtactctttttccacaccatgcgatataagagccaggacccaagaaacccacataacgatagatttgtgctgtcaaagggacacgcggcccctattttatatgccgtgtgggccgaagcaggctttttagctgaagcggagctgctgaacctgcgtaaaatatcctcagacctggacggtcatccggtgcccaaacaggccttcactgatgtcgcaaccgggagtctaggacaggggctgggtgccgcttgcggcatggcctataccggcaaatattttgataaggcatctttgcccagcagctgggattacagctatcgggtgtattgtttgcttggcgacggcgaactgagcgagggatcggtctgggaagccatggcctttgcatccatctacaaattagataatcttgtggccatcctggatattaacaggctcgggcagtcagatccggctcccctccagcaccagatggatatctaccaaaagcgctgcgaggcctttggttggcatgccatcatcgtcgatggtcactcagtcgaggagctgtgtaaggcattcggccaggctaaacatcaaccaaccgccatcatcgcaaagactttcaaggggcgcggtattacgggagtcgaggacaaggaatcttggcacggcaagcccctaccgaaaaacatggcagagcagatcattcaggaaatctatagccagattcagagcaagaagaagatactggccacaccccctcaggaggacgccccatccgttgatattgctaatatcagaatgccaagtttgccctcctataaagtgggagataagatcgccacccgtaaggcctatggtcaagcgctggctaagctgggacacgcctctgatagaatcattgctctcgacggagacactaaaaactccactttctctgagatcttcaaaaaggaacaccctgacagattcattgagtgctatatcgcagaacagaatatggtctccatagcggttggatgcgctacccggaacaggacagtacctttctgcagtactttcgcagcctttttcacccgcgctttcgatcagattaggatggctgctatttctgagtcaaacatcaatctgtgtggcagtcattgcggtgtgagtataggagaagatggcccgagccaaatggccctggaagatctggccatgttccggtccgtgcctacatcaactgttttttaccctagcgacggtgtggctacagagaaggctgttgagttggccgccaataccaagggcatttgcttcattcgtacaagccggcccgagaacgccattatctacaataacaatgaagatttccaggtcggccaagcaaaagtggttctgaagtccaaggacgatcaggtaacagttatcggcgccggcgttacactgcacgaggcactcgctgccgcagaacttctaaaaaaggagaaaatcaacatccgggttctggaccccttcactatcaaaccgttagaccgaaaactcatcttagattccgctcgggccaccaagggacggattctgacggttgaagaccactactacgaagggggcatcggtgaagctgtgtcttctgcggtggtgggtgaaccagggattacagtgacgcacctcgccgtgaatagagtcccgcggtctggaaaacccgctgagttgctgaagatgttcgggatcgatagagatgcgatagcccaagcagtgagaggcctgatcactaaagcctag

SEQ ID NO: 209274 - DNA, 1182 bp, synthetic construct
  misc_feature 1..1182: note = Description of Artificial Sequence: Synthetic coding sequence
  source 1..1182: mol_type = other DNA
atggccctgaaggtggccaccgtggccggcagcgccgccaaggccgttctggggcccgcactcctgtgtcggccctgggaagtgctgggcgcacacgaggtcccgtcgagaaacatattttcggaacagaccatccctcctagcgctaagtacggcggtaggcacaccgttacaatgatccctggggatggtatcggccctgaactaatgctacatgttaagtctgtctttagacacgcctgcgttcccgtggactttgaagaggttcatgtatccagcaacgcagacgaagaggacattaggaacgctatcatggcgattcgcagaaatagggtggcattaaagggtaatattgaaacaaaccataatcttccgccctcccacaagagccgaaacaacatcctgcgtaccagcttggatctgtacgcgaacgtgattcactgcaagtcactgccaggcgtcgtgacccgacacaaggatatcgatatccttattgtgagggaaaatactgaaggtgagtatagttcactggaacacgagtccgtagccggcgttgtagaatctctcaagattattaccaaggcgaagtcccttcgcatcgcagagtatgcgttcaaactggctcaggaatcgggcaggaagaaggttactgcagtacacaaagctaacatcatgaagctcggagacggcttgttcctccaatgttgtcgggaggtcgctgcacggtatccccaaatcacttttgagaacatgatagttgataacacaaccatgcaactggtttcacgcccccagcagttcgacgtgatggttatgcctaatttgtacggaaatattgtcaataacgtctgtgctggcctcgtgggtgggcccggcttggttgccggggcaaactatggacacgtgtatgccgtgtttgagactgccacacgtaacaccggaaagtccattgcgaataagaatatcgccaacccaactgctactctacttgcaagctgcatgatgttagatcacctgaaactacatagctacgccacttccatcaggaaggccgtactggcatcaatggacaacgaaaatatgcacaccccagacatcggcggtcagggcacaacaagcgaagcgatccaagacgtgatcaggcatattcgggtgataaacgggcgggcagttgaggcctag

SEQ ID NO: 209275 - DNA, 1791 bp, synthetic construct
  misc_feature 1..1791: note = Description of Artificial Sequence: Synthetic coding sequence
  source 1..1791: mol_type = other DNA
atggccgacgccgaggcccgggccgagttccccgaggaggcccggccggataggggaaccctgcaggtattacaggacatggcatcacgattgaggattcattccattagagcgacatgctccaccagcagcgggcaccctacttcctgttctagctcttcagagatcatgagtgtgttgttcttttatataatgcgatacaaacagagtgacccagagaaccccgataatgacagattcgtgctggccaaacggctgagttttgttgatgtggcaaccggctggctgggacaggggctgggggttgcgtgcgggatggcatacaccggaaagtattttgacagagcaagctatagagtattctgtcttatgtcagatggggaaagctctgaggggtcagtgtgggaggccatggctttcgcaagttattattcactcgataatctcgtggcgattttcgacgtaaatagactgggacatagcggagccctccctgcagaacactgtataaacatctatcagagaagatgcgaggcttttggatggaatacttacgtggttgatggtcgcgatgttgaggccctttgtcaagttttttggcaagcttcccaagtcaagcataagccaactgcagtggtggccaagacatttaaggggcgcggaacgccaagcatagaagacgctgagtcctggcacgccaaaccgatgccacgtgagagggccgatgccatcatcaaactgatagaaagccagattcagactagcaggaacctggacccacagccccccatcgaagactcccccgaagtgaatatcacagacgtgcgtatgacgagcccccccgactacagagtgggcgacaagattgccacccgcaaagcgtgcgggctcgcattggcaaagttgggttacgccaataatcgcgtcgtagtgctcgatggcgatacccgctattcaacgttcagcgagatcttcaacaaagagtacccagagagatttatcgagtgttttatggcggagcaaaatatggtgtccgtggccctgggctgcgcatcccggggacgcacaattgcctttgctagcacgttcgcagcctttctaacacgggcttttgaccacattagaattgggggactggcggaaagcaacatcaacatcatcggatctcactgcggcgtgagcgtgggcgacgatggagcttcacagatggcactggaggacatcgctatgttccgcacaataccaaagtgcactatcttctatcctaccgacgccgtctctactgaacacgctgtcgctctagccgccaatgctaagggaatgtgttttattcggaccactcggcctgagacaatggtgatttacaccccccaggagaggttcgaaattggacaagcaaaggtcctaaggcactgcgtgtccgataaggtcacggtgattggggctggcatcacagtgtatgaggctctcgccgccgcagacgaactctccaagcaagacatcttcattagagtcatcgacttgttcacaatcaaaccactggacgttgcaactatcgtttccagcgctaaagccaccgaggggcggattatcacagtggaggaccactaccctcaaggaggcatcggagaggctgtatgtgctgcagtgtctatggacccagatattcaagtccactcactggcagtctctggcgttccacaatccggcaagagcgaagaactgctggacatgtacggaatttctgcaagacatattatagtggcagtaaaatgcatgctgttgaattag

SEQ ID NO: 209276 - DNA, 1674 bp, synthetic construct
  misc_feature 1..1674: note = Description of Artificial Sequence: Synthetic coding sequence
  source 1..1674: mol_type = other DNA
atgagcgtgctgttcttctacatcatgcggtacaagcagagcgaccctgagaaccctgacaatgacaggttcgtcctcgccaaacgcctctcgtttgtcgacgttgccacagggtggctggggcagggcctcggggttgcgtgcggaatggcttacaccgggaaatatttcgaccgcgccagttaccgggtattttgcctaatgtctgatggcgaatcttcggaaggctccgtatgggaagccatggcgtttgcttcctattacagccttgataacctggtggctattttcgatgtgaatcggctcggacactcaggcgcacttcccgctgagcactgtatcaatatctatcagagacgttgcgaggcctttggttggaacacatatgtggtagatggtcgagatgtggaagccctttgtcaagtcttttggcaggccagccaagtcaaacacaagcccaccgctgtggtggcaaaaacattcaagggacgcggcacaccatccatcgaagacgcggagtcctggcacgccaagcctatgcctcgagagagggccgatgccatcataaagctgatcgagtctcagatccaaacttctcgcaacttggacccccaacctccaattgaggatagccctgaggtgaacattactgacgtacggatgacaagcccacccgattaccgagtaggggacaagatcgccacgcgtaaggcttgtggtctggccctggcaaaactcggttacgccaataaccgtgtggtagttctggatggggataccagatacagcaccttcagcgagatctttaataaggagtaccctgagaggtttattgagtgttttatggcagagcaaaatatggtctcagttgccctgggctgtgcttcccgaggacggaccattgcatttgcatcgacttttgctgccttccttacacgagcatttgaccacattcggattggcgggctggccgaaagcaatattaatatcatcggctctcactgtggggtctctgtgggcgatgacggagcgagccagatggccctggaggacattgccatgttccgcaccatccctaaatgtaccatcttttacccaacagacgccgttagtacagaacatgcagtcgccctggcagccaatgccaaggggatgtgctttatacggaccaccaggcctgaaacgatggtgatatacacacctcaggagcggttcgagatcgggcaggccaaaggagtgtcaatgctgcaggattcctggagttctgtgatctcttatcagaaggttctgcggcattgcgtctccgacaaggtgacagttatcggcgccggtattacagtttacgaagctctcgccgccgccgacgagctcagtaagcaggacatcttcatcagggtgattgatttgtttacgattaaaccattggacgtcgcgaccattgtcagctccgctaaagctacagagggaaggataataactgtggaagaccactatcctcagggcgggattggcgaagccgtgtgtgccgccgttagtatggatcccgacattcaggtgcatagcctcgcagtctcgggagtgccccagtctggtaaaagcgaggaactgttagatatgtacggaatttccgctcggcatatcatagttgctgtcaagtgcatgttactcaattag

SEQ ID NO: 209277 - DNA, 1623 bp, synthetic construct
  misc_feature 1..1623: note = Description of Artificial Sequence: Synthetic coding sequence
  source 1..1623: mol_type = other DNA
atgagcgtgctgttcttctacatcatgcggtacaagcagagcgaccccgaaaatcccgataacgacagattcgttctagctaagagactgtccttcgttgacgtggcaacgggctggctcggacagggattaggcgtggcatgcggtatggcctacaccgggaagtattttgacagggcctcatatcgggttttctgcctgatgagtgatggagagagcagtgagggaagcgtttgggaggctatggcttttgcctcctattactctctagataatctagtggccatttttgacgtgaatcggttgggacacagtggcgcacttccggccgaacactgcattaacatttaccagagacggtgtgaagcgttcggatggaacacctatgtggtagatggaagggacgtagaggctctgtgccaagttttctggcaggcatcgcaagtgaagcacaagccaaccgcggtggttgcaaagacttttaagggaaggggcactccatcaattgaggacgcagagtcctggcacgccaagccaatgccacgggagcgagctgatgctatcataaagttaattgagtcacagatacagacttctcgtaacctggacccacaaccccccatcgaggactcaccagaagttaatataaccgatgttaggatgacatctccaccggattacagagtgggagacaagattgccacgcggaaggcttgcgggctggccctggcgaaattaggatatgcaaataaccgggtggttgtcttggatggggacacacgttatagcacttttagtgagatatttaacaaagaatatccggagagattcattgagtgcttcatggcggagcagaacatggttagcgtcgcgctcggttgcgcctcaaggggacgcaccatagcctttgcttccacctttgctgctttccttaccagagcgttcgatcatatccggattgggggtctggcggagagtaacataaacattatcgggtctcattgcggggtgtccgtcggggacgatggcgcttctcagatggcacttgaggacatcgccatgttcagaactatccctaaatgtaccatattctaccctactgacgcagtgtccactgaacacgcagtcgctttggcagccaatgctaaagggatgtgctttatacggaccacaagaccggaaaccatggttatctacacaccccaggagcgcttcgaaatcggtcaggctaaggtgctgaggcactgcgttagtgacaaagtgactgtcataggtgccggcatcacagtttatgaggctttggctgcggcagatgagctgagcaagcaggatatttttatacgggtgatcgatctgtttacaataaagccgctcgatgttgcaactattgtcagttcagccaaggcaaccgagggccgcataattacagtggaggatcactatccacaaggcggcattggagaggctgtgtgtgcagcagtttccatggaccccgacatccaggtgcattctttggccgttagcggagtccctcaatcaggcaagagcgaggagttgctagatatgtacgggatttccgcccggcacattatagttgcggttaagtgcatgctcttaaattag

SEQ ID NO: 209278 - DNA, 894 bp, synthetic construct
  misc_feature 1..894: note = Description of Artificial Sequence: Synthetic coding sequence
  source 1..894: mol_type = other DNA
atgagcgcctgggccgccgccagcctgagccgggccgccgcccggtgcttactcgcaagagggcctggcgtgcgggctgctccacctcgcgatcctagaccgagtcaccctgagccaagaggatgtggagcggcccctggcagaacgctgcatttcactgctgcagtcccagctgggcataacaagtggagcaaagtgcgccacataaaggggcccaaagacgtggagcgctctcgcatctttagcaagctctgtttaaacattagattggccgttaaggaaggcgggcccaacccagagcataatagtaatcttgccaatattttagaggtatgtcgttctaagcacatgcccaaatccacaatagagaccgctctcaagatggagaaatccaaggatacgtacttactctatgagggccggggaccaggcggaagcagcctgcttattgaagcactgtccaactcctcacacaaatgccaggcagatattcgccacatcctgaacaaaaacggcggggtcatggccgtcggagccagacatagtttcgacaaaaagggagtgatcgttgtagaagtcgaggaccgggagaaaaaggccgttaatctggaacgagctctggaaatggcaattgaggctggggcagaggatgttaaggaaactgaggacgaagaggagaggaacgtgtttaaattcatttgcgatgcgagctctttacatcaggtccgcaaaaagcttgattcccttggactctgtagcgtttcttgtgcactggagtttatccccaacagcaaggtgcagttagctgagccagaccttgagcaagcagctcatctgattcaggccctgtctaaccacgaggacgtgatccacgtttatgataatattgagtag

SEQ ID NO: 209279 - DNA, 687 bp, synthetic construct
  misc_feature 1..687: note = Description of Artificial Sequence: Synthetic coding sequence
  source 1..687: mol_type = other DNA
atgagcgtgagcgagatcttcgtggagctgcagggcttcctggccgccgagcaggacattcgcgaagagattaggaaggtcgtacagagtttggaacagacggctagagaaatcctcactctgctgcaaggagtccaccagggggccggtttccaagatattccaaaacggtgcctcaaggcccgcgagcattttggaactgttaaaacccaccttacatcacttaagactaagtttcccgcagagcagtactaccgcttccatgaacattggcgattcgttctgcaaaggctggtcttcttagcagctttcgtggtttacctagagacggagacactggtaacccgtgaagctgtcacagagatactaggtatcgagcccgacagggagaaagggttccacttggatgttgaagattacctatctggggtccttatcttggcctcagagctgtctaggttgtcagtgaattcggtgacagcaggcgactattcaagacccctgcacatttctacatttattaatgagctggactcaggcttccggctgctgaatctgaaaaacgacagtctgcggaaaaggtacgatggccttaagtatgatgtgaagaaagttgaagaagttgtttatgacctctctatcagaggctttaataaggagaccgctgctgcttgtgtggaaaaatag

SEQ ID NO: 209280 - DNA, 585 bp, synthetic construct
  misc_feature 1..585: note = Description of Artificial Sequence: Synthetic coding sequence
  source 1..585: mol_type = other DNA
atgagcgtgagcgagatcttcgtggagctgcagggcttcctggccgctgaacaagacattcctaaaaggtgcctgaaagcgcgtgagcacttcggcaccgtgaagacccacctgacaagtctgaagactaaattccccgcggaacagtattatagattccatgaacactggcggtttgtcctgcagaggctggtctttctagccgctttcgtggtatatctggagacagagaccctcgtgacgcgagaggcagtgacagagattctaggaatcgaacccgaccgtgagaagggcttccatttggatgtggaggactacctatcaggagttttaatcctggcatcagaactgtctcggttgtctgttaactcggtgacggccggggattattcacggccactgcacatttccacatttatcaatgaactggattctggtttccgcctgctcaacctgaaaaacgactctcttcggaagcgatatgacgggctgaagtacgacgtgaagaaggtcgaggaggttgtctacgatctctctatccggggatttaacaaagagactgctgcggcctgcgtggagaagtag

SEQ ID NO: 209281 - DNA, 447 bp, synthetic construct
  misc_feature 1..447: note = Description of Artificial Sequence: Synthetic coding sequence
  source 1..447: mol_type = other DNA
atgagcgtgagcgagatcttcgtggagctgcagggcttcctggccgccgagcaagatatccgggaggagattcgcaaagtggtgcagtcactggagcaaactgctcgtgagattttgacactgctgcagggggtccatcaaggtgccggtttccaggacattcctaagaggtgcttgaaagcgcgggaacattttgggaccgtgaagacacacctgacatcactgaagactaaattccccgccgagcagtactacaggttccacgaacactggcgattcgtcctccagaggctggtctttttggccgccttcgtagtttacctggagaccgagaccttggtgacccgggaagctgtgaccgagattctaggtatagaagccgtgtgtcagcaacgtgattgttggcgtctgctgcccaccccacctcatctccatcttcatcagtag

SEQ ID NO: 209282 - DNA, 873 bp, synthetic construct
  misc_feature 1..873: note = Description of Artificial Sequence: Synthetic coding sequence
  source 1..873: mol_type = other DNA
atgagcaacaaggagggcagcggcggcttccggaagcggaagcacgacaatttccctcataaccaacgccgggagggcaaggacgtcaacagctcctctcccgtgatgttggcgtttaagtccttccagcaagagctggacgctcggcacgataaatatgaaagactggtcaagctgtcccgggacatcaccgtagagtctaaacgtacaatcttcctcttacaccggattacttctgctcctgatatggaggatattctcaccgagagtgagatcaaactggatggcgtgagacagaagatctttcaggtagcccaagagctgtcgggtgaggatatgcatcagttccaccgagccatcactaccggtctgcaagaatacgttgaagcagtgagcttccagcatttcattaagacaagatccctcatctcaatggacgagatcaataagcagcttattttcaccactgaagataacggtaaggagaataaaactccctccagcgatgctcaggataagcaatttggcacatggagattgcgagtgactccagtggattaccttttgggggttgccgatctgactggagaacttatgaggatgtgcatcaattccgtgggcaacggcgatatcgacacaccttttgaagtttcacagtttctacggcaggtttacgatggattttcttttatcggtaacactggcccttatgaggtttctaagaaactgtataccctgaagcaaagtctggccaaagtagaaaacgcctgctacgccctgaaggtcagaggctcagagatccccaagcacatgctcgctgacgtgttctcagtgaagaccgagatgatagaccaagaagaggggatctcttag

SEQ ID NO: 209283 - DNA, 492 bp, synthetic construct
  misc_feature 1..492: note = Description of Artificial Sequence: Synthetic coding sequence
  source 1..492: mol_type = other DNA
atgagcaacaaggagggcagcggcggcttccggaagcggaagcacgacaattttccccacaaccaacgcagagaaggtaaagatgtgaactcatcttcacccgtgatgctcgcgttcaaatccttccagcaggaacttgacgctcgccacgataagtatgagcgcctagttaaactgtcccgcgacataactgtggagtctaagcgcacaatttttttgttgcaccgaatcacgtcatcccagtatctcgatcacagtgctccagatatggaagatatcttgactgagtctgagattaagcttgatggagttcgccagaaaatcttccaagtggcccaagaactttcgggcgaggacatgcaccagtttcacagagccataacaacaggcctccaagagtatgtggaggccgtgtccttccaacatttcattaaaaccagatcactaatcagtatggacgaaattaataagcagctgatctttaccacttag

SEQ ID NO: 209284 - DNA, 273 bp, synthetic construct
  misc_feature 1..273: note = Description of Artificial Sequence: Synthetic coding sequence
  source 1..273: mol_type = other DNA
atggaccccctgcgggcccagcagctggccgccgagctggaggtggaaatgatggctgatatgtacaaccggatgacttcagcgtgtcaccgaaaatgcgtccccccacactataaggaggccgagctctcaaaaggggaaagtgtgtgccttgaccggtgtgtatcaaagtatctcgatattcatgagaggatgggaaaaaagctgaccgagttgagcatgcaggacgaagagctgatgaaaagggtacagcagtccagtggccctgcttag

SEQ ID NO: 209285 - DNA, 273 bp, synthetic construct
  misc_feature 1..273: note = Description of Artificial Sequence: Synthetic coding sequence
  source 1..273: mol_type = other DNA
atggaccccctgcgggcccagcagctggccgccgagctggaggtggagatgatggccgatatgtataataggatgacatctgcttgtcaccgtaaatgcgtccccccgcattataaggaggcagaactatctaagggagagtcagtctgtttggatcggtgcgtgagcaaatatttagatatacacgagcgtatgggaaaaaaacttactgaactaagcatgcaggatgaggagttgatgaagcgagtgcaacagtcatcagggcctgcttag

SEQ ID NO: 209286 - DNA, 273 bp, synthetic construct
  misc_feature 1..273: note = Description of Artificial Sequence: Synthetic coding sequence
  source 1..273: mol_type = other DNA
atggaccccctgcgggcccagcagctggccgccgagctggaggtggaaatgatggctgacatgtacaatcgaatgacatctgcctgccatcggaagtgtgtcccccctcactataaggaggctgagctgagcaaaggcgaatcggtgtgcttagaccgctgtgtgtcgaagtatctggatattcatgaacggatgggaaaaaagctcactgagctttccatgcaggacgaagagctgatgaaacgcgttcagcagtctagtgggcctgcatag

SEQ ID NO: 209287 - DNA, 927 bp, synthetic construct
  misc_feature 1..927: note = Description of Artificial Sequence: Synthetic coding sequence
  source 1..927: mol_type = other DNA
atgaagcactacgaggtggagatcctggacgccaagacccgggagaaactgtgttttttagataaagtagaaccacacgccaccatcgcagaaatcaagaatctgttcactaaaactcacccacagtggtatcctgcgagacaatctctaagactagatccaaaaggcaagagcttgaaggacgaagacgtcctccaaaaactgccagtcgggactaccgccaccctgtactttcgggatctgggcgcccagattagctgggtcacagttttcctcacagaatacgccggacctctgtttatttacctcctgttctattttcgtgtcccatttatttacggccacaagtacgactttacatccagccggcatacggttgtgcatctcgcctgtatatgtcacagtttccattatatcaaaaggctccttgaaacgctgtttgtacaccgctttagtcatggcacaatgcccctgagaaacatcttcaagaactgcacatactactggggcttcgctgcatggatggcatactacatcaaccatcccctctacacaccgcctacgtatggcgcccaacaggtcaaacttgcactggccatctttgtcatctgccagttaggtaatttttccatccacatggcacttagggatttgcgtccagctggatctaaaaccagaaagataccttacccaactaagaatcctttcacttggttgttcctactagtatcgtgtccgaattacacctacgaggtgggttcatggattgggtttgctattatgactcagtgcctgccggttgcactgtttagtctggtggggttcacccagatgactatctgggccaaagggaaacacagaagctacctgaaggagttccgagactaccctcctctcaggatgcccattatcccattccttctgtag

SEQ ID NO: 209288 - DNA, 516 bp, synthetic construct
  misc_feature 1..516: note = Description of Artificial Sequence: Synthetic coding sequence
  source 1..516: mol_type = other DNA
atggaggagtacgcccgggagccctgcccctggcggatcgtggacgattgtgggggtgccttcacaatgggtaccattggcggtgggattttccaggccataaagggcttcaggaacagccctgtgggagttaatcatcgactgaggggatctcttacagctatcaaaaccagggcgcctcagctcggcggcagcttcgcggtctggggagggctttttagcatgatcgattgttccatggtccaggtgagaggcaaggaagacccttggaacagcatcactagcggggcccttacaggcgcgatactggctgccagaaacggcccagtggcaatggtgggctctgctgccatggggggtattttactcgccttaattgagggagccggcattctccttacgcggtttgccagcgctcaattccccaacggacctcagttcgccgaagatccatcacagctgccttcaactcaactgccgtcctctcccttcggggactacagacagtaccaatag

SEQ ID NO: 209289 - DNA, 519 bp, synthetic construct
  misc_feature 1..519: note = Description of Artificial Sequence: Synthetic coding sequence
  source 1..519: mol_type = other DNA
atggaggagtacgcccgggagccctgcccctggcggatcgtggacgattgcgggggggcattcaccatgggggtgataggcggcggagtctttcaggcaatcaaagggttccggaacgcacccgtcggtattcgacacagattgcgcggtagtgcgaatgccgtgcggattcgtgctccacagataggtggttctttcgctgtgtggggcgggctattcagcacgatcgattgcggcttagtgaggttaagggggaaagaagacccatggaacagtatcacttctggagcactaacgggcgccgtgctcgcagcacggagcggaccattggccatggtgggtagcgctatgatggggggcattctgttagcactgatcgaaggggtagggattctgctgacccggtatacagcccagcagttcaggaatgcacctcccttcctggaagacccttcacagctcccccctaaggacggcacgcccgcccccgggtacccttcttatcagcagtatcactag

SEQ ID NO: 209290 - DNA, 669 bp, synthetic construct
  misc_feature 1..669: note = Description of Artificial Sequence: Synthetic coding sequence
  source 1..669: mol_type = other DNA
atggaggagtacgcccgggagccctgcccctggcggatcgtggacgactgtgggggcgcctttaccatgggggtgattggcggaggtgtgtttcaggctatcaagggatttcgaaatgccccggtttgccgactcttgagcgaagcccctctgtttatctatagctgttccagatctgtcagtcctactgtgaacgtgtcttctgagcgggctgaatccaggccgacattgtttatggcagtgtccctgcatatggcatggtgcttggcccatataggtatccgacatcgtctgcgcggctccgctaatgccgttagaattcgtgcccctcaaatcggcggaagcttcgccgtgtgggggggcctgttttctaccattgattgcggactcgtgcgactgcgagggaaggaggacccatggaattccataaccagcggggcattgacaggcgcagtactggctgctcgctccgggcctctggcaatggtcgggtcggccatgatgggaggtattcttctggctcttatcgagggggttgggattctcctcacacggtatacagctcagcagttccgtaacgccccaccgtttcttgaggacccaagtcagctaccccccaaagatggaacccctgcccccgggtatccatcgtatcaacagtatcactag

SEQ ID NO: 209291 - DNA, 585 bp, synthetic construct
  misc_feature 1..585: note = Description of Artificial Sequence: Synthetic coding sequence
  source 1..585: mol_type = other DNA
atggccgccgccgcccccaacgccggcggcagcgcccccgagaccgcaggctcagccgaggctccactccagtatagtctgctgttgcaatacctcgtgggtgacaaacggcagccacgtctcttggaacctggatcactgggtggcatcccttccccagctaaaagcgaagagcagaaaatgatcgaaaaagctatggaaagctgcgcctttaaggcagcgctggcctgcgtgggaggtttcgtcctcggcggcgcttttggtgtgtttacggccggaatcgatacaaacgtgggcttcgatcctaaggacccgtaccgcacgccaaccgctaaagaggtactcaaggatatgggacagcggggtatgtcatacgcgaagaatttcgcaattgtgggggcaatgttttcctgcacagagtgcttaatcgaaagctacaggggcactagcgactggaaaaactctgttatatctggttgtattacagggggcgcgatcggattccgggcgggcttaaaagctggggctattgggtgcgggggctttgcagcgttctctgcagccatcgactactatcttaggtag

SEQ ID NO: 209292 - DNA, 630 bp, synthetic construct
  misc_feature 1..630: note = Description of Artificial Sequence: Synthetic coding sequence
  source 1..630: mol_type = other DNA
atggagggcggcggcggcagcggcaacaagaccaccggcggcctggccggtttcttcggtgctggcggtgccggctactcccacgctgacctggccggcgtgccgctgacagggatgaaccccctgtcgccatatctgaatgtagacccccggtatctggtacaggatacggacgaattcatcttacctaccggcgccaacaagaccagaggcaggttcgagctcgccttctttactattggaggttgctgcatgacaggagcagcctttggagcgatgaacggacttcgcttgggcttgaaggagactcaaaacatggcttggtccaaaccaaggaatgtgcagattctaaatatggtgaccaggcagggcgccctgtgggctaatacgctgggtagcttagccctcctgtacagcgcctttggcgttattatagaaaaaaccagaggggccgaagacgaccttaacacagtggccgctgggactatgacaggcatgctgtataagtgtacgggcggattaagaggcatagcccggggtggattgacaggccttacactcacttccctatacgcactgtataataattgggagcacatgaagggtagcctgctgcagcagagtctgtag

SEQ ID NO: 209293 - DNA, 486 bp, synthetic construct
  misc_feature 1..486: note = Description of Artificial Sequence: Synthetic coding sequence
  source 1..486: mol_type = other DNA
atggagggcggcggcggcagcggcaacaagaccaccggcggcctggcgggctttttcggtgctggcggtgccggttattctcatgccgacctcgcgggggtgccattaacagggatgaaccctctctcaccctatttaaacgttgatccccgatacctcgtacaagacacagacgagttcatcctgcccactggcgctaataaaacacgggggagattcgaactcgcctttttcactattggcggatgctgcatgactgcgttactgtacagtgcattcggcgtcataatcgagaagacccgaggagcggaggatgacctgaacacggtagctgctgggactatgacgggcatgctatacaagtgtacaggtggtcttcgtgggatagcgcgaggtggtcttacggggttgactctaacaagcttatacgccttatataacaactgggaacatatgaaaggatctctgctgcaacagtctctctag

SEQ ID NO: 209294 - DNA, 519 bp, synthetic construct
  misc_feature 1..519: note = Description of Artificial Sequence: Synthetic coding sequence
  source 1..519: mol_type = other DNA
atggagggcggcggcggcagcggcaacaagaccaccggcggcctggccgggttctttggagcaggtggtgcaggatacagtcatgctgacctggctggcgtgcctctaacagggatgaaccctctctcaccctacctgaatgtagatccccgatacctggtccaggacactgacgaattcatcctgcctaccggcgccaataaaacaagaggtagatttgagctggccttcttcacaatcgggggatgctgcatgacaggagccctgtgggccaacaccctgggaagcctggcccttctgtattccgcattcggcgtcataatcgagaagactcgaggcgctgaggatgacctcaatactgtagccgctggcactatgacgggaatgttatataaatgtaccggcgggcttaggggcattgcacgagggggtttgaccgggctgaccctaacttctttatatgcgctctacaataactgggaacacatgaagggctcgctcctgcagcaaagcctgtag

SEQ ID NO: 209295 - DNA, 381 bp, synthetic construct
  misc_feature 1..381: note = Description of Artificial Sequence: Synthetic coding sequence
  source 1..381: mol_type = other DNA
atgaccggcgccgccttcggcgccatgaacggcctgcggctgggcctaaaagaaacccagaacatggcttggtcgaagccccgcaatgtacagattctgaacatggttaccaggcagggcgctctttgggcaaacacactagggtcactcgcgctgctctactcagcttttggtgtcattatcgagaagacacgtggcgcagaggatgatctaaacaccgtggcagctggcactatgacaggaatgttatacaagtgcaccgcatctgcatcgcaaagcgcccgcattgctgacggactgatttttaccgaattctgctcagtggctcggctgcaaggttcgggaactatcctggcccactataacttacacctgccttag

SEQ ID NO: 209296 - DNA, 324 bp, synthetic construct
  misc_feature 1..324: note = Description of Artificial Sequence: Synthetic coding sequence
  source 1..324: mol_type = other DNA
tgaggcggcagcggcaacaagaccaccggcggcctggccggcttctttggggctggaggcgcaggctattcccacgctgatcttgcgggggtgcccccactgctgtattcagcttttggcgtcattattgagaaaactcggggagcagaagacgaccttaacacagtggcggcaggaaccatgacagggatgttatacaagtgcacgggaggactacgggggatcgccaggggggggctcactggcttaactctgactagcctgtatgctctgtacaacaattgggaacatatgaagggcagtctgctacagcaaagcctctag

SEQ ID NO: 209297 - DNA, 1359 bp, synthetic construct
  misc_feature 1..1359: note = Description of Artificial Sequence: Synthetic coding sequence
  source 1..1359: mol_type = other DNA
atggccgccgccgccctgcggagcggctggtgccggtgcccccggaggtgtctcggaagtggtatccagttcttatccagccacaatctgccccatgggtccacctaccaaatgaggagacccggcggcgaactgccactgagtaagtcttatagctctggcaaccgaaaaggctttttatcgggtctcctggataacgtcaaacaggaacttgcgaagaataaggagatgaaagagtccatcaaaaaattcagagatgaggcacgcaggcttgaagagagtgacgttcttcaggaagcacgcagaaaatacaagacaattgagtccgaaaccgttcggaccagcgaagtcctgagaaagaaactgggcgagcttacaggcacagtcaaggagagcttgcatgaggtcagcaagagtgacctgggaagaaaaattaaggaaggtgtggaagaagcagctaagactgccaaacagtcagcagagtctgtatcaaaggggggcgagaagctcggcagaaccgccgccttccgcgcgctgagccaaggtgtggagagcgtgaagaaagaaatcgacgactctgtcctcggtcagactggtccttatcggcggccccagcgcttaaggaagcgcaccgagtttgccggagataaattcaaagaagaaaaggtattcgagcccaacgaagaagcactgggcgtggttctgcacaaggactccaagtggtatcagcagtggaaggacttcaaggagaataatgttgtcttcaatcggttcttcgaaatgaaaatgaagtacgacgaaagcgacaatgcattcatcagggctagccgcgccctcactgacaaagtgacagacctgctgggaggtttattctccaaaactgagatgtccgaggtgttaaccgagatactcagagtcgatcccgccttcgacaaggaccgatttctgaagcaatgtgagaacgacattattcctaacgtgttggaggccatgatctctggagagttagatattctcaaagactggtgttatgaagctacatatagtcagctggcgcacccgatccaacaagcgaaggcgctgggcttacagttccatagcaggatcctggatatcgacaatgttgacctggccatgggtaaaatgatggaacaagggcccgtgcttatcatcaccttccaggcgcaactcgtcatggtggtgcgaaacccaaagggcgaggtagtggaaggtgaccctgataaagtgctgcgaatgctgtacgtctgggcactgtgccgggatcaggacgagctgaacccatacgccgcttggaggttactcgatatctctgcctcttcaacagaacaaatcctttag

SEQ ID NO: 209298 - DNA, 294 bp, synthetic construct
  misc_feature 1..294: note = Description of Artificial Sequence: Synthetic coding sequence
  source 1..294: mol_type = other DNA
atggacagcagcagcagcagcagcgccgccggcctgggcgccgtggatcctcagctccagcatttcatcgaggtggagacacagaagcaaagattccagcagctcgtgcaccagatgactgagctgtgctgggaaaagtgcatggacaagccaggcccaaaactggactctcgggctgaagcctgctttgtcaactgcgtcgagagattcatcgacacaagccagttcatcctgaatcgcctggagcaaacccaaaaatcaaagcctgttttctcggagagcctgtcggactag

SEQ ID NO: 209299 - DNA, 270 bp, synthetic construct
  misc_feature 1..270: note = Description of Artificial Sequence: Synthetic coding sequence
  source 1..270: mol_type = other DNA
atggccgcccagatccccgagagcgaccagatcaagcagttcaaggagttcctaggcacttataacaagctaactgagacatgctttctcgactgcgtcaaagattttaccactcgggaagtgaaacctgaagagacaacatgttctgagcactgtttacagaaatatttaaagatgacccaacgcatctccatgcgatttcaagagtaccacattcagcagaatgaagccctggctgcaaaggcagggttgctgggccagcctcgttag

SEQ ID NO: 209300 - DNA, 270 bp, synthetic construct
  misc_feature 1..270: note = Description of Artificial Sequence: Synthetic coding sequence
  source 1..270: mol_type = other DNA
atggccgcccagatccccgagagcgaccagatcaagcagttcaaggagtttcttgggacctacaataagttgaccgagacttgtttcctggattgtgttaaggactttaccacccgggaagtgaagcccgaagaaactacctgctcagaacactgtctccagaaatacctcaagatgacccagcggatctccatgaggttccaggagtaccatatccaacaaaacgaagcccttgcggcaaaggccggcctgcttggccagcctcgctag

SEQ ID NO: 209301 - DNA, 135 bp, synthetic construct
  misc_feature 1..135: note = Description of Artificial Sequence: Synthetic coding sequence
  source 1..135: mol_type = other DNA
atggccgcccagatccccgagagcgaccagatcaagcagttcaaggagtttctgggaacctacaataaactaacagagacttgcttcttggactgcgtgaaagatttcaccacaagggaagtaaaacccgaatag

SEQ ID NO: 209302 - DNA, 270 bp, synthetic construct
  misc_feature 1..270: note = Description of Artificial Sequence: Synthetic coding sequence
  source 1..270: mol_type = other DNA
atggccgcccagatccccgagagcgaccagatcaagcagttcaaggaattcttagggacttataataagctgacagaaacgtgcttcctggattgcgtcaaagatttcaccacgagagaagtcaaacccgaggagacaacttgcagcgaacactgcctccagaagtacctgaagatgacacagagaatctccatgagattccaggaataccatatccaacagaacgaagctttagctgccaaggccggtctcctaggccaaccacgctag

SEQ ID NO: 209303 - DNA, 270 bp, synthetic construct
  misc_feature 1..270: note = Description of Artificial Sequence: Synthetic coding sequence
  source 1..270: mol_type = other DNA
atggccgcccagatccccgagagcgaccagatcaagcagttcaaggaattcctgggaacatacaataaattgaccgaaacatgcttcctggactgtgtgaaagactttacaacacgcgaagtgaagccagaagagacaacgtgctccgaacactgcctgcaaaaatacctgaagatgacacaacggatttccatgagattccaggagtaccatatccaacagaacgaagctttagcagcaaaagccggcctattggggcaaccccgctag

SEQ ID NO: 209304 - DNA, 381 bp, synthetic construct
  misc_feature 1..381: note = Description of Artificial Sequence: Synthetic coding sequence
  source 1..381: mol_type = other DNA
atgcccttcttcggcaacaccttcagccccaagaagaccccccccaggaaatccgctagcctgtctaacctgcattcactggataggagtacccgcgaggtagaattagggctggaatacggatcacctaccatgaatctcgcagggcaatccttgaaattcgaaaacggacagtggattgccgagactggcgtgagcgggggcgtcgaccgccgggaagtccagaggttgcgaagaagaaaccagcaactcgaggaagagaataatctgctgcggcttaaggtggacatcttgctggatatgctttccgagagcacggccgagagccacttaatggagaaggagctggacgaacttaggattagcaggaagaggaagtag

SEQ ID NO: 209305 - DNA, 1086 bp, synthetic construct
  misc_feature 1..1086: note = Description of Artificial Sequence: Synthetic coding sequence
  source 1..1086: mol_type = other DNA
atgggcaacgtgctggccgccagcagcccccccgccggcccccccccgccacccgctcctgccctggtgggcttgccaccgcctcctcccagtcccccaggattcaccttgccccctctgggcggcagtttgggcgcagggacctctacctcgcggagttccgagagaacgcctggtgctgctacggctagtgcttcaggagccgctgaggatggggcatgtggctgcttgcccaaccccggtaccttcgaggagtgccaccgcaagtgcaaggagctcttccctattcagatggagggcgtgaagctcacggtgaacaaaggcctctcaaaccactttcaggtcaaccatacagttgccctcagtacgattggagagtccaactaccattttggggtcacatacgtcggtaccaagcaacttagccctacagaggctttcccagtcctggtcggcgacatggacaacagcggttccctcaacgctcaggttatccaccagctgggccctggcttgcgatcaaagatggccatccaaactcagcagagcaaattcgtcaactggcaagtggatggggaatatagagggtcggacttcactgctgccgtaacactaggcaacccagatgtgctggtcggctccggcattttagtcgcacattatcttcaaagcatcactccatgccttgctctgggtggagagctggtatatcaccgccggccaggagaggaggggaccgtaatgtctctcgcgggtaagtacaccctgaacaactggcttgcgaccgtgactctggggcaggcaggtatgcatgccacatactaccacaaagcgtctgatcagcttcaggtcggcgtcgagttcgaagcctccacgaggatgcaagacactagcgttagcttcggctaccagctggacctgcccaaagcaaacctgctgtttaagggctcggtggatagtaattggattgtgggcgccaccctagaaaagaagttgcctccattacccctgacattggctctaggcgcatttctgaatcatcggaagaataagttccagtgtggttttggcctgacaatcgggtag

SEQ ID NO: 209306 - DNA, 1086 bp, synthetic construct
  misc_feature 1..1086: note = Description of Artificial Sequence: Synthetic coding sequence
  source 1..1086: mol_type = other DNA
atgggcaacgtgctggccgccagcagcccccccgccggccccccccctccccccgcccccgccctggttggcctgccccctccccccccatcaccaccaggttttaccctgccacccctggggggtagcctaggcgcaggcacatcaactagtcggagctccgagcgcaccccaggggccgctactgccagtgcctccggcgcagcagaggatggggcttgcgggtgccttcccaatcctggcacattcgaggaatgccaccgcaagtgcaaggagctgtttcctattcagatggagggagtgaaactgacggtcaataagggactgagtaaccacttccaggtgaatcacactgtggccctgtccactataggtgagtctaactaccatttcggagtcacctacgtagggacaaagcagttatccccgaccgaggcgtttcctgttctcgtcggcgatatggataatagcgggagtctgaacgcgcaggtgatccatcagctggggcctggactccggtcgaaaatggcgatacagactcagcaatccaaattcgtcaattggcaggtggatggagagtataggggctcggatttcactgctgcagttaccctgggcaaccccgacgtgctggtaggatccggcattctggtggcacactatctccagtccattacgccgtgcctggccttggggggtgaactggtctaccataggagacctggagaggagggaacggtcatgtctttagccggcaagtacacccttaacaactggctcgcaaccgtgactctgggtcaagctggaatgcatgcaacttactatcataaagctagcgaccagctgcaagtcggtgtagaatttgaggcctcgacaagaatgcaggacactagtgtgagctttggctatcagctcgacttacccaaagctaatctgctgtttaaagggtccgtggattcaaactggatcgtgggtgctactcttgaaaaaaagcttcccccactacctctcaccctggccctgggggcctttctgaatcatcgcaaaaataagttccagtgcggctttggcctaactatcggatag

SEQ ID NO: 209307 - DNA, 1086 bp, synthetic construct
  misc_feature 1..1086: note = Description of Artificial Sequence: Synthetic coding sequence
  source 1..1086: mol_type = other DNA
atgggcaacgtgctggccgccagcagcccccccgccggccccccccctccacccgcccctgccctggttggactgcctcctcctccaccatcgccacctggctttactctgcccccactggggggaagtttgggagcaggaacatcaacctccagatcgagtgagcgcacacccggcgctgctaccgcttcagcctcaggtgcagccgaggacggggcctgtgggtgcttaccaaatcccggcacatttgaggagtgtcacaggaagtgtaaagagcttttccccattcaaatggagggcgtgaagctgacagttaacaagggcttgagtaatcattttcaggttaatcacacagtggcgctcagtacaatcggcgaatcaaattaccacttcggtgtgacttacgtggggacaaaacagttatccccgacggaggctttcccggtgctcgtgggggacatggacaacagtggtagtctgaacgcccaggtgattcaccagcttggtcccggtcttcggtccaaaatggccattcagacccagcagtccaaatttgtgaactggcaggtggacggcgaatatcgcggttccgactttaccgctgccgttaccctgggcaaccctgacgtcctggttggatccggcattttggtagcacattatctgcagtcgataaccccctgcctcgccctgggcggcgagctcgtctaccatcggcgtccaggcgaggagggcactgtcatgtctctggccgggaagtatactctgaataattggcttgccaccgtaaccctgggccaagctggaatgcacgcaacctactatcataaagcttctgatcagctgcaggtcggagtggaattcgaggccagcaccagaatgcaggacacctccgtgagttttggttaccagctggatctgcctaaagccaatttactgttcaagggtagcgtggacagtaattggattgtgggagccacattggaaaaaaaactcccccctcttcccttaaccctagccctcggggctttcctgaaccaccgcaaaaataagtttcagtgtgggttcggactcaccatagggtag

SEQ ID NO: 209308 - DNA, 453 bp, synthetic construct
  misc_feature 1..453: note = Description of Artificial Sequence: Synthetic coding sequence
  source 1..453: mol_type = other DNA
atgcccagcagcggcagcgtgagccggagccggcagcggggccggtcgatggcctcaaggggcttcgacggctccagacgcggcagcctgcgccgtgccggcgctagggagcctcccagcgaagtaatcgaggcagcggcacaggctagcggaagctgctggtccagcccttttttttctgctagcacaccctccgccgctgccacaggggtgccagggcccacagatatggcagcggtgttgcagcaggtgctagaaaggacagaactgaataagttacctaagtctgtgcagaataagctggaaaagttccttgctgatcagcagtctgaaattgatggtttgaaggggcgacacgaaaagtttaaggtggaatcggagcagcagtacttcgagattgagaagaggttgtcccactctcaagaacgtctggtcaatgaaacccgtgaatag

SEQ ID NO: 209309 - DNA, 7092 bp, synthetic construct
  misc_feature 1..7092: note = Description of Artificial Sequence: Synthetic coding sequence
  source 1..7092: mol_type = other DNA
atggccgccgtgctgcagcaggtgctggagcggaccgagctgaacaaattgccgaagtcagtgcagaataagttggaaaagtttttggcggaccagcagtccgaaatcgacggcctgaaaggtcggcatgagaagttcaaggtagaaagcgagcagcagtacttcgagatcgagaagagactgagccattctcaggagcgtctcgttaatgagaccagggaatgccagagccttcgcctcgaactagaaaaactgaataatcagctgaaggcattgacagagaagaacaaggaacttgaaattgcgcaggatcgcaatatagccatccaatcacagttcactcgcacaaaggaagaacttgaagcagagaagcgggatttaatccggacgaacgaacggctgagccaggagctagaatatcttaccgaggacgttaaaaggctcaacgaaaagttaaaggaatccaatacgactaagggggagctgcagctaaaattggatgaactgcaggcttctgacgtgtctgtcaaatacagggaaaaacggctcgaacaggaaaaggagctgctgcacagtcagaacacttggcttaacacagaactcaaaacaaaaaccgacgaactcctggccctgggccgagagaaggggaatgagattctcgagttgaagtgtaaccttgagaacaagaaggaggaagtgtcaaggctggaagagcagatgaatggcttgaagaccagcaacgagcatctacagaaacatgtggaagacctcctgaccaaactcaaggaagcaaaagagcagcaggcctcaatggaggaaaaattccacaatgaattgaatgcacatattaaactgagcaatctctacaagtctgctgcagacgattcggaggctaagagcaacgagttaactcgggctgtcgaggaacttcataaactactaaaggaagccggtgaggccaacaaagcaatccaggatcatttactggaagtcgaacagtcaaaggatcaaatggagaaagagatgttggagaaaattggcaggctggaaaaagaattagagaacgccaatgatctgctgtctgccaccaagcggaagggagctatcctgagcgaagaagaactagcggcgatgtcccccacggcggctgccgtcgcgaagattgtgaagccaggcatgaagctgacagaactgtacaatgcctatgtcgaaacacaagaccagcttctgctggagaagctggagaataaaaggatcaacaagtaccttgacgaaattgttaaggaggttgaggccaaggcccctatactcaaacgtcagcgggaagagtacgaaagggcccaaaaagcagtggcctcgttgtccgtcaaattggagcaagccatgaaggaaatccagcgtctgcaggaggacacagataaggctaacaagcagtcatcagttctcgagcgggacaatagaaggatggagatccaggtgaaggacctctctcagcagattcgagtactgttaatggaactcgaagaggctcgcggaaatcatgtgattcgggacgaggaagtttccagcgcggacatctcttctagctccgaggttatttcacagcacctggtttcttaccgtaacatcgaggagctgcagcagcaaaatcagaggctacttgttgcgttgcgagagttaggggaaacacgcgagagggaggagcaagaaaccacttcctctaaaatcaccgagctgcagctgaagctggaaagcgccctgaccgaactggagcagctgagaaagtccagacagcaccagatgcagctagtcgacagcatcgtccgacagcgggacatgtaccgaatcctcttgtcccagacaactggagtcgctatccctctgcatgccagctccctggacgacgtaagtctggctagcacacccaagagacctagcacgtctcagacagtgagtacccctgcccccgtcccagtgattgagtccaccgaggccatcgaagctaaagccgccctcaaacagttacaagagatattcgagaattataaaaaagagaaggctgaaaatgagaagatccagaatgaacaattagaaaaactccaagagcaagtgacagacttacggagccagaatactaaaattagcacacagctggatttcgcaagcaagcggtatgagatgcttcaggacaatgttgaaggttatcgcagagaaataactagcctacacgaacgaaaccaaaagttaaccgccaccactcaaaagcaggagcaaatcattaacaccatgacccaggatctgcgtggcgcgaatgagaaattggccgttgctgaagtgcgggctgaaaatcttaaaaaagagaaagagatgctcaagctcagtgaagtacgactttctcaacagagggaatcattactcgctgagcagcgcggccagaatttgcttcttacaaaccttcaaacaattcaagggattttggagcggtcggaaacagagaccaagcagaggctctcgtcgcagattgagaagctggagcacgaaatctctcacctgaaaaagaaacttgagaacgaagttgaacagaggcataccctcactcggaatcttgacgtccagcttttggacacaaagcgacagctcgacactgagacaaaccttcatcttaatacaaaggagctgctgaagaatgctcaaaaagagatagccactctgaaacagcatctttcaaacatggaagttcaggttgccagccagtcttcacaaagaaccggtaaaggccagccctccaacaaagaggatgtcgatgacctcgtctctcagcttagacagaccgaggagcaggtgaacgacctgaaggagagactgaagactagcaccagcaacgtggaacagtatcaggctatggtgacttcgctggaagaaagtctgaacaaagagaagcaagtcacagaggaggtgaggaaaaatatcgaagttcgcctgaaggagagcgcggaatttcagactcagctggagaaaaagctaatggaagtggagaaggaaaaacaggaactgcaagatgacaagcgaagggcaatcgaaagcatggagcaacagttatccgaacttaagaaaactctctcttcggtgcagaatgaggtccaggaggcactccaaagggcatctacagcgctaagtaatgagcagcaggcacgccgtgactgccaagaacaggctaagatagcagtggaggcccagaacaaatatgaacgggaattaatgcttcatgctgctgatgttgaggcattgcaggcagcaaaggagcaggtgtccaaaatggcttctgtaagacaacacctggaagaaactactcagaaggcggagtctcaactgttggagtgtaaagcttcttgggaagagagggagcgtatgctaaaagatgaagttagcaagtgtgtttgtaggtgcgaggacttggaaaagcagaataggcttttacacgatcagatagagaagctctctgacaaggtggtggcatcagtgaaagaaggagtacaaggacccctcaacgtgtcattgtccgaggaaggcaaatcccaagaacagatcctggagattcttcggttcattaggagggaaaaggaaatagcagaaactaggttcgaagtcgcacaggtggaatccctgcgataccgacaacgggtggagcttctggagagggagctccaggagctgcaggattctcttaatgctgagcgcgaaaaggtacaggtgactgcgaagaccatggctcagcacgaggaactgatgaagaaaactgaaaccatgaacgtggtaatggaaactaacaagatgctgagagaagaaaaggagcgtctggaacaagatttgcagcagatgcaggcgaaagtgcgaaaactcgagttggacatattaccactgcaggaggccaatgccgagttgtctgagaaatcaggaatgctgcaggctgagaaaaaactgttggaagaggacgttaaaagatggaaggcgcgcaaccagcacctggtgtcacaacagaaagacccggataccgaagagtatcgaaaactcctcagcgaaaaagaggttcatacaaaacgaatccaacagctgactgaagagatcggcaggctgaaggcagagatcgcacggagcaacgcctctctcacaaacaaccaaaacctgatccaatcgctgaaagaagatctcaataaggtacggacagaaaaagaaactatccaaaaagatctggatgctaagattatcgacatccaggaaaaagtgaagacaatcacccaggttaagaaaatcgggcgacgttacaaaacccagtacgaagagcttaaggcccagcaggataaagtaatggagacgagtgcacagtcaagcggcgaccatcaagagcagcacgtctcagtgcaagagatgcaagagttgaaggagaccctgaatcaggctgaaactaaaagcaaatctctggagtcccaggtggagaaccttcagaaaactctctcagagaaggagactgaagccaggaacctacaagagcaaacggttcaattacaatccgagttatcaaggctccgccaggacctgcaggatcgcacgactcaggaggagcagctgaggcagcaaattacagagaaggaggagaagacacggaaagctatcgtggcagccaaatccaagattgcccacctggccggcgtcaaagatcaattaacgaaggagaatgaggagttaaagcagagaaacggtgccctggatcagcagaaggacgaattggacgtgcgtatcacggcattgaagtctcagtacgagggcaggattagccgactcgagcgggaactgcgggagcaccaggaacgtcatctggagcagcgggatgagccccaggagccgtccaacaaggtgcccgagcagcagagacagattactctgaaaaccacccccgccagcggggagagagggattgcatcaacgtctgatcctcccaccgccaatattaagcccaccccagtggtgtcaaccccttcaaaagtcacggctgcggccatggctggcaataagtcgacaccaagggccagcatacgtcctatggtgacgccagccaccgtgacaaaccccactaccaccccgaccgccaccgtgatgcccactactcaggttgaaagccaggaggcaatgcagtcggagggtcctgtggagcacgtgccagtgttcgggtcgacatcaggatcggtgaggtctacctcccccaacgtgcagcctagtatatctcaaccaatcctgactgttcagcagcaaacccaggccacagcctttgtgcagcccacacaacaatcacatccacagattgagccagccaatcaagagctgtcttccaacattgtggaagtagtccagtcatccccagtggagcgtcctagcacctccaccgctgtgttcggtacggtgagcgctacaccaagttccagcctgcccaagaggacgagggaggaggaggaggacagcaccattgaagccagcgaccaggtgtctgatgacacagtggagatgcccctgcctaagaaattgaaatccgtgacccccgtgggcacagaagaggaggtcatggctgaggaatcaactgacggcgaggttgaaacccaagtgtacaaccaggattctcaggattccatcggggaaggcgtcacccagggagattacacaccaatggaggactccgaagaaacaagccagtctctccagatagatcttggcccactgcaatctgatcagcagaccaccacgtcaagtcaggacgggcaggggaaaggggatgacgtaatcgtcattgattcggacgatgaagaggaggatgatgacgagaatgacggcgagcatgaggactacgaagaggatgaggaagacgacgatgatgatgaagatgatactggcatgggggacgagggcgaagactccaacgagggcactggttctgccgacgggaatgacggatacgaagccgatgatgctgagggaggcgatggtacagaccccggaacagagactgaagagtctatgggagggggggaaggtaatcatcgcgccgctgatagtcagaactcaggcgaaggaaataccggggctgccgaatcaagtttctctcaggaggtcagtcgcgaacaacagccatcatcagcaagcgaacggcaagccccacgggccccccaatccccaaggcgcccaccgcaccccctgccacctaggcttacaatacacgccccccctcaggagctcgggccacctgtccagcgtatccagatgacaagacgccagagcgtggggagaggactgcaattgacaccaggcatcgggggcatgcagcaacacttctttgacgacgaagatcgtacagtgcccagtacccctacgttggttgtcccacaccgaacagatggattcgccgaagccattcattcccctcaagtggcaggtgtgcctaggttcagattcggacctccagaagacatgccacagacctcgagttctcactcagaccttggtcaacttgcctcccaaggcggtttgggcatgtacgagacaccattatttcttgctcatgaagaggaatcaggtgggaggagcgtgcctaccacgccacttcaggttgcggcacccgttaccgtgttcacggagagtacaaccagcgacgcaagcgaacacgcttcccagagcgtgcccatggtaaccaccagcactggaaccctctccactacaaatgaaacagccaccggggacgatggagatgaggtctttgtagaagcggaatctgaaggcataagctcggaagccggtctggaaatcgattctcagcaagaggaggagccagtgcaggcgtctgacgaaagcgatcttccctcaacatctcaggatccaccgtcgtccagcagcgtggacacctctagctcccagccgaaaccgttcaggagggtgcgattgcagaccacacttaggcaaggggtgcggggccgccagttcaaccgccagcggggcgttagccacgcaatgggaggacgaggcggaatcaaccgcggaaatatcaactag

SEQ ID NO: 209310 - DNA, 453 bp, synthetic construct
  misc_feature 1..453: note = Description of Artificial Sequence: Synthetic coding sequence
  source 1..453: mol_type = other DNA
atgcccagcagcggcagcgtgagccggagccggcagcggggccggtccatggcatctcgcggcttcgatggatccaggagggggagcctcaggcgagctggtgcccgagaacccccctcagaggttattgaagccgcagcacaagcgagcggttcatgctggtcttcacccttttttagcgcgtccaccccaagcgctgcggcaaccggcgtccctgggcctacggatatggcagcagtactgcagcaggtattggaaagaaccgaactaaacaaactcccaaaatctgtgcaaaataagctggaaaagttcctggccgatcagcaaagcgagattgacggtctcaaagggagacatgaaaagttcaaggtagagtctgagcagcaatactttgaaattgagaagcgactctctcactcccaagaacggctggtcaatgagactcgagagtag

SEQ ID NO: 209311 - DNA, 510 bp, synthetic construct
  misc_feature 1..510: note = Description of Artificial Sequence: Synthetic coding sequence
  source 1..510: mol_type = other DNA
atggcccccccctgggtgcccgccatgggcttcaccctggccccctccctaggatgtttcgtaggttcgcggttcgtgcatggggaaggactgcgttggtacgcaggattacagaaaccttcttggcaccccccacactgggttctggggccagtctggggcacactctatagcgctatgggctatgggtcttatctcgtgtggaaggaactgggcggatttaccgaaaaggctgtagtgcctttggggctttacactggccagctggctttgaactgggcctggcctccaatcttcttcggggcaagacagatggggtgggcactggtggatctgctgctggtgagcggggcggccgccgctactaccgttgcttggtatcaggtgagccctctggctgcaagactcctgtatccatacctggcttggctggcgtttaccacaactctcaattattgtgtgtggcgggacaatcacgggtggagaggcggccgtcgcctgccagaatag

SEQ ID NO: 209312 - DNA, 510 bp, synthetic construct
  misc_feature 1..510: note = Description of Artificial Sequence: Synthetic coding sequence
  source 1..510: mol_type = other DNA
atggcccccccctgggtgcccgccatgggcttcaccctggccccctccctgggctgcttcgtggggtccagattcgtccatggggaagggctccgatggtacgccggcttacagaaaccttcgtggcacccaccccactgggtcctggggcctgtgtggggaacactgtacagtgctatgggctatggcagctatctggtctggaaagagctgggaggctttaccgagaaggccgttgtacccctaggcctgtacacgggacaacttgctttgaactgggcttggccacccatattctttggcgctcgccagatggggtgggccctagtggatttactcctcgtgagtggcgccgcagctgcaaccactgtggcctggtatcaggtgagccccctggccgcccgactgctatacccttatctggcttggctggcgttcactaccactttgaattactgtgtctggcgagacaaccacggctggaggggaggccggcggctgcccgaatag

SEQ ID NO: 209313 - DNA, 309 bp, synthetic construct
  misc_feature 1..309: note = Description of Artificial Sequence: Synthetic coding sequence
  source 1..309: mol_type = other DNA
atggccccccacctgctgtggtgccccaccaacggcctgggcctgggcggaagcccagccggtcagtggggcggcggctcccactacagaggacttgtgccaggagaaccagccggtcgaccgcccgccctacccctgcctgggctggccgggctgcacgaccacacccagctgctgaggatggcgggccagccctggctggcatggggaaccgctgctgcacgagtctccgcgcggccgacgcgggactgtagctgcactagccgctgccaccatgcatgtgatgtggtggcagtcacgctcagctag

SEQ ID NO: 209314 - DNA, 324 bp, synthetic construct
  misc_feature 1..324: note = Description of Artificial Sequence: Synthetic coding sequence
  source 1..324: mol_type = other DNA
atggcccccccctgggtgcccgccatgggcttcaccctggcccccagtctagggtgctttgtgggctccagatttgttcatggggaggggctcagatggtatgcgggactgcagaaacctagctggcaccccccgcactgggtcctgggacccgtttggggcactctttatagtgctatgggctacggttcttacctcgtctggaaggaactcggagggttcacagaaaaggctgtggtgcctcttgggctctatactgggcagctggcacttaactgggcgtggccccccatcttcttcggcgctcgccagatgggttggtag

SEQ ID NO: 209315 - DNA, 609 bp, synthetic construct
  misc_feature 1..609: note = Description of Artificial Sequence: Synthetic coding sequence
  source 1..609: mol_type = other DNA
atgtgctacggcaagtgcgcccggtgcatcggccacagcctggtgggtctcgccctcctgtgtattgcggcaaatatcctgttgtattttcccaacggcgaaactaagtatgcctccgaaaatcatctgagtaggtttgtgtggttctttagcgggattgttgggggagggcttttgatgttattacccgcattcgtgttcatcggcttggaacaggacgactgttgcgggtgttgtgggcatgagaattgcgggaagcggtgtgcaatgctttcatcagtgctggctgcactgataggcatcgcaggatcagggtattgtgtgatcgtcgccgcactcggactcgctgaagggcccctgtgcttggactccctggggcagtggaactacacatttgcttcaacggagggacagtaccttctcgatacctccacatggtctgaatgtactgagccaaaacacattgtcgaatggaatgtcagtctctttagcatcctcctggcactgggtggcattgaatttattctttgtttgatacaggtgattaatggagtgctggggggcatttgtgggttctgctgctcacatcagcaacagtatgactgttag

SEQ ID NO: 209316 - DNA, 699 bp, synthetic construct
  misc_feature 1..699: note = Description of Artificial Sequence: Synthetic coding sequence
  source 1..699: mol_type = other DNA
atgtgctacggcaagtgcgcccggtgcatcggccacagcctggtgggtctcgcactgctgtgcattgccgccaacatactactatacttcccaaacggagagacaaagtacgcgagcgagaaccacttgtcccgattcgtgtggtttttctctggcatagttggaggggggctcctcatgctgctgccagccttcgtttttatcgggctggagcaggatgattgttgtgggtgttgtggtcacgagaactgcggtaagagatgtgcaatgcttagcagcgtattggcagccctcatcggtatcgctggatccgggtactgcgtgattgtggccgcgctgggactcgcggaaggccctctgtgcctggactctttagggcagtggaactatacttttgcaagcaccgagggccaatatctgctggacacaagcacctggtctgagtgtactgagcccaagcacattgtggaatggaatgtgtccctttttagtatcttgctcgcactgggcggaattgaattcattttgtgcctgatccaggtcatcaacggtgtgctgggaggcatatgcggattttgctgcagccaccagcagcagatgactgccaagaggacaaacccgggacaatcccacaatctgcctctcttccactgcaatttgtatatcagcctggtgttcatctgcaaaaccttgtattag

SEQ ID NO: 209317 - DNA, 609 bp, synthetic construct
  misc_feature 1..609: note = Description of Artificial Sequence: Synthetic coding sequence
  source 1..609: mol_type = other DNA
atgtgcaccggcggctgcgcccggtgcctgggcggcaccctgatcccgctggctttcttcggttttctggccaatatacttctgttttttcccggcggcaaggtaatagatgacaatgatcatctgagccaggaaatctggtttttcggggggattctcggctccggcgtgctaatgattttccccgcccttgtgtttctcggtttgaagaacaatgattgttgtgggtgctgcggcaacgagggctgcggcaaacgtttcgcaatgttcacctcgactatcttcgccgtagtcgggtttcttggcgctggctattctttcatcatttcagccatttccattaacaaaggcccaaagtgtctaatggccaacagcacgtggggctaccccttccacgacggagattatctgaacgacgaggccctttggaacaaatgccgggagccacttaatgttgtgccatggaacttgacacttttcagtatcctactggtagtgggaggaatccagatggttctttgtgctatccaagttgtcaatggcctgcttggtacgttgtgtggggattgccaatgttgcgggtgctgcggcggcgatggcccagtgtag

SEQ ID NO: 209318 - DNA, 594 bp, synthetic construct
  misc_feature 1..594: note = Description of Artificial Sequence: Synthetic coding sequence
  source 1..594: mol_type = other DNA
atgtgcaccggcaagtgcgcccggtgcgtgggcctgagcctgatcaccctgtgtctggtttgtattgtcgctaatgcactgcttctggttcccaatggggagacctcctggacaaatacaaaccacctgtcactgcaggtgtggctgatgggggggttcattggcggcgggctgatggtgctctgtccaggaatagcagcggtgagagccggaggtaagggatgctgtggtgccggctgctgcggcaatagatgcaggatgttgaggtccgtgttctcctccgccttcggcgtgctgggcgccatttattgtctctctgtgagtggggccggtttaaggaatggcccgaggtgtctgatgaacggggaatgggggtaccattttgaggataccgccggcgcttatctccttaatcgaaccctgtgggacaggtgcgaggcaccaccccgcgtcgtcccttggaacgtcacattattctcactcttggtcgctgcctcatgcttagagatcgtcctgtgtgggatccagcttgtgaacgctacgatcggcgtgttctgtggggactgcaggaagaagcaggatacccctcactag

SEQ ID NO: 209319 - DNA, 438 bp, synthetic construct
  misc_feature 1..438: note = Description of Artificial Sequence: Synthetic coding sequence
  source 1..438: mol_type = other DNA
atgagcgccagcgccgccaccggcgtgttcgtgctgagcctgagcgcaattccagttacttatgtatttaatcacctcgccgcacagcacgactcctggaccattgtgggtgtcgctgccctgatactattcctggtggcccttctggcgcgtgtcctcgtcaagcggaagcccccacgggatcctctgttctacgtatatgctgtttttgggtttacatcagttgtgaaccttataattggtttagagcaggatgggatcatagatggattcatgacacactatctgagggaaggagagccgtacctgaacacagcctatggtcatatgatctgctattgggatggctcagctcattacctgatgtatcttgtgatggtggccgccattgcatgggagtgttggcacatctgctcaatcctgttcctgacattatag

SEQ ID NO: 209320 - DNA, 1113 bp, synthetic construct
  misc_feature 1..1113: note = Description of Artificial Sequence: Synthetic coding sequence
  source 1..1113: mol_type = other DNA
atgagcgccagcgccgccaccggcgtgttcgtgctgagcctgagcgccatccccgttacctacgtgtttaatcacctggcagctcagcatgattcatggacaattgtcggcgttgctgctctgatcctgttcctggtcgcactcttagctagggtgttggtaaagcgaaagccccctagggaccctctcttttacgtatatgctgtgtttggattcacctcggtggtcaatttgatcattggcctggagcaagacgggatcattgatggctttatgacgcactatctgagggagggtgagccctatctcaataccgcctatggtcatatgatttgctattgggacggtagcgctcattacttgatgtacttggtcatggtggcagccatcgcatgggaagaaacttaccggactatcgggttatactgggttggcagcatcatcatgtcggtggtggtgttcgtgccaggcaatattgtgggtaagtatggaactcggatttgcccagcattctttctttccattccgtacacctgtctgcctgtctgggctggtttcaggatatataaccaacctagcgagaattacaattatccgagcaaggtcatccaggaggcccaggcaaaagatctgctgaggcgtccgttcgacctcatgctggtcgtgtgcctgcttcttgcgaccggcttctgtctgttcagaggtttgattgcactagactgtcctagtgaactctgccggctgtatacccagttccaggagccttatttgaaggatccagctgcctatcctaagattcagatgctagcctatatgttctactccgtaccttattttgtaacagcactgtacggcctagtagttcctggctgttcttggatgcccgatatcaccctgatacacgctggaggtctggctcaggcacagttttcccacatcggggcgagtttgcatgctcgcaccgcttacgtctacagggtcccagaagaggctaagatcttattccttgcactcaatatcgcttacggcgtactcccacagctgctagcctacaggtgcatctacaaaccggagttcttcatcaagactaaggcagaagagaaggtcgagtag

SEQ ID NO: 209321 - DNA, 1020 bp, synthetic construct
  misc_feature 1..1020: note = Description of Artificial Sequence: Synthetic coding sequence
  source 1..1020: mol_type = other DNA
atgagcgccagcgccgccaccggcgtgttcgtgctgagcctgagcgctattcccgtaacatacgttttcaaccatttagccgcccagcatgactcttggaccatcgtgggtgttgcagctttgatcttattcctcgtggcgctccttgcccgagtgttggttaaaaggaaacctccccgggacccactcttctatgtttacgcagttttcggattcacctctgttgtgaatcttatcataggcttagaacaggatgggatcatagacggatttatgacccattacctgcgggaaggagaaccctatctgaacactgcgtatggacacatgatctgctactgggacgggtccgcacattacctgatgtatctcgtcatggtcgctgcaatcgcctgggaagagacgtaccgcacgattggcctatactgggtcgggagtattatcatgtccgtggtggtctttgttccgggcaatattgttggaaagtatggcacacgcatctgccctgcgttctttctcagtataccttacacctgtctgcctgtttgggcaggcttccgcatctacaaccagccttccgagaattataactacccatcaaaggtcatccaagaggcacaggcaaaggaccttctaaggcgcccctttgacctgatgctcgttgtgtgtctgcttctggctaccggcttctgtctcttccggggactgatgctcgcgtatatgttttattctgttccttattttgtgacagcactctatggcctggtagtgcctgggtgcagctggatgcctgacattacactcatccatgcaggcggactggcccaggcacagttttcgcacatcggggccagtttacacgctcgcacagcttacgtgtatcgggttccagaggaagctaaaatcctcttcctggccctcaatattgcgtatggcgtgcttccacaacttctggcttatagatgcatttacaaacctgaattctttattaagactaaggcagaggagaaggtggagtag

SEQ ID NO: 209322 - DNA, 1122 bp, synthetic construct
  misc_feature 1..1122: note = Description of Artificial Sequence: Synthetic coding sequence
  source 1..1122: mol_type = other DNA
atgagcgccagcgccgccaccggcgtgttcgtgctgagcctgagcgcaatccctgttacatacgtgtttaatcatctagctgcccaacacgattcttggacaatcgtcggtgtagcggcgctgattctgtttttggtcgcgttgttggctcgcgtgctcgtcaagagaaagcctccacgagacccactgttttacgtctacgcagtcttcggattcacaagtgtggtgaatctcatcattggcctagagcaggacgggataatcgatggatttatgacgcattacttacgcgaaggtgaaccatatctcaatacggcatatggacacatgatctgttattgggatggatcagcgcactacctcatgtatttggtaatggttgcagctatcgcctgggattgttaccgcgagacgtatcggactattggcttatattgggtgggttccattatcatgagcgttgtggtgttcgtacccggcaacatcattggtaaatacgggactcggatctgcccagctttcttcctgtcaattccttatacatgtctgcctgtgtgggccggtttccgcatttataatcagccatcagagaactataattacccgtcaaaagtgatccaggaggcccaggccaaggacctgctgcggcgtcccttcgatttgatgcttgttgtgtgtttactgctggctaccggcttttgtctgtttcgcggcctgattgccttagattgcccctctgaattatgccgtctgtacacacagttccaggagccatacttgaaagacccggccgcctatccaaagattcaaatgctagcatatatgttttacagcgtgccctacttcgtaacggccctgtacggattggtcgtgccaggatgctcttggatgcccgacattactctgattcatgccggcggcctcgcccaagcccagttttctcacatcggggcctccttgcatgcccgcaccgcctacgtgtatcgggtgcctgaggaggcaaagatccttttcctcgcgctgaatattgcatacggggtccttcctcaactgttggcatacagatgtatctacaagcctgaatttttcatcaagaccaaggccgaagaaaaggtagaatag

SEQ ID NO: 209323 - DNA, 567 bp, synthetic construct
  misc_feature 1..567: note = Description of Artificial Sequence: Synthetic coding sequence
  source 1..567: mol_type = other DNA
atgagcgccagcgccgccaccggcgtgttcgtgctgagcctgagcgccatcccagtcacttacgtgtttaaccacctggcagctcagcatgactcctggacaattgtgggagtcgcagctcttatactcttccttgtggccctcctggcgcgggtcctcgttaaaaggaagccacctcgagatccgcttttttatgtgtacgccgttttcgggtttacatctgtcgtaaatctcattataggactcgaacaggacggtattatagatggattcatgacccattacctgcgcgagggagaaccatatctcaacacagcctacggacacatgatttgctattgggacggttccgcgcactatctgatgtaccttgtgatggtcgccgccattgcgtgggaagagacctatcggaccattggcctatactgggttggatcaatcattatgagcgtagtggtctttgtgccggggaacattgtggacgcagggatctatgtattattctgcagcttactctgtgattgcaccgtctggctgtctggttcctggatgtttttggatgcttag

SEQ ID NO: 209324 - DNA, 1020 bp, synthetic construct
  misc_feature 1..1020: note = Description of Artificial Sequence: Synthetic coding sequence
  source 1..1020: mol_type = other DNA
atgagcgccagcgccgccaccggcgtgttcgtgctgagcctgagcgccatcccagtcacttacgtatttaaccaccttgcagctcaacacgacagttggacaatcgtcggcgtggctgccctgatcctgttcctcgtggctttactagccagagtgcttgtgaaacggaagcccccaagagatccactgttttacgtctatgcagtgtttggatttacctccgtggtgaacctaattatcggtctggagcaggacgggataatcgacgggttcatgacccattacctgcgggagggggagccatacttgaacacagcttatggacacatgatctgctactgggatggctcggctcattatctcatgtatctcgtcatggtagctgccatagcctgggaagaaacttaccgaaccataggactctattgggtcggtagcataattatgagtgtcgtggtgtttgtccccggaaacatagtcggaaagtatggcaccaggatctgtccagcttttttcctttccatcccgtacacctgccttccggtttgggcaggcttccgaatctataatcagccaagcgaaaactacaactatccgagcaaagttatccaagaagcccaagccaaagatttgttgaggcgacctttcgatctcatgctcgtggtctgtctacttctcgccaccggcttctgtctgttccgcgggttgatgctggcctacatgttttactccgtgccatactttgtgacagcactgtacggactggttgtcccgggttgctcttggatgccagatatcactctgattcatgctggagggcttgcgcaggcccagttcagccacattggggcctccttacatgccagaactgcctacgtgtatagggtgccagaggaggccaaaattctcttcctcgccctgaatatcgcctacggtgtgctcccccagctcctagcctaccggtgcatctataaacctgaattttttataaagactaaggccgaggaaaaagtagaatag

SEQ ID NO: 209325 - DNA, 1056 bp, synthetic construct
  misc_feature 1..1056: note = Description of Artificial Sequence: Synthetic coding sequence
  source 1..1056: mol_type = other DNA
atggacatcccccccctggccggcaagatcgccgccctgagcctgagcgctctgcctgtgagctacgccttaaaccacgtttctgccctgtcccacccgctgtgggtggccctgatgtccgccctgatcctcggcctcctctttgtcgctgtgtattcactaagtcatggcgaggtaagctacgaccccctctatgcagtgttcgccgtttttgcattcaccagcgtggtcgaccttataatcgccctccaggaggactcttacgttgtgggctttatggagttttataccaaggagggcgaaccatacttacgaacagcacacggcgtgttcatctgttactgggacggtacagtccattacttgctgtatctggctatggccggcgccatctgtcggaggaagcgctacagaaatttcggcctctactggttgggtagcttcgccatgagcatccttgtatttctgacgggcaatatactggggaagtattcctcggagatccgtcctgcattctttcttactatcccgtatctcctagtgccgtgttgggccggaatgaaagtgttctctcagcctagggcattgacaaggtgcaccgccaatatggtgcaggaggaacagcgtaaaggcctcctccagcgacctgcagatttggctcttgtaatctacttgattcttgctggcttctttaccttgtttcgtggtctcgtggtactggactgtcccaccgacgcttgcttcgtgtacatataccaatacgaaccctatcttcgagacccggttgcgtaccccaaggtccagatgcttatgtatatgttctacgtcttgcccttttgcggccttgcagcgtacgcattgaccttcccgggctgcagctggcttcccgactgggcgctagtgttcgcgggcggcatcgggcaagctcaattttcgcatatgggcgccagcatgcatctccgcacgccttttacctaccggtgtctgcagtggcccgcctttttccatcagccaccgcccagcgatccactcgccctgcacaagaagcagcattag

SEQ ID NO: 209326 - DNA, 1134 bp, synthetic construct
  misc_feature 1..1134: note = Description of Artificial Sequence: Synthetic coding sequence
  source 1..1134: mol_type = other DNA
atggacatcccccccctggccggcaagatcgccgccctgagcctgtccgcccttccggtgtcgtacgcgctgaaccatgtgagtgcgttatcacatcctctgtgggtggccctgatgtctgccctgatactgggacttctttttgtcgcagtttatagcctgtctcacggggaggtgagctacgatccgctctatgcagtattcgccgtgttcgccttcaccagcgtcgtggatctgattatcgctctgcaggaggactcttacgtcgtgggctttatggagttttacactaaagagggagagccctacctcagaactgcccatggcgtttttatatgctactgggacggtacagttcactatctgttatatctggcaatggcgggggcgatatgcaggcgcaagaggtaccggaactttggcctgtactggctcggatcattcgccatgtcaatcctggtcttccttacaggaaatattttgggcaagtacagtagcgagatcagacctgcattctttctgacaatcccttacctgctggtgccatgctgggcagggatgaaggtgttcagtcaacctcgcgcactgaccaggtgcaccgccaacatggtacaggaagagcagagaaaagggcttctccaacggcccgctgacctcgcactcgttatttatttaatcctcgccgggttttttactctgtttagaggcctcgttgtcctggattgcccaacagatgcctgcttcgtgtatatctaccagtacgagccatatcttagggatccggtggcctacccgaaagttcaaatgctgatgtacatgttttacgttctacctttctgcggactggcagcttacgcactgacctttcctggctgcagctggctacccgactgggccctggtatttgccgggggaataggccaagcccagttctctcacatgggagcctcaatgcaccttcgaacgccctttacataccgggtacccgaggacacatgggggtgcttcttcgtctgtaacctgctatacgcccttggcccacacctactggcctatcggtgtcttcagtggcccgccttttttcatcagcctccgccgagcgatcccctggcactgcataagaaacagcactag

SEQ ID NO: 209327 - DNA, 642 bp, synthetic construct
  misc_feature 1..642: note = Description of Artificial Sequence: Synthetic coding sequence
  source 1..642: mol_type = other DNA
atggacatcccccccctggccggcaagatcgccgccctgagcctgtctgctcttcccgtgtcgtacgctctgaatcacgtgagcgccctgtcacaccccctctgggtggcactgatgtccgccttgattctcgggctgctgttcgtggcagtgtattctttgtcccacggagaagtcagctatgacccactgtacgcagtctttgccgtgtttgctttcacctccgtggtcgatctcattatagctctgcaggaggatagttacgtagtcggcttcatggagttctataccaaggaggtgctggggggccgcccgggctctccactgccacactgtccttccgaatcccctacatgcccccacagagagtctcatacatgcgcccagcgtactgagtctagctcggccactggtatggctctgtttaccaccagtagcacttggccctggcccgccccatcagctgagggcgccggcggcagagagcgcgtggctcccgatccaggtagggaagtcgctagttccgatggcgtccccggccagggcggagcaaggtctgtatgccgcagaaatcaggacgcatcactcggactgcagccgggcgttgcccgccggagatttcagggtactagccaggtctag

SEQ ID NO: 209328 - DNA, 1257 bp, synthetic construct
  misc_feature 1..1257: note = Description of Artificial Sequence: Synthetic coding sequence
  source 1..1257: mol_type = other DNA
atggcccccacccagggcccccgggcccccctggagttcggcggcccactgggcgctgccgcacttctcctgcttttgcccgccacgatgttccatctgctgctggccgctagatccggcccagctaggctgcttgggcctcctgcttcactcccaggtctcgaagttctgtggtcccctcgcgctctgctgttgtggcttgcttggttgggtctgcaagcagcactgtacttgttacccgcccgcaaggtggctgagggacaggagctgaaagacaagagcaggctacgttaccctattaacgggtttcaagccctggtgctgaccgctctcctggtgggattagggatgagcgccggactgcctctcggcgccctcccggaaatgttgttgcccttagcgttcgttgccacacttacggccttcatcttttccctatttctttatatgaaagcccaagtcgcacctgtgagcgcactggccccagggggtaactctggcaacccaatctacgacttttttctgggccgcgagctgaatcccagaatctgttttttcgacttcaagtatttttgcgagctgcgccctgggctgatcggctgggtattaattaacctggccctattgatgaaagaagccgagctacgcggcagtccttcgctcgccatgtggcttgttaatgggttccaattactatacgtgggagacgctttgtggcatgaggaggccgtgttgaccaccatggacataacccacgacgggtttggcttcatgctggcgtttggtgacatggcttgggttcctttcacgtactcattgcaggcccaatttctgcttcaccaccctcagccactcggactacccatggctagcgtcatctgcctcataaacgcaaccggatactatatcttcaggggggccaattctcaaaagaacactttcagaaagaacccgtccgatcctagagtggcaggactggaaacaatttcaaccgcaacaggcaggaaactcttagtctccgggtggtggggaatggtcagacacccaaattaccttggggacttgataatggctcttgcttggagcctgccttgcggggtttcacacctgctcccttatttctatctgctctattttacggccttactggtccacagagaagcccgtgacgagcggcagtgcctccagaagtatggccttgcatggcaggagtactgtcgtagggttccatatagaatcatgccctacatatactag

SEQ ID NO: 209329 - DNA, 1176 bp, synthetic construct
  misc_feature 1..1176: note = Description of Artificial Sequence: Synthetic coding sequence
  source 1..1176: mol_type = other DNA
atggcccccacccagggcccccgggcccccctggagttcggcggcccactgggtgctgccgcgctactactgttgttgcctgccactatgtttcacctgctactcgccgccagaagtggccctgccagactcctagggccacctgcatcactgcccggtctggaagttctttggagcccccgcgctttgctgctttggctcgcttggctaggccttcaggccgcgctgtatctgctgcctgcacgcaaagtggctgaaggccaagaactgaaggacaaaagtcgccttagataccccatcaatggctttcaggccctcgtcctaacagctctgttggtcggtctgggcatgtcagccggcctgcccctcggagcactccccgagatgctcctcccactagcatttgtagccaccttgactgctttcattttctccctgtttctgtacatgaaggcccaggtggcccccgtctccgcgctggctcccgggggcaacagtggcaaccctatatatgacttctttctgggaagggaactcaaccctcggatttgcttttttgatttcaaatatttctgtgagctccggcctgggttaatcggttgggtgcttattaacctcgcattgttgatgaaggaagccgagttacgtgggtcaccctccttagccatgtggttagtcaatggatttcagctgctttacgtaggagatgccctatggcatgaagaggccgtattaaccaccatggacattacccatgatggattcgggttcatgctggcattcggtgatatggcttgggttccattcacctatagtctgcaggctcaattcttactgcaccatcctcaaccattgggcttgcctatggcctcagttatctgcctcatcaatgggctggagacgataagtacagcgacgggaagaaaacttctggtctcaggatggtggggcatggttcgccatccgaattatctcggcgacttgattatggccctcgcgtggagccttccatgcggagtgtctcacctcttgccctacttttaccttctgtatttcacagccctgctcgtgcaccgggaagctcgcgatgagcgtcagtgcctgcagaaatatggcttagcttggcaggaatactgccgacgcgtgccataccggatcatgccctacatctattag

SEQ ID NO: 209330 - DNA, 909 bp, synthetic construct
  misc_feature 1..909: note = Description of Artificial Sequence: Synthetic coding sequence
  source 1..909: mol_type = other DNA
atgagcgccggcctgcccctgggcgccctgcccgagatgctgctgccacttgcttttgtcgccaccctcactgctttcatatttagcctgtttctttacatgaaggcccaggttgctcctgtttctgcgctggccccaggaggcaattctggaaatcctatttatgattttttcctgggtcgcgagcttaatcctaggatttgtttttttgattttaaatacttttgtgaactgcgtcctgggctaattggatgggtactgattaacctagctttgctcatgaaggaagctgagctgcggggctctccatcactcgccatgtggttggtgaatggctttcaactgctgtacgttggagatgcactgtggcacgaagaggcagtactgactactatggatataacccacgatggatttggatttatgctggcgtttggggatatggcctgggtgcctttcacatatagtctccaggcacagttcctcctccatcatccgcagcccctgggactgcccatggcgtccgtcatttgccttatcaatgccacaggctactatatcttccggggagccaactcacagaagaacacctttcgaaagaatccgtctgatccccgggtagccggtcttgagaccatcagcaccgcaaccggacgaaaactcctcgtctcaggttggtggggcatggtgagacaccccaattaccttggtgacctgatcatggcacttgcctggagcctgccatgtggcgtttcccatctgctgccgtacttctacctgttgtattttacggcactgctcgttcaccgcgaagccagagacgagcgccagtgtctccagaaatacggcctggcttggcaggagtactgtaggagggttccttataggataatgccatatatttactag

SEQ ID NO: 209331 - DNA, 1713 bp, synthetic construct
  misc_feature 1..1713: note = Description of Artificial Sequence: Synthetic coding sequence
  source 1..1713: mol_type = other DNA
atgggcttcctgcagctgctggtggtggccgtgctggccagcgagcaccgcgtggcgggagccgctgaggtgttcggtaatagctccgaaggcttgattgagttttcagtcggcaagttcaggtacttcgaactcaaccggccatttccggaggaggccatactgcatgacattagtagtaatgtgacttttctgatctttcagattcacagccagtaccagaataccacagtgtccttctctcctaccttgttgtcaaactctagcgagactggaactgcaagtgggctggtcttcattctcaggccagagcagtcaacatgtacctggtacctcggcaccagcggcatccagccagtgcagaatatggcaattttactcagttactctgagagagatcctgtgccaggtggatgtaacctcgagttcgatttagacatcgacccaaacatttatcttgagtataacttcttcgagaccactatcaagttcgcccctgctaacctcggttacgcacgtggagtggaccctccaccttgtgatgctggaactgaccaggacagcagatggcgcttgcaatacgacgtataccaatactttctgcccgaaaatgatcttacagaagaaatgctcctcaaacacctgcagaggatggtgtccgtccctcaggtcaaggcctctgctctcaaggtggtcactcttacagctaatgataaaacgtccgtgtctttttcctcactgcccgggcagggtgtgatatacaacgttatagtctgggatccgtttctgaacacaagcgctgcttatattcctgcccatacttatgcctgttctttcgaggcaggggaaggtagttgcgcctctctgggtagagtctcttccaaagtcttttttacactgtttgcactactgggcttttttatttgcttctttggccaccgcttttggaagacagagttgttttttataggcttcattattatgggcttctttttttacatccttatcacacggctcaccccgatcaagtatgatgtcaatctcatactaaccgccgttactggatctgtaggcgggatgtttttggtagcggtatggtggcgctttggaattttatctatctgtatgctctgtgtcggtctggtcctgggtttcctcatatcatccgtgacctttttcactccactgggaaacttgaaaattttccatgatgacggtgtgttctgggtcaccttttcctgcatcgctatcctgatccctgttgtattcatgggttgtctgagaattcttaatatactgacatgcggggtgattggtagctattccgtggttctcgcaatagactcctactggtcgacctcactatcgtacataactttgaatgtccttaaacgcgcgctgaacaaggacttccaccgagcattcactaacgtgccttttcagaccaacgactttatcatcctggcagtgtggggcatgttagcggtttcaggaatcacactgcaaatacggagagagagaggacgccccttcttccccccccatccatacaaactgtggaagcaggaaagagaacggagagttaccaacattctggacccgtcatatcacatcccaccactgcgtgagcggctttacgggcgactgactcaaataaagggcctgttccaaaaggagcagcctgccggagagcggacccccctgcttttgtag

SEQ ID NO: 209332 - DNA, 351 bp, synthetic construct
  misc_feature 1..351: note = Description of Artificial Sequence: Synthetic coding sequence
  source 1..351: mol_type = other DNA
atgggcttcctgcagctgctggtggtggccgtgctggccagcgagcaccgggttgccggtgctgcagaggtgttcggcaattcctccgaggtgtacttggtcgtgggtctcatcgagttctctgtgggtaaattccgctattttgagctgaaccggcccttccctgaagaagctatcctgcatgatatatcctccaacgtgaccttcctaatcttccagattcattctcagtatcagaacacgacagtgtccttctctccaacacttctttctaactcttcggaaaccggcacagcgagcggcctggtctttatccttaggcctgaacaaagtacctgtacctggtattag

SEQ ID NO: 209333 - DNA, 1413 bp, synthetic construct
  misc_feature 1..1413: note = Description of Artificial Sequence: Synthetic coding sequence
  source 1..1413: mol_type = other DNA
atgggcatctggaccagcggcaccgacatcttcctgagcctgtgggaaatatatgtcagcccgcggtcccccgggtggatggactttatacagcacttgggcgtgtgctgcctagttgcgcttattagcgtcggcctcctgtccgtggccgcctgttggtttcttcctagcatcattgctgccgcagcatcctggatcattacgtgtgtgctcttgtgctgctcaaaacatgcccggtgctttattttgctggtgttcctgtcatgtggactgcgcgagggccggaacgctctgatcgcagccgggactggcatagtgatactgggccacgtggagaacatatttcacaactttaaaggcctgcttgacgggatgacttgtaatctacgagccaagtcttttagcatccacttcccgttactaaagaagtatatcgaggccattcagtggatttatggcctcgccacccccctaagcgtgtttgacgacctcgtttcgtggaaccagaccctggccgtatcactgtttagtccttcccacgttttggaagcgcagcttaacgattccaagggggaggtgctttctgtgttgtatcagatggcaacaactaccgaagttctctctagcttgggacaaaagctgctcgctttcgctggtttgtccctcgtcctcctgggcaccgggcttttcatgaagaggtttctaggaccctgcgggtggaaatacgagaatatctatataacacgccagttcgtccagttcgatgaacgcgagcgccaccagcagcgcccttgtgttcttcctctgaacaaagaagagagacgaaagtatgtgattatcccgactttctggcctacccccaaagagagaaaaaatcttggcctttttttcctgccgattttgattcatttgtgcatatgggtactattcgcagcggttgattatctcctgtaccgcctgatttttagcgtttccaaacaattccaatccctgcctgggttcgaggtgcacctgaaactacacggggagaaacaggggacccaagatatcatccacgacagttctttcaacatctcagtttttgaaccaaactgtatcccgaaaccaaagtttttgctgagcgagacgtgggtgccattaagtgtcatattactcatcctggtgatgctaggccttctgtcctccattttgatgcagctgaaaatactcgtcagcgcctcattctacccctccgtcgaaaggaaaagaatccagtatcttcatgccaagttgcttaaaaaacgaagcaagcaaccactgggagaagttaagcgtagactctcactttatttaaccaagatccatttttggttgcctgtgcttaaaatgatcagaaaaaagcagatggatatggcatctgcagacaaatcatag

SEQ ID NO: 209334 - DNA, 567 bp, synthetic construct
  misc_feature 1..567: note = Description of Artificial Sequence: Synthetic coding sequence
  source 1..567: mol_type = other DNA
atgagcaccatgttcgccgacaccctgctgatcgtgttcatcagcgtgtgcaccgctctgctggcagagggaatcacttgggtgttagtgtatagaacggacaaatataagcgactgaaggcggaagtggagaaacaatctaagaagctggagaagaaaaaggaaaccattacagagtctgccggccggcagcagaagaaaaagatcgaacgacaggaggaaaagctgaaaaataataaccgggatctgagcatggttcgaatgaaatccatgttcgctatcgggttttgcttcaccgctctgatggggatgtttaactcaatctttgatggcagggtggttgctaaacttccatttacgcctctgagctacattcagggactgtctcaccggaatctgctgggagacgatactaccgactgttctttcatcttcctgtacattttgtgcactatgtccatcaggcagaatatccagaagatcctgggcctggcgccttccagggcggccaccaagcaagctggtggattcttaggacctccacctcctagcggaaagtttagctag

SEQ ID NO: 209335 - DNA, 510 bp, synthetic construct
  misc_feature 1..510: note = Description of Artificial Sequence: Synthetic coding sequence
  source 1..510: mol_type = other DNA
atgagcaccatgttcgccgacaccctgctgatcgtgttcatcagcgtctgcacggcattactggccgaggggataacttgggttttggtttatcggaccgacaagtacaaaagactgaaagccgaagtggaaaagcaatcaaagaagttggagaaaaagaaagaaaccattaccgagtcagcaggacgccaacagaaagtccgcatgaaatccatgttcgcaattggattctgttttaccgccctcatgggaatgtttaactcaatttttgacgggcgtgtcgtggcaaaactcccgtttacgcctctgtcttacatccagggcctttcacatcggaacctactgggagatgatacaacagactgcagcttcatattcctgtatattttatgcacgatgagtattcgccaaaatatccagaagattttgggcctcgcaccaagccgcgctgcgacgaagcaggccggaggctttctgggcccaccccctccctccggtaagttttcctag

SEQ ID NO: 209336 - DNA, 603 bp, synthetic construct
  misc_feature 1..603: note = Description of Artificial Sequence: Synthetic coding sequence
  source 1..603: mol_type = other DNA
atgatgcactacgtggactacagcatgatgtaccacctgatccggggtcagagcgtgatcaagctgtacattatttacaatatgctcgaggtggctgaccggctgttctcgagcttcggacaggacattctggacgccttatattggactgccaccgaaccaaaggagaggaagcgtgcccatatcggttttgtagagattaagggatcggtgtttaaaaagttcgagaagaacaatcttttccagatgagcaactccgacattaaggagcggtttacaaactacgtgctcctgctgatagtgtgccttcggaatatggagcagttcagctggaatcccgaccacctatgggtgctgtttcctgacgtatgcatggtgattgcttccgagatcgcggtggatatcgtcaagcacgcatttataacaaagttcaacgatatcaccgccgatgtatactctgagtatagagcttcactggccttcgatctggtgagctctagacagaagaatgcttatacggattactccgacagtgtggcgagaaggatggggtttattccattgccccttgccgtcttagtagacatccccgaaagcacatag

SEQ ID NO: 209337 - DNA, 1371 bp, synthetic construct
  misc_feature 1..1371: note = Description of Artificial Sequence: Synthetic coding sequence
  source 1..1371: mol_type = other DNA
atggtgttcggcatcttcctgtgcctggacgccttcctgtacgtgtttaccttgctaccgcttcgcgtgtttctggctctctttcgcctcctaaccctgccttgttatggcctgagggataggagactactgcagcctgctcaggtgtgtgacattttgaagggagtcatactcgtaatctgctacttcatgatgcattacgtggattacagcatgatgtatcacctaatcagggggcagtcagtgatcaagctctatataatctataacatgcttgaggtagccgatcggctattttcatcttttggacaggacatcctggatgccctgtattggaccgcgaccgaaccaaaggagcgcaaacgggcgcacattggagtaatcccgcatttcttcatggccgtgctgtatgtgtttttgcacgctatcttgatcatggtgcaggccacaacactgaacgtcgcctttaatagccacaacaaatctttactgaccattatgatgagtaacaatttcgttgagataaaggggtcggtcttcaagaagttcgagaaaaacaatctcttccagatgagcaattcggacataaaagagagattcacgaattatgtactactcctgatcgtgtgcctgcggaacatggagcagttctcttggaaccccgatcacctgtgggtgctgttccctgatgtttgcatggtgatagcaagtgaaattgccgttgacattgtcaaacacgcttttataactaagttcaacgatattacagctgacgtgtacagtgaatatcgcgccagtctcgcttttgatctggtatcttcccggcaaaaaaacgcctataccgattactctgacagcgtcgccagacgcatggggttcatccccctgcctctggccgtcttactaatccgggtcgtgacctcatcgataaaagtgcaggggatattgagttatgcctgcgtcatcttgttctattttggattgatatccctaaaagttctaaactcaattgtactgttgggtaagagttgtcagtacgtgaaagaagccaaaatggaggaaaaactgagcaaccctccagccacatgcactcccggtaagccctcatccaagtcccagaataagtgtaaaccatctcaggggttgtcaaccgaagaaaatctgagtgcgagcattaccaagcagccaatacaccagaaagagaatattatccccttactcgttacctcaaattcagatcagtttctcactaccccagatggagacgagaaggatataacacaagataactcagaactcaaacaccgatcatccaagaaggaccttctggaaatagaccgctttaccatatgtggtaaccggatcgactag

SEQ ID NO: 209338 - DNA, 1704 bp, synthetic construct
  misc_feature 1..1704: note = Description of Artificial Sequence: Synthetic coding sequence
  source 1..1704: mol_type = other DNA
atggccggcgtgggcgacgccgccgcccccggcgagggcggcggcggtggggtggatggaccgcagagggacggacgaggggaggccgagcaaccgggcggatcaggcggtcaagggccaccacccgctcctcagctgactgagactttaggcttttacgagtcagacagacgccgtgagagacggcgcggacgcacagaactcagcttactcaggttcctaagcgccgagttgaccaggggctatttcctagaacataatgaagcaaagtacactgagcgtcgcgagagggtctatacttgtctccgtattccccgggagttagagaagttgatggtttttgggatttttctttgcttagatgccttcttgtacgttttcactttactgcccttacgtgtgttcctggcgcttttcagactgctgaccttgccttgctacggcctgcgggatagacgtctccttcagcctgcccaagtttgtgatatcctgaagggggtgattctggtgatctgttacttcatgatgcactacgtagactactcaatgatgtaccacctcattcgggggcagtctgtgatcaagctgtatatcatatacaatatgctggaagtggctgatcgcctgttcagctctttcggtcaggacatccttgatgcactttactggaccgccacagagccaaaggagcggaagcgagcccacattggagtgattcctcacttttttatggctgttctgtacgtgttcctgcacgccattctgatcatggtgcaagcaacaaccctaaacgtagcattcaactcacataacaaatcactactgaccataatgatgagcaacaacttcgtggaaattaaaggctcagtgttcaaaaaatttgaaaaaaataatctgtttcaaatgtctaattcagacataaaagagaggttcacgaactacgtcctgcttcttatagtatgtttgaggaatatggaacagttttcatggaacccggatcacctgtgggttctgttccctgatgtgtgtatggtgatcgcttccgaaatcgcagtggacatcgtaaaacacgcatttataactaaattcaacgatatcaccgctgatgtctactctgaatacagagcttctctggccttcgatctcgtgtcctctagacaaaaaaatgcttacacggactactcagactcggtcgccagaaggatgggcttcatcccactcccattagccgtgttactcatccgagtggtgaccagctccatcaaggtgcagggaattctctcctacgcttgcgtcattttattttatttcggactcatcagcctgaaagttttgaatagcatcgtgctccttggaaagtcatgtcaatacgtaaaagaggccaagatggaggagaaattgagcaaccctcccgccacatgcactccgggcaaaccttcttcaaagtcccagaataaatgcaagcctagtcaaggcctgagcactgaagagaacctgagtgcctccattaccaagcagccaatccatcaaaaagagaatatcattccgctgctcgttacatctaattctgaccagttcctgaccaccccagatggcgatgaaaaggatattactcaggataacagcgagttgaaacacaggagttccaaaaaggatctgctcgagattgatagattcactatttgcggtaacaggatagattag

SEQ ID NO: 209339 - DNA, 1689 bp, synthetic construct
  misc_feature 1..1689: note = Description of Artificial Sequence: Synthetic coding sequence
  source 1..1689: mol_type = other DNA
atggccggcgtgggcgacgccgccgcccccggcgagggcggcggcggcggcgtggacgggccccagcgggacggccggggtgaggcagagcaaccagggggctccggcggccaggggccccccccagcgcctcagctgaccgagactctgggattctatgagagcgatcggcgccgagagcgtcggcgggggcgcacagaactgtctttacttcgctttctatccgctgaacttacccgtggttattttcttgagcataatgaggctaaatataccgaacggcgggagcgggtttacacttgtctgcgcatcccccgtgaactggaaaaactgatggtgttcggtatcttcttatgtttggacgcgttcctgtacgtctttactttgctgcctctgcgagtctttctagccctcttcagactattaaccttaccttgttacgggttaagagaccggagattacttcagccagcacaggtgtgtgacattttaaaaggagtgatcctagtgatttgctactttatgatgcactatgtcgactactctatgatgtaccacctcatccgcggtcagagcgtgatcaagctgtatattatctacaatatgttggaggtggctgatagattgttcagttcttttggccaggacatcctggatgctctctactggactgcaaccgagcctaaggaacggaaaagggcgcacatcggcgtcataccccatttttttatggcagtgttgtacgtgttcctgcacgctattttaattatggtgcaggcaaccaccttgaacgttgcctttaacagccacaataagagcctacttactatcatgatgtctaacaactttgtggagatcaagggaagcgtgtttaaaaagttcgaaaaaaataatctattccagatgtccaattctgacattaaagagcggtttacaaactatgtgctccttttgatagtgtgtcttcgcaatatggaacagttctcctggaatccagaccatctttgggttttgttccctgatgtctgtatggtgattgcctcagagatcgctgtcgatatcgtcaagcacgcttttatcactaagttcaatgacattacagcagatgtgtattcagagtacagagcttcattggcgtttgacctggtgtcaagcaggcagaaaaatgcgtatactgattatagcgactccgtcgcccggaggatgggatttatcccgttgccgctcgcagtcctgcttattagagttgtgaccagctcgatcaaggtgcaagggatcttgagttacgcctgtgtgatcttattttatttcggtctgatcagtcttaaagtgctcaattctatcgtcctgttagggaagtcatgccagtatgtaaaggaagccaagatggaagagaaattgagcaatcctcctgcgacatgcactcctggcaagccttcttcaaagtctcagaataagtgcaagccatctcagggcctgagtactgaagaaaacctctcagcgtctatcactaagcagcctatccatcagaaggagaatataatacctctcctggtgacatctaacagcgatcagttccttacaaccccagacggtgatgagaaggacatcactcaggacaactctgagctcaaacaccgaagttcaaaaagcgttctgctgtgtcagtctggtctgcccgagtgttag

SEQ ID NO: 209340 - DNA, 2283 bp, synthetic construct
  misc_feature 1..2283: note = Description of Artificial Sequence: Synthetic coding sequence
  source 1..2283: mol_type = other DNA
atgagccccaagaaggtgcagatcaaggtggaggagaaggaggacgaaactgaggagtctagctctgaggaggaggaggaagttgaagacaaactacccaggcgcgaatcattgaggcctaaacgcaaacgcactagagatgtgatcaacgaggacgatcccgagccagagcccgaagacgaagaaaccagaaaggctcgagagaaggagcggcggcggcggttgaagcgaggtgccgaagaggaggaaatcgatgaggaagagctggagaggctgaaggcggagctggacgagaaacgccagatcatcgccacagttaaatgtaagccatggaagatggagaaaaagattgaggtactaaaggaagccaaaaagttcgtgagcgaaaacgaaggagcactgggcaagggaaaaggtaaaaggtggttcgcctttaaaatgatgatggcaaagaaatgggccaaattcctgagagatttcgagaattttaaggcagcctgtgttccttgggaaaataagataaaggctatcgaatcccagttcggaagttccgtcgcctcatacttcctttttctacgctggatgtatggggtcaacatggtgttgttcattttgaccttctctttaatcatgttgccagagtatctgtgggggctcccttacggttccctgcctcgcaaaaccgttcctcgggctgaggaggcgagtgctgccaatttcggcgtgctttacgactttaatggactggctcaatactccgtcctcttttacggatactacgataacaagagaactatcgggtggatgaacttcagactgcctctgagctattttctggtgggaatcatgtgcatagggtattcctttctggtcgtcctgaaggccatgacaaagaacataggggatgatggcgggggggatgacaacacgtttaatttctcttggaaagtatttaccagctgggactacctgatcgggaacccggaaacggccgacaacaagttcaattctatcactatgaacttcaaggaagccatcaccgaggagaaggcggctcaggtggaagaaaacgtccacttgatacgttttctgaggttcctggctaatttctttgtcttcctcactctcggcggaagtggctatctgatcttctgggcagtcaaaagatctcaggagtttgcccagcaggaccctgataccttagggtggtgggaaaagaatgagatgaatatggtcatgagcctgttgggaatgttctgccccaccctttttgatttatttgccgagttggaggactaccaccctttgattgcgctcaaatggctgctgggaagaatttttgcacttctcttgggcaacctgtatgtctttattctcgcactgatggacgagataaacaacaagattgaagaggaaaagctggttaaggctaacataacgctgtgggaggctaacatgatcaaagcatacaatgcttccttctcagagaactcaacaggtccaccatttttcgtccacccagccgatgttccccgcggcccctgctgggagacaatggttggacaggaattcgttaggctgacagtcagcgatgtgctgactacctacgtcacaatcctgattggcgatttcctgcgggcctgcttcgttagattctgcaactactgctggtgctgggatctggagtatggctacccctcatatactgaattcgacatttccgggaatgtgctggcactcattttcaaccaggggatgatctggatgggttcattctttgcaccgagtcttcctggaattaacatcctgcgcctccatacttccatgtattttcagtgctgggctgtaatgtgttgcaacgtgccggaggcccgcgtgttcaaagcttcacgcagcaacaatttttaccttggtatgctgctcttaatattatttctatcaacgatgcccgtattgtacatgatcgtctccctgccacccagcttcgattgtgggcctttttccggcaagaatagaatgttcgaagtcattggcgagaccctggaacatgactttccaagctggatggccaagattttacggcagctgtcgaaccccgggctcgtcattgctgtcatcctggtgatggtgctggcaatatactatctcaacgccaccgctaagggacagaaggcggccaacctagatctcaaaaagaaaatgaaaatgcaggcccttgagaacaagatgcgaaataaaaagatggccgcggcacgagctgccgctgccgctggcagacagtag

SEQ ID NO: 209341 - DNA, 2283 bp, synthetic construct
  misc_feature 1..2283: note = Description of Artificial Sequence: Synthetic coding sequence
  source 1..2283: mol_type = other DNA
atgagccccaagaaggtgcagatcaaggtggaggagaaggaggacgaaacggaagaaagctcaagcgaggaggaggaggaggtggaggacaagcttccccgcagagagtcacttcgcccgaagaggaagaggactcgcgatgtaatcaacgaagatgaccctgaacccgaacctgaggacgaggaaacgcgcaaggcgcgagagaaggagcggaggcggagactaaagagaggcgcagaggaagaagaaatcgatgaagaggagcttgaacgacttaaagccgagctcgatgagaaaagacagataattgcaacagtgaaatgcaagccctggaaaatggagaagaagatcgaagttttgaaggaggccaaaaagtttgtatctgagaatgagggagcactgggcaagggaaagggtaagagatggtttgcgttcaagatgatgatggccaagaagtgggctaagttcctgagggatttcgagaatttcaaagccgcctgcgttccttgggagaacaagattaaagcaattgagagccagttcggttccagcgtcgcctcttatttcctgtttttgcggtggatgtacggagtgaacatggttctttttatactcaccttttccctgatcatgctgccagagtacttgtggggactcccctatgggtcactgcctcgaaaaacagtacctcgcgccgaagaggcgagtgccgccaatttcggagttttgtacgactttaatggactcgcccagtacagcgtccttttctacgggtattatgacaataaacggaccatcggatggatgaatttccggttgccgctgtcgtatttcttagtgggcatcatgtgcataggttatagttttctcgtggtgttgaaggcaatgaccaaaaacattggagacgatgggggcggcgatgataataccttcaatttttcctggaaggtctttaccagttgggattatctcattggcaatccggaaacagccgacaacaagtttaattccatcaccatgaatttcaaggaggccattactgaagaaaaagccgcacaagtggaagagaatgtgcaccttatacgctttttgcgctttctagctaatttcttcgtcttcctgactctaggaggttctggatacctcatcttttgggctgtcaagcgctcccaggaattcgcacagcaagaccccgataccctgggatggtgggagaagaatgagatgaatatggtgatgtcactcttgggtatgttttgccctactctgttcgacctcttcgccgaattagaggattaccatccactcattgcccttaagtggctgctcggaaggatcttcgcactgctgctgggcaatttgtacgtctttatcctcgccctcatggatgagatcaataacaagatcgaggaagagaagctcgtgaaggcaaatatcaccctctgggaggccaatatgattaaggcttataatgcctccttttccgagaattcaaccggtccccccttttttgtccatcccgccgatgtaccccgagggccttgttgggaaacaatggtgggtcaggaatttgtgaggctgaccgtaagcgatgtactgactacgtatgtcaccatattaattggcgacttcttgcgcgcatgttttgtgcgtttttgcaactactgttggtgttgggatcttgagtacggctacccttcatatactgagtttgacatcagcggcaacgtactggccctaatcttcaaccaggggatgatatggatgggaagtttctttgcgccttccctgccgggaatcaacatccttaggctgcatacatccatgtacttccaatgttgggccgtcatgtgttgtaatgtccccgaggctagagtcttcaaagccagcagatctaacaacttttacttaggtatgcttcttctgatcctgttcctgtccactatgccagtgctttatatgatcgtgagtttaccaccaagcttcgattgcggccctttttctgggaagaatcggatgttcgaagtgattggcgagaccctcgagcacgactttccctcttggatggcgaagatcctaagacagctatcaaatcccggattagtcatagcagtcatactggtcatggtgctggccatctactatctgaatgccactgccaaaggccagaaagcagcaaacctcgatctcaagaagaagatgaaaatgcaggccctagaaaataagatgcgtaacaaaaaaatggccgccgcccgtgcggctgctgcggccggaaggcagtag

SEQ ID NO: 209342 - DNA, 2223 bp, synthetic construct
  misc_feature 1..2223: note = Description of Artificial Sequence: Synthetic coding sequence
  source 1..2223: mol_type = other DNA
gtggagtggagcggcgagtgcctgcggagctgccggcgggaggtgcagattaaggtagaggagaaagaggacgaaaccgaagaatcttctagcgaagaggaggaggaggttgaggataaattacctcggcgggaaagtctccgccctaagcggaagaggacgagggacgtcattaacgaagatgatccagagcccgagccagaagatgaggagacgaggaaggctcgggagaaggagaggaggcgccgcttgaagcgcggagcagaagcgaaaaagttcgtgagcgagaatgagggagcgctgggcaaaggcaaaggaaaacgatggttcgcgtttaagatgatgatggcaaaaaaatgggccaaattcctaagagacttcgaaaactttaaggcagcttgtgtaccgtgggaaaacaagattaaggccatcgagagtcaatttggaagttccgtcgcttcatatttcctgtttctcaggtggatgtacggcgtaaacatggtcctatttatactgacttttagtctgataatgctgcccgagtacttatgggggttaccatacggcagcctcccccgaaaaacggtgccgagagctgaggaagccagcgccgcaaacttcggcgtcctatatgattttaatggactggcccaatactcggttctgttctacgggtactatgataataagcgaacgattggttggatgaacttccggctgcctctgagctacttcttggttgggatcatgtgtattggttactcatttcttgtcgtgttgaaggctatgaccaagaacatcggggatgacggaggcggcgatgacaacacctttaacttctcttggaaggtgttcacaagttgggactatctgatcggtaatcccgagactgccgataataagtttaattcgataactatgaactttaaagaggcgatcaccgaggagaaggccgcacaggtagaagaaaacgtgcacttaattcgttttctcaggttcctggcgaatttctttgtctttcttactttaggaggcagcggctatcttatcttctgggcagtgaagaggagccaggaattcgctcagcaggatcctgatactctgggatggtgggagaagaacgagatgaatatggttatgtcactcctagggatgttctgtcccactcttttcgatctcttcgcggaactcgaggactaccatcccctgattgccctgaagtggctgctaggacggattttcgctctcctgctcggaaacctctatgttttcattctggccctcatggatgagattaacaataagattgaggaagagaaactggtgaaggctaacatcaccctctgggaggcaaacatgattaaggcgtacaatgcttccttctcggagaactcaacagggcccccgttttttgttcatccagccgatgtccctagaggaccttgctgggagacaatggtcgggcaagaatttgtccgccttactgtgtcagacgtgcttacaacctacgtgacaatcttgataggtgacttcctgcgcgcctgttttgtacgcttctgcaactactgctggtgctgggatctggaatacggctacccgtcttacacagagttcgacattagcggcaatgtgttggccctgatcttcaaccaaggcatgatctggatgggctcgttcttcgctccaagcttgcccggcataaatattttgcggttgcacacttctatgtattttcagtgctgggctgtgatgtgctgcaacgttcccgaggccagagtattcaaagcttccagaagcaacaacttttacctcggcatgctgctcttgatcttgtttctgtctacaatgcccgtgctgtacatgatcgtgtctctgcctcctagttttgactgtgggcctttttccgggaagaaccgcatgttcgaggtcatcggggaaacactcgaacatgactttccttcttggatggccaagattttgagacagctcagcaaccctgggttggtgattgctgttatcctggtgatggtgctcgcaatttattatctcaacgctaccgccaaaggccagaaagcggcgaatctggacctcaaaaaaaaaatgaaaatgttgcagctgctggtggcgagtaataagtatcccgagtcgcccgaaaaggtccacttcgccctactgtttaaatcaaatgccatatgcgagaggcctgagaataagcactgttag

SEQ ID NO: 209343 - DNA, 2283 bp, synthetic construct
  misc_feature 1..2283: note = Description of Artificial Sequence: Synthetic coding sequence
  source 1..2283: mol_type = other DNA
atgagccccaagaaggtgcagatcaaggtggaggagaaggaggacgagaccgaggagtcttctagtgaagaggaggaggaagtggaggataaactgcccagacgagagtctctgagacccaagcgcaagcgaactagagacgtcattaacgaggacgatccagagcctgaacccgaagatgaggagactcgcaaagctagagaaaaggaacgcaggcgtagattgaagagaggagcagaagaagaggagatcgatgaggaggaactcgagaggctgaaggctgaattggatgagaagcgtcagatcatcgctactgtcaaatgtaaaccctggaaaatggagaaaaagattgaagttctgaaagaagctaaaaagttcgttagtgaaaatgagggggccttgggcaaaggcaagggaaagcgctggttcgcctttaagatgatgatggctaagaagtgggccaaatttctgcgggacttcgagaatttcaaggccgcctgtgttccctgggaaaacaagattaaagcaattgagagccaatttggttcatccgtggcgtcatattttctcttcctacgatggatgtacggcgttaatatggtgctgttcattctgacattcagcttgattatgctccccgaatacctatggggattaccatacggtagtctccccaggaagactgttcctcgggcagaagaagccagcgccgcaaattttggcgtgctctatgactttaacggcttagcacaatactccgtcttgttttatgggtactacgataataagcggaccataggttggatgaacttcagactgcccttaagttatttcctggtaggtattatgtgtataggttactcctttctggttgttctcaaagctatgacaaagaatattggtgatgacggcggcggagacgacaataccttcaatttttcttggaaggtgttcacatcatgggactatctcatcggaaaccctgagacagccgacaacaaattcaacagcattaccatgaattttaaagaagctatcacagaagagaaagcagcacaggtcgaggagaatgtccacctgatccggtttctgaggttcttagccaattttttcgttttcctgaccctgggaggctctggctatttaattttctgggccgtaaagagaagtcaggaattcgcacagcaggaccctgacactttaggctggtgggagaagaacgagatgaatatggtcatgagcttgctgggtatgttctgccctacgctcttcgaccttttcgcggaactggaggactatcacccattgatcgcactgaagtggctgctggggagaatcttcgcactcttactcggcaacctctatgtgttcattctggccctaatggatgagatcaacaacaagattgaggaggagaagttggtaaaggccaatatcaccctctgggaagctaatatgatcaaagcttacaacgcctctttcagcgagaactcaaccggccctcctttctttgtgcatccagccgacgtccccagaggcccttgttgggagacaatggtaggccaggaatttgttcgtctgacagtgagcgatgtgcttaccacctatgtcactattctgataggggacttcttgcgggcctgcttcgtgcgcttctgcaattactgctggtgctgggaccttgagtacggatacccatcctatacagagtttgatatctccggaaacgtgctggccctgatcttcaaccaaggcatgatctggatgggctccttcttcgccccaagtctacctggaattaatatcctgcggctccatacaagcatgtatttccagtgttgggctgtcatgtgctgcaatgtgccagaagcccgcgtcttcaaagcaagtagatcaaataacttttacttgggcatgcttctgttgattctctttttgtccactatgcccgtcctttacatgatcgtcagcctcccccccagctttgactgtggcccattctctggaaagaatcgcatgtttgaagtgattggcgagacactcgagcacgattttccatcctggatggcaaagattctgagacagctgtccaaccccggcctcgtgattgcagttatcttggtaatggtgctggccatttactatctgaacgccaccgcgaagggtcagaaggctgccaatttagatctcaagaaaaaaatgaagatgcaggccctcgagaacaaaatgaggaacaaaaagatggctgccgcccgcgcggctgctgcggccggccggcagtag

SEQ ID NO: 209344 - DNA, 2184 bp, synthetic construct
  misc_feature 1..2184: note = Description of Artificial Sequence: Synthetic coding sequence
  source 1..2184: mol_type = other DNA
gtggagtggagcggcgagtgcctgcggagctgccggcgggaggtgcagatcaaagtggaggagaaggaggatgagacagaagaatctagctctgaagaggaagaagaggtcgaggataagctgcctcgacgggagtcactccgtccaaagcgaaagaggacccgcgacgtgattaatgaggatgatcccgaacctgagcctgaagatgaggagacgaggaaggcccgagagaaagaacggagacggaggcttaaaagaggcgcagaggcaaaaaaatttgtgtccgaaaacgagggcgcactcggtaagggcaaaggcaaaaggtggttcgccttcaaaatgatgatggccaaaaagtgggccaaatttctcagagactttgagaattttaaggccgcatgtgtgccatgggagaacaagatcaaggccatcgaaagccaatttggctcaagtgtcgcctcctactttctttttctacgttggatgtatggcgttaatatggttttgtttatcctcactttctccctgatcatgcttcctgagtacctgtggggattgccctacgggagtctgcccaggaagactgtgccccgcgcagaagaggctagcgccgctaactttggggtgctgtatgactttaatggccttgcccaatatagtgtactcttctatggctattacgataacaagcggaccattggctggatgaattttcgcttacccctcagttacttcctggtgggaattatgtgcattgggtatagtttcctggtggtgctgaaagccatgacaaagaatattggagacgatggaggcggcgacgacaatacatttaacttcagctggaaagtgttcacatcctgggactatctgataggaaatccggaaacagcagataataaattcaattctattacaatgaatttcaaggaggctatcactgaggagaaagctgctcaggtcgaagaaaacgtacatctcatacgattcttacggtttctggccaatttttttgtgttcctgaccctcggtggcagtggatacctgatattttgggcagtcaagcgctcccaggagttcgcacagcaggaccctgatactttggggtggtgggaaaagaacgagatgaacatggtcatgtccctcttgggcatgttttgtccgacactttttgatttattcgccgagctcgaggattaccatccattaatcgcgctcaagtggctactgggaaggatttttgctcttctccttggcaacctgtatgtatttattctcgccctgatggacgagatcaacaataagattgaagaggagaagttggttaaggctaatataacactctgggaggccaacatgataaaggcttacaatgcctcttttagtgagaactcgactggccccccattctttgtgcatccagccgatgttccaagaggcccttgctgggaaacgatggtcggacaggagttcgtccgtttaaccgttagcgacgttctcaccacctacgtgaccatcttgattggagactttctgcgagcctgcttcgtccggttttgcaattactgctggtgttgggacctggagtatggctatccttcttacaccgaatttgatatctccgggaatgtgcttgctctgatctttaaccaaggcatgatctggatgggttcattcttcgctccatcactgccaggcatcaatatattaagactgcacactagcatgtacttccagtgttgggccgtgatgtgttgcaacgtccccgaagctagagttttcaaggcttcaagatccaataacttctatcttggtatgctcctcctcatccttttcctgtccaccatgcctgtactgtatatgatagtctctctccccccttcatttgactgtgggccctttagcggcaagaatagaatgttcgaggtgatcggagagaccttagagcacgacttcccgtcgtggatggccaaaattctaaggcagctgtccaaccctggactggtgattgccgtaattctcgtgatggtgttggcgatatattacctcaatgctacggcaaagggccaaaaggctgccaatcttgatctgaagaagaaaatgaagatgcaggcattagagaataaaatgcgtaataaaaaaatggccgctgctcgggccgcagccgcagccggccgacagtag

SEQ ID NO: 209345 - DNA, 1665 bp, synthetic construct
  misc_feature 1..1665: note = Description of Artificial Sequence: Synthetic coding sequence
  source 1..1665: mol_type = other DNA
gtggagtggagcggcgagtgcctgcggagctgccggcgggaggtgcagatcaaagtggaagaaaaggaggacgagacagaagagagctcatccgaggaggaagaggaagttgaagacaaactcccgagaagggaatctctaagaccaaagcggaaaagaacaagggatgttattaacgaggatgaccccgaacccgagccggaagatgaggagactaggaaagccagagagaaagagaggcgcaggagactgaaaaggggggccgaggcaaagaaattcgtgtctgagaacgaaggggccttgggaaaggggaagggtaagcgctggttcgccttcaaaatgatgatggctaagaagtgggcaaagtttctccgggacttcgaaaatttcaaggccgcctgtgtcccctgggaaaataaaatcaaagcaatcgaatcacagttcggtagttcagttgcatcttacttcctctttctcagatggatgtacggtgtgaacatggttctgttcatcttgaccttctcgttgattatgctgccagagtatctgtggggactcccgtacgggtccctgcccagaaagaccgtcccccgtgcagaagaagcttcagccgccaactttggagtcctgtacgactttaatggcctggctcaatacagcgtgctcttctacgggtactacgacaataagcgcacaattggctggatgaacttcaggcttccgctatcttactttctcgtgggtatcatgtgtattgggtatagcttcctggtcgtgctcaaggccatgaccaaaaacataggcgacgatgggggcggcgacgacaataccttcaacttctcatggaaggtttttactagctgggattatctgatcggcaatccggagactgcggacaataagttcaactctattacaatgaacttcaaagaagccattaccgaggaaaaggctgcccaggtggaagagaacgttcatctaattcgcttccttcggtttttggcgaacttttttgttttcctaacattgggaggcagtggctacctgattttttgggccgtaaagcgaagccaggaattcgcacagcaggacccagacactctgggatggtgggaaaaaaatgaaatgaatatggtgatgagcctcctcggcatgttttgccccactttgttcgacctgtttgctgaattggaagattatcatcccctgattgccctgaaatggctcctaggcaggattttcgcattgctgctcggcaacctctacgtgtttattctcgccctgatggacgaaattaataacaaaattgaggaggaaaaactggtgaaggcaaacataactttgtgggaagctaatatgatcaaagcctataacgccagctttagtgagaacagcacggggcccccgttctttgtgcacccagccgacgtccctcgaggtccgtgttgggagacaatggtagggcaggagttcgttcggctaactgtatctgacgtgctgaccacctacgtgactatcctaatcggggactttttaagggcttgcttcgtgcgtttttgtaattactgttggtgttgggaccttgagtacggctacccctcctatacggagttcgacatcagtggcaatgtgctcgctctgattttcaaccagggaatgatttag

SEQ ID NO: 209346 - DNA, 2265 bp, synthetic construct
  misc_feature 1..2265: note = Description of Artificial Sequence: Synthetic coding sequence
  source 1..2265: mol_type = other DNA
cagatcaaggtggaggagaaggaggacgagaccgaggagagcagctctgaggaggaggaggaggtcgaggacaagttgccacgcagggagtcgctcaggcccaagagaaagaggactcgggacgtaatcaacgaagatgaccccgagcccgagcccgaggacgaggaaaccaggaaagcacgcgaaaaggagcggaggcgacggctgaagcgaggtgcggaggaggaggagattgatgaggaagagctggaaaggctcaaagcggaactggacgaaaagagacagatcattgcaaccgtgaaatgcaaaccttggaagatggaaaaaaaaatcgaggtcttaaaggaggccaagaagtttgtgtcagaaaacgagggtgctctgggtaagggcaaggggaagagatggtttgccttcaagatgatgatggctaagaagtgggccaagttcctgagggatttcgagaactttaaggccgcttgtgtgccatgggagaataagataaaggccatcgaaagccagtttggcagctccgtcgcaagctacttcttgttcctaaggtggatgtacggtgttaatatggttctctttatcttaacctttagcctgatcatgctccctgaatacctctgggggctgccatatgggtccttgccacggaagacagtgccgcgggccgaggaggcttctgctgcgaatttcggcgtactttatgacttcaacggactcgcccagtactctgtgctcttttatggatattatgacaacaagcgcaccatcgggtggatgaactttagactccctctgtcatatttcctggtcggaatcatgtgcataggatactccttcttggtagtactcaaggccatgacaaaaaatattggcgatgatgggggcggagatgacaacacattcaacttttcctggaaggtattcaccagttgggattatctgataggcaatccagagaccgcagacaataagtttaattccatcacaatgaactttaaggaggctatcaccgaagagaaagccgcacaagtcgaagaaaacgtacatctgatcagattcctgcgatttctggcaaacttttttgtgttcctaacactggggggtagcgggtacctgatcttctgggcagtcaagagatcccaagagttcgcgcagcaagaccccgacacccttggttggtgggagaagaatgaaatgaacatggtgatgtccctgctgggtatgttctgtcctacacttttcgacctgtttgcagaactcgaggactatcaccctctcattgcattgaagtggctgctgggacggatcttcgcactgctgttgggtaatctgtacgtgtttatcctggccctgatggacgagataaacaacaaaatagaggaagagaagctcgtaaaagccaatattacgctctgggaggcaaacatgattaaagcttacaatgctagcttctctgagaactctacaggacccccattcttcgtccacccagctgatgttccacgggggccatgttgggaaaccatggtggggcaggaattcgtgcggctgaccgtgagcgatgtcctgacgacctacgtgacaattcttattggcgacttcctcagggcatgctttgtgcgcttttgcaactattgctggtgctgggaccttgagtatgggtacccttcttacactgaattcgacattagtggaaatgttctggccctcatcttcaaccagggtatgatctggatgggctcgtttttcgccccctcgcttcctgggatcaatattctgagacttcatacttccatgtatttccaatgttgggccgtcatgtgctgcaatgtccctgaagctcgagtttttaaggcctcgcgcagcaacaatttctatctcggtatgcttctgctgatcctgttcctgtcgactatgccagtcctgtatatgatcgtctccctgccacctagcttcgactgcggaccttttagcggcaaaaatagaatgttcgaagtcataggcgaaactctggagcatgatttcccctcatggatggcaaagatcctgcgacagttgagtaatcctggcctcgttatcgccgtgatcctggtaatggtgctcgcgatttactatctgaatgcgactgccaagggacagaaagcagccaacttagatctgaagaagaaaatgaaaatgcaagccttagaaaacaagatgaggaacaaaaagatggctgctgcccgggcagacggcgcagccggccgcgcttag

SEQ ID NO: 209347 - DNA, 2721 bp, synthetic construct
  misc_feature 1..2721: note = Description of Artificial Sequence: Synthetic coding sequence
  source 1..2721: mol_type = other DNA
atgagccaccaggtgaagggcctgaaggaggaggcccggggcggcgttaaaggtcgggtgaaatctggttcaccccacacaggcgatagattaggcagacgctccagctccaaacgggcactgaaagctgaggggacgccaggcaggaggggcgcacaacgaagccaaaaagagcgcgctggcggctcgccctcacctggcagccctaggcgcaagcagactggtcgccggcggcatcgggaggagttaggtgagcaggagcggggagaggccgagcgcacttgtgaaggcagacgcaagcgggatgagagggctagcttccaagagcggactgccgcaccgaaacgggaaaaggagattccgcggcgggaagagaaaagcaaaagacagaagaaaccacggagctcaagccttgcgagcagcgcgagtggtggggaatcgctatccgaagaagagcttgcccagatactggagcaggtagaggagaaaaagaagctcatcgccaccatgagatctaaaccctggcccatggccaagaagttgacagagctccgcgaggctcaggagtttgtggaaaagtacgagggggccctgggaaagggcaaaggaaagcagttatacgcatataaaatgctgatggccaaaaaatgggtgaagttcaaaagggacttcgacaactttaagacgcagtgcatcccctgggaaatgaaaatcaaagacattgagtcacacttcggctcgagcgtggccagttattttatttttctgcggtggatgtatggtgtgaacctggtcctgttcggcctcatcttcgggcttgttattattcctgaggttctgatgggaatgccatatggctctatcccgaggaagactgtcccaagggcagaagaggagaaggcaatggactttagcgttctgtgggactttgagggctatatcaagtattccgccttattctacggatattacaataaccaaagaacaattgggtggttgagatacaggttgccaatggcatacttcatggtaggggtgtctgtgttcgggtactctctgataatagtgatccggtcaatggcctctaacacgcaaggcagtactggcgaaggcgagtccgataattttaccttcagttttaagatgttcactagttgggattacttaataggcaatagcgagaccgcggacaacaaatatgcgtcaatcacgaccagttttaaggaaagcattgtggacgagcaggagtctaacaaggaagagaatatccacttgacccgcttccttagggtcctggccaacttcctgatcatatgctgtctctgcggcagcggctatctcatttacttcgtcgtcaaacgttcccagcagtttagtaaaatgcagaatgttagttggtatgagaggaacgaggtggaaatcgtgatgagccttctcggtatgttttgtccccccctgttcgagacaatagctgccctagagaactaccaccctcggaccggcctcaagtggcagctaggtagaatattcgccttgtttctgggaaacttgtatactttcttgctggcgttaatggacgacgtgcacttaaagctggcaaacgaagaaaccataaagaatatcactcattggacactttttaactactacaacagtagcggttggaatgagtcagtcccccggccaccacttcaccctgctgatgtgccccgagggtcgtgttgggagacggctgttgggatcgaattcatgcgtttgactgtcagtgatatgctggtgacttatattactattctgcttggggatttcctgagggcatgcttcgtgcgcttcatgaactattgttggtgttgggatctagaggccggtttcccttcctacgccgagtttgatatttctggaaatgttctcgggctcattttcaaccaaggcatgatatggatgggatccttctacgcccccggcctggtcggaataaatgtccttagactcttaacttcgatgtatttccaatgctgggctgtgatgagctctaatgtgccccacgagcgggtgtttaaagcgtctagatccaataatttctacatgggactcctgttgctggttctttttttatccctgctgccagtggcctacacgatcatgtccctgccaccgtcctttgattgtggcccattctcaggcaaaaaccgaatgtatgatgttctccaggagaccattgaaaacgacttccctacctttctcgggaaaatattcgccttcctggcaaaccccggccttatcattcccgccatcttgttaatgtttcttgccatctattacctcaattccgtatcaaaaagcctctccagggccaatgcccaacttagaaagaaaatccaggtgctgcgggaagtggaaaaaagtcacaagtccgttaaaggaaaggccacagctcgagatagtgaagatactccgaagagctcctccaagaatgctacacagctccagctaaccaaggaagagaccaccccaccttcagcttcccagtcacaggccatggataaaaaagcacagggccctggaacaagcaactctgcctcccgaacgaccctcccagcatcaggccacctgcccatttcacggcccccaggcatcgggcccgactccggtcacgcgccaagccaaacacacccgtggaggagtgcaagcgggaagagtgctcagaggccgccacattag

SEQ ID NO: 209348 - DNA, 1365 bp, synthetic construct
  misc_feature 1..1365: note = Description of Artificial Sequence: Synthetic coding sequence
  source 1..1365: mol_type = other DNA
atggcccagcccctggccttcatcctggacgtgcccgagacccccggcgaccaggggcagggccctagcccctacgacgaaagtgaggttcacgattctttccagcaattaatacaggagcagtcccagtgcaccgcacaggaagggctggagctgcagcaaagagaaagggaggttaccggatctagccagcaaacactgtggaggccagagggaacgcagagcacagccaccctgagaattctcgctagcatgccgtcccggacaattgggaggtctcgcggcgccattatttcccaatactataacagaacagtccagcttaggtgtcggtctagccggcctttgttggggaatttcgttaggagtgcatggcctagcctgcgactatacgatctggagctagatccgactgcgctcgaggaagaagagaagcagagcctgctggtgaaggaactgcaatcccttgcagttgcccagcgcgatcacatgttgcggggaatgccactgtccctggccgagaaacggtccctccgagagaagtcaagaaccccccgcggcaagtggcggggccagcccggttccggcggcgtgtgctcttgctgcggaagactgcggtatgcgtgcgtgctggcgttgcactcactgggactggctctgttaagtgctcttcaagcattgatgccctggcggtatgcgttaaagaggatcgggggtcaatttggatcttcagtgctctcctacttcctgttcttaaagacgcttctcgcctttaatgctctcctccttttgctactcgttgccttcataatgggaccacaggtggcattcccacctgcactccccgggcccgctcccgtttgcactggactagaattactgaccggcgctggctgctttacccacacagtaatgtattacggccattacagcaacgctaccctcaatcaaccctgcggctctccacttgatggcagccagtgtacaccccgggtgggagggctgccttacaacatgcccctggcttacctgagcaccgtgggcgtgagcttcttcatcacatgcataacactcgtttattcaatggctcatagcttcggtgagtcgtaccgcgtgggttctacgtctggcattcatgcaattacagtgttctgttcatgggattacaaagttacccagaaaagggcatcacggcttcagcaggataacataaggacacggttgaagggcgaagacaaaatcttcctgatcaataagctgcatagtatatatgaacggaaggagcgggaggagcgtagtagggttgggaccaccgaagaagctgcagcacccccggcacttcttactgatgagcaggatgcctag

SEQ ID NO: 209349 - DNA, 2418 bp, synthetic construct
  misc_feature 1..2418: note = Description of Artificial Sequence: Synthetic coding sequence
  source 1..2418: mol_type = other DNA
atggcccagcccctggccttcatcctggacgtgcccgagacccccggcgatcagggacagggtcctagtccatacgatgagtccgaagtccatgacagctttcagcagcttattcaagagcagagtcagtgtaccgctcaggagggacttgaactgcagcaacgggaacgagaagtgactggttccagccagcagactttatggcgccctgaggggacccagtccacagccacgcttcgcatcctggcaagtatgccctcccgcacgatcggtagaagccggggagctataatctcccagtattataacagaacggttcagttaagatgtcgctcctcaagacctctgcttggaaatttcgttcggagtgcgtggccctctctgagactctatgacttggaattggaccccaccgccctagaagaggaagagaagcagtcactcctggtgaaagaactgcagagcctcgcagtggcacagcgcgatcacatgctcagaggaatgcccttaagtctggccgaaaagcggagcttacgcgagaaaagcagaaccccccgagggaagtggcgcggtcagcctggtagcggaggagtgtgctcttgctgcggacgcctgaggtatgcatgtgtgctggcactgcattccctgggcctggcccttttaagtgctcttcaggcgctgatgccttggcgttacgccttgaagagaattggcggacagttcggatcatcggtgctctcgtacttcctgttccttaagactctgctggcctttaatgcgctgctcctcctgctgcttgtcgcattcataatgggcccccaggtagcattcccccccgccctgccaggacctgctcctgtgtgcactggactggagctgctaaccggggccggttgcttcacacacacagttatgtactacggtcattattctaatgcaacactgaatcagccctgtggctcgcctctggacggaagccagtgcacacccagggtaggtggcttgccctataatatgcccctcgcttacctctccactgtcggagtgagcttcttcatcacttgtataactctggtctattccatggcccactcatttggggagagttatagagttggatccacttctgggatacacgctattaccgtgttctgctcctgggattacaaggttacccagaaacgggccagccggctgcagcaggataacatccgcacgagactcaaagagctgctcgccgagtggcagctgcgtcacagccctaggtcagtttgcgggcgacttagacaggcagcagttctcggcctcgtctggctgctgtgcctagggacagccctcggctgtgccgtggccgttcacgtgttttcagagtttatgatccaatctcctgaggccgccggccaagaggctgttctacttgtgctaccacttgtcgtaggtctcctgaacctgggggccccctatctgtgtcgggtcctggctgcccttgaaccccacgattcccccgtgctcgaggtttatgtggccatctgtcgcaatttaatcctcaaactggcaattctgggtaccctgtgttatcactggctgggtagaagagtgggcgtgctgcagggacaatgttgggaagacttcgtgggccaggagttatataggtttttggtgatggatttcgtgctgatgctgctcgatactttgtttggtgaactcgtttggcgcatcataagtgagaagaagctcaagagacgtcggaaacctgagttcgacatagctcgtaacgtccttgaactgatttatggccagacattaacatggctgggggtactgttctccccattgctgccggcagtccagattataaagctgcttttggtcttttacgtcaagaagacctctctactcgccaattgtcaggctccacgccgcccttggcttgccagtcacatgagcacagttttccttacgctcctgtgttttccagcattcttgggtgcagccgtcttcctgtgctacgccgtgtggcaggttaaaccatcttcaacatgtggaccattccgaactctcgatactatgtatgaagccggtcgggtgtgggtgagacatctggaagcagccggaccacgggtgtcatggctgccctgggtacatcgataccttatggaaaatacattttttgtgttcctcgtctctgccttgctactggcagtcatttatttgaatatccaggtggtccgcggacagcgcaaggtgatttgcttgttaaaagaacagatcagtaacgagggagaggacaagatattcttaatcaataagcttcacagtatttacgagagaaaggagcgcgaagaacggagccgagtgggtaccactgaggaagctgccgcaccacccgccctgctcactgacgagcaggatgcatag

SEQ ID NO: 209350 - DNA, 1155 bp, synthetic construct
  misc_feature 1..1155: note = Description of Artificial Sequence: Synthetic coding sequence
  source 1..1155: mol_type = other DNA
atggcccacagcttcggcgagagctaccgggtgggcagcaccagcggcatccacgcaattacagttttctgctcttgggactacaaagtcactcagaaaagagcctcaagactacagcaggacaatatccgcactcggctcaaggaacttctggccgagtggcaactgaggcacagtccgcgcagcgtatgtggcaggttgcgccaggctgccgtgctggggctggtgtggctcctctgcctcggaactgccctgggatgcgccgtcgcagtccatgtgttcagcgaatttatgattcaaagtcctgaggctgcgggacaggaggcagttttactggtccttcctttagttgtaggactgctaaacctgggggccccttacctgtgccgcgtcctggctgcacttgagccacatgacagcccagtgctggaagtgtacgtggccatctgtcggatcatcagcgagaaaaaactgaagcgccgacgcaagcccgagttcgacattgcaagaaatgtgctcgaactgatttacggccagacattgacatggttaggtgtgctcttctctcccctgttacccgccgtgcagattattaaactgcttcttgtgttctacgtgaagaaaacgtctttgctggccaattgccaggcccccaggaggccatggttggcttcccatatgagtacagtgttcctgactttgctctgtttccctgcattccttggcgccgccgtattcctgtgttacgccgtatggcaggtgaaaccttcatctacgtgcggcccctttcggacactagacacaatgtatgaagctgggagagtttgggtgcggcacctggaagcagctggaccgcgtgtcagttggcttccgtgggtgcaccgctacctaatggagaacacattctttgtttttctcgttagcgcattgttgctggctgtaatctacctgaacattcaagtggtgcgcggccagcggaaggttatttgtttattaaaagagcagatctcaaatgaaggggaggataagatcttcttgatcaataagcttcatagtatctacgagagaaaggagcgcgaggaacggagtcgtgtgggtacgaccgaagaggccgctgccccaccggctctgctgactgatgagcaggatgcatag

SEQ ID NO: 209351 - DNA, 417 bp, synthetic construct
  misc_feature 1..417: note = Description of Artificial Sequence: Synthetic coding sequence
  source 1..417: mol_type = other DNA
cagtgctgggaggacttcgtgggccaggagctgtaccggttcctggtgatggattttgtgcttatgttgcttgacaccctgttcggggagctcgaaaataggttccaatctgatgtcttttccagccgaatatgggcatggtggcggaagccagagttcgatatcgctagaaatgtacttgagttaatttatgggcagactctgacatggctcggcgtactgttcagcccactcctgccagctgtgcagattatcaagctgctgctcgtgttctacgttaaaaagaccagtttacttgctaactgtcaggccccacgccgtccctggctggccagtcacatgagcaccgttttcctgacacttttgtgctttcctgccttccttggggcagctgtgtttctgtgctacgccgtttag

SEQ ID NO: 209352 - DNA, 2418 bp, synthetic construct
  misc_feature 1..2418: note = Description of Artificial Sequence: Synthetic coding sequence
  source 1..2418: mol_type = other DNA
atggcccagcccctggccttcatcctggacgtgcccgagacccccggagaccagggtcagggaccctccccatacgacgaaagcgaagtacacgacagtttccagcagctaatacaggaacagtcccagtgtactgctcaggaaggtttagaactgcagcaacgcgagagagaggtgacaggtagtagtcagcagaccctgtggcgcccagagggcacgcaaagcacagctactttacggattctagcctccatgccctcacgcacaatcgggaggtctagaggggccattatcagccagtactataataggactgtccagctgcgctgtaggtctagtcggccactgctgggcaactttgtgaggagtgcatggcccagcttgagattatacgatctagagttagacccaacagcacttgaagaggaagagaagcagagtctgctcgtcaaggagctccagagtttggcggtagctcagcgagaccacatgttgcgcgggatgccgttgagtctggccgagaagcgttcactgagagagaaatcccggacgcctcgcggcaagtggcgcgggcagccgggatccgggggcgtgtgttcgtgctgtgggagactcagatatgcctgtgtcttggcattgcacagcctcggcctcgctctgctgtctgcacttcaagctctcatgccctggagatatgccctgaaaaggataggaggtcagttcggtagtagcgtgttgtcatatttcctgtttctcaagacgctgctagcttttaacgccctgcttctgctactactcgtcgcctttatcatggggcctcaggtggctttcccaccggcccttcccgggccggctcccgtgtgtacagggctcgagctacttacaggtgccggctgcttcacccacaccgtcatgtactatgggcactactcgaacgctaccctcaaccagccttgcgggtccccactggacgggtctcagtgtaccccacgcgttgggggactgccctacaacatgccactcgcctatttgtcaacagttggcgtgtctttcttcatcacctgcatcaccctggtatactccatggcccatagctttggtgaatcttaccgtgtgggcagtacttctgggatccatgccatcactgtattttgctcatgggattacaaggtgacacagaagcgggcctctagactgcagcaggacaatattagaactcgcctaaaagaattgctcgctgaatggcaactgagacactcaccccgatccgtgtgcggtagattgagacaggctgccgttctcggcctcgtctggctgctttgtttaggcacagcgctcggatgcgctgttgcggttcacgttttctctgaatttatgatacagagtcctgaggcggcgggccaagaggcagtcctgctcgttctgcctctggtcgtgggcctgctgaacctgggggccccatacttgtgtcgtgtccttgctgccctggaaccacatgactccccagttctagaggtgtacgtggctatatgccgcaacttgattctcaagctggctatcctgggcaccttgtgttatcattggctgggccggagagttggcgtactacaggggcagtgctgggaggatttcgtcggtcaggagctatatcgcttcctggttatggactttgtgctgatgcttctggataccctcttcggtgagcttgtctggcggattattagcgaaaagaaactgaagcgaagaagaaaacctgagtttgatatcgccagaaacgttctggagctcatttatgggcagacactgacttggttgggggtgttgtttagccctctgctgcctgccgtgcaaatcatcaagctccttctcgtgttctatgtcaaaaaaacctcccttctagcaaattgccaggcgccacgacgcccttggttggctagccatatgagcacagtgtttctgaccttgctgtgttttcccgcatttctcggcgccgcggtgttcctctgctatgccgtgtggcaggtgaaaccttcatccacgtgtggccccttcaggactctcgatacaatgtatgaagcaggccgggtttgggtgaggcacctggaggcagcgggaccacgggtgtcttggctgccttgggtgcaccgctacttgatggagaatacattttttgtcttcctcgtctcagcgcttttactagccgtgatctacctgaatatccaggtggtgcgggggcagcggaaggtcatttgtctccttaaggagcagatttcaaatgagggggaggacaaaatctttctgattaataagctccactctatatatgaacgcaaggagcgggaggagcgcagccgagtgggcacaacagaggaggcagccgccccacctgccttgctcactgatgaacaggacgcctag

SEQ ID NO: 209353 - DNA, 1098 bp, synthetic construct
  misc_feature 1..1098: note = Description of Artificial Sequence: Synthetic coding sequence
  source 1..1098: mol_type = other DNA
atgaacatcatggacttcaacgtgaagaagctggccgccgacgccggaacttttcttagtcgggcagttcagttcaccgaagaaaagcttggtcaggccgaaaaaaccgagctggacgcgcacctggagaacctgttgagcaaggcagaatgcactaaaatttggacggaaaagattatgaagcaaactgaggtgctgctacagcccaatccaaacgctcgcatcgaggaatttgtatatgagaagttggacaggaaagcaccaagtaggatcaacaatcctgagctgctaggccagtacatgattgacgccggcacagaatttgggcccggcactgcctatgggaacgctttgatcaagtgtggagagacacagaagcggatcggaaccgccgatcgagagctgattcaaacctccgcattaaatttcctcactcctcttcgcaattttatcgagggtgattataagacaattgctaaggagcgcaaacttttacagaacaagcgcctggatctggacgcagctaagacccggctaaaaaaggcgaaggcagcagaaactaggaatagttctgagcaggagctgcggatcacccaatccgaattcgaccgccaggccgagatcactcgcctcctgctcgagggcataagttccacacacgcgcaccacctgcgctgcttgaacgactttgtcgaagcccaaatgacttactatgcccaatgctatcaatacatgctggatttacagaagcagcttggatctttcccctctaactacctgagtaacaataatcaaacaagcgtaactccagtgccctccgtcctgcccaacgccatcggatcctctgcaatggcgagcaccagcggcctggtcattacatctcctagtaacctctccgacctgaaggaatgtagtggctccaggaaagcccgtgtgctctacgactacgacgccgccaactcgaccgaactgagcttgctggccgacgaagtaatcacggttttttctgtcgtggggatggactcagattggctgatgggcgagcggggtaaccaaaaaggtaaagtccctattacttacctggaattattgaattag

SEQ ID NO: 209354 - DNA, 636 bp, synthetic construct
  misc_feature 1..636: note = Description of Artificial Sequence: Synthetic coding sequence
  source 1..636: mol_type = other DNA
atggccggcgtgggcgccggccccctgcgggccatgggccggcaggctttgcttctgctcgcactctgcgccaccggagcccagggactctatttccacattggggagaccgaaaagagatgttttattgaggagattccagacgagacaatggtcattggaaactaccggacccaggggatgcatgtggaggtgaaggatcccgatggcaaagtcgtgctgagcaggcagtatggcagcgaagggaggtttacgttcacgtcgcacactccaggagaccatcagatttgcctgcattccaactctaccagaatggctctgttcgcgggaggtaaactgagagtccatttggacattcaggtaggagagcatgcaaacaactaccctgaaatcgcagccaaggataagcttacggaattacaacttagagcacgacagcttctggaccaggttgagcaaatccagaaggagcaggattatcaaaggtatagagaagaaagattcaggctcacatctgagagcactaaccagcgcgtgttgtggtggagtattgcacaaaccgttattctaatcctgaccggcatctggcaaatgaggcaccttaaaagttttttcgaggctaagaaactggtctag

SEQ ID NO: 209355 - DNA, 684 bp, synthetic construct
  misc_feature 1..684: note = Description of Artificial Sequence: Synthetic coding sequence
  source 1..684: mol_type = other DNA
atggccggcgtgggcgccggccccctgcgggccatgggccggcaggctctcctgcttttggctctctgcgccacaggggctcagggcttgtattttcacatcggggagacagaaaagcggtgttttatagaagaaattcccgacgaaacaatggtgattggaaactatagaacccagatgtgggataaacagaaagaagtgtttctgccttcgacgcctggattgggcatgcatgtggaagtgaaagacccagacggtaaggtggtgctgagccgccaatatggatccgagggccggtttacttttacttcacacacaccaggggaccaccagatttgcctacacagcaactctacccgcatggcgctcttcgctggaggcaagttgcgcgttcacctcgatattcaggttggcgagcatgcgaacaactaccccgaaattgcggcgaaagacaagttaaccgaactccagctccgcgccagacaactgcttgaccaggtagagcagattcagaaggagcaggactatcagcggtaccgggaggaacgctttcgcctgacttccgagtcaaccaatcaacgggtgctgtggtggtcaatcgcccaaaccgtaatactgatattgacgggaatctggcagatgaggcacctgaagtcattcttcgaagccaagaagcttgtttag

SEQ ID NO: 209356 - DNA, 660 bp, synthetic construct
  misc_feature 1..660: note = Description of Artificial Sequence: Synthetic coding sequence
  source 1..660: mol_type = other DNA
atgagcggcctgagcggcccccccgcccggcggggccccttccccctggctttgctgctgctatttctgttgggaccaaggctggtactggcaatatcctttcacctgccaatcaactctcgcaaatgtttgcgtgaggaaatccacaaagacctattagtcacaggagcatatgagatctctgatcagtcagggggggctggaggactgagatcacatctgaaaatcactgattccgctggccacatcctttatagtaaggaggatgctactaaaggcaaatttgcgttcacaactgaagattacgatatgttcgaagtatgcttcgaatccaagggcacaggccgcatacctgatcagctggtgattctggatatgaagcatggagtggaggccaagaactacgaggaaatcgccaaggtggagaaactcaaaccccttgaagtggagctgcggcgattagaggatttgtctgaaagcattgtgaacgatttcgcttacatgaagaaaagggaggaggagatgagggatacaaatgagagtacaaatacacgtgtactatatttttcaatattttcaatgttctgccttatcggtttagctacctggcaggtgttctaccttaggcgtttttttaaggccaagaagttgatcgagtag

SEQ ID NO: 209357 - DNA, 471 bp, synthetic construct
  misc_feature 1..471: note = Description of Artificial Sequence: Synthetic coding sequence
  source 1..471: mol_type = other DNA
atggccggctggcccggcgccggccccctgtgcgtgctgggcggcgccgccctcggagtatgtttggcaggcgtagcaggacagcttgttgagccatcaacagcgccacccaagcccaaacctccccctctcaccaaggagacagttgtcttttgggacatgcgcctttggcacgtagtgggaatcttcagcctgttcgtcctctcaatcattattacgctgtgctgtgtctttaactgtcgcgtgccaagaacccggaaggagatcgaagccaggtatctgcagcggaaggcagctaagatgtataccgacaaactcgaaacagtgccacccctgaatgaactgacagaagtgcctggtgaggataaaaaaaagaaaaaaaaaaagaaaaaagactccgttgatactgtggctattaaggtggaagaggatgaaaaaaacgaggccaagaagaagaagggggagaagtag

SEQ ID NO: 209358 - DNA, 1602 bp, synthetic construct
  misc_feature 1..1602: note = Description of Artificial Sequence: Synthetic coding sequence
  source 1..1602: mol_type = other DNA
atgaacgagagccccgaccccaccgacctggccggcgtgatcatcgagttgggccctaacgacagcccacaaacttctgaattcaagggagctacagaggaagcccctgcaaaggagtcagtccttgcccgcttatccaaatttgaggttgaggatgccgagaatgtggcgagttatgattcaaagattaagaagatcgtgcattctatcgtctcatctttcgcctttgggctattcggcgtttttctagttttactggatgtaacactgatactcgctgatcttattttcacagacagtaaactctacattccactggaataccgctccatctcactggctattgccctgttctttctgatggacgtgttgcttagggtgtttgtagaacgtcgccagcaatacttttctgacctgtttaacatactcgacacggccatcatcgtgattcttctgcttgttgacgtcgtgtatattttcttcgatattaaactactccggaacatcccccgctggacccacctcttgcggctccttcgccttattatcttgcttcggatattccatctcttccaccagaagagacagttagaaaaactgatccgcagacgtgtaagtgagaataagcgaaggtacacaagggacggctttgatttggatctgacctacgtgacggagaggatcatcgctatgtctttcccctcatccggacggcagtctttctatcggaaccctatcaaagaggtcgtccgtttcctagataaaaagcatcgtaatcactaccgggtgtacaatttgtgctctgaacgcgcctatgatcccaagcattttcacaaccgagtcgtgagaatcatgatcgacgatcacaacgtgccaaccctgcatcagatggttgtctttaccaaagaagttaacgagtggatggcccaggacttggagaatatcgtcgcaatacactgtaagggggggacagatcgaactggcactatggtctgtgctttcctcatcgcatcagagatttgctcaacagcaaaggaaagcctgtattatttcggggaacgtaggacagacaagacacattccgaaaagtttcaaggggtgaagacaccatcccagaaacgctatgtagcctattttgcccaggtgaaacatctgtacaactggaacctgccccctaggaggattttgttcattaaacactttatcatctattctatcccacggtatgtccgcgatttaaaaattcaaatagaaatggaaaaaaaggttgtattttccacaatttccctgggcaagtgtagcgtacttgataatatcaccaccgataaaatccttatcgatgttttcgacggcctccctctttacgacgatgttaaggtgcagtttttctactccaatcttcccacgtactatgataactgtagcttttacttttggctacatacttcctttatagagaacaacagactgtacctgccaaaaaacgagctggataacctgcataaacaaaaggctcgccgcatttaccctagtgatttcgctgtggaaatcctgtttggagagaagatgacttcaagcgatgtcgtagcaggatctgattag

SEQ ID NO: 209359 - DNA, 1542 bp, synthetic construct
  misc_feature 1..1542: note = Description of Artificial Sequence: Synthetic coding sequence
  source 1..1542: mol_type = other DNA
atgaacgagagccccgaccccaccgacctggccggcgtgatcatcgaactgggaccgaatgacagtccccaaacaagcgagtttaagggtgcaaccgaagaggctcctgccaaggagtcctcaaaaatcaaaaagatagtccacagtatagtctctagttttgccttcggcttgtttggtgtttttctggtgctgctcgacgtgaccctcatccttgccgatttaatttttacggattcaaagctttacattccactggaatatcgttccattagtctggccatcgcccttttctttctgatggacgtgttactccgggtgtttgtcgaacggcgtcagcagtattttagcgacctttttaatatcttagataccgcgataatagtgattctgctgctcgtggacgtagtttatatctttttcgatatcaaactgctcagaaatatccctagatggactcatcttctgcgccttctccgcctgattattctgctgcgtatcttccatctgtttcatcagaaaagacagctggaaaaattgattagaaggcgtgtctccgaaaacaaacgtaggtataccagggacgggttcgatttggatttgacttacgtgactgagcgaatcatcgccatgagtttccctagttcaggacggcaaagtttctaccggaatccgattaaggaagttgtccgctttttagacaagaagcaccgcaaccactatcgggtctacaatctgtgttccgagcgcgcctatgacccaaaacacttccacaatagggtagttaggatcatgatcgacgaccacaatgtgccaactcttcatcagatggtcgtattcactaaagaggtgaatgaatggatggcccaggatcttgagaatatcgtggcgatccattgcaaagggggcactgatagaaccggaactatggtatgtgccttcttgatagccagtgagatttgtagcaccgccaaggaaagcctgtactacttcggcgaaaggagaactgacaaaacccacagtgagaaatttcagggcgtgaaaacgccctctcagaaacggtacgtcgcatactttgctcaagtgaagcacctgtacaactggaatctgccgccccgccggatcctcttcattaagcacttcatcatttactcaattcctcggtacgtaagggaccttaagattcaaattgaaatggagaagaaagtggttttttcaaccatttctctgggtaagtgcagcgtgcttgacaacattactacagataaaatcctgatcgatgtctttgatgggctgccattatatgatgacgttaaagtccaatttttttactccaacttacctacctactatgacaactgcagcttctacttctggctacacacatcctttatagaaaacaaccgcctctacttgcccaaaaacgagctagacaaccttcacaaacaaaaagcgcgtcgcatctaccctagtgatttcgctgtggagatcctgtttggtgagaagatgaccagctcggacgttgtggcgggcagcgactag

SEQ ID NO: 209360 - DNA, 1656 bp, synthetic construct
  misc_feature 1..1656: note = Description of Artificial Sequence: Synthetic coding sequence
  source 1..1656: mol_type = other DNA
atgaacgagagccccgaccccaccgacctggccggcgtgatcatcgagcttgggccgaacgactccccccaaaccagtgaatttaaaggcgctactgaagaagcgcctgccaaggaatcaccgcacacttccgaatttaagggggcagcacgcgtatcccctataagtgaaagtgttttggcaagattaagcaaatttgaagttgaggatgcggaaaacgtggcgagctacgactccaagatcaagaaaatcgtgcactcaatcgtgtctagctttgccttcggcctatttggggtctttctagtgcttctcgatgtgactctgatcttggcggacctgatatttactgactcaaagctctacattccactggaatatcggagcatttcactggccatcgcccttttcttcctgatggacgtgctccttcgcgtctttgtggagaggaggcagcagtactttagcgacctgtttaacatacttgataccgctatcatcgtgattttactcttagtagacgtggtttatattttctttgacatcaaactgttaaggaatattcccagatggactcatcttctccgcttgctgcggctcatcatcctgctgcgcatttttcacctctttcatcaaaagagacagttggagaaactgatacgcaggagggtcagcgagaataagcggcggtacacacgggacggcttcgacttagacctgacttatgtcacagaaaggatcatcgccatgtcattccccagttcgggaaggcagagcttctatcgcaatcctatcaaagaagtcgttaggtttcttgacaaaaagcatcgaaatcattatcgcgtctataacctttgtagtgagcgcgcgtatgatcccaagcacttccataatcgcgtggttcggatcatgatagacgatcacaacgtgccaacattacaccagatggtggtctttaccaaagaagtgaacgaatggatggctcaggatctcgagaatatcgtagcgatccactgcaagggaggtactgatcggaccggtacaatggtctgtgcctttctaatagcttctgagatttgcagtacggcaaaggaatccctctactacttcggcgagcggcgtacagacaaaactcactccgagaaattccagggagtcaagacccccagccagaagaggtacgtggcatattttgctcaggttaaacatttatacaactggaaccttccacctaggcggattcttttcataaagcattttatcatttactcaatacctaggtacgtccgggatctgaaaatccagatcgagatggaaaagaaggtcgttttcagcaccattagtctcggcaaatgttctgtgttggacaatatcacgactgataagattttgatcgatgtgttcgacggcttaccactttacgatgacgtgaaagtgcagttcttttacagtaatcttcctacatactatgataattgtagcttttacttttggttacatacgagcttcatcgagaataatagactataccttccaaagaatgagctggacaatctgcacaagcagaaggcaaggcgcatctacccatcagattttgccgttgagatcctgtttggagagaaaatgacatccagcgatgtcgtggcaggctccgactag

SEQ ID NO: 209361 - DNA, 1692 bp, synthetic construct
  misc_feature 1..1692: note = Description of Artificial Sequence: Synthetic coding sequence
  source 1..1692: mol_type = other DNA
atggagcgggacagccacggcaacgccagccccgcccggaccccctcggccggagcttcacccgcccaggcatcccccgcaggcaccccccctgggagggcaagtcccgcacaggccagccctgcacaagccagccctgctggtaccccgcccgggcgcgcctctccagcccaggctagccccgccgggacccctccaggacgcgcttctccaggcagagcgagccctgctcaggcctccccagcccaggcatctcctgccagggcaagcccagctctggcctctttgagccgaagcagctctggtcgatcctcgtccgccagatccgcctctgtcacaacatcccccacacgtgtgtaccttgtcagggccactccagtgggcgccgttccaattaggtcttcacctgctagaagcgcccctgcaaccagagccacacgcgagtcgcctgggacttcgctgcccaagttcacgtggcgcgaaggccagaaacaactgccattgattggatgtgtcctcctgctgatcgcgttagtagtgtccctcatcattctgtttcaattctggcaggggcacactggaatccggtacaaggaacagcgggagtcatgtccaaaacatgcagttaggtgcgatggggtcgtggattgcaaattaaagagcgacgagttgggttgtgtgcgttttgattgggataagagcttgctgaaaatatacagcgggagttcgcaccagtggctgcccatttgttcttcaaactggaacgacagttattccgaaaaaacttgtcaacagcttggcttcgagtctgctcacagaacaactgaggtagcacaccgcgattttgctaactccttctccattctgagatataattcaactatccaggagtctctgcatagaagcgagtgtccaagccagaggtatatctctctccagtgtagtcattgcggtcttcgcgccatgaccggaaggatcgtcgggggggcgctggcatctgattccaagtggccttggcaggtgtcactgcacttcggcacaacccatatctgtggcgggaccctgatagacgctcaatgggtgctaacagccgcacactgcttttttgtgacccgagagaaagtgctggagggatggaaggtgtacgctggcactagtaacctccatcagctgcctgaggccgcttctatagccgagatcatcatcaactccaactataccgacgaggaagacgactacgatatcgcactcatgaggttgtcaaagcccctcacgttgtccgcacacattcaccccgcctgccttcctatgcatggccagacgttctctctgaatgagacttgctggatcacaggatttggaaaaacccgtgaaacagacgacaaaacatcaccttttctcagagaggttcaggtgaaccttatcgatttcaagaagtgtaacgactacctcgtctacgactcctacctgacaccaaggatgatgtgtgccggcgatctgcgcggaggccgggactcctgtcagggcgatagtggcggtccactcgtgtgtgagcaaaataatcgctggtatctggctggggtgacttcttggggcacgggttgcggtcagcgcaacaaacctggggtttatacaaaggttaccgaggtgctgccttggatctacagtaaaatggagtcttcagcaggctag

SEQ ID NO: 209362 - DNA, 1194 bp, synthetic construct
  misc_feature 1..1194: note = Description of Artificial Sequence: Synthetic coding sequence
  source 1..1194: mol_type = other DNA
atggaccccgacagcgaccagcccctgaacagcctggtgaaggtgattcttgataagtactattttctgtgcgggcagccactccattttatcccaagaaagcagctgtgcgatggtgaattggactgcccgctgggggaagacgaagaacactgcgtcaaatcttttcctgagggacctgctgttgctgtgagactgtcaaaagacaggtccaccctgcaggtactggactctgccaccggtaattggttttctgcctgcttcgataatttcacagaagccttggccgaaaccgcttgccggcagatgggctattcatccaagcctacattcagggccgtcgaaatcggtccagaccaggacctggatgtggtcgagatcacggagaatagccaagaactaagaatgagaaatagctcaggtccttgcctgtccgggtcgcttgtgtctcttcactgccttgcttgtgggaagtcccttaaaactcctagggtagtcggcgtagaggaggcgtcggtggatagttggccttggcaggtttccatccagtacgacaagcagcacgtctgtggcggatccatactcgatcctcattgggtgctaaccgccgcccattgcttcagaaagcacacagatgtgttcaattggaaggtcagagcaggaagcgataaactcggttcatttcccagtctggctgtggctaaaataattatcatagagttcaaccccatgtatccgaaggataacgatatcgccctgatgaagctgcaattccctctgacgtttagcggcacggtgcgccctatttgtctgccctttttcgatgaagagctaaccccagctaccccactctggattatcgggtgggggttcactaaacagaacggcggcaaaatgtcggacatcctcctccaggcaagcgtccaggtcattgactccacacggtgtaacgcggatgacgcataccagggcgaggtgacagaaaaaatgatgtgtgccgggattcccgagggcggagttgatacatgccagggagattctgggggtccactgatgtatcagagtgaccagtggcatgtagtcggaattgtgtcttgggggtacggatgcgggggtccatccactccgggcgtgtataccaaggtgtctgcctacctcaactggatatacaacgtctggaaggctgaactgtag

SEQ ID NO: 209363 - DNA, 1266 bp, synthetic construct
  misc_feature 1..1266: note = Description of Artificial Sequence: Synthetic coding sequence
  source 1..1266: mol_type = other DNA
atgatgtaccggaccgtgggcttcggcacccggagccggaacctgaagccatggatgatagccgtcctcattgtcctctccctgaccgtggtggccgttactatcggcctcctggtgcattttttggttttcgaccagaagaaggagtactatcacggatcatttaaaatcctagatccacagatcaataacaatttcgggcagtctaacacataccagctcaaggacctccgcgagactacagaaaatctggtgtcccaggtcgatgaaatcttcatcgactcagcctggaaaaaaaactacatcaaaaatcaggtggttcgtctaactccagaggaggacggtgttaaggtggacgttataatggtgttccagttcccctccaccgaacaaagggcagttcgagagaagaaaatccagagtatcctgaaccagaagatcaggaacctgagagcgttaccaattaacgctagctccgtccaggtgaacgccatgtcctcgtccaccggtgagctgacagtgcaggcttcttgcgggaaacgcgtggttccactcaatgtcaacagaattgcttccggtgttatcgcgccgaaagcggcttggccttggcaagcgtcactccaatacgataacattcatcagtgtggagcgaccctgatatctaacacctggctcgtcactgcagcccactgcttccaaaagtacaagaacccccaccagtggactgtaagcttcggcacgaagatcaatccacctctaatgaaacggaacgtgcgcagatttatcatccacgagaaataccgatcagcagcccgggagtacgatattgccgtggtgcaagtgtcgagccgcgtgactttttccgacgacattcgccagatctgtctgccagaagcgtctgcgtcttttcagcccaacctgactgttcatattacaggcttcggtgccctgtactacgggggcgaatcccagaatgatctacgtgaagcgagggtaaaaatcatctccgatgatgtgtgtaaacaaccccaggtttacggaaacgatattaagccgggaatgttctgtgcgggctacatggaaggaatctatgatgcatgcagaggagactctggcgggcccctggtaacccgcgacctgaaggacacctggtatcttattggaattgttagctggggagacaactgcggccagaaggataagcccggcgtctatacgcaggttacctattatcgaaactggattgcctcgaagacgggaatttag

SEQ ID NO: 209364 - DNA, 1257 bp, synthetic construct
  misc_feature 1..1257: note = Description of Artificial Sequence: Synthetic coding sequence
  source 1..1257: mol_type = other DNA
atgatgtaccggaccgtgggcttcggcacccggagccggaacctgaagccttggatgatagcagtcttgatcgtgcttagcttaactgtcgtcgccgtgacaattggactgttagtccacttccttgtgtttgaccagaaaaaagaatactaccatggctcattcaagattctggacccacagattaacaacaatttcggccaatctaatacgtatcagctgaaagacctgagagagacaacagagaacctagttgatgaaatattcatagattcagcctggaagaagaattacatcaagaaccaggtcgtgcggttgactccagaagaggacggcgtgaaggtagacgtcataatggtcttccaatttccatctacagagcaacgtgctgttcgcgagaagaagattcaatctatcttgaaccagaaaatcaggaatctgcgcgcactcccaatcaatgctagcagcgtgcaagtgaatgctatgagcagctcaacaggagaactgaccgttcaagcctcctgcggcaagcgcgttgttcctctgaacgtgaacaggatcgcaagtggagttatcgctcctaaagctgcgtggccttggcaggctagtctgcaatatgacaatattcaccagtgtggcgctactctaatttctaatacctggctggttaccgccgctcactgcttccaaaaatataaaaatcctcaccagtggaccgtatccttcggcactaaaatcaacccaccccttatgaagagaaatgtgaggcggttcataatccacgagaaataccggtccgccgccagggaatacgatatcgccgtcgtgcaggtgtcgtccagagtgacgttttcggatgacatcagacaaatctgtcttcccgaagccagtgcttcttttcagcccaatctgactgttcacattacaggctttggcgctctgtattatggcggggaatcccaaaatgatcttcgggaagccagagtgaaaatcatctctgatgacgtctgtaaacagcctcaggtttatggtaacgatattaagcccgggatgttttgcgccgggtatatggagggcatctacgacgcatgcaggggggattctggcggcccactcgtaacaagagatttgaaggatacttggtacctgatcggaatagtgagctggggagataactgcggccagaaggataagcctggggtatacacacaagtcacctattataggaactggattgcttccaagaccggtatttag

SEQ ID NO: 209365 - DNA, 1254 bp, synthetic construct
  misc_feature 1..1254: note = Description of Artificial Sequence: Synthetic coding sequence
  source 1..1254: mol_type = other DNA
atgtaccggaccgtgggcttcggcacccggagccggaacctgaagccatggatgatcgcagtgctcatcgtactgtctctgaccgtggtggctgtaaccatcggattactcgttcatttccttgtcttcgatcagaagaaggaatactatcatgggtcatttaaaattctggacccccagatcaacaacaatttcgggcaatctaatacataccagttgaaggacctacgcgagaccaccgagaacctggtggatgagatttttatagactctgcctggaagaagaattatattaaaaaccaggttgtgcggctcacacccgaggaggatggagttaaggtcgatgtaatcatggtgtttcaatttccaagtaccgagcaacgcgctgtccgggaaaagaagatccagtcaatcctgaaccaaaagattaggaatttaagggcacttccaataaatgcttccagcgtacaagtcaacgccatgagttccagtacgggtgagctgactgtccaagcttcctgcggcaaaagagtcgtccccttgaatgtgaatcgcatcgcatcaggcgtgatcgcccccaaagcagcttggccttggcaggccagcctccagtacgataacatccatcagtgtggcgctacactcatctccaacacgtggctcgtaacagccgcgcactgtttccagaaatacaaaaacccccatcagtggactgtttcctttggaactaagatcaacccacccctgatgaagaggaacgtgcgccgctttattatccatgagaaatatcgctctgctgcacgggaatacgacatcgccgtggtacaggttagcagtcgcgtgaccttctccgatgacattagacagatctgtctgcccgaggcatctgctagtttccaaccaaatcttactgtgcatatcacaggtttcggggccctgtattacggcggtgagtcccaaaacgacctgcgtgaagctagggtgaagattatctcagacgacgtctgcaagcagccacaagtttacggtaatgacatcaagcctgggatgttttgcgccgggtatatggaaggtatctacgacgcttgtcggggtgattccggtggccccctcgtgactcgggacctaaaagacacatggtacctgatcggaattgtgagctggggcgacaactgcgggcaaaaagacaagccaggagtgtacacgcaggtgacttactatcgtaactggattgcttccaaaacagggatttag

SEQ ID NO: 209366 - DNA, 1689 bp, synthetic construct
  misc_feature 1..1689: note = Description of Artificial Sequence: Synthetic coding sequence
  source 1..1689: mol_type = other DNA
atggagcgggacagccacggcaacgccagccccgcccggacccccagtgctggagcgagtcctgcgcaggcctcccccgctggaacacctccaggtcgggcctcccctgctcaggcgtccccagcccaagccagtcccgctggtacgccccctgggcgggcttcccctgctcaggccagccccgcagggacaccaccagggagagcctcccccgggcgggcatcacccctgcaagcttctccagctcgcgcatcccccgcactcgcatctctatccagaagttcctctggtcgttctagcagcgctcggtccgctagcgtgaccacttctccaaccagagtctatttagtgagggccacaccagtcggggccgtccctattcggtcctcccctgctcgctcagccccagctactcgcgctacacgtgagtcccctggcactagcctgcctaaattcacatggcgcgaaggacagaagcagctacccttgatcggctgcgtccttctgttaattgccttggtggtaagtctgatcattctgtttcagttttggcaagggcatactggaatacggtataaagagcaacgtgaatcatgcccaaaacatgctgtgagatgcgatggggtggtcgactgcaagctgaagtcagacgagctgggttgtgtccgttttgattgggacaagtcactgctgaagatatatagtggctcctcgcaccagtggcttcccatttgcagcagcaattggaacgactcgtatagcgaaaagacctgtcaacagctcggttttgagagtgcacatcgaaccactgaagtggcccacagagatttcgccaattcatttagcatactgagatacaatagtactatacaagaatctcttcataggtctgaatgtccttcccagcgttacatctctctgcagtgttcccactgcgggttaagggccatgactggccgaatcgtgggaggggctctcgcttctgactcgaagtggccctggcaggtcagtctccatttcggcaccacccacatctgcggtgggacactgatagacgcacagtgggtcctcacagccgcccactgtttttttgtcacaagggaaaaggtgctggagggatggaaagtgtatgctgggacttcaaacctgcaccagctcccggaggccgctagtattgcagagattatcatcaactctaattatacagacgaggaggacgactacgatatagcactcatgcgcctgagtaaaccgctgaccctgtctgcccacatccatccagcctgcctccccatgcacgggcaaacattctccctcaatgaaacatgttggattacaggattcggtaagactagagagactgacgacaagacctccccatttctccgggaggtccaggtcaatctcatcgattttaaaaagtgcaacgattacctggtttatgattcctatctgacccctagaatgatgtgtgccggtgatctgcgtggcggaagggacagctgccagggtgacagcggagggccacttgtgtgcgaacagaataaccgctggtacctggccggggtaacatcctgggggactggctgcggccagaggaacaagccgggcgtttatacgaaggtgacggaggtgctgccctggatatacagcaagatggaaagtgaagtgcgctttagaaaatcctag

SEQ ID NO: 209367 - DNA, 1761 bp, synthetic construct
  misc_feature 1..1761: note = Description of Artificial Sequence: Synthetic coding sequence
  source 1..1761: mol_type = other DNA
atggagcgggacagccacggcaacgccagccccgcccggacccccagtgctggtgcctctccagcgcaggcctcaccagccggaacccccccaggccgtgcaagccctgctcaggcctccccagcccaagccagcccagccggaacacctccgggtcgagcctcaccagcgcaagcctccccagccggtacgccacctggtcgggctagcccgggacgggccagccccgcccaggccagtcccgctcaggcttcgcccgccagagcctcacctgcattggcgtccttgtctcgctcctccagcggaaggtcatccagcgcacgaagcgcgtccgtgacaaccagtccaacacgagtctacctagtgcgggcaaccccagtgggggcggtacccataagatcctctccagcgcggtctgctcccgctacaagggcgactagagagtccccagggacaagcctcccaaagttcacttggcgcgaaggacagaagcagctgcccctaatcggatgcgtgctgctgctgatcgctctcgtcgtgtctcttatcatactgtttcagttctggcagggacatactggcattaggtacaaagagcaacgcgaaagttgccctaaacatgccgtgcggtgtgacggcgtagttgattgcaaactcaaatctgatgaactgggatgcgtaaggttcgactgggataagtcactcttgaagatttactccggcagttcacatcagtggttacctatctgcagtagtaattggaacgattcatatagtgagaagacatgccaacaactcggcttcgaatcagcgcaccgaaccacagaggtggctcaccgggattttgctaattcattttccatattaagatacaacagcacgatacaggaatccctgcaccggtccgaatgccccagccagaggtatatttcactgcagtgttctcattgtgggctgcgggcaatgactggcaggatcgtgggtggcgccctggccagcgactcgaaatggccatggcaggtgtccctgcatttcggtaccacgcatatctgcggaggcaccctcatagacgctcagtgggtgttgacagccgctcactgcttcttcgtgaccagggagaaggtgctggagggctggaaggtgtacgctggcacctctaatctgcaccagctgccggaagccgcaagtatcgcagaaataatcattaatagcaactacactgatgaagaagacgattatgatattgctctcatgcgtctttcaaagccactcacattatcagcccacattcacccagcctgtctgccgatgcacggccagacttttagtcttaacgagacttgttggatcaccggctttgggaagaccagggaaactgacgataagacctctccattccttcgtgaggttcaggtcaatcttattgactttaagaaatgcaatgactacctcgtgtacgactcctatctaactccaaggatgatgtgtgccggcgaccttcggggaggaagggacagctgtcagggcgacagtggggggccgctggtgtgtgagcagaacaaccgctggtacctggccggtgtgacctcctggggaaccggttgtggccagaggaataaacccggagtctacactaaggtaaccgaagttttaccctggatctacagcaagatggaagtccgaagcttgcagcaagacaccgcccctagccggttgggtacgagctctgggggcgacccaggcggcgccccacggttgtag

SEQ ID NO: 209368 - DNA, 1704 bp, synthetic construct
  misc_feature 1..1704: note = Description of Artificial Sequence: Synthetic coding sequence
  source 1..1704: mol_type = other DNA
atggagcgggacagccacggcaacgccagccccgcccggaccccctctgcgggcgcctccccagcacaagcttctcctgctggaacacctcccggaagggcgtccccagcacaggcgtcacctgcacaggcatcccccgcgggaaccccacccgggcgggcgagcccagctcaggcgtcacctgctggaacacctcccgggagagcatctccaggtagagcaagtcccgcgcaggccagtcctgctcaggcttccccagcccgagcatcccccgcgttggccagcttatcacggtctagttcaggcagatcatcctctgcccggtccgctagcgtcacaaccagccccacgcgcgtctatctggtgagggcaacacctgtgggagctgtgcccattagaagctcgcccgctcggtcggctcctgcaacccgagcgacaagggaaagtcctgggacctccctgcccaagttcacctggcgcgaagggcaaaagcaactgcccctaatcgggtgcgtgcttcttctgatagctctggtggttagcctgattatcctcttccagttttggcagggacacaccggtatcagatacaaagagcagcgggaatcgtgcccaaagcacgcagttcgatgtgacggagtcgtagactgcaagctaaagtctgacgagctgggttgcgtgaggtttgactgggataagtcgctgctgaagatttactcggggagtagccaccagtggttacctatttgctcctcaaactggaacgacagctacagcgaaaagacatgccagcagctcggctttgaatccgcacaccgcaccaccgaggttgcgcaccgggactttgccaacagttttagcatactgagatataacagcacgatccaggaaagcctgcacagaagcgagtgtccaagccaacggtacatcagcctacagtgttcacactgtgggctcagggcaatgactggccggatagtcggaggcgctctcgcttcagattccaagtggccatggcaggtctcgctgcacttcggaacaactcatatctgcggggggactcttattgatgcccagtgggttctgactgcggcccattgctttttcgtcacacgagaaaaggtgttggaaggctggaaggtatatgctggcacgagtaatctccatcagcttcctgaagcagcatccatcgctgagatcataataaacagcaactacacagacgaagaggacgactacgatatcgccttgatgcggctgagcaagccattgactctgtcagctcatatccatcctgcatgcttacccatgcatggacaaacatttagcttaaatgaaacctgttggatcaccggattcgggaagacccgcgagaccgacgataaaacaagccccttcctgcgcgaggtgcaggtgaatctgattgactttaagaaatgcaacgattacctggtctacgatagctacctaacaccgcggatgatgtgcgcaggcgatttaagagggggtcgagactcttgccaaggagacagcggggggccactcgtgtgtgaacagaataatcggtggtatctggcaggcgttacctcttggggaacaggatgtggccagcgaaataagcccggcgtatacaccaaagttacagaggtcctaccctggatctactctaaaatggaaagcgaagtgcgcttcaggaaaagttag

SEQ ID NO: 209369 - DNA, 1476 bp, synthetic construct
  misc_feature 1..1476: note = Description of Artificial Sequence: Synthetic coding sequence
  source 1..1476: mol_type = other DNA
atggagcgggacagccacggcaacgccagccccgcccggaccccctctgcaggggctagccccgcccaggctagccccgcaggaactccccctggccgtgcaagtcctgcacaagccagcccagcccaggcctcacctgccggtacaccgcctggcagggcgtcacccgcacaggcaagccccgcaggaacaccgcccggccgagcatctcccggtagggcctcccctgcgcaggcttcccctgctcaggcctcccctgcccgcgcctctccagcactggctagcttgtcgcgtagttcatcaggccgatcatcctccgcaagaagtgctagcgtgaccaccagcccaacccgcgtctatctggtccgggcaacaccggtcggagctgtgcctataaggtccagcccagcccggtccgctcctgcgacccgggcaacccgcgaatcccccggcacgagccttcctaaatttacatggagggagggccagaagcaactcccactcattggatgcgttttactgctgatagccttagtggtgagtttaatcatcctgttccagttttggcaaggacacaccggtattcgctataaggagcagagggagagctgtcccaagcatgctgtgcgctgtgacggcgtggtggactgtaaactgaagagcgacgagctgggttgcgtgcggttcgattgggacaaatccctgctcaagatctattctggcagctcacaccagtggctccccatctgttccagtaactggaatgacagttattccgagaagacctgccagcagcttgggtttgagtcggctcataggaccacggaagtggcccacagggattttgctaactctttcagtattttacggtataattctaccatacaggagagcctgcaccgcagtgagtgcccatctcaacggtatatttctctgcagtgttcccactgcgggctcagggccatgactgggcgcatcgtcggtggcgctctggcaagcgattccaagtggccgtggcaggtctcccttcactttggcacaactcatatttgcggaggtacgctgattgatgcacaatgggtgcttactgctgcccactgcttttttgtgacccgcgaaaaggtgctggaagggtggaaagtgtatgcagggacatcaaaccttcatcagctgcctgaagcggcctccatcgccgaaatcatcatcaacagtaactatacggacgaagaagatgattatgacatagccctgatgagattatcaaagcctctcactttgagcggcgagggtatttgcacccctagaagtcccgcaccacaaccccagcaccccctgcagccctctcacttgtctgcctctgtgaacagctaccctggaccaaaggcctccgcaggacagaaatccaaaaccctgaaagacccatatatggagcacttttgtttcattatccgagagactgaagcccagggtctttag

SEQ ID NO: 209370 - DNA, 1599 bp, synthetic construct
  misc_feature 1..1599: note = Description of Artificial Sequence: Synthetic coding sequence
  source 1..1599: mol_type = other DNA
atggagcgggacagccacggcaacgccagccccgcccggacccccagcgccggagcctctccggcccaggcctcacctgccgggaccccacccggcagagctagtccagcgcaggcaagccccgcccaagcctcaccagcgggcaccccacccggacgagcgtccccagcacaggccagtcctgccgggactcctcccggccgggctagtccagggagggcctcccctgctcaggcatctccagcacaggcatcccccgcgcgggcatccccagctttagcctctctgtcgaggagcagctcgggtagatcttctagcgcacgatccgcgagcgtgactacctctccaacccgagtgtatctggtcagggccactcccgtcggcgccgtgccgattaggagttcccccgcccgcagcgcccctgctactcgtgcaactagggaaagccctgttcagttctggcagggacacactggaatcagatacaaggagcagagagaaagctgtccaaaacacgcagttagatgtgatggtgttgtcgactgtaagctcaaaagtgacgaactgggctgcgtgagatttgactgggacaagtccctcctcaaaatttactccgggtccagtcaccaatggctgccgatctgttcgtccaattggaatgacagctactcagagaaaacctgtcagcagctgggcttcgagagtgctcaccgaacaaccgaagtagcccaccgagactttgctaacagtttttctatccttaggtacaacagcacaatacaggagagcctgcatcggtcagaatgtccttctcagcgctacatttccctgcagtgctcacactgtggactgcgcgcaatgactggccggattgtgggaggggcattagcctcagacagtaaatggccttggcaggtttcactgcattttggtaccactcacatctgtggcggaaccctcatcgacgctcaatgggtgctgacggcagcacattgctttttcgtgaccagagagaaggtgcttgaaggctggaaggtgtatgctggcacgtccaatctccatcagctgcctgaagccgcatccattgccgaaatcatcataaatagcaactataccgatgaggaggatgattatgacatcgccctcatgaggctgtctaagccacttacactgtcagcccacatccaccccgcctgtctcccaatgcacgggcagaccttctccttaaacgaaacctgctggatcaccgggtttggcaagaccagagaaacagacgataagacatctccattccttagggaagtgcaggtcaacctgattgactttaagaaatgcaatgattacctcgtttatgactcctatctaactccgaggatgatgtgtgccggggacctgagaggcggcagagattcatgccagggggacagtggaggcccactggtatgtgaacagaacaaccggtggtacctggcaggtgttacaagctggggaaccgggtgtggacagcgcaacaaacccggagtttataccaaggtgaccgaagtccttccctggatttattcgaagatggagtctgaggtcaggttccggaaatcttag

SEQ ID NO: 209371 - DNA, 1365 bp, synthetic construct
  misc_feature 1..1365: note = Description of Artificial Sequence: Synthetic coding sequence
  source 1..1365: mol_type = other DNA
atgggcgagaacgacccccccgccgtggaggcccccttcagcttcagatccctatttgggctcgatgatctgaaaatcagtcctgtggcccctgatgcggacgccgttgccgcccaaattttgtccctccttcccctgaaattttttccaatcattgtgatcggcataatcgccctgatcttggccctggcaattgggttgggaattcatttcgactgctccggcaaataccgctgtcggagctctttcaagtgcatcgaattgatcgctagatgcgatggagtgtcggattgcaaggacggagaggatgaataccggtgcgtaagggtgggagggcagaatgctgttcttcaggtgttcacagctgcctcttggaagactatgtgcagtgatgattggaaaggacactacgccaacgtcgcatgcgcacagttgggcttcccaagttacgtcagttcagataatcttcgggtgtcatctcttgaagggcaatttagagaggagttcgtcagcattgaccacctgttgcccgacgacaaggtgaccgcattacatcactccgtgtacgtcagagagggctgtgccagtggccacgttgtgaccctgcaatgcactgcgtgtggacatcgtcggggttactccagcagaatcgtcggcgggaacatgtcactcctaagccagtggccctggcaagcaagcctgcagtttcaggggtaccacttgtgcggcggcagtgtgattactccactgtggattatcactgctgcccattgtgtgtacgacctctatttgcccaaaagctggaccattcaggttggcctagtctccttactggacaaccccgccccgagccatttggtggagaagatcgtatatcacagcaagtacaagcctaaaaggctcggcaacgacatagccttaatgaagctagccgggccactcacattcaatgaaatgatacagcctgtgtgtctccccaattctgaagagaactttccagatgggaaggtgtgttggacatcaggctggggcgcaacagaggacggagccggtgacgcttcacccgtgctgaatcatgccgcggtcccactcattagcaacaagatctgtaatcatagggacgtctacggtggcatcatatcaccttcaatgctctgtgcagggtatctcactggaggcgtcgacagctgccaaggtgactccggaggaccactggtttgccaggagaggagattgtggaagctggttggggccacgtctttcggcatagggtgcgctgaagtaaacaaaccaggtgtgtatacaagagtcacttcctttctcgactggatccatgagcagatggaaagggatttgaagacctag

SEQ ID NO: 209372 - DNA, 1617 bp, synthetic construct
  misc_feature 1..1617: note = Description of Artificial Sequence: Synthetic coding sequence
  source 1..1617: mol_type = other DNA
atgcaggccgtgggccccaagcccctgcccaccctgctgtgcggcgggcggacaggacataggaccgcacgagtgctctcatttctcatcagaagttgcccctgtgagccaggtaagggatgcgtgtacggcaaacctgtgacgctctggccaacaatttcttcagtcgtacccagcacctttctgggcttgggcaattatgaagtggaggtggaagccgaacccgacgtccggggtccagagatcgtgactatgggcgaaaatgacccgcctgcagtcgaggcccctttttccttccggtcattgtttggtctggatgatctaaaaatctcccccgtagctcctgacgccgacgccgttgccgcccaaattctgtcattactgccgctgaaattttttcccatcattgtgatagggattattgctctgatattagccttggccatagggctcggcatccactttgactgctcagggaagtatcgctgccggtcatcctttaagtgtatcgaactgattgctcgctgtgacggcgtgagcgactgcaaggatggcgaggatgagtataggtgcgtcagagtcggcggtcagaacgcggtgctccaggtgtttacagcggcctcttggaagactatgtgcagcgacgactggaaggggcattatgccaacgttgcttgtgcacaacttggcttcccctcctatgtttcttctgacaatctgcgcgtttcctcccttgaaggccaattccgcgaagaatttgtctctattgatcaccttctacccgatgataaagtaactgccctgcaccatagtgtgtacgtgcgagaaggatgcgcttctggacacgtcgtcacgctccagtgtaccgcctgtggtcatagacgcggttattccagcagaatagtgggaggaaatatgtctctgttgtcgcaatggccatggcaggccagcctacaatttcaaggctaccacctgtgtgggggatcagttattactccactgtggatcatcaccgcagctcattgcgtatacgacctctatctgcccaagtcgtggaccatccaggtgggcctggtcagtcttctcgataacccagccccatcacacctagtagagaaaattgtctatcatagtaagtacaagccaaaaaggcttgggaatgatattgcactcatgaaacttgccgggcctctaacctttaacgagatgattcagcccgtttgcctccccaattctgaagaaaattttcccgatggtaaggtttgctggacatcgggctggggcgcaactgaggatggggctggcgacgcctctcccgtcttaaatcatgccgctgtgcctctcatctccaataaaatatgtaatcatcgcgacgtgtacggggggattattagtccatccatgctttgtgccggctacctgacaggcggcgtcgattcatgtcagggagacagtggcggccccctggtgtgtcaagaaagaaggctgtggaagctagttggggccacatcctttgggattggatgcgctgaggtgaacaagccgggtgtttatacccgggtgacttcttttcttgattggatccatgaacaaatggaacgggacctgaaaacgtag

SEQ ID NO: 209373 - DNA, 1035 bp, synthetic construct
  misc_feature 1..1035: note = Description of Artificial Sequence: Synthetic coding sequence
  source 1..1035: mol_type = other DNA
atgggcgagaacgacccccccgccgtggaggcccccttcagcttcagatccctttttggattggatgatttgaaaatcagccctgttgccccggacgcagacgccgtcgccgctcagatactcagcctcctgcccttgaaattttttcccatcatcgtgataggcatcattgctctgatcctggctctcgccattggacttggtatccattttgattgcagcgggaaataccggtgcagatcttctttcaagtgcattgaactgatcgcccggtgtgacggggtctccgattgtaaggacggcgaagacgagtacagatgtgtacgagttgggggacagaacgctgttttacaggtgttcaccgcggcttcttggaaaaccatgtgtagtgacgattggaagggtcactacgcgaatgtggcatgcgcccagctgggattcccctcatacgtcagttccgacaacctaagggtctctagcttagagggacagtttagggaagaattcgtctcaatcgatcatcttctgcccgatgacaaagtgactgctttgcaccatagcgtatacgtgcgtgagggttgtgctagtgggcacgtggtaactttgcagtgtactgcgtgcgggcatcggcggggatactcctctcgtatcgtagggggaaatatgtcgttactctcacagtggccatggcaggcgtctctccagttccagggataccacctgtgtggggggagcgtgattacacctctgtggattattactgccgctcactgcgtctatgacctctatctaccgaaaagctggacaattcaggtgggattggtctctctactcgacaaccccgctccatcccacctggtcgaaaaaatcgtttatcattctaagtacaagcctaagcgcctggggaacgatatcgccctaatgaaactcgctgggccccttacctttaacggcaccagtggatcactgtgtggctccgccgcactgccattgtttcaagaggaccttcaactactgattgaagcgttcctgtag

SEQ ID NO: 209374 - DNA, 1362 bp, synthetic construct
  misc_feature 1..1362: note = Description of Artificial Sequence: Synthetic coding sequence
  source 1..1362: mol_type = other DNA
atgggcgagaacgacccccccgccgtggaggcccccttcagcttccggtcgctattcggtctagatgatctgaagatcagtcccgtggcaccagatgctgatgcagtggctgcccaaattctgagcttgctccctctgaaattctttcccatcatagtcattggcatcatcgctctaatcctcgccttggccattgggctaggcatccacttcgattgctcagggaagtatcgatgcaggtcaagttttaaatgtatcgagctgattgcccgctgcgacggggtctctgattgtaaggatggcgaagatgaatataggtgtgtcagggtcggcggccagaacgccgttcttcaggtgtttaccgccgcttcttggaaaacaatgtgttctgatgactggaaaggccactatgccaacgttgcctgtgcacagcttggcttcccctcctacgtctcatcggacaacttgagagtttcttccttggagggacagttccgagaggagtttgtgtctattgaccaccttcttccggatgataaagtgacagccctgcaccatagcgtctacgtccgagaaggatgtgctagcgggcatgttgtgaccctccagtgcactgcctgcgggcatcggaggggatattcctctaggatcgttggtggaaacatgagtctgctttcccagtggccatggcaggcttccttgcagttccagggttatcacctgtgtggtggcagcgtgatcacgcccctgtggatcattaccgccgcgcattgtgtttatgacctgtatctccccaaatcctggactatacaggtcggtctggtctccctgctggataacccagcaccatctcacctggttgaaaaaattgtctaccattccaagtacaaacccaaacgccttggaaacgacattgccctgatgaaactcgcgggacccctaactttcaatgaaatgatccagccggtctgtctcccaaattcggaggagaatttccccgatggaaaggtctgctggaccagtggatggggggctaccgaagatgggggcgatgcctccccagtcttgaatcatgctgcagtgcctctgatcagcaataagatctgcaaccaccgggatgtttatgggggcataatctcaccttcaatgctgtgcgcgggctacctgaccggcggggtggattcttgccagggcgactccgggggcccattggtgtgccaggaacggcgcctctggaaactggttggcgccacttcttttggcatcggttgcgctgaggtaaataagcccggggtgtacactcgagtcacctcctttctggactggattcatgaacagatggaacgagatctcaaaacctag

SEQ ID NO: 209375 - DNA, 1314 bp, synthetic construct
  misc_feature 1..1314: note = Description of Artificial Sequence: Synthetic coding sequence
  source 1..1314: mol_type = other DNA
atgctgcaggaccccgacagcgaccagcccctgaacagcctggacgttaagccccttcggaagcctaggatccctatggagacattccgcaaagtggggatccctattattatcgccttgttgagccttgcttcgataatcatcgtcgtcgtgttaattaaagtgattctggataagtactacttcctgtgcggccagcctttacattttattcctcgcaagcaactgtgtgacggcgagctagactgccctctgggcgaggatgaagaacactgcgtaaaatcatttcccgaaggacccgccgtcgccgtgcgtctgtcaaaggaccgctccacactccaagtcttagatagcgcaacagggaactggttttctgcctgtttcgataactttaccgaagccttggcagagacagcgtgtcgtcaaatgggctacagcagtaaacctacctttcgcgccgtggagatcggccccgaccaggacttggacgtggtggagattacagaaaatagccaggaactgagaatgcggaactcaagcggtccctgcctttccggctccctagtgtcactccattgcttggcatgtgggaagtcattgaagacccctcgcgtagtaggcgtggaggaggcttccgtcgactcttggccctggcaggtgagcatccagtacgacaaacagcatgtgtgcggcggatctatccttgatccgcactgggtgctaacagctgcccattgcttccggaaacacaccgatgtctttaattggaaggtgcgcgccggatctgataagctgggaagtttcccgagtctcgccgtcgctaagatcataatcattgagttcaatcccatgtatccgaaagataatgacattgcattgatgaagctgcaatttcctcttacattctctggaacagtacgacccatatgtttgcctttcttcgacgaagaactgacaccagctaccccgctgtggattattggttgggggttcacaaaacaaaatggcggcaagatgtcagacatcctgcttcaggccagcgtccaggtgatagactctacccgctgtaatgccgatgatgcatatcagggggaagtcaccgagaaaatgatgtgtgcaggcatcccagaagggggcgtggacacttgtcagggagactcaggaggccctcttatgtatcagtcagatcaatggcatgtcgtcggcatcgtgagttgggggtatggatgtgggggcccctccacaccaggcgtgtatactaaggtgagcgcatacctgaactggatttataatgtttggaaagcagaactatag

SEQ ID NO: 209376 - DNA, 1299 bp, synthetic construct
  misc_feature 1..1299: note = Description of Artificial Sequence: Synthetic coding sequence
  source 1..1299: mol_type = other DNA
atgctgcaggaccccgacagcgaccagcccctgaacagcctggacgtgaagcctttgcgcaagccaaggatcccgatggaaaccttcagaaaggttgggatcccgattattatcgccctgctctctctggcttctatcattattgttgtagtgttgattaaggtgattctcgataagtactatttcctgtgtggtcagcccctacacttcatccccagaaagcagttatgcgacggcgagttagattgccccctaggcgaggacgaggagcattgtgtgaaatcgttcccggagggccctgctgtggcggtccgtctgtctaaggaccgtagtacattgcaggtcctcgacagtgccaccggcaattggttttcagcttgctttgacaacttcaccgaggccctggccgaaacagcctgccggcagatgggttactccagggcagttgaaataggccctgaccaagacctcgacgttgtggagatcacagagaattcacaggagctcagaatgcgtaattcatctggaccttgcttgtccggcagcctggtgtcgctacactgtctggcctgcggcaagagcttaaagacaccacgggttgtgggcgtcgaggaggccagcgttgactcctggccttggcaggtctcgatacagtacgacaaacagcatgtgtgtggcggctctattctggaccctcactgggtactgaccgcagcccactgtttcaggaagcacacggacgtgtttaactggaaggttagagcgggatccgataaacttgggtcatttccatcccttgctgtggccaagatcattattattgagtttaatccgatgtatcccaaagataatgacatcgccttgatgaagttgcagttccctctgacatttagcggaacggtgcgacccatttgcttgccctttttcgacgaagagctcaccccggcaaccccactatggattattggatggggctttacgaagcagaacggtggcaaaatgagtgatatcctgctgcaggccagcgttcaggtgatagacagtactcgctgtaacgctgacgacgcttatcagggggaggtcacagaaaaaatgatgtgcgctggaattccagagggcggagtagacacatgccagggtgactctggcgggcctctcatgtatcagtctgaccagtggcatgtggtgggaattgtgtcctgggggtatggctgcgggggcccctctacacctggcgtctacactaaggtgtccgcatatctgaattggatctacaacgtgtggaaagcggagttgtag

SEQ ID NO: 209377 - DNA, 1308 bp, synthetic construct
  misc_feature 1..1308: note = Description of Artificial Sequence: Synthetic coding sequence
  source 1..1308: mol_type = other DNA
atggaccccgacagcgaccagcccctgaacagcctggacgtgaagcctctcagaaaaccgaggatccctatggagacatttcgcaaggtgggaattcctattattatagcactactgagtcttgcatcaatcattatcgtcgtggtgctcattaaggtaattcttgacaagtactattttctctgcggtcaaccactgcattttatcccacgcaagcaactatgcgatggagaactggattgtccattgggagaggatgaagaacactgtgttaaaagcttccctgaaggccccgccgtggcagtacggctgtctaaagacagatctacactgcaggttctggattccgccaccggcaactggtttagcgcatgtttcgacaattttaccgaagccttggctgagaccgcatgtcggcagatgggttatagttctaagcctaccttccgcgccgtcgaaatcggaccagaccaggatctcgacgttgtggagattacagaaaattctcaggagttgcgaatgaggaactcctccggcccttgcctgtcgggaagcctcgtgagcctccactgtctggcctgcggcaagagcttgaaaactcccagggttgtgggagtcgaagaagctagcgtcgatagctggccttggcaggtgtccattcagtatgacaagcaacacgtttgcgggggatccattttggatccccattgggtgctgactgctgcacactgtttcaggaagcacaccgacgtatttaactggaaggtccgcgcaggctccgataagttaggatctttcccctcccttgctgtggcgaaaattatcattatcgagttcaatcctatgtaccctaaagataacgatattgccctcatgaaactgcaattcccgctgacattcagcggcacagtgcggccaatctgtttgccattcttcgacgaggaactgacccctgccacacctctctggatcattggatggggattcaccaagcagaatggggggaaaatgagtgacattcttctccaggcgtctgtccaagtgattgacagcacgcgttgcaatgccgatgacgcttatcagggcgaggtgaccgagaaaatgatgtgtgctggaattcctgagggcggtgtggatacatgtcagggagactcaggaggacctcttatgtaccaatcggatcagtggcacgttgttgggattgtgtcctggggctacggttgtggtggaccctccactccaggcgtgtacaccaaagtgagtgcctatctgaattggatctacaacgtttggaaggctgaattgtag

SEQ ID NO: 209378 - DNA, 1374 bp, synthetic construct
  misc_feature 1..1374: note = Description of Artificial Sequence: Synthetic coding sequence
  source 1..1374: mol_type = other DNA
atgagcctgatgctggacgaccagccccccatggaggcccagtacgctgaagaaggtcctggccccggaatctttcgagctgaaccaggcgaccagcagcatccgatcagccaagcagtgtgctggcgttctatgcgccgcggctgcgctgttcttggggccctaggccttctggccggggcaggcgtgggctcttggctgctggtgctctacctgtgtcccgcggccagccagcccatctctggaacacttcaggacgaggagattacactatcttgctctgaggcgagtgctgaagaggcgctacttccagcactgcctaaaacagtctcctttagaatcaactccgaggactttctgttggaggcccaggttagggatcagccccgctggctgctagtctgccacgaggggtggagcccggccctggggctgcaaatctgttggtcactgggccatctgagacttacgcatcataaaggggtcaacttaactgatattaagctgaatagctctcaggaattcgcacagctcagccccagattgggaggtttcctggaggaggcgtggcagcccaggaataactgcacttccggacaggttgtcagtctgaggtgctctgagtgtggtgctaggccgctggccagccggatcgttggcggccagagcgtagcaccagggcgctggccctggcaagcttcagtggctctgggctttcggcatacttgtggtggatccgtccttgccccaaggtgggtggtgaccgctgcgcactgtatgcacagcttcaggctggcaaggctgagttcttggcgagttcatgctggcctcgtgtcccattccgccgtgcggccacatcagggtgccttagtcgagcggattatacctcaccctctgtactccgcccagaaccatgattacgatgtggccctgctccgtctgcaaaccgctcttaatttttccgacaccgtcggggcagtttgtctgccagccaaagagcaacactttccgaaggggagcaggtgttgggtgagcggctgggggcacacccatcccagccacacctatagttctgacatgcttcaggataccgtagtccccttgttctcaacacaactgtgcaatagcagctgtgtctacagcggtgccttaactccacggatgctttgcgccggatacttagatggaagagccgacgcctgccagggagatagtggaggacccctggtctgccctgacggggacacatggcgcttggttggggttgtcagctggggaagaggatgtgctgaaccaaatcatccgggtgtgtatgctaaagtggctgagtttctggactggatccatgacacagcccaggactccctcttgtag

SEQ ID NO: 209379 - DNA, 2436 bp, synthetic construct
  misc_feature 1..2436: note = Description of Artificial Sequence: Synthetic coding sequence
  source 1..2436: mol_type = other DNA
atgctgctgctgttccacagcaagcggatgcccgtggccgaggccccccaggtggccggggggcagggcgatggcggagacggcgaggaggcagagcccgaggggatgttcaaggcttgtgaggacagcaagcgaaaggctcgcggttatctgagattagtgcccttatttgtgttgttagcattactagtcttggcgagcgccggtgtgctcttgtggtattttctcggctacaaggccgaggttatggtatcccaggtgtactccggttcattacgcgtgctgaacagacacttctcacaggatctgactagacgggaaagttccgccttccgctcggagaccgccaaggcccagaagatgctaaaagaactcatcaccagtacaaggctggggacatactataacagctcctccgtatattctttcggggaaggcccgctcacatgcttcttttggttcatcctacagattccggagcaccgacgcctgatgctttcacccgaggtggtgcaagcactgctagttgaggaacttctctccaccgttaattcttccgcagcggtcccctacagggccgaatacgaagtcgacccggaagggctagtcatcctggaagcctcggtaaaagacattgcagcgctcaactccaccctgggttgctatcgatatagctacgttggccagggccaagtgctgcggcttaagggccccgaccatctggctagttcttgtctttggcacttgcagggccccaaggacttaatgctcaagctgcggctcgaatggacccttgcggaatgtagggataggcttgccatgtacgacgtagccgggcctctcgaaaaaaggcttatcacatccgtgtacggctgtagccgacaagagcccgtagtcgaagtgctggcaagcggcgccatcatggctgtggtgtggaaaaagggcttgcacagctattatgatcctttcgtgctcagcgtgcaacccgttgtgtttcaggcctgtgaggtgaatttgacgctggataatagattggatagtcaaggagtcctgagtacaccttatttccccagctattattctcctcaaacccactgctcttggcatcttactgtcccaagtctggattacggactagccctctggtttgacgcttatgctctgcggcgccaaaaatacgacctcccgtgcacacagggccagtggaccattcagaaccgcaggctctgtgggctccgaatcctccagccttacgccgaacggatccctgttgtggccaccgctggcatcacgataaacttcacctctcagatcagcttaaccggtcccggagtgcgcgtgcactatgggctgtacaaccagagcgacccttgccccggcgagttcctgtgctcagtgaatggattatgtgttccggcatgcgacggagtcaaagactgtcctaatgggctcgacgagcggaactgcgtgtgccgtgcgacctttcaatgcaaagaagattctacgtgcatttctcttcctaaggtgtgcgatgggcagccagactgcctgaacggctcggatgaagagcagtgtcaggaaggggtgccctgtgggacgtttacttttcagtgcgaagataggagttgtgtgaagaagcccaatccccagtgcgatggccgaccggattgtcgcgatggaagcgacgaggagcactgcgactgcggcctgcagggaccttcaagccggatcgttggaggagccgttagctccgagggcgagtggccatggcaggcaagtctgcaggtgcgaggccgccatatttgcggaggcgccctgatcgctgatcgatgggtcattacggccgcgcattgctttcaggaagacagcatggccagcacggttctgtggactgtgttcctcggcaaggtctggcagaattcccgctggccaggcgaagtctcatttaaggtttctagattactactgcatccgtaccatgaagaggatagccatgattacgacgttgccctccttcagctggatcatccggtcgtcagatcagcggccgtgcgacccgtgtgcctgccagctagatcacacttctttgagcccggattgcattgctggataactggctggggcgcactgagagaaggaggtccaataagcaacgcccttcagaaagttgacgttcagctgattccacaggatctgtgcagtgaggtttataggtaccaggttacacccaggatgttgtgcgccggctacagaaagggcaagaaagacgcgtgccagggggatagtggtggtccacttgtgtgcaaggccctctccgggaggtggttccttgccggcctcgtttcctgggggctgggttgcggcaggcccaactattttggtgtctatacacgcatcaccggcgtgataagttggattcagcaggttgtcacctag

SEQ ID NO: 209380 - DNA, 2475 bp, synthetic construct
  misc_feature 1..2475: note = Description of Artificial Sequence: Synthetic coding sequence
  source 1..2475: mol_type = other DNA
atgcccgtggccgaggccccccaggtggccggcggccagggcgacggtggcgacggagaagaagctgagccggaggggatgtttaaggcatgcgaggattctaagagaaaggcaaggggttacctgcgtttggttccattgttcgtgttacttgcgttgcttgtattggcctccgcgggcgtgctactgtggtatttcctagggtacaaggccgaagtaatggtttctcaggtgtatagcggcagcctccgggtattaaatcgccactttagccaggacttgaccaggcgcgagagctcggcattccgcagcgagaccgcaaaggcccagaaaatgctgaaggagctgattacatccacacgtcttggcacatattataattcttcctctgtgtactcgtttggcgaaggccctctgacctgttttttctggtttatcttgcagattccagaacaccggaggctaatgctgagccccgaagtggtgcaggccttgttggtggaggaactgctgtctaccgttaattcaagtgcggccgtgccttatagggctgaatacgaagtggatcccgagggtttggtcattctcgaagccagcgtcaaagacatcgccgcgctgaatagtacgctgggttgttatcggtacagctacgtgggacagggacaagtgttacggctgaagggacctgaccacctggcatcatcctgtctttggcatctgcagggccccaaagacttgatgctgaaactccggctggaatggactcttgctgagtgtagagaccgcctggcgatgtatgacgtggctggccctctggagaagcgcctgataactagtgtctatggctgctccagacaggagcccgttgtcgaggtgttggccagcggggcaattatggcagtggtgtggaagaaggggttgcactcctactatgacccattcgtgctctctgtgcaacctgtggtttttcaggcctgtgaggtgaacctcacactagacaatagacttgactcccagggggtgttgtcaaccccttactttccctcctactattcaccacaaactcattgttcgtggcatttgaccgtgccatcattggactacggccttgcactgtggttcgacgcatatgccctcagacgccagaagtacgatctcccctgtacacagggacagtggaccattcagaatcgtagactttgcgggttaaggatactacagccctacgcagagcgtattccagtggtggccacagcaggaatcacgattaacttcactagtcagataagcttgaccgggcccggggtgagagtacactacggattatacaaccaatctgatccatgtccgggcgaatttctatgctccgttaacgggctctgtgtgcccgcctgcgacggggtcaaagattgtccgaatgggctggacgagcgtaactgtgtgtgtagggccacctttcagtgtaaagaggactccacgtgtatatctttacctaaggtatgcgatgggcaaccggactgtctgaacgggtccgatgaggaacagtgtcaagaaggcgtgccctgcgggaccttcacattccagtgcgaggatcgtagttgtgtgaagaaacctaatcctcagtgcgacggccgtccggactgccgcgacgggtctgatgaagaacactgtgactgcggcttacagggcccatcctctaggattgtaggcggagcggtaagctccgaaggcgagtggccttggcaagcaagtttgcaggtgagagggagacatatctgcgggggagccctcattgcggataggtgggtcatcactgcagcgcattgttttcaggaagatagcatggcttctacagtactgtggactgtcttcctcggcaaagtgtggcaaaattcaaggtggcccggggaggtgtcattcaaggtgtccaggctcctactgcacccataccatgaggaagactcacacgattatgacgtggctctactgcagctcgaccatcctgtggtgaggtcagctgctgtcagacccgtgtgcctgcctgcgcgctcacacttttttgaacccggtctgcactgctggataacaggttggggtgcactacgggagggcgccctcagggccgacgctgtagcgctgttctatggatggcgtaaccaagggtccgaaacatgctgttgccccatttcgaatgcactgcagaaagtcgatgtgcagctcatcccgcaggacctttgctcagaagtataccggtaccaggttaccccacgaatgctatgcgcagggtacagaaagggcaagaaggatgcttgccagggcgattcaggaggacccctggtttgcaaagctctaagcggaaggtggtttttggctggccttgtgagctggggactcggttgcgggcgccctaattacttcggagtgtatactcggattaccggcgtcatctcctggattcagcaagtcgtcacttag

SEQ ID NO: 209381 - DNA, 2409 bp, synthetic construct
  misc_feature 1..2409: note = Description of Artificial Sequence: Synthetic coding sequence
  source 1..2409: mol_type = other DNA
atgcccgtggccgaggccccccaggtggccggcggccagggcgacggaggagacggtgaagaggccgaacctgaagggatgttcaaggcatgcgaggactctaagcgaaaagcccgtggttacctgaggctagttcctctgtttgtgctcctggctctgctggtgctagcctcagcaggcgtgttgctgtggtactttcttggctataaagccgaggttatggtaagccaggtgtacagcgggagtctccgcgtcttgaatagacatttcagtcaagatcttaccaggcgggaaagctctgctttccgctctgaaaccgccaaggcccagaaaatgctgaaagagctcatcacaagtacaaggttaggcacgtattacaattcaagtagtgtgtactcctttggtgagggccccttgacatgctttttctggttcatcttgcaaatcccagaacatcggcgcctgatgctctctccagaagtagtgcaggctctcctggtggaagagctgctgtccaccgttaattcctctgcagccgtgccctacagggccgaatacgaagtggatcccgaaggcctcgtcatcctagaagcttcagttaaggacattgccgccttgaattccacactgggatgctaccgatattcatacgttggccaggggcaagtactcagactgaaggggcctgaccaccttgcctcatcctgtctgtggcacctgcaaggtccaaaagacctcatgttgaagttacgcctcgaatggactctggcagagtgtagagatcgtttagccatgtacgacgtagcgggaccccttgagaaaaggctgattacctccgtgtacggctgctctagacaagagcccgtggtcgaggtgttagcttccggggctatcatggcagtggtctggaaaaagggcctacattcttactatgacccatttgtactctctgtccaacccgtagtctttcaggcatgtgaggtcaacctcaccctggataataggctcgattcccagggcgtactcagtaccccatattttccttcttactactctccgcaaactcactgttcttggcatctaacagtgccatcccttgattacggcctggccctgtggtttgacgcgtatgcactccgcagacaaaaatacgacttgccctgcacacagggacaatggaccatacagaaccggagactttgcggactgaggatactgcagccatacgctgaaagaattcctgtagtggccactgctggtattaccatcaacttcaccagccagatcagtttgacaggtcccggagttcgggtgcattacgggctgtacaaccagagtgatccctgccccggtgaatttctgtgctctgtgaatggcctgtgcgtgcccgcgtgcgacggcgtgaaagattgccctaacgggctcgacgagcgtaattgcgtctgccgggccacctttcagtgcaaagaggattccacgtgtatctctctgccaaaggtttgcgatgggcagccagactgtttaaatggctctgatgaggagcagtgtcaagaaggagttccttgtggaacattcacattccagtgtgaagaccgcagctgcgttaagaagcctaacccacagtgtgatggaaggccagactgtagagacggttcggacgaagaacactgcgattgcggcctgcagggaccctcttcacgcatcgtgggcggtgccgtgtcttctgagggagagtggccttggcaagcctcgctgcaggttagagggcgccatatttgtgggggcgcactgatagcagacagatgggtaatcacagccgcgcactgcttccaggaggatagtatggcatccaccgtcttatggactgtttttctgggaaaggtttggcaaaactcaagatggcctggggaggttagtttcaaggtttcgcgccttcttctccacccctaccatgaagaggattcccacgattacgacgttgcactgctgcaactagatcacccagttgttcggtccgctgccgttcgccctgtttgtcttccagctcgatcacactttttcgaaccaggccttcactgctggatcaccggatggggtgctctgcgcgagggcggccccatttcaaacgcattgcaaaaagtagatgtacaactaatcccgcaggacttatgttctgaggtgtatcggtatcaggtgacacctaggatgctctgtgctggatatagaaaggggaaaaaggatgcgtgtcagggagactccggcggccccttggtttgtaaggctctgtccgggcgatggttccttgcaggactcgtgagttggggattagggtgcggtaggcccaattattttggcgtatacacacgcataacgggcgtaatcagctggatccagcaggtcgtgacctag

SEQ ID NO: 209382 - DNA, 2475 bp, synthetic construct
  misc_feature 1..2475: note = Description of Artificial Sequence: Synthetic coding sequence
  source 1..2475: mol_type = other DNA
atgcccgtggccgaggccccccaggtggccggcggccagggcgacggtggcgacggtgaggaggccgagcctgaaggcatgttcaaggcttgtgaggacagcaaaagaaaggctcgcggctatctgcgcctggttcctttgttcgtcctactagcactacttgtgctggccagcgctggtgtgctgctttggtactttttgggctacaaggctgaagtgatggtttcccaagtttattcaggcagcctcagggtgttaaatcggcacttttcacaggaccttaccaggcgagagtcctcggccttccggagtgagaccgctaaggcgcagaaaatgttaaaggaacttattacctccacgcgcctcgggacctactacaattcaagtagtgtatactcattcggcgagggccccttgacatgttttttctggtttatcctgcaaattcccgagcaccggcgactgatgctgtcccccgaagtggtgcaggctctgcttgtggaggaactcttgtccacagtgaattctagcgccgctgtgccttatcgagcggagtacgaggtcgaccccgagggcctcgtcattctggaagcttcagtgaaggacatcgccgcattaaattcaacactcggctgctatcggtactcatacgtgggacagggacaggtgttacggctaaagggcccagaccatctcgcaagcagctgtctttggcacctgcaaggacctaaggaccttatgcttaaactccgattggagtggactctcgctgagtgtcgcgatagattggctatgtacgacgtggcaggtccactggagaagaggcttatcacatccgtttacggatgctctcggcaagagcccgtagtagaggtgctcgccagtggtgccatcatggcggtggtgtggaaaaagggccttcactcttactacgaccccttcgtgctgtctgttcagcctgtcgtattccaagcttgtgaggttaacctcacactggataaccggctggactcccaaggggtcctttctacaccatattttccctcttattacagcccccagacgcactgcagctggcacctgacagttccttcattagactatgggctggccttgtggttcgatgcgtacgcgctccgtagacagaagtacgacctcccttgcacccaggggcaatggaccatccagaaccgccggctctgtgggttacgaattctgcagccgtacgcggagcgaatacccgtggtggcaactgccgggatcaccatcaacttcacttctcagatttccctcacaggccccggggtgagggtgcattatgggctttacaatcaatcagatccgtgtcccggtgagtttctgtgtagcgtcaatggactttgcgtacccgcgtgtgatggcgtcaaggattgtcccaatggcctggacgagaggaactgcgtttgccgagccacgtttcagtgtaaggaagattccacgtgcatttcactccctaaagtgtgtgatggacagcctgactgtctcaacggaagcgatgaggaacagtgccaggagggagtgccctgcggaaccttcactttccaatgcgaggatcgatcatgtgttaaaaagccgaatcctcaatgtgacggacggcctgattgtcgcgatggcagcgacgaggaacattgtgattgcgggctgcagggaccctccagcagaatcgtcggcggtgctgtgtctagcgagggggaatggccttggcaagcctctctgcaggtacgcggacgccacatctgcgggggcgctctgatagctgatcggtgggtgattactgctgcacactgcttccaggaagactctatggcttccacagttctgtggactgtgttcctaggtaaagtgtggcagaatagccgatggccaggggaggtgtcttttaaagtaagcagactactcctccacccataccacgaggaggatagtcacgactacgatgtggcactcctgcagcttgatcatccagtcgtccgctctgcagctgtgagaccagtctgcctccctgccaggtcccacttcttcgagcccggtttgcattgctggataaccggatggggcgcactacgcgagggtgccctacgggctgacgccgtcgccctgttctacggatggcgtaaccagggtagcgaaacctgctgctgcccaatctcaaatgcactgcaaaaggtggatgtgcagttgatacctcaggacctgtgttcagaagtataccgataccaggttaccccgaggatgctgtgtgctggctatcgcaaaggcaagaaggacgcttgccagggcgactccggcggtccactcgtctgcaaagcactatcaggaagatggttcctggcaggcctggtaagctggggcttaggctgtggtagacctaattatttcggagtgtacacccgcatcacaggcgttatctcctggattcaacaagtggttacttag

SEQ ID NO: 209383 - DNA, 426 bp, synthetic construct
  misc_feature 1..426: note = Description of Artificial Sequence: Synthetic coding sequence
  source 1..426: mol_type = other DNA
atgcccgtggccgaggccccccaggtggccggcggccagggcgacgggggcgacggtgaggaagcagagccagagggaatgtttaaagcctgcgaagactccaaacggaaggctcgcgggtatctgagactggtgcccctgtttgttctgctggccctacttgtccttgcatcagcaggggtcctcctgtggtacttcctgggctacaaggctgaggtcatggtgtcccaggtgtactccggttccttgagagtgttaaatcggcactttagccaggatctcaccaggagggagagctctgcgttcaggtcagagacagcaaaggcgcagaagatgcttaaagagttgatcacttccaccagactcggaacttactacaattcatcttcagtctactccttcggagaaggtccgctaacttgctag

SEQ ID NO: 209384 - DNA, 1386 bp, synthetic construct
  misc_feature 1..1386: note = Description of Artificial Sequence: Synthetic coding sequence
  source 1..1386: mol_type = other DNA
atgctgctgctgttccacagcaagcggatgcccgtggccgaggccccacaggttgccggcggacagggagacgggggcgatggcgaggaggctgagcccgaaggaatgtttaaggcgtgtgaagattctaagcgaaaagctcgtggatacctgcgtctagtgcccctctttgtgctgcttgcactgctagttctcgcaagcgccggagtgctactttggtacttcctggggtacaaagctgaagttatggtctctcaggtatactctggatctttgcgcgtgctcaaccggcatttttcccaagacctcactagacgtgagtcgtcagcctttcgatctgagactgccaaggctcaaaaaatgttaaaggaactcataactagcactcggctaggaacctattataatagttcttccgtttacagcttcggggaggggcctctgacttgctttttctggttcatactccaaataccagaacaccgcaggctaatgttatcgccagaggtagtgcaggccctgctggtagaggaactcctctccaccgttaactcctccgcagcagtgccgtatagggctgaatatgaagtcgacccagagggcttagttattctcgaagcgtctgtcaaagatatcgccgcactgaactccacactgggctgctacagatacagttacgtgggccagggacaagtgctgaggctgaagggtccagaccacttggcaagctcttgtctctggcacctgcagggccctaaagacctcatgctgaaactgcgcttggagtggactctggccgagtgtcgcgaccggctagcaatgtacgatgtggcaggacctctggagaagcgactgatcacttctgtgtatggatgtagtaggcaggagcccgtggtcgaggtattagcctctggcgctatcatggcggtggtttggaaaaaaggactgcattcttattatgatcctttcgtgcttagcgtgcagccagtcgtgttccaggcttgcgaagtgaatttgaccctcgacaaccgtctggactcacagggcgttctttccactccctacttcccgtcctattattcaccccagactcactgctcatggcacctcaccgttccgtccctagactacggtctagcattatggtttgacgcctatgcacttagaaggcagaaatatgacttgccttgtacccaagggcagtggaccattcagaatcgccggtaccactttctgtctagcctctggcttcccttcttgccccctccaccctcgctaccttccagcatcgtgactccatcactggaagctcaggtcccgaatcttcggggtgcagccaggggtgcaagtaggggatggggatggtgtcaagcgtgctgcccttag

SEQ ID NO: 209385 - DNA, 1527 bp, synthetic construct
  misc_feature 1..1527: note = Description of Artificial Sequence: Synthetic coding sequence
  source 1..1527: mol_type = other DNA
atggccagcgccgtgtggggcagcgccccctggtggggcccccccccaccagcgccagctcgtcctctcacagacatcgacttttgttccggagcccagctgcaggaattgactcagctgatacaagagctgggcgtccaggagtcttggtcagacggacctaagcctggagccgatctccttagggccaaagacttcgtgttctctctgcttggcctggtgcatcggcgagatccgcgatttcccccacaggctgagcttctactcctgcgcgggggcataagagagggctcactggacctgggacatgcccccctgggcccctatgcccgtggcccccactacgacgcaggttttacactgctcgtgcctatgttctccctggacggcaccgagctgcagctcgatctagaatcgtgctacgctcaggtttgcctcccggaaatggtatgtgggactccaatcagagagatgtggcaggactgcttagggccgccagtgccaggcgctcgagattctatccaccgcaccgagagcgaggagtcgtcgaaagattggcaaagcagcgttgatcagccacactcttatgtcaccgagcatgaggctccggttagtttggaaaagtccccatccgacgtatccgcatccgaaagcccccagcatgacgttgtggaccttggcagtaccgctcccctgaaaaccatgtcgtctgatgtcactaaggcagcggtggagagtccagttcctaagccaagcgaggcgagagaggcttggcctacactgtgttcggcccaggtggccgcctggttcttcgccacgctggccgccgtggcggaatcgctaattcccgtgccaggggcaccccgcctggtacacgccgcaaggcacgctgggtttaccacggtccttctagccactcctgagccaccacgtcgacttctgttgttcgacttaatccccgtggttagcgtggccggctggcctgagggcgcaagatcccatagctgggcgggcccgcttgccagcgagagcgccagcttttacttggtgccaggcggggggaccgaaaggccatgtgcatccgcttggcaactctgtttcgcccgccaggagttagcacttaaggcccgaatccctgcccccctgctccaggcacatgccgctgcgcaggccctactgaggcctctggttgcaggaaccagagcagcagcaccttacctcctgagaaccttgttgtattgggcctgtgagaggctgccagccttgtatctcgcccgcccagagaacgcaggtgcctgttgcctgggacttctcgatgagttgggaagggtcctggaggccggtactctccctcactactttctaaacggtagacagctgaggactggggatgacagcgccgcgctgttgggcgaactggcgaggctgcgcggagaccctgcacgtgctctgcgagcagcagtcgaggaagccaaagtggccaggaagggaggcggcttggctggtgtcggagggggggcacactag

SEQ ID NO: 209386 - DNA, 1527 bp, synthetic construct
  misc_feature 1..1527: note = Description of Artificial Sequence: Synthetic coding sequence
  source 1..1527: mol_type = other DNA
atggccagcgccgtgtggggcagcgccccctggtggggcccccccccgcccgccccggcccgccctctgaccgacattgatttctgttcgggcgcgcagcttcaagagcttactcagctcattcaagaactgggggtgcaggagtcgtggtcagatggcccaaaacctggcgctgacctgctcagggctaaggactttgtgtttagcctgcttggtcttgttcaccgacgggatcccagatttccacctcaggccgagctcctgctgctcaggggaggaatccgagaaggcagcctcgatctgggtcatgcccctctgggaccctatgccagaggcccccattacgacgctggatttactttgcttgtgcccatgttcagtctcgacgggactgagctgcagctggatctcgagagctgctacgctcaggtatgcctccctgagatggtttgtggaaccccaataagagaaatgtggcaagactgtctggggccccccgtgccgggagccagggattccatccatcggactgaaagcgaggaatcatctaaagattggcagagtagcgtggatcaaccccatagctacgtcactgaacatgaagcccctgtttctcttgagaaaagtccatctgacgtttctgccagtgaatctccacagcacgacgtggtggatcttgggagcaccgcaccgttaaaaacaatgagcagcgacgtgactaaagcggcggtggaaagccccgtcccaaagccatctgaagcccgggaggcctggccgacactttgctctgcccaagtggccgcctggttcttcgctacccttgccgccgtggctgaaagcctgatccctgtaccaggcgcccccaggcttgttcatgctgcacgccacgcgggattcaccacagtacttctcgcgacccccgaacctccccgacggctcctcctgttcgatctcatcccagtggtcagtgtggccggctggccagagggtgccaggagccactcttgggccggcccgttggccagcgagtcagctagcttctacttagtacctggggggggtaccgagaggccttgtgcctctgcatggcagctttgttttgcacgccaggagctcgctcttaaggcaagaatacctgcgccactgctccaggcccacgctgccgcccaggcgctgctccgccctctcgtggccggtaccagagcagcagccccttacttgctgcgcaccctcttgtactgggcctgtgaaaggctgccagccttgtacttggccagacctgagaatgcaggcgcatgctgcctgggcctgcttgacgagttgggacgcgtgcttgaggcaggaacgttgcctcattacttccttaacggacgtcaactgcgaacaggagacgactccgccgccctcctgggcgaactggctcgactgcgaggcgaccccgcccgggccttaagggctgctgtggaggaggccaaggtagctcgcaagggaggtggtcttgcaggcgttggtggaggcgctcattag

SEQ ID NO: 209387 - DNA, 825 bp, synthetic construct
  misc_feature 1..825: note = Description of Artificial Sequence: Synthetic coding sequence
  source 1..825: mol_type = other DNA
atgggcaagagcctgagccacctgcccctgcacagcagcaaggaggacgcctatgacggtgtaacttctgagaacatgcgcaatggtttagtgaactctgaggtccataacgaggatggccggaacggtgatgtatctcagtttccatacgtggaatttacaggccgagactctgttacatgtcccacctgccagggcaccggtcgcatcccccgtgggcaggaaaaccagctcgtggctcttataccctactcagatcagagactccggcctcgaagaacaaaattgtacgtgatggcctccgtctttgtttgtctgctgttatccggattggcggtgttctttctctttcctcggtccattgatgtgaagtacatcggtgtgaagagcgcctatgtgagctacgacgtgcaaaagagaacgatttatcttaacattacgaataccctgaatatcaccaacaacaactactacagcgtcgaggtggagaacattacagcgcaggtccagttttcaaagacagtgattggcaaagccaggcttaacaacattacaattattgggccccttgacatgaaacagatagactataccgttcctacagtcatcgctgaggaaatgtcttatatgtatgatttctgtaccctgatctcaattaaggtgcataatatagtcctgatgatgcaagtgacagtcacgactacctactttggccactctgaacaaattagccaggaaagatatcaatacgtggattgcggtcgtaatactacatatcaactcggccaaagcgagtacctgaacgtcctgcagccacagcaatag

SEQ ID NO: 209388 - DNA, 825 bp, synthetic construct
  misc_feature 1..825: note = Description of Artificial Sequence: Synthetic coding sequence
  source 1..825: mol_type = other DNA
atgggcaagagcctgagccacctgcccctgcacagcagcaaggaggatgcatacgatggcgttacctccgagaatatgaggaatgggctcgtgaattcggaagtccataacgaagacgggcggaacggggacgtttcccaattcccatacgtcgaattcaccggcagggactcagtgacttgtccaacttgtcaggggacgggccgaataccacgtggacaggaaaatcagcttgtggcactcatcccctatagtgaccagaggctgcgccctcgcaggaccaagctgtacgtaatggcgagcgtattcgtgtgtcttctgctaagtggtttggcggtattctttctcttcccacggtctatcgatgtaaagtacattggagtgaagtctgcatacgtaagttatgacgtccagaaaagaacgatttacctgaacattactaatacactgaacataacaaacaataattactactctgtggaggtcgagaacattaccgcccaagttcagttctctaagacggtgattgggaaggccaggctgaacaacatcactattatcgggcctttggacatgaagcagatcgattacacagtgcccaccgtcatcgcagaggagatgtcttacatgtatgatttctgcacactcatctccatcaaggtacacaacatcgtgcttatgatgcaagtgaccgtgactaccacatacttcggacatagtgagcagatctcacaggagagataccagtacgtcgattgcgggaggaacaccacttatcagctggggcagagtgagtacctgaacgtcttacaaccccaacagtag

SEQ ID NO: 209389 - DNA, 78 bp, synthetic construct
  misc_feature 1..78: note = Description of Artificial Sequence: Synthetic coding sequence
  source 1..78: mol_type = other DNA
atgggcaagagcctgagccacctgcccctgcacagcagcaaggaggacgcgtacgatggtgttacttctgaaaactag

SEQ ID NO: 209390 - DNA, 333 bp, synthetic construct
  misc_feature 1..333: note = Description of Artificial Sequence: Synthetic coding sequence
  source 1..333: mol_type = other DNA
atgggcaagagcctgagccacctgcccctgcacagcagcaaggaggatgcctacgatggcgtgacatccgagaatatgcgcaatggcctcgtcaactctgaggtgcacaacgaggacggccggaatggcgatgtaagccaatttccctatgtggaattcaccgggcgagacagtgtgacctgccccacgtgccaggggacagggcgcatccccaggggccaggagaatcagctggtggctttgattccatactccgaccaaagactcaggcctcgccggaccaagctttatgtgatggccagcgtgttcgtctgcttgctgttgtctgggtag

SEQ ID NO: 209391 - DNA, 369 bp, synthetic construct
  misc_feature 1..369: note = Description of Artificial Sequence: Synthetic coding sequence
  source 1..369: mol_type = other DNA
atgcacggcaccttcgtgatcctgctgcccctgagcctgatcctgatggtgtttggcgggatgactggcttcctgagctttctcctgcaggcttatctgctgctgctcctgaccgggatactctttttgttcggcgccatggttacattagctgggatctctgtgtacatcgcctactcagccgcagccttcagggaggccctgtgtttgctggaggagaaggccctgctggatcaggtggacatctcgtttggctggagcctggccctgggctggatttccttcatcgccgagctgctgaccggggcagccttcttagcagccgcccgtgagctgtccctccgacgcagacaggaccaggccatctag

SEQ ID NO: 209392 - DNA, 570 bp, synthetic construct
  misc_feature 1..570: note = Description of Artificial Sequence: Synthetic coding sequence
  source 1..570: mol_type = other DNA
atgggcctgggcgcccggggcgcctgggccgccctgctgctgggcacgctgcaagtgctcgctcttttgggggccgcccatgaatctgccgcgatggccgagaccttacaacatgtaccctcagatcatactaacgaaacttcaaattcaactgtgaagccccctacaagcgttgccagcgactcttctaacacgaccgtcactacgatgaagccgacagccgcttctaacacaactactccaggtatggtgtcaacaaatatgacttcgacgacgctgaagagtaccccaaagacgacaagcgtgagccagaacacttcccaaatatcaacgtcaactatgacagtgacacacaattccagtgttactagtgctgcttcttccgttacaattaccacgactatgcacagtgaagccaaaaaggggagcaaattcgataccgggtcattcgttgggggaatcgtcctgacacttggggtgctgtcaattctatacatcggctgtaagatgtactacagtagacggggtattagatataggacaatcgatgagcatgacgcaatcatctag

SEQ ID NO: 209393 - DNA, 627 bp, synthetic construct
  misc_feature 1..627: note = Description of Artificial Sequence: Synthetic coding sequence
  source 1..627: mol_type = other DNA
atgggcctgggcgcccggggcgcctgggccgccctgctgctgggcacactgcaagttctggcgctgctcggagccgctcatgagtccgctgccatggcagcctctgccaacattgagaatagcgggttgccgcataattcctctgcaaactctacggagactctgcagcatgttcctagcgatcataccaatgaaaccagtaactctaccgtcaagcctccaaccagtgtggcatcagattcttccaatactacggtgactaccatgaaaccaactgccgcaagcaataccacaaccccagggatggtatcaaccaacatgacatcgaccaccctgaagtcaacccccaagaccacttcagtttcgcagaacacctcccagattagcacatctaccatgaccgtgacacataatagtagcgtgactagcgcagcttctagtgttaccataacaacaactatgcatagtgaggcgaaaaaaggatccaaattcgacaccggttcttttgtggggggtatcgttttgacattgggtgttctgagtattctgtacataggctgtaaaatgtactacagtagacgggggatacggtataggacaatcgacgagcacgatgccattatatag

SEQ ID NO: 209394 - DNA, 588 bp, synthetic construct
  misc_feature 1..588: note = Description of Artificial Sequence: Synthetic coding sequence
  source 1..588: mol_type = other DNA
atggagaaccacaagagcaacaacaaggagaacatcaccatcgtggacatctctagaaagattaaccagttgccggaagccgagagaaacctgctcgaaaatggctccgtttacgtgggtctgaacgcggctctgtgtggactcatcgctaacagtctgtttagaagaattctcaacgttactaaggcaagaattgccgccggcctgccgatggcagggatcccttttttgaccaccgacctcacttacagatgcttcgtcagcttccccctcaacaccggcgacctggactgtgagacgtgtaccatcacaaggagcggtctgaccggacttgtgatcggcggtctgtatcctgtgttcctggcaattccggtcaacggaggcctggcagcccggtatcagtcagccctactgcctcacaaaggaaatatcctgtcttactggatccgcacgtccaaacccgtgttccggaagatgctctttccaatcctgctgcaaacaatgttttccgcctacctcggatctgaacagtataaactgctgatcaaagcccttcagctcagtgagcccgggaaggagatccattag

SEQ ID NO: 209395 - DNA, 378 bp, synthetic construct
  misc_feature 1..378: note = Description of Artificial Sequence: Synthetic coding sequence
  source 1..378: mol_type = other DNA
atggccggcatccccttcctgaccaccgacctgacctaccggtgcttcgtgtcctttccactgaacaccggcgacctcgactgcgaaacctgtactatcaccagaagtggactgaccggcctggtgattggggggttataccctgttttcctggctattccagtaaatggggggctcgcagccaggtaccaatctgcactgttaccacataaggggaatatcctgagttattggatccgcacctctaagccagtctttaggaagatgctatttcccattctgctgcagaccatgttctctgcctacctggggtccgagcaatataagctcctcattaaagctttacagctctccgagcctgggaaggagatccattag

SEQ ID NO: 209396 - DNA, 489 bp, synthetic construct
  misc_feature 1..489: note = Description of Artificial Sequence: Synthetic coding sequence
  source 1..489: mol_type = other DNA
atgctgcagaccagcaactacagcctggtgctgagcctgcagttcctgctgctctcttatgacttgtttgtcaactctttctctgaactgttgcagaagactcctgttattcagctggtgctctttataatccaggacattgctgttctgtttaacatcattatcatcttcctcatgttcttcaacacgttcgtatttcaggctggtctggtgaatttactgttccacaaattcaaaggcacaattatcttaaccgccgtctacttcgccctctcaatatctctgcacgtctgggttatgaacttgcggtggaaaaactccaactcctttatctggactgatgggctgcagatgctttttgtgttccaaaggctggccgctgttctctactgctatttttacaagcggacagctgtccgcctgggagatccacacttctaccaggacagtttgtggctgcgcaaggagttcatgcaggtgcggcgctag

SEQ ID NO: 209397 - DNA, 318 bp, synthetic construct
  misc_feature 1..318: note = Description of Artificial Sequence: Synthetic coding sequence
  source 1..318: mol_type = other DNA
atgctgcagaccagcaactacagcctggtgctgagcctgcagttcctgttgctgtcttatgatctgttcgtcaattcattctctgagcttttgcagaaaacaccagtaatacaactggtcttattcatcatccaagatattgccgtgttgtttaatatcattatcatattcctaatgttcttcaatactttcgtgtttcaagccggactggtgaacctcctatttcacaaatttaagggaacgataattctgactgctgtttatttcgcactgagcatcagtctgcacgtatgggtcatggtgagggtggccgtgtag

SEQ ID NO: 209398 - DNA, 1140 bp, synthetic construct
  misc_feature 1..1140: note = Description of Artificial Sequence: Synthetic coding sequence
  source 1..1140: mol_type = other DNA
atgccccacagcagcctgcaccccagcatcccctgcccccggggccacggggctcagaaggctgcccttgtgctgctctcagcttgccttgtcactttgtggggattgggggaaccccctgaacataccctccgctatttggtgctccacctcgccagtctgcagctggggttgctcttaaacggtgtttgcagcctggcagaagagctgcgacacatccactcacggtacagagggagctactggaggaccgtcagggcctgcctgggttgccctctgaggcggggtgcattattgctgctcagcatctatttttactactccctccccaacgcagtcgggccacccttcacctggatgcttgcacttttgggcctctctcaggccctgaatattctcctaggcctcaaagggttagcccctgccgagatctcagccgtgtgcgaaaaaggcaattttaatgtggcacatggcttggcatggtcctactacatcggctacctgagacttatactgccggaactccaagcgcggattcggacttataatcaacactataacaatctgttaagaggggccgtgtcccagcggctctacatcttactgcctctggattgcggcgtgccagacaatctgtccatggcagaccctaatatccggtttctcgacaagctgccgcaacaaaccggagaccatgctgggatcaaagaccgcgtgtactcaaacagcatctatgaattactggagaacgggcagagagctgggacatgcgtcttggagtacgctacacccctacagactctttttgcaatgtctcagtatagccaggcaggattctctcgggaagacagactggagcaagccaagctattctgccgaactctggaggacatcctggctgacgcccctgagtcacaaaacaattgcaggctgatagcttaccaggagccggccgatgattcatccttcagtctctcccaagaagtcctccggcacctcaggcaggaagagaaagaggaggtcaccgtcggtagcctaaagacctctgcagttccaagcacatcgacgatgtctcaggagcctgagctacttatcagtggaatggagaagccattgccactcaggaccgatttctcctag

SEQ ID NO: 209399 - DNA, 762 bp, synthetic construct
  misc_feature 1..762: note = Description of Artificial Sequence: Synthetic coding sequence
  source 1..762: mol_type = other DNA
atgccccacagcagcctgcaccccagcatcccctgcccccggggccatggggcccagaaagccgccttagtgctactgtctgcttgtctggtgactttgtggggcttgggtgaaccccctgaacatactctgcggtacttagtcctccaccttgcctctctccagttgggcctccttctcaacggagtctgctctttggcggaagaactgcgacatatccatagccgctatagaggtagttactggaggacagtgagggcttgcctcggctgtccgcttagacgaggagccctcctgctcctgagcatttatttctattactcactccccaatgctgttggacctcccttcacttggatgctcgcgttactcggcctgagccaggcactgaatatactgttgggtctgaaagggttggcacccgccgagatcagtgccgtgtgcgaaaaggggaactttaacgtagctcatggcctcgcatggagctactacattggatatttgagactgatcctgcccgagttgcaagctcgcatcagaacttataatcagcactataataaccttctcagaggtgctgtgagccaacgactctatattttactgccgctggattgtggagtgcctgataatctctcaatggcagacccaaatattcgattcctggacaagctgcctcagcaaactggggatcacgctgggatcaaagatcgtgtgtattcaaattctatatatgaactgctcgagaatggacaacgctag

SEQ ID NO: 209400 - DNA, 423 bp, synthetic construct
  misc_feature 1..423: note = Description of Artificial Sequence: Synthetic coding sequence
  source 1..423: mol_type = other DNA
atgcccagcgccttcagcgtgagcagcttccccgtgagcatccccgctgtgctgacacagactgactggacagaaccctggttaatgggattagctacattccatgcactctgtgttctcttaacatgcctgtcaagtcgttcttacaggctgcagatcggccactttttgtgcctagtgatccttgtatactgcgctgagtatatcaacgaagcagccgctatgaattggagactgttcagcaagtatcagtacttcgacagtaggggcatgttcattagtattgttttctcagccccgctgctggtcaacgccatgatcatagtggttatgtgggtctggaaaactttgaacgtgatgactgatctgaaaaatgcccaggagagacgaaaggagaaaaagagacgccgcaaagaagactag

SEQ ID NO: 209401 - DNA, 384 bp, synthetic construct
  misc_feature 1..384: note = Description of Artificial Sequence: Synthetic coding sequence
  source 1..384: mol_type = other DNA
atgctgagcggctacctgcagaccgactggaccgagccctggctgatggggctggccacatttcatgcactgtgcgtgctgttgacctgtttatcatctcgatcatatcggctgcagattgggcatttcctttgtcttgtcattctggtttactgtgcagaatacatcaatgaggcggcggcaatgaactggcggctgttcagtaaatatcagtattttgatagtaggggtatgttcatttcgatcgtgttctcggccccgctccttgttaacgctatgatcattgtcgttatgtgggtgtggaagaccttgaacgtcatgacggacctcaagaatgcgcaggaacgtcggaaggagaagaagcgccgccgcaaagaggactag

SEQ ID NO: 209402 - DNA, 1560 bp, synthetic construct
  misc_feature 1..1560: note = Description of Artificial Sequence: Synthetic coding sequence
  source 1..1560: mol_type = other DNA
ggccccgcccagcgggccagcagccccatccccagcgccggccggcgcgaaggggcccaagcggccacacagcgagtagagcgtcgtgaccgagaccctgggggctgtgcagcatggactccctccacgctcccacttagccccagaagtgctgcgtcgagttccacttgcgccggggggtgcggtaaaaggacagcaagcagtaggcgcactagtcggccatctaggatgacagcaactaccggccccaaggtgatccagacgtcagccgccaacttcagtctcaataattcaaaaaaactcaaacccatacagatactttctaacccactttctacgtacaatcagcagctctggcttacttgcgttgtagaattggaccagtccaaggaaacctccattaaaaccagctttcccatgaccgtgaaagtggacggagtggctcaggacggcaccaccatgtacatccataataaagtgcataatagaacacgaaccctgacgtgcgccgggaaatgcgccgagatcatcgtggcccacctcggctatttgaactatacacaatatactgttatagtggggtttgagcacttaaaacttcctattaagggaatgaactttacatggaagacatacaacccagcttttagtagattagagatatggtttcgcttcttttttgtagttctcactttcatagtcacttgtctctttgcacatagcctccggaagttctctatgagggactggggcattgaacagaaatggatgtcagtgcttttgcccctgttgctgttgtacaacgacccattttttccacttagttttttggttaattcttggttgccaggaatgttggacgatctttttcagagcatgtttctgtgcgctcttttgttgttctggctatgcgtgtatcacggaatcagagtgcagggcgagaggaagtgtctgactttctacctgcctaagttctttattgttggactcctgtggttggcaagcgtgacactcggaatttggcagacagtcaacgaactccacgatcctatgtaccagtatagggtcgataccggcaacttccaggggatgaaagtgttttttatggtcgtggccgccgtatacattctttatctgctcttccttatcgtacgagcctgttctgagctgagacacatgccctatgtcgatctgcgtctgaaatttctgactgcacttaccttcgtagtgcttgtcatcagtatcgctattctgtacctaagatttggagcacaggttttgcaagacaatttcgtggctgaattgagtactcactaccaaaagcccgctgagttcctgtcattctacggattgctcaatttttacctgtacaccttagctttcgtttactctccctccaagaacgccctttacgaatcccagctgaaagataacccagcattttcaatgctgaacgactccgacgatgatgtcatctacggtagcgactatgaggagatgcctctgcaaaacggccaggctattcgtgcaaaatacaaggaggagagcgacagcgattag

SEQ ID NO: 209403 - DNA, 1839 bp, synthetic construct
  misc_feature 1..1839: note = Description of Artificial Sequence: Synthetic coding sequence
  source 1..1839: mol_type = other DNA
atgggcgccgcccccagccccacccaggccagcagccggggcggcggccctggcccccccgccccgacccgggcagtttccagttcatcgcgggctcgaggtggggctctgagcgcactaggaccgagcccggctcgtccactgacaactagtcctgctcccgctccaccacctcggtcaaggcccgccagacagcagccggacccccagtgttgggaaaagcgcggcggagccggaggtgacactaagggcggagccgccggaccaggcccggggcgccttcgggggatggacgcagaatatccggcattcgaaccccccctgtgctctgaacttaagcacctttgtcgcagactcagagaagcctacagggagctaaaggaagacctcacccccttcaaggatgatcgctactaccgactcgccccgatgagactgtataccctgagcaaacgccactttgtgctagtgtttgtggtgtttttcatctgttttggcctgacaattttcgtagggattaggggccccaaagtgatccagaccagcgcggctaacttctcactcaataacagtaaaaagctaaaacctattcaaatcctatccaacccactgagtacttacaaccagcaactttggctgacgtgcgttgtggaactggatcagagtaaggagacaagcatcaaaacatcctttccaatgactgtcaaggtggatggcgtagcccaggacggaacaactatgtatatccataacaaggtccacaacagaacaaggactctcacctgtgccggtaaatgcgcggagataatcgtggcacacctcggatacctgaactatacccagtacactgttatcgtaggatttgagcaccttaaattgcctatcaaggggatgaacttcacttggaagacctataacccagccttttctcgtctggagatctggttccgcttcttctttgtggtccttacatttatcgttacctgtctcttcgctcatagtctgcgtaagttctctatgcgcgattggggcattgagcagaaatggatgtccgtgttgctccccctcctcttgctgtacaacgatccatttttccctctttcattcttggtgaacagttggctgcctggcatgctggacgacctgtttcaaagcatgttcctttgtgctctgttgcttttttggctgtgcgtctaccatgggataagagttcagggcgaacggaagtgcctgacattttacttacccaaattcttcatcgttggactgttgtggctcgcatcagtaaccttaggcatctggcaaaccgtcaacgaattgcacgatcctatgtaccagtacagagttgataccggaaattttcagggtatgaaagtgtttttcatggtcgtagccgccgtttacatcttatacctcctctttcttatcgtacgggcatgctccgagttacggcacatgccgtacgttgatttgagacttaagtttctgactgccttgacttttgtggttctagtgatttctattgccatactgtatctgagattcggtgcccaagtgttgcaagacaattttgtggcagagctgtccacgcattaccagaacagcgctgaattcttaagcttttacggccttctgaatttttacctctacacactggcattcgtgtattcaccgagcaagaacgcactgtacgaatcgcagctaaaggataaccctgctttctcaatgctgaatgactctgatgacgatgtcatctacgggagtgattacgaagagatgcccctccagaacggtcaagccattagggctaagtacaaggaagagtcagactcagattag

SEQ ID NO: 209404 - DNA, 1317 bp, synthetic construct
  misc_feature 1..1317: note = Description of Artificial Sequence: Synthetic coding sequence
  source 1..1317: mol_type = other DNA
atgccctgcacctgcacctggcggaactggcggcagtggatccggccactggtggctgtgatttaccttgtgagcatcgtggtggccgtaccactctgtgtctgggaacttcagaaactggaagttgggatccacactaaggcttggttcatagctggcatctttttgctcctgacaatcccaattagcctttgggtcatcctgcagcacttggtccactacactcagccggaactccaaaaacccatcattcgcatcctctggatggttccgatttactcgctggatagctggattgcccttaaatacccagggatcgctatttatgtggacacttgccgggagtgctacgaggcctatgtaatatataattttatggggttcctgaccaactaccttacaaatcgctaccctaacctggtactcattcttgaggcaaaggaccagcagaagcactttccaccactgtgctgctgcccgccgtgggccatgggtgaagtcctgctgttcagatgcaagctgggagttttgcagtacactgtcgtgagacctttcaccaccattgtggcacttatctgcgaactcctgggaatttatgacgagggcaacttcagcttttccaacgcgtggacatatctagtaataataaacaatatgtctcagctgtttgccatgtattgtttgctgttattctataaggtgctgaaagaagaattatctcccattcaacctgtcggcaagttcctctgcgtgaagttggtcgtgtttgtttccttttggcaggccgtggtgatcgcccttctggtgaaagtgggggtgatcagcgagaaacatacctgggaatggcagacggtggaagccgtagctaccgggctgcaagacttcatcatatgcatcgagatgtttctggccgcgattgcacatcactacacctttagctacaagccctatgtgcaggaggcagaggagggcagctgcttcgatagcttcttggctatgtgggacgtgagtgatattagggacgacattagcgaacaagtgcgccatgtgggcaggactgtgcgaggccacccccgcaagaagcttttcccggaggaccaagatcagaatgaacacaccagcctgctgagttcctcatcccaagacgctatttcgatcgcctcatcgatgccccctagtcctatgggtcactaccagggtttcggacacacagtgacgccacagacaactccaacaacggccaagatttcagacgagatcctttccgataccatcggggagaagaaggaaccttcagacaaaagtgtagactcctag

SEQ ID NO: 209405 - DNA, 4152 bp, synthetic construct
  misc_feature 1..4152: note = Description of Artificial Sequence: Synthetic coding sequence
  source 1..4152: mol_type = other DNA
atgtacgccaccgacagccggggccacagccccgccttcctgcagccacagaacggcaattcacgacatccgtctgggtatgtgcccggcaaggtggtgccacttaggccacctccaccccccaagagccaagctagtgctaaattcactagcattagacgcgaagacagggccacttttgctttttcacctgaagagcagcaagcgcagagggagtcacagaaacaaaaaaggcacaagaatacattcatctgcttcgccattacatcatttagtttctttattgccctggcaataattctggggatctcctccaaatacgcgcccgacgagaactgtccagatcagaacccacgtcttcgcaactgggatcccgggcaggattccgccaaacaggttgtgataaaggaaggggacatgctgagactcacatccgatgccacagtccatagcatagtgatccaggacgggggcctactagtgtttggcgataacaaggatggctcgcggaacataacgttgaggactcactacattctgatccaagatgggggcgcactgcacattggtgccgagaagtgccggtataagagtaaagccacaatcaccctttatgggaagagtgatgagggcgaatctatgccaacctttggcaaaaagttcatcggggttgaagctggcggaactctggagctgcatggagccagaaaggctagctggactttactggcccggacactcaactcgagcggcctcccttttgggtcctatacctttgagaaagatttctctcggggcttgaacgtgagagtcattgatcaggataccgcaaaaatactggaatccgagaggttcgacacccatgaataccgcaacgagtctcgccgacttcaggagttcctgcggtttcaggacccgggcagaattgtcgctatcgctgtcggagactctgccgccaagagccttttgcaggggaccatccagatgattcaggaaagactgggatcagagctgatccagggactgggatacaggcaagcttgggccctcgtaggagtgattgacggggggtctacttcatgtaatgagagtgtcaggaattacgaaaaccatagttcaggagggaaagctctcgctcagagagagttctacaccgttgacgggcagaagttctcggtcacggcttattctgagtggatcgagggcgtttccctatctggattcagggtggaggtcgttgacggagtcaagctgaatctgctcgacgatgtatccagttggaagccaggagaccaaatcgtggtcgcttctacagattattcaatgtatcaagctgaggagtttacccttctgccctgttcagagtgcagtcattttcaggtgaaagtaaaggagacaccgcagttcttacatatgggtgagattattgatggggtggacatgagggccgaggttgggatactgacccgcaacatcgtgatccagggggaggtcgaggactcttgttatgctgagaatcagtgtcagtttttcgactatgacacattcgggggtcacattatgatcatgaagaatttcaccagtgtgcatctgtcgtacgtcgaacttaaacatatggggcaacagcaaatgggtcgatatcccgtccactttcatctgtgtggggacgttgactacaaagggggttatcgacacgccacatttgtggacggcctgagcatacaccacagcttctctaggtgcatcactgtgcatggcaccaacggcctgctcattaaagacacaatcgggtttgatacactgggccattgcttttttctggaggacggcatcgagcagagaaacacactctttcacaatctggggctgctgacaaagccaggaacccttttgccaaccgatcggaacaattccatgtgtactaccatgcgcgataaagtcttcgggaattacattcctgttccagctacagattgtatggccgtttctacattttggatcgcacacccgaacaacaacttgatcaacaacgccgcggcgggttctcaggatgccggaatctggtacctgtttcacaaggagcccactggagagagcagtggactgcagctgctggctaaacccgaactgactcccctgggaatcttttataataatagggtgcattctaattttaaggcgggacttttcatcgacaagggggtcaaaaccactaactcttccgcagccgaccccagggagtatctgtgtctcgacaactcggcgaggtttcggccccatcaagacgccaacccagagaaacccagggtggccgccctaatagacagactcatcgcctttaagaataatgacaatggcgcctgggtccggggaggcgatatcatagtccaaaacagcgcatttgcggacaatggaataggcctgacttttgcatcagatggttcattcccatcggatgaaggtagctctcaggaggtcagtgaaagcctcttcgtcggagaaagccgcaactatggctttcagggcggccagaacaagtatgtagggactggaggcatcgatcaaaagccaaggacacttccccgaaatagaacatttcctattagaggatttcagatttacgatggcccaatacatcttacccggagcactttcaagaagtatgtgccaacacccgacaggtactctagtgccatcggctttttaatgaagaactcgtggcagatcactccacggaataatatctcattggtcaagttcgggccccacgtttctctcaatgtgttcttcgggaaaccagggccttggttcgaagactgcgagatggacggcgataagaattcgatattccacgacatagatgggagcgtcactggatacaaggacgcgtatgtgggaaggatggacaactacttaataaggcaccccagctgcgtgaacgtttctaagtggaacgcagtcatctgcagcggcacttatgcacaggtgtatgtccagacttggagcactcaaaacctgtcgatgacaataacaagagacgagtaccccagcaaccctatggttctcaggggtatcaatcagaaggccgccttcccacagtaccagcccgttgtgatgctggaaaaaggttatacaattcactggaacggcccagcacccagaaccaccttcctgtacctggtcaactttaataaaaatgactggatacgggtcggcctgtgttacccctcgaacaccagtttccaggtcacattcgggtaccttcagcgtcagaatggaagcctctctaagatcgaagagtacgagcccgttcacagcctcgaggaattgcagagaaagcaaagcgaacggaaattttacttcgactcgagcactgggctcctgttcctgtatttaaaggccaaaagtcaccggcacgggcattcttattgcagttcccagggatgtgaacgcgtgaagatccaggccgctactgatagtaaagacatttcaaattgcatggcaaaggcttaccctcaatattaccgcaaacccagtgttgttaagaggatgccagcaatgcttaccggactgtgtcagggatgcggtacacggcaggtagtatttacctcggacccacataagtcatacctgccggtgcagttccagtctcctgacaaggcagagacccagaggggggacccatctgtaatcagcgtgaacggtacagactttactttcagatccgccggtgtgctcctgcttgtagttgacccatgctcagtgcctttcaggctaaccgagaaaaccgtgttccctctggcagacgtgtcaaggatcgaagagtatctcaagaccggcattccccccagatccattgtgttgctgtctactaggggcgagattaagcagcttaatatctcccacctgctggtgcctctcggcctggccaaaccggctcatctgtacgacaagggatccacaattttcctggggttctcaggaaattttaaacccagctggacgaagctgttcacatcacctgcaggccaagggctcggtgtgcttgaacagtttattcccttgcaacttgatgaatacggatgtcctagggccaccacagtccgccgtcgagacctagagctcttgaaacaggctagtaaggctcactag

SEQ ID NO: 209406 - DNA, 3963 bp, synthetic construct
  misc_feature 1..3963: note = Description of Artificial Sequence: Synthetic coding sequence
  source 1..3963: mol_type = other DNA
atgtacgccaccgacagccggggccacagccccgccttcctgcagccacagaacggcaacagccggcatccaagtggctatgtccccgggaaggtggtgcccttgaggcccccaccgccgccaaaatcccaggctagtgcgaagtttacctctatccgccgcgaggatagagctacttttgctttctctcccgaagaacagcaggcccagcgcgaatctcagaaacaaaagcggcataaaaacacctttatttgcttcgccatcacctccttttcattctttatcgcccttgctatcatcctgggcatcagttctaagtatgctccggacgagaattgtcctgaccagaatccgcggctgagaaattgggacccgggacaggatagcgccaaacaagttgtgatcaaggagggagatatgctgagactgacgagcgacgccacggttcattccatcgtgattcaagacggcggattacttgtgtttggagacaacaaggatggaagccgtaatattacgttaaggacccactacatcctgatccaggacggaggcgccttgcatattggggctgagaagtgcaggtacaaatccaaagctaccatcaccctgtacggtaagtctgatgaaggtgagtccatgcccacctttggcaagaagtttatcggcgtcgaggccggcggcactctggaacttcacggtgcacggaaagccagctggactcttcttgctagaaccttgaactcatcagggctgcctttcgggagctacacatttgaaaaggattttagtcgggggttgaatgttagagtaattgaccaggataccgccaaaatactcgaatcagagcggtttgacacacacgagtaccgaaacgaatcacgcaggctgcaagagtttctccggttccaggatccagggagaatcgtagcaatagccgttggcgatagtgcggccaaatcacttctccagggtaccatccagatgatccaagaaaggctgggatctgagttaattcaaggcctgggatacagacaggcctgggctctcgtcggggtaattgatggaggatctactagctgcaacgaaagcgtgcggaattatgagaaccattcctcaggaggaaaagctctcgcccagagggagttttacactgtggatgggcagaagttttccgttacagcctactctgagtggatcgaggaaactcctcaatttcttcacatgggcgaaatcatcgatggtgtagatatgagggccgaggtcggtatcctaactcgcaacatcgtgattcagggggaggtggaggacagttgttatgctgagaaccagtgccagttcttcgactatgatacctttgggggtcatattatgatcatgaaaaacttcacatctgtgcacttatcatacgttgagctgaagcacatgggtcagcaacagatgggtcgctatcccgtgcactttcatctgtgtggtgacgttgattataagggcgggtataggcacgctaccttcgtggatggactgagcatccatcactcctttagccggtgtattaccgtacatggcacgaacggtctgctaattaaggacaccattgggttcgatactctgggacattgcttcttcctcgaagacggcattgagcagaggaacacgctgttccacaacctggggctcctgacaaagcctggcacacttctgccgactgaccgcaataattcgatgtgtactactatgcgggataaggtctttggaaactatatccccgttccagcaacggactgcatggcagtgtcaactttctggattgctcaccctaacaacaacttgatcaacaatgctgccgctggcagtcaggacgccggcatctggtacctgtttcataaagaacccactggagagagctctggtcttcagttgctggcaaaacccgagctcactccacttggtatattttacaataaccgagtgcatagtaatttcaaggccggcttattcatcgacaaaggtgtgaagacaaccaatagttctgctgctgatcctcgagagtatctttgcctcgacaattccgcacgtttccggcctcaccaggacgctaaccctgagaaacctcgagtggctgctttaatcgatcgcttgattgcattcaagaacaatgacaacggcgcttgggtgagaggcggggatatcattgttcaaaactctgctttcgccgacaatggcatcggcctgacgtttgcttctgacgggtcattcccttctgatgagggatcttcccaggaagtatcagaatctcttttcgtgggggaaagtagaaactacggcttccagggaggacagaacaaatacgttggcaccggaggaattgaccagaagccacgcaccctgccccggaatcgcacttttcccattaggggtttccagatttacgatgggccaatccaccttactcgttcgactttcaagaagtacgtgcctactcccgatagatattcatctgcaatcgggttcctaatgaaaaactcatggcagatcactccccggaacaacattagtctggtcaagttcgggccccacgtatcccttaacgtgttttttggaaagcctggcccctggtttgaggactgcgagatggacggggacaagaactcgatctttcacgacatagacgggtctgtgaccggctataaggatgcatacgttgggcgcatggacaattacttaatccgacacccctcctgtgtcaacgttagcaaatggaatgccgtgatatgctcagggacctatgcccaggtgtacgtacaaacatggtccactcagaacctgtcgatgaccattacacgagatgagtatcccagtaaccctatggtgctcagaggtattaatcaaaaggccgctttcccccaataccagcctgtagttatgctggagaagggatacacaatccactggaacggcccggcacctcgtaccacctttctctacctggttaattttaacaaaaatgactggatccgcgttgggctgtgctacccatctaataccagtttccaggtgacctttggatacctacagaggcaaaacggctcactctccaagatcgaagagtacgagcccgttcactcactggaggaattacagcgcaagcagtctgaacggaaattttactttgacagcagcacaggtctgctttttctatacctgaaggctaagtctcaccgacatggacactcctactgttctagccagggctgtgaaagggtgaaaatccaagccgcgacggacagcaaagatatatctaactgtatggcgaaggcttatccacagtactatcgcaaacctagtgtcgtcaagaggatgccagcaatgctgactggcttgtgccagggatgcgggacccggcaggtggtcttcactagcgaccctcacaagagctacctaccggtacagtttcaatctccagataaggccgaaacccaacgaggggacccatcagtgatctccgtcaatggcacggacttcactttccggtcagccggtgtgcttttgctcgtggtggacccatgttcggtgccatttcgtttgacagaaaaaactgtatttccgctggctgatgtctccaggatcgaggaatacctgaagaccgggatccctccacggagcattgtcctcctgtctactaggggggaaattaagcagttgaacatctctcacctacttgtccccctgggcctcgctaaacccgcccacctgtatgataaaggcagcacaatctttttgggcttctcagggaatttcaaaccgagctggacgaagctgttcacctcccctgctggccaaggccttggagtgcttgagcagttcatcccactgcagctggacgaatatggttgtcctagagcaacaaccgtgagacgccgggatctcgagctactgaaacaggcaagcaaagcccactag

SEQ ID NO: 209407 - DNA, 1131 bp, synthetic construct
  misc_feature 1..1131: note = Description of Artificial Sequence: Synthetic coding sequence
  source 1..1131: mol_type = other DNA
atgaccatcacccgggacgagtaccccagcaaccccatggtgctgaggggaattaaccaaaaagctgcctttccccaataccagcctgtagttatgctggaaaaaggctatacaatccactggaatgggccagctcctaggaccacatttctttacttggtcaatttcaacaagaacgattggattcgcgtgggcttgtgttatcctagtaacacatcattccaggtgacatttggctacctccagagacagaatggctctttaagtaagatcgaagaatatgagcccgtgcacagcctcgaggaacttcagcgcaagcagtcagaaagaaagttttactttgactcttctactgggctgctcttcctgtatcttaaggccaagtcccaccgacacggtcactcctactgctctagccaggggtgcgagagggtgaagatccaggctgcgacggactccaaagatatcagcaattgtatggcaaaggcatatccgcagtactacaggaagccgagtgtggtgaaaagaatgcctgccatgttgaccgggctgtgccaggggtgcggtacaaggcaggtcgtgttcacttcagaccctcacaaatcctatctgcctgtgcaattccagagcccagataaagccgagacccagcgaggcgatcctagcgttatctccgtaaacggcaccgattttacattccgttccgccggcgtcttgctgctagtcgttgatccttgcagcgttccctttaggctgaccgaaaagaccgtctttccattagccgatgttagcagaatcgaggagtaccttaaaactggaataccaccccgctctatcgtgctcctaagtacgaggggggagatcaagcagctcaacatctcccatttgctcgtgcccctcggcctggcaaaacccgctcatttgtacgacaaaggcagtacaatcttcttgggttttagcggcaattttaagcccagctggaccaaactcttcacttctcctgcaggacaaggacttggggtgctagaacagttcattccactccagctggatgagtatggatgcccccgagcaaccaccgttcgcagaagggatctcgagctgctgaagcaagcctcaaaagctcactag

SEQ ID NO: 209408 - DNA, 57 bp, synthetic construct
  misc_feature 1..57: note = Description of Artificial Sequence: Synthetic coding sequence
  source 1..57: mol_type = other DNA
atgtacgccaccgacagccggggccacagccccgccttcctgcagccacagaattag

SEQ ID NO: 209409 - DNA, 570 bp, synthetic construct
  misc_feature 1..570: note = Description of Artificial Sequence: Synthetic coding sequence
  source 1..570: mol_type = other DNA
atggaggagggcggcaacctgggcggcctgatcaagatggtgcacttactcgtcctgagcggggcttgggggatgcagatgtgggtgacattcgtgtccggttttctgctgtttaggagccttcctcgccacacctttggactggttcagtcaaaactatttcctttctacttccatatcagcatgggatgtgcctttataaatctctgcatactcgcaagccaacacgcctgggcacaactgacattctgggaggcctcacagctgtaccttctgtttttatcactgaccttggcaaccgtaaacgcacggtggctggagcccagaaccaccgcagccatgtgggctttgcaaacagtggaaaaagagaggggactgggcggtgaggtaccaggctcccatcagggcccggacccttataggcagttacgcgaaaaggatcccaagtacagcgccctaagacagaatttcttccggtatcacgggctgagctccctttgtaacctgggctgtgtcttatccaatggtctctgcttagccggcctcgcgcttgaaataagatcattgtag

SEQ ID NO: 209410 - DNA, 570 bp, synthetic construct
  misc_feature 1..570: note = Description of Artificial Sequence: Synthetic coding sequence
  source 1..570: mol_type = other DNA
atggaggagggcggcaacctgggcggcctgatcaagatggtgcacctgctcgttctgtctggagcttggggcatgcagatgtgggtgacatttgttagcggcttccttctgttccggagtcttccgaggcacacttttgggcttgtgcagtcgaagctgtttcctttctacttccacatttctatgggctgtgcttttattaacctctgtatacttgctagccagcacgcttgggcccagctgaccttttgggaagcatcacagctctaccttctgtttttgagccttacattagccaccgtgaacgcccggtggttggagcctcgcacgaccgccgctatgtgggcattgcagactgttgaaaaggagcgcggcctggggggcgaagtgcccggcagccaccaaggccccgacccgtaccgccagctgagagagaaggatcccaaatattctgctctcagacaaaacttttttaggtaccacgggttgtcctcactatgcaatcttggctgtgtgctctccaacggcctttgcctggctggactggccctggagatcagatccttgtag

SEQ ID NO: 209411 - DNA, 570 bp, synthetic construct
  misc_feature 1..570: note = Description of Artificial Sequence: Synthetic coding sequence
  source 1..570: mol_type = other DNA
atggaggagggcggcaacctgggcggcctgatcaagatggtgcacctgcttgtcttgtctggggcctgggggatgcagatgtgggtgacattcgttagcggctttctgctgtttcgctcactgcccagacacacctttgggctcgtgcagtcaaagctcttccccttctatttccatatcagcatgggatgcgcttttatcaatctgtgtattctcgcgtcccagcacgcctgggcccagctcacattttgggaagcatcgcaactgtacctgctgttcctgtccctgactctcgccaccgttaacgctagatggttggagccacggactacagcagccatgtgggcacttcagactgtcgagaaggaaaggggcctgggaggagaggtccccggaagccatcagggaccagacccctacaggcaacttcgcgaaaaggaccccaaatattctgcgttgcgccagaacttcttccgatatcacggactctcatccctctgtaatttggggtgcgttctctcaaatggtctgtgtctggctggcctagccttggaaattcgatccctatag

SEQ ID NO: 209412 - DNA, 447 bp, synthetic construct
  misc_feature 1..447: note = Description of Artificial Sequence: Synthetic coding sequence
  source 1..447: mol_type = other DNA
atgctgccccggggcctgaagatggccccccggggcaagcggctgagctctactcccctcgagattcttttcttcctgaacggttggtacaatgccacctacttcctcttggaactgttcatattcctatacaagggtgtgctcctaccttatccgactgctaatctcgtgcttgacgtggtgatgctcctgttatacctcgggattgaggtcatacgactgttttttggtaccaaggggaatttatgccagagaaagatgccattaagcatcagcgttgccctgacattcccaagtgcaatgatggcaagctactacctgctgctgcagacatatgtgctgcgactggaagccattatgaacggtatcctcttgtttttttgcggctcggagctccttctcgaagtcctgacgctggctgccttttctagcatggatagaatttag

SEQ ID NO: 209413 - DNA, 438 bp, synthetic construct
  misc_feature 1..438: note = Description of Artificial Sequence: Synthetic coding sequence
  source 1..438: mol_type = other DNA
atgctgccccggggcctgaagatggccccccggggcaagcggctgagcagtactccactggaaatcctgtttttcctgaacggctggtacaacgcaacctattttctgcttgagctcttcatctttctgtacaagggagttcttttgccctacccaactgccaatctggtgctggacgtagtgatgttgctcttatatctcggtatcgaggtgatcaggctgtttttcggtacgaaggggaacctgtgccagaggaaaatgccactgagtatcagtgtcgctttaacattcccctctgctatgatggccagttattatctgctcctgcaaacttacgtgctccgattggaggccatcatgaatgggattctgctgttcttttgcggctcggagctgctccttgaagtgctgactttggcagcctttagccggatctag

SEQ ID NO: 209414 - DNA, 942 bp, synthetic construct
  misc_feature 1..942: note = Description of Artificial Sequence: Synthetic coding sequence
  source 1..942: mol_type = other DNA
atgcggaccgacagcggcgcccggctggaggagggccacctgcggcccccgcgcgcactgccccctgtcccttctatcgatgatatcccgctgagtagaccgaagaaaaaaaaaacccagcccgccgaactgcaatatgccaacgaactgggagtagaagacgaggatatcattaccgatgaacagactaccgtcgagcagcagtctgtgtttaccgctcccaccggcatctcacagcctgtaggaaaggtgttcgtcgaaaagagcaggcgatttcaggctgccgatcgcagtgagctgatcaaaaccacagaaaatatcgacgtgagcatggacgtaaaacctagttggactacacgggacgtcgcattaactgttcatcgggcattccggatgattgggctgttttcacatggcttccttgccggctgtgcagtctggaacatcgtggtgatttacgtgctagctggggatcagctgagcaatctctcaaaccttctgcaacagtataagacactggcgtatcctttccagtcactactctatctcctcctcgctctgtccacgattagtgctttcgaccgcattgacttcgccaagatcagtgtggcaatccggaattttttggccctggatccaaccgctctggcatcatttctgtatttcacagccctcattctctctttgagtcagcaaatgacaagtgatcgtatccatctttatactccttcctccgtgaatggctccctctgggaggcagggatcgaggagcagatattgcagccttggattgtggtgaatcttgtcgtggctcttctcgtcggcctgtcgtggctgtttctctcgtataggcccggcatggacctgtccgaggaacttatgttttcttctgaagttgaggagtaccctgacaaagagaaggaaatcaaagcctctagttag

SEQ ID NO: 209415 - DNA, 1203 bp, synthetic construct
  misc_feature 1..1203: note = Description of Artificial Sequence: Synthetic coding sequence
  source 1..1203: mol_type = other DNA
atgggcaagaaccccgtgcggcccccccgggccctgccccccgtgcccagccaggacgatatccccttatccaggccaaagaagaagaaaccacggactaagaacacacccgcttctgcatccctggagggactcgcccagacggctggaaggcggccctcagaggggaacgaaccttccaccaaagaactcaaagaacatcctgaagcccccgtgcagcgacgtcagaaaaaaactagactcccactagaattggagacaagttctacacagaagaagtcctcgagctccagcctcctgcggaacgaaaatgggatcgatgcggaacctgccgaagaggccgtaattcaaaaaccccgcaggaagacaaagaaaacgcagccagccgagctgcagtatgcgaacgaattaggcgtggaggatgaggatattatcactgacgagcagaccactgtagagcagcagtcggtgttcactgcgcctactggtattagtcaacctgtgggcaaggtctttgttgagaagtcaagaaggtttcaggctgccgatcggtctgagctcatcaagactacggagaatattgatgtgtcgatggacgttaagcccagttggactactcgagatgtggccttgaccgtccatagagccttcagaatgatcggactgttcagccacggtttcttggcgggatgcgcagtatggaacatcgtggtaatctatgtgctggctggcgaccagctctctaacctgtctaatctgctgcaacagtataaaaccctggcctatccattccagtccctcttgtacctattgctggccctgtcaacaatatcagcttttgacaggatcgattttgcgaagatcagcgttgctatccggaattttctggctctggatccgactgcactcgcctcctttctgtactttaccgcactcattctctcactctcccagcagatgacttcggaccgaatccacctttacacacctagttccgtaaacggcagcttatgggaggccgggattgaggagcagatcctgcaaccatggattgtggtcaacctggtcgttgccctgcttgttggcctttcctggctgtttctgtcctataggcctggaatggatctctccgaagaactgatgttctcctccgaggtagaagaatatccagataaagaaaaagagattaaagcctcctcttag

SEQ ID NO: 209416 - DNA, 1227 bp, synthetic construct
  misc_feature 1..1227: note = Description of Artificial Sequence: Synthetic coding sequence
  source 1..1227: mol_type = other DNA
atgcggaccgacagcggcgcccggctggaggagggccacctgcggcctccccgggctctgcctccagttcctagccaagatgatatacccctcagcagacccaagaagaaaaaacccaggaccaaaaatacccccgcctcagccagccttgaaggcctggcccagaccgccggtcgcagaccttctgagggtaacgagccttctactaaggaacttaaagaacacccagaggcaccagttcagcggcgacagaaaaagacacgactaccactggagcttgaaacaagcagtacacagaaaaagtctagctcctcatctcttctcaggaacgagaatggtattgatgccgagccggctgaagaggcagttattcagaagcctaggcgaaagaccaaaaagacccagccagctgaattacagtatgccaacgaattgggggtggaggatgaagatataataactgacgagcagacgacagtggagcagcagtcagtgttcaccgccccaactggtatctctcaaccagtcggcaaagtgttcgttgagaaatccagacgtttccaggccgccgatcgatctgaactcattaaaacaaccgagaatatcgacgtgtctatggatgtaaagcccagttggacaacaagagatgtcgcactgaccgtacaccgggcgtttcgtatgatcggcctgttcagccatggattccttgcaggatgcgcagtctggaacatcgttgtcatctacgtgctggcgggggatcagttgagcaatctaagcaatctactccagcagtataaaaccctggcgtacccctttcagtctctgctgtacctgttgctcgccttaagtacaattagcgcctttgataggatcgatttcgcgaagatttccgtggctattcgcaattttttggccttagatccgactgctctggcctccttcctttacttcacagcgctcatactgagcttatcacagcaaatgacctcagaccggatccatctgtacaccccttcttctgttaacggatcactgtgggaggccggcatcgaggaacagattcttcagccctggatcgtcgtaaacctcgtggtggctctgttggtaggattatcatggctgtttctgtcataccgtccgggtatggatctttcagaagaattaatgtttagctcagaggtggaggagtacccagacaaggagaaggagataaaggccagttcatag

SEQ ID NO: 209417 - DNA, 1293 bp, synthetic construct
  misc_feature 1..1293: note = Description of Artificial Sequence: Synthetic coding sequence
  source 1..1293: mol_type = other DNA
atgacccactgcgcctgcgcccgggaccggcgggagggctggggcgcgagatgcttgggtcgacgtcctccaagacctgctaagcgcagaatgggcaaaaacccggtgcgcccaccccgagcccttcccccagttccatcaatagacgacataccactgtcccgcccgaaaaaaaaaaaacccagaacgaagaacactccagccagtgcatctctcgagggcctggcccaaaccgctgggagaagaccctcagaggggaatgagccttcaaccaaagagctcaaagaacatccagaggctccggtgcagcgacgccagaagaagactcggctacctcttgaactggagacctcctctacacagaagaaatcgagctcctcaagcctgctgagaaatgaaaacggcatcgatgccgagcccgccgaagaggccgtaatccaaaagccccggcgcaaaacaaaaaaaactcaacctgcagaactgcagtacgcaaatgagctgggagtggaggacgaggatatcattactgacgagcaaaccactgtggaacagcagagtgtgttcacagcccctacgggaatctctcagccagtcggaaaggttttcgtcgagaaaagcagacgattccaagcagccgaccgtagcgagctaataaagactaccgaaaacatcgatgtgtcaatggatgtgaaaccttcatggacgaccagagacgtggccttaaccgtgcaccgagcctttcgcatgattggcctgttctctcacggattcttagccggttgtgctgtctggaacatcgtcgtcatatacgttttagccggagaccagctttctaatctttctaacctgctccaacagtataaaacgctggcttatcctttccaatcccttctctatctgctccttgcactgtcaaccatcagtgcattcgacaggatcgactttgctaagatctcagtggccattaggaacttcctggctctagaccccactgccctggcctcatttctttactttactgccctgatactgagcctgtcccagcaaatgacttccgaccgtatccatttatacaccccatcaagcgtaaatggcagcctctgggaggctggcattgaagaacaaatcctccagccttggattgttgtgaacctcgtagtcgcactgcttgtcggtctttcttggttattcttatcgtaccgacctggcatggacttgtccgaggagctgatgttctcctccgaggtcgaagaatatcctgacaaggagaaggagattaaggcctcgagctag

SEQ ID NO: 209418 - DNA, 1227 bp, synthetic construct
  misc_feature 1..1227: note = Description of Artificial Sequence: Synthetic coding sequence
  source 1..1227: mol_type = other DNA
atgcggaccgacagcggcgcccggctggaggagggccacctgcggccgccaagagccctgcctcccgtgccttccatcgacgacattccactgtctaggccaaaaaagaaaaaaccccggactaagaacacacccgcttccgcttccctcgaggggctggcccagacagcaggccgccgcccttcggaggggaacgaaccctctaccaaagaattgaaagaacatcctgaagcgcctgtgcagcgcagacagaagaaaacacggcttccgctggagctggagacgagttccacccaaaagaaatcctccagttctagcttgctccggaatgaaaatggaattgatgctgaacccgccgaggaggcagtgatacagaagcctcggcgaaagaccaaaaagacccaacccgccgagctccagtatgcgaatgagcttggggtggaggacgaggatatcataacagacgagcagaccacagtcgagcaacagagcgttttcactgcaccaaccggaatctcacagcccgtgggaaaggtgttcgtcgagaaatctaggcggttccaggccgctgaccgttctgaacttataaaaacgacagagaacatcgacgtctcaatggatgtgaagccttcatggacaacccgcgatgtagctctaactgtccatcgtgccttcaggatgataggcctgttcagccacgggttcctcgccggctgcgctgtctggaacattgtcgtgatatatgtgctagccggtgaccagttatctaacttatccaacttactccagcagtataaaacattggcatatcccttccagtctttgctgtatcttttgctggcactgtctacaatatctgcatttgaccggatcgactttgcgaagatctcagtggcaattcgaaattttctggctctggaccccactgccctggcaagttttctgtattttacggctctcatcctcagcttaagtcaacaaatgacgtctgataggatccacttgtatacccccagttctgtgaacggttcgctgtgggaggcaggcatcgaggaacagatcttgcagccttggatcgtcgtaaacctcgtcgtggccctgctggtgggactgtcttggttgtttctctcctataggcctgggatggatctgagcgaggagttaatgttcagctctgaagtagaagaatacccagacaaagaaaaggaaataaaggcttcatcctag

SEQ ID NO: 209419 - DNA, 1101 bp, synthetic construct
  misc_feature 1..1101: note = Description of Artificial Sequence: Synthetic coding sequence
  source 1..1101: mol_type = other DNA
atggccctgccccccggccccgccgccctgcggcacaccctgctgctcctaccggctcttctaagcagcgggtggggggaactcgaacctcagatcgatggacagacctgggccgagagggcactcagagagaacgagaggcacgccttcacctgccgtgtggcaggcggccccggtacaccccgcctagcctggtatttggatggccagcttcaggaggcctcaacttctaggctgctctcagtcgggggggaagctttcagcggagggacctctactttcacagtaactgcacatcgcgctcagcacgaactgaactgctcactccaggatccaaggtcggggcgctctgcaaatgcttctgttatattgaacgtacagttcaaacctgagattgctcaggttggggctaagtaccaagaagcccagggcccaggactcctggtggtgctgtttgcgttggtcagagctaacccccccgccaacgtcacttggattgaccaagatggacccgtgaccgtgaatacaagcgatttcctcgtgctggacgcacagaattacccatggttgaccaaccatactgtgcagctccagctgagatcattggcccataacttatccgtagtcgcgactaacgatgtgggcgttaccagtgcgagtctgcccgctcctggcttgttggccacccgcgttgaagtgcccctgctcggcatagtcgtggctgctgggctggcactgggtacacttgtaggattctcaaccctcgtagcatgccttgtatgccggaaggagaagaaaaccaaaggccccagtcgccacccttcactgatctcctctgactccaataatctgaaactgaacaacgtccgactgccccgtgagaatatgtctctgcctagcaacttacagttgaatgatctgactcccgatagcagggcagtcaagcccgccgacagacaaatggctcagaacaactctcgaccagagctgctcgatcccgaaccaggcggcctgttaacaagtcaagggttcatcaggctcccggtgctgggctacatctatcgagtgtcaagcgtgtcatccgatgaaatctggctctag

SEQ ID NO: 209420 - DNA, 657 bp, synthetic construct
  misc_feature 1..657: note = Description of Artificial Sequence: Synthetic coding sequence
  source 1..657: mol_type = other DNA
atggccctgccccccggccccgccgccctgcggcacaccctgctgttgctcccagccctgctgtccagcgtcaaacccgaaattgcgcaggtgggcgcgaagtatcaggaggcacagggccctggcctgctagttgtgctctttgcattggtgagagctaacccacctgctaacgtgacatggatcgatcaggacggccctgtgacagtgaataccagcgacttcctggtcctggacgctcaaaattatccctggctcaccaatcatacggtccagcttcaactcaggtcgctggcccataacctgagcgttgtcgctactaacgatgtcggcgtgacttctgcttctctccccgcccccggtccgtctagacaccccagtcttatatcatctgactccaacaacctaaaactcaacaacgtgcggttgccgcgggaaaatatgtcactcccttcgaatctgcagctaaatgacctgacaccagactctagggccgtgaagcctgcagaccgtcagatggcacagaacaattccagaccagagttactcgatcctgaacccggcgggcttcttactagccaggggtttataagactgcctgtgctaggctacatctatcgcgtgagtagcgtctcctcggacgagatttggttgtag

SEQ ID NO: 209421 - DNA, 1056 bp, synthetic construct
  misc_feature 1..1056: note = Description of Artificial Sequence: Synthetic coding sequence
  source 1..1056: mol_type = other DNA
atggccctgccccccggccccgccgccctgcggcacaccctgctgctgctgccagccttgttgagcagcggttggggagaactcgagccacagattgacggacagacctgggcggagagggccttaagggagaatgagcgccacgctttcacatgtagggtagccggtgggcccgggacacctaggctggcctggtaccttgacgggcagctccaggaagcgagtacctcacggctgctctcagtgggaggcgaagcctttagcgggggaaccagtaccttcacggtgaccgcccaccgcgcccagcacgagctcaattgctcacttcaggatccccgctctggtcgctccgcaaatgcctccgtcatccttaatgtacagtttaagccagagatcgcccaagtgggggccaagtaccaggaagcccagggtcctgggctgctagtggtgctgtttgctcttgttcgtgcaaacccgccagcgaacgtcacttggattgatcaggacggcccagtcacagtgaatacttccgactttttagtgctggacgcccagaactacccctggcttacaaatcataccgtccaactccaattaagatccctggcccacaacctgtctgtcgttgcaactaacgacgttggagtgaccagcgcaagcctgcctgcaccaggcctgttggcgacccgagtcgaagttcccctgctaggtattgtcgtggcagctgggctcgcgcttgggactctggtggggttcagtactcttgttgcatgcctagtgtgtcggaaggagaagaaaacaaaaggaccatcccgccacccttctttgatctccagcgactcaaacaatctgaaactcaacaacgtgcggcttccacgggaaaatatgagcctgcccagcaacctgcagttaaatgatctcactccagatagtcgggcagttaagcccgccgacaggcaaatggcccagaacaactctcgacctgagctccttgaccccgaaccgggaggactccttacatcccagggaagacgtaatcaagacaaggatgcatag

SEQ ID NO: 209422 - DNA, 969 bp, synthetic construct
  misc_feature 1..969: note = Description of Artificial Sequence: Synthetic coding sequence
  source 1..969: mol_type = other DNA
atggccctgccccccggccccgccgccctgcggcacaccctgctgttgcttcccgcactcctctccagcggatggggggagctggaacctcaaattgacggccaaacctgggccgagcgtgccctccgagagaacgagcgacacgcctttacatgtcgcgtcgctggaggccccgggacccctcgactcgcctggtacctagatggtcagttacaggaggcctccacttccaggctcctttcagtgggcggtgaggccttttccggcggaacaagcaccttcacagtgaccgctcaccgagcccagcacgagctcaactgctctctccaagacccccgctccggcagatccgcaaacgcaagtgtgattttaaacgtgcagtttaaaccagaaattgctcaggtgggggcaaagtaccaagaagcgcagggtccgggcttacttgtagtgctgttcgcccttgtaagggccaaccctccagccaatgtcacttggatcgatcaggatggtcccgtgactgtaaataccagcgacttcctggtgctggatgcccaaaattatccatggctgacaaaccacacagtgcaactgcagctgaggtctttggcccataatttgtccgtcgtcgcaaccaatgatgttggagtgacatccgcaagcctccccgccccgggaccctccagacacccaagcctgattagtagtgactccaacaatctcaaacttaataacgttcggctgcctcgtgagaatatgagtttgccgtccaatttgcagctgaacgacctgactccagatagccgcgccgtcaagcctgccgaccgccagatggcgcaaaataattctagacccgagctgctggaccctgagccaggaggcttacttacgagccaaggcttcattaggctccctgtcctgggctatatttatcgagtgagctctgtctcgagtgacgaaatttggctgtag

SEQ ID NO: 209423 - DNA, 969 bp, synthetic construct
  misc_feature 1..969: note = Description of Artificial Sequence: Synthetic coding sequence
  source 1..969: mol_type = other DNA
atggccctgccccccggccccgccgccctgcggcacaccctgctgctattgcctgccctgttgtccagcgggtggggagagctggaaccccagatagatggacagacttgggccgaacgagccctgcgcgaaaacgagcggcatgcatttacttgccgagtagcaggagggccgggaactcctcggttggcatggtacctggatggccaattgcaggaggcgtctacaagccggttactgagtgtgggcggagaagcgttctctggcgggacgtccacatttaccgttaccgctcaccgggcccagcacgaactgaattgcagtctccaggatccacggtcaggcagaagtgccaatgctagcgtaattttaaatgtgcagttcaaaccagaaatcgcccaagtgggtgccaagtaccaggaagcccaggggcctggactcctagtagttctgtttgccttagtgcgcgcgaatccgccagctaacgtgacttggatcgaccaagacggtccagtgaccgtgaacacttccgattttcttgtgctggacgcgcaaaactatccttggttgactaaccatacggttcaactccagttaagaagtctcgcacataatttaagcgtagtcgccaccaatgatgtgggtgttacaagcgcatccctgccagctcccggaccctcccgccacccgagccttatcagctctgacagtaataatctcaagctcaataacgtgagattgcccagggagaatatgtctctgccttctaacctacagctgaatgacctgacccccgattctagagctgtgaagccagccgaccggcagatggcccaaaacaactctcgacccgagcttttggaccccgaacccgggggcttgctcacaagtcaggggttcatcaggttgcccgtgctgggatacatttatagggtgtcaagtgtgagctctgacgagatctggctgtag

SEQ ID NO: 209424 - DNA, 921 bp, synthetic construct
  misc_feature 1..921: note = Description of Artificial Sequence: Synthetic coding sequence
  source 1..921: mol_type = other DNA
atggccctgccccccggccccgccgccctgcggcacaccctgctgctgctgcccgcactgctttcctctgggtggggagaattggaaccccagatagatggacagacgtgggccgagcgagctctgcgtgagaatgagagacatgctttcacctgtcgcgtggcagggggccctgggacgccacgcctcgcgtggtacctcgacgggcagctccaggaagcctctacctcaaggctgctgtcagtcgggggtgaagccttcagtgggggtaccagcaccttcactgttaccgcgcatcgtgcacagcatgagctgaactgtagccttcaggacccacgctcggggaggagcgcaaacgcatccgttatccttaacgtccagttcaaacccgagatagcacaagttggcgcaaagtatcaggaagcacaggggccaggactgctggtggtcctctttgctcttgtgagggcaaacccccccgccaacgtgacctggattgatcaggatggtcctgtgacagtaaacacttcagacttcctagttctggacgcgcagaattacccctggctgacaaaccataccgtgcaattacagctcaggtctctggctcataatctcagcgtcgtggccacgaacgacgtgggcgttacttcggccagcttgcctgctcctggaccgagcagacatccaagcctgatttcttcagactccaacaacctcaaactcaataacgtacgcctgccaagagaaaacatgtccttgccaagcaacctacagctcaacgacctcacaccagactcacgcgtgaagcccgctgaccgccaaatggcgcagaataattcacgcccagaattgctggatccagaaccaggcgggttgctcacttcccagggccgcaggaatcaggacaaggacgcttag

SEQ ID NO: 209425 - DNA, 1146 bp, synthetic construct
  misc_feature 1..1146: note = Description of Artificial Sequence: Synthetic coding sequence
  source 1..1146: mol_type = other DNA
atggccctgccccccggccccgccgccctgcggcacaccctgctgctgctgccagccctgctctccagcggctggggggagttggagccacagatcgacggccaaacatgggccgaacgcgccctgagggagaacgaaagacacgcttttacatgcagagtcgcaggtgggccaggtaccccacgacttgcgtggtacctcgacggtcagctgcaagaggcttcaacctcacgcctgctgagcgtcggcggtgaggcattctccggaggcacctcgactttcactgtcacagctcacagagcccagcacgaactgaattgtagccttcaagatccgcggtcaggccggagcgctaacgccagcgtgattctgaacgtacagtttaaacctgagatagctcaggtcggcgctaagtaccaggaggcacaggggcccggcttgttggtcgtcctgtttgcactggtgcgggctaacccgcctgcaaacgttacctggattgatcaggacgggccggtaaccgttaacacctcggacttcctcgtactggacgcccagaactatccctggttgacgaaccacaccgtccagttacagctgcgatctcttgcacacaacctgtccgtagtcgctacgaacgatgttggagtgaccagcgcttccctgccggctccaggcctgttagccactagggtcgaggtgccccttcttggcatcgtcgtcgctgccggactcgccctaggcaccctggtgggcttcagcactctggtggcctgcctggtttgtcgcaaagaaaaaaagactaaggggccatctagacacccttctttaatttccagcgattctaacaatcttaagttaaacaatgtcaggctacctcgtgagaacatgtctctgccatcgaacctacaactgaatgacctaaccccagatagccgcgttaaacccgcagatcgccagatggcccaaaataactcccgtcccgaactgctcgaccccgagcccgggggccttttgacctctcaggcatgtctgctgcaccacggaactcccgctctgaccaacccttggctcccacatcagcaagaaggcgcactccctggtggctggtctccgcaggcccacaattccaccgtgtggaagctgtag

SEQ ID NO: 209426 - DNA, 810 bp, synthetic construct
  misc_feature 1..810: note = Description of Artificial Sequence: Synthetic coding sequence
  source 1..810: mol_type = other DNA
atggccctgccccccggccccgccgccctgcggcacaccctgctgttactacctgcactgttgagtagtgggtggggggaattggaaccacagattgatggacagacttgggccgaacgcgcactgagagagaacgagagacacgcttttacgtgccgcgtcgcagggggaccaggaacaccgcggttagcctggtatctggatggccagctgcaagaagcgtcgacgtctcgactgctaagtgtgggaggcgaagcctttagcgggggaacaagcacatttactgttactgcacaccgcgctcagcatgagctgaattgctctttgcaggatccacgctcagggcggtcagccaacgcttctgttattctcaacgttcagtggctgctagcgacaagagtggaggtccccctgctgggtatcgtggttgctgcgggactggccctggggaccttagtgggcttctcaaccctagttgcctgcttggtgtgtcgcaaggagaagaagaccaaaggaccgagccggcacccctctctcatctcttccgattcaaataatctgaagctcaacaatgtgaggctgccaagggagaacatgtctctgccctctaacctgcaactcaacgacttaacaccggacagtcgagcagttaagccagccgatcgacagatggcacaaaataatagcagaccagagttgttagatccagagcctggggggttgctcaccagccagggtttcattaggctccccgtgctcggctacatctatcgggtgtcttctgtcagctctgacgagatctggctgtag

SEQ ID NO: 209427 - DNA, 669 bp, synthetic construct
  misc_feature 1..669: note = Description of Artificial Sequence: Synthetic coding sequence
  source 1..669: mol_type = other DNA
atgctgtggctgctgttcttcctggtgaccgccatccacgccgagctgtgccagcctggcgctgaaaatgcttttaaagttagactatccatcagaaccgcgctaggagacaaagcctacgcttgggatactaatgaagaatatctgttcaaggcgatggtggcgtttagtatgagaaaggtgccaaacagagaggccaccgagatctctcacgtactgctttgtaatgtgacgcagcgagtgtctttttggtttgtagtgacggacccatccaaaaatcatacactccccgctgttgaagtacaatctgctatcagaatgaataagaatcgtatcaataatgcctttttcctgaatgatcagaccctcgagttcctcaagattccctccacacttgccccaccaatggatcccagtgtgcctatttggatcatcatatttggggtgatcttttgtatcattatagtggccatagctcttttgattctcagtgggatctggcagcggagacgcaaaaataaggaacccagcgaggtggatgatgctgaggacaaatgcgagaatatgataacaatcgagaacggtatcccatccgacccactggatatgaagggcggacatataaatgacgcctttatgactgaagacgagcggttaacaccattatag

SEQ ID NO: 209428 - DNA, 252 bp, synthetic construct
  misc_feature 1..252: note = Description of Artificial Sequence: Synthetic coding sequence
  source 1..252: mol_type = other DNA
atgctgcggaacctgctggccctgcggcagatcggccagcggaccattagcactgccagccggcgacacttcaagaacaaagtccccgagaagcagaagttgtttcaagaggatgatgagatccctctctatctgaagggcggggtggccgatgccttactctacagagctacaatgattttaaccgttggaggcaccgcctacgctatttatgagcttgcagtggcaagcttccctaagaagcaggaatag

SEQ ID NO: 209429 - DNA, 729 bp, synthetic construct
  misc_feature 1..729: note = Description of Artificial Sequence: Synthetic coding sequence
  source 1..729: mol_type = other DNA
atgtactacggcctgagcaacttctaccagaaccaccggcggtacgtgaagtcccgtgatgatagccagctcaacggagacagttctgcacttcttaacccctctaaggaatgtgagccctatcgacgaaacgaggacaaacctatcgcaccttgtggagctattgctaacagcatgtttaacgatacgctggaactgttcctaatcggcaacgatagttacccaatcccaattgccctgaagaaaaaagggatcgcgtggtggacggataagaacgtgaagtttcgtaaccctcctggcggcgataaccttgaagaacgtttcaaaggaactactaaacccgtcaattggctgaaacctgtttacatgctggatagtgacccagataacaacggctttattaatgaagattttatagtgtggatgagaaccgcggctctcccaacttttagaaagctgtatcgcctaatcgagagaaagagcgatttacacccgacactccccgccggccgatattccttgaatgtcacctataactaccctgtacattactttgatggaagaaaaaggatgatcctgagtactatttcctggatgggtgggaagaacccattcctgggaattgcatatatcgcagtgggctccatcagctttttattgggcgtcgtgttattggtcataaatcataaatatcgcaattcctcaaacactgcagacataacaatttag

SEQ ID NO: 209430 - DNA, 978 bp, synthetic construct
  misc_feature 1..978: note = Description of Artificial Sequence: Synthetic coding sequence
  source 1..978: mol_type = other DNA
atggccatgaactacaacgccaaggacgaggtggacggcggccccccatgcgcgcccggcggtactgcaaaaacccgccggccagacaatacagcctttaagcaacaacgcctgcccgcctggcagcctattctgaccgccgggactgtactgccaatcttcttcatcattgggctgatatttatccctatcggtataggcatatttgttacttccaacaacattagggaaatcgaaggtaacgtgtttatgtactatggactttcaaatttctatcaaaatcaccgcaggtatgtgaagtcccgcgacgattctcaattgaacggcgacagttccgcgcttttgaatccttctaaggagtgtgagccttaccgacgaaacgaagataagcccattgctccatgtggagcaattgccaattcaatgttcaacgatacacttgagctgttcctgatcgggaatgattcctatccaattcccattgcactaaagaagaagggtatcgcctggtggacagataaaaatgtcaaattcaggaatccgccgggcggtgacaatctggaggaacggtttaagggaaccaccaaacctgtaaactggctcaagcccgtgtatatgttagattcagacccggataacaatggattcatcaacgaagactttattgtgtggatgaggactgctgcgttaccaacatttcgaaagctgtacagactgatcgagcgcaaatccgatcttcaccctaccctgcccgctgggaggtattcactaaatgtaacatacaactatcccgttcattatttcgatggccgaaagcggatgatcttaagtacaatcagctggatggggggcaagaacccatttctggggattgcctatattgcagtaggttccatctcattcctccttggagtggtactgctggtcatcaaccataagtaccgcaacagcagtaatactgccgatatcacaatatag

SEQ ID NO: 209431 - DNA, 234 bp, synthetic construct
  misc_feature 1..234: note = Description of Artificial Sequence: Synthetic coding sequence
  source 1..234: mol_type = other DNA
atgtactacggcctgagcaacttctaccagaaccaccggcggtacgtcaaaagtagagatgactcccagctcaatggagattcgagcgctctgctcaacccgagcaaagagtgcgagccataccggcgcaatgaagataagccgatcgctccctgcggcgctattgccaacagtatgttcaatgacaccctcgagctgtttctaataggcaacgactcttatcctataccatag

SEQ ID NO: 209432 - DNA, 1038 bp, synthetic construct
  misc_feature 1..1038: note = Description of Artificial Sequence: Synthetic coding sequence
  source 1..1038: mol_type = other DNA
atggccatgaactacaccgccaagacccggcggcccgacaacaccgcatttaagcagcagagattaccagcttggcagcctattttgacagcgggtaccgtgctgccaatattttttattattggactcatttttatccctatcgggatcggcattttcgtgacaagtaacaatatccgggagatcgagatagactataccggtacagaaccatcttccccgtgcaataaatgtctgagccctgatgtgacaccttgtttctgtactattaacttcaccctggagaaatcttttgaagggaatgtctttatgtattacggactttctaacttttaccagaaccaccgaaggtatgtgaaaagcagagatgattcccagctcaatggtgactcttccgccctcctcaatccatcaaaagagtgtgagccctaccgtaggaatgaggacaaacctatagccccatgtggggctatcgcaaatagtatgtttaacgatactctggagctgtttttgattggaaatgactcatatcctatccctattgccctcaaaaagaaaggtattgcctggtggacagacaagaatgtaaagttcaggaaccctccagggggggacaatttggaggaacggttcaagggtaccaccaagcctgtgaactggctgaagcctgtttacatgctggattctgatcctgataacaacggctttatcaacgaggacttcatcgtgtggatgagaactgccgcactgcccacatttagaaagctttatcggctcatcgaacggaaatctgaccttcaccctacactcccagccggccgttacagtttaaatgtgacttataactacccggttcactattttgacgggagaaaaagaatgatattatccaccatctcatggatgggaggcaagaatcccttcttgggcatagcttatattgccgtaggatctatctcattcttattgggcgtggtgctcttagttatcaatcacaagtatcgcaacagtagcaatacggcggacatcaccatttag

SEQ ID NO: 209433 - DNA, 1056 bp, synthetic construct
  misc_feature 1..1056: note = Description of Artificial Sequence: Synthetic coding sequence
  source 1..1056: mol_type = other DNA
atgacctggagcgccaccgcccggggcgcccaccagcccgacaacaccgccttcacccagcagaggttaccggcttggcagcccctgctcagtgcatcaatagccctgccattattcttttgtgccgggcttgcattcattggtttgggactgggcttatattacagctctaacggtattaaagaacttgagtatgactacactggagatcccgggactggcaactgctcagtttgcgccgccgccgggcaaggaagagcgcttccgcctccatgcagttgtgcctggtacttttccctcccagagctttttcaggggcccgtttacctgtattacgaactgaccaatttttatcagaacaatcggagatacggggtgagtagggatgacgcccagttaagtggactgcccagcgcactacgtcacccagtcaatgaatgtgctccttatcagcggtcagccgcagggctccctatagccccttgcggagcaattgctaactcactgttcaatgactcattctcactgtggcaccagcggcagccaggagggccctatgtggaggtgccactggacagatcagggatcgcttggtggaccgactatcatgtaaaattccgaaacccccccttggtcaatgggtctctggctctcgccttccagggcaccgcacctcctcctaattggaggagaccggtctatgagctgtccccagatcctaataacaccggctttattaatcaggatttcgtggtgtggatgagaaccgctgcgctgccaaccttccgaaagctctacgcacgcatccggcagggaaattactccgccggcctaccccgcggtgcataccgtgtaaacatcacttacaactacccagtacgagccttcggcgggcacaagctgctgattttttcttcaatatcttggatgggtgggaagaatccattccttggaattgcatatttggtggtgggatccttatgtatactgactggattcgtcatgctggtagtgtacatacgctatcaggaccaggatgatgacgacgaggaatag

SEQ ID NO: 209434 - DNA, 1056 bp, synthetic construct
  misc_feature 1..1056: note = Description of Artificial Sequence: Synthetic coding sequence
  source 1..1056: mol_type = other DNA
atgacctggagcgccaccgcccggggcgcccaccagcccgacaacacagcttttacgcagcagagactgccggcctggcagccactgttgtctgcatcaattgcgctcccccttttcttctgcgccggcctggcctttatcggcttgggccttggcctttattacagcagcaacggtattaaggaattggagtatgactacactggggacccgggcaccggtaattgttccgtctgcgccgccgccgggcagggacgggcactccctcccccgtgctcctgtgcatggtacttcagcctgcccgaactattccaggggccagtttatttatattatgaactgaccaacttctaccagaataataggagatatggtgtctcacgagacgacgcccagttgtcaggcttgcccagcgccttgcgccaccccgtcaacgagtgtgccccctatcaacgaagcgcagcagggcttcccatcgccccatgtggcgctatagcaaactctctctttaatgacagtttctcactgtggcaccagcggcagcctggcggaccatacgtggaggttcccctggatcgcagcggcattgcttggtggacagattaccacgtgaagttccgcaaccctccactggtgaacgggtcattggctttggcttttcagggtaccgccccaccaccaaattggcgaaggccagtctacgagctctctccagacccgaacaacacgggcttcatcaatcaggattttgtggtgtggatgagaaccgcagctctcccaacatttaggaaattgtatgcccgcatcaggcagggaaactactctgctggtctcccccggggggcctatcgcgttaatataacatacaactatcctgtcagagccttcggtggacataagttattgatcttttctagcatcagctggatgggcggcaagaacccattcctgggcattgcctatttagttgtgggctccctgtgtatcctgactgggttcgtgatgctagtggtgtatatccgctaccaagatcaggacgatgatgacgaagagtag

SEQ ID NO: 209435 - DNA, 342 bp, synthetic construct
  misc_feature 1..342: note = Description of Artificial Sequence: Synthetic coding sequence
  source 1..342: mol_type = other DNA
atggaggagcgggcccagcactgcctgagccggctgctggacaacagcgctttgaagcaacaagaactgccgatacatcggttatacttcaccgctcgcagggtcctcttcgtcttcttcgccactggtatcttttgtttatgtatgggcattatactcatcctgagcgccaggagcacccaagagatcgagatcaactacacccggatctgcgcgaattgtgcgaaactgcgggaaaatgcctcaaattttgacaaggaatgcacctgttccatccccttttacctgagcggtaagatgatggtgggagagattcaagaaacgagacttaccctgcactag

SEQ ID NO: 209436 - DNA, 207 bp, synthetic construct
  misc_feature 1..207: note = Description of Artificial Sequence: Synthetic coding sequence
  source 1..207: mol_type = other DNA
tgactgtgcatgggcatcatcctgatcctgagcgcccggagcacccaagagattgagatcaactacacaagaatttgcgccaattgcgctaagctgcgggaaaacgcgtcaaacttcgataaggaatgtacttgctccatacctttctacttaagtggtaaaatgatggttggagagatccaggaaacccgcctaaccctgcactag

SEQ ID NO: 209437 - DNA, 1203 bp, synthetic construct
  misc_feature 1..1203: note = Description of Artificial Sequence: Synthetic coding sequence
  source 1..1203: mol_type = other DNA
atggccgccaactacagcagcaccagcacccggcgggagcacgtgaaggtcaagacctcttcacagccaggatttctggagcggctgagcgagacatcaggcggcatgtttgtgggtttgatggcctttttattgtcattttatttgattttcacaaatgaagggcgcgctctgaagacagcaacatcgctagccgaaggcctgagcttagtggtgtcacctgattctattcactccgtggctccagaaaatgaggggaggttagtgcatatcatcggggccctacggacatctaagctcctctcggatcctaactatggcgtacatttacctgcagtgaagctaagacgccacgtggaaatgtatcaatgggtggagacggaagagtctcgggagtatacagaagatggacaggttaaaaaggagacacgttattcctataacaccgaatggaggagcgaaatcatcaacagtaaaaactttgatagggaaataggtcacaaaaatcctagcgccatggcggtggaaagctttatggccaccgcgccatttgtgcagatagggagattctttctcagcagtgggttaatcgataaggtagacaactttaaaagcctgagcttgtcaaagctcgaagacccccacgtggacatcatccgacgcggtgactttttttaccattcagagaaccccaagtaccccgaggtcggggatcttcgggtgtccttttcatacgccggcctgagtggcgacgacccagacttgggacctgcccacgttgtcaccgtaatcgcccgtcagcggggagaccagctggtacctttcagtaccaagagtggtgatactctgttgttattacatcacggtgacttctccgctgaggaggtgttccacagagaattgcggagtaactccatgaagacttggggcctgcgcgctgccgggtggatggccatgtttatgggactgaatctcatgacacgtattctgtatacccttgtagactggttccccgtttttcgggacctggtgaatatagggctcaaggccttcgccttctgcgtcgcgacttcgctgactttactgactgtggccgctgggtggctgttttaccgccctctctgggccctactcatcgccgggctggctctagtgcccattctcgtagcaagaactcgagtacctgcgaagaaactcgagtag

SEQ ID NO: 209438 - DNA, 546 bp, synthetic construct
  misc_feature 1..546: note = Description of Artificial Sequence: Synthetic coding sequence
  source 1..546: mol_type = other DNA
atggccagcgccggcagcggcatggaggaggtgcgggtgagcgtgctgacgccccttaagctcgttggactcgtgtgtattttcttagccctgtgcttagacttgggcgccgtgctttcaccggcttgggttacagctgatcaccagtattatctgtctctttgggaaagctgtcgtaaacccgcctccttggatatatggcactgcgagagcacactctcttctgactggcagatcgctactttggcactgctgctcggcggagctgctatcatacttattgccttccttgtgggtcttatatctatttgcgtgggatccaggaggagattctatagacccgtagccgtgatgctcttcgccgcggttgttttacaggtgtgcagtctagtattgtacccaatcaagtttattgagacagtctcattgaagatctaccatgaatttaattggggttacgggctggcctggggagccacgatttttagctttggaggggccatcttgtattgtttgaaccctaagaactatgaggattactattag

SEQ ID NO: 209439 - DNA, 2745 bp, synthetic construct
  misc_feature 1..2745: note = Description of Artificial Sequence: Synthetic coding sequence
  source 1..2745: mol_type = other DNA
atgggccccttcaagagcagcgtgttcatcctgatcctgcacctgctggaaggagcattgtcaaatagcctaatacaacttaacaataatggatacgagggaatcgtagtagcaatcgatcctaacgttcctgaagatgagactctaatccagcaaattaaagacatggtaacacaggcctccctctaccttctcgaggcgacaggaaaaaggttttactttaagaatgtggctattctgattccggagacctggaagactaaggcggattatgtgaggccaaagctcgaaacttacaagaacgccgacgtactggtcgcagaatcaactccaccaggcaacgacgagccgtacacggaacagatgggtaattgtggtgagaagggagagagaattcacctgactcccgacttcatcgctggaaaaaaattagccgagtacggcccacaggggcgggctttcgtgcacgaatgggcccaccttaggtggggtgtctttgacgagtataataacgatgaaaagttctacctcagcaacgggcgcattcaggccgttcggtgctccgctggcattaccggtacgaatgttgtgaagaaatgtcagggagggtcttgttacaccaagcggtgtacatttaacaaagtgacaggactgtatgagaaggggtgcgagtttgttctccagtcccgccagactgagaaagcttctatcatgtttgcccagcacgtggactctatagtggagttctgtacagaacagaaccataataaggaagcgcctaacaagcagaatcagaaatgtaatcttaggtcaacatgggaagttatccgtgatagtgaagactttaaaaagaccacgcctatgaccacccagccacccaatccaacattcagcctgctgcaaatagggcagcgaatcgtatgtttagtcctggataaaagtggatctatggctacgggtaatagactgaatcgtctgaatcaggcaggccagctcttccttctgcaaaccgtggagctcggttcatgggtggggatggtcacctttgactctgccgcgcatgtgcagaacgagctgattcagatcaacagtggatcagacagagataccctggctaaaagattacctgcagccgccagcggcggtacctccatttgctcaggcttgagaagcgcgttcacagtcataagaaaaaagtatcccaccgacggatccgagatcgtcctgcttacagacggcgaggacaatacaatatctggatgcttcaacgaggtgaaacagagtggggcgattatccacacagtggcacttggacccagcgcagcccaggagctagaggagctgagtaagatgacaggcggactgcagacctatgcatccgaccaggtacagaataacggactcattgatgcatttggggctctgagctccgggaacggggccgttagccagaggagcatccagctcgagagcaaaggattgaccctgcagaattcacaatggatgaatggtacagtcatcgtcgatagcaccgtgggcaaggatacactatttcttatcacctggacaatgcagcccccccaaatcttgctttgggacccaagtggacagaagcagggaggtttcgtggtcgacaaaaataccaagatggcgtatctacagatcccgggcatcgcgaaggttgggacctggaaatattctctccaagcctcttctcaaacgctgacactgacagttacatcaagggcctctaatgccacactaccaccaattactgtgacgagtaaaacaaacaaggatacttcaaaatttccctctcccctggttgtttacgccaacattagacagggcgcctctcctatccttagggcttctgtcaccgcactgatagagtcagtgaacgggaaaacagttaccctggaattactggacaatggtgccggggccgacgcgaccaaagacgatggcgtgtactcccgatatttcacaacatacgacacaaacggaaggtacagtgttaaagttcgagctcttggcggcgtaaatgcagctcggaggcgggtaatcccccagcaatctggggctctttatattcccggctggattgaaaacgacgagattcagtggaacccaccgcggccggaaattaataaggatgatgtacagcataaacaggtctgcttcagccggacgtcttctggcggatcatttgtggcatcggatgtcccaaacgctcccatccccgacttgttcccccctggccaaattacggacctgaaggccgagattcacggcggctcactgataaacctgacttggacggctcccggggatgattatgatcatggcaccgcacacaaatacatcatcaggatttctacctccattctggatttgcgcgataagtttaatgagtctcttcaagtcaataccaccgctttaattccaaaagaggccaactccgaggaggtgttcttgttcaaacctgagaacatcacgtttgaaaacgggactgacctgttcatagcaattcaagctgtagataaggtggatctgaaatccgagatctctaatatcgcccgggtgtctctctttatccctccgcagaccccacccgagactccgtcaccagatgagacgtcagctccttgcccaaacatccacataaatagcactatcccaggcattcacatactgaaaattatgtggaaatggattggtgaactgcagctgtcaattgcctag

SEQ ID NO: 209440 - DNA, 1674 bp, synthetic construct
  misc_feature 1..1674: note = Description of Artificial Sequence: Synthetic coding sequence
  source 1..1674: mol_type = other DNA
atggccaccgccgtgagccggccctgcgccggccggagccgggacatattatggagggtgcttggctggagaatagttgcctcgatcgtttggagcgtgctgtttctccccatctgtaccaccgttttcattatcttttcacgtatcgatttattccatccaattcagtggttaagcgactcattttctgatttgtactcgagctacgtcatcttctacttcttactgttatctgtggttataattatcatctccatttttaacgtggagttctatgcagtggtcccttccatcccttgctcccgtctcgccctgattggaaaaatcattcacccccagcagctcatgcactccttcatacatgctgctatggggatggttatggcttggtgcgcggccgtgattactcaaggacagtactcgttcctggtggtgccatgtactggaaccaactctttcgggtcacccgcagcacaaacatgtctgaacgagtaccacctgtttttcctcttaacgggggcgttcatgggatattcctactccctcctgtactttgtgaataacatgaactatttaccgttccctatcatccagcaatacaagttcctccgttttaggaggagccttctgctgctcgtgaagcactcttgtgttgagtcccttttcctggtgcgtaacttctgcattctgtactattttttgggatatattccaaaggcgtggatctccacagctatgaatctccacatagacgaacaggtgcatagaccacttgacactgtgtctggcctgctaaacctgtctctgctgtatcatgtttggttatgcggggtgtttcttcttaccacctggtatgtttcctggattctgtttaagatttacgctaccgaggcgcatgtcttccctgtgcaacctcctttcgctgagggttctgatgaatgcctcccgaaagtcctgaactcaaacccaccacctattattaagtatctggccctccaggacctcatgcttctttcccagtatagcccatccagacggcaagaggtatttagtctgtcccagcctggcggccatccacacaattggactgccatttcaagagaatgccttaatttgctgaacgaaatgactgaattttctaacccttctcccagcacctccatcagtgccgaaggcaagactatgcgacagccatcagttatctatagctggatccagaacaagcgagagcagataaagaatttcttaagtaaacgggtgcttatcatgtactttttcagtaaacacccagaggcaagcatccaagctgtgttcagtgatgcccaaatgcacatatgggccttggagggcttgagccacctggtggccgcctcgtttaccgaggacaggttcggcgtcgtgcaaacaacacttccagccatcttgaatacactcttgactctacaggaggccgtcgataaatactttaaattgccacatgcctcatccaaacctccacgtattagcggaagtttggtggataccagctataaaacattgcgattcgccttcagggcatcattgaagaccgctatatataggatcactactacgtttggggaacacctgaacgccgtacaggcttcagctgagcatcagaaacgactccagcaatttctcgagttcaaggagtag

SEQ ID NO: 209441 - DNA, 2025 bp, synthetic construct
  misc_feature 1..2025: note = Description of Artificial Sequence: Synthetic coding sequence
  source 1..2025: mol_type = other DNA
atggccaccgccgtgagccggccctgcgccggccggagccgggacattctgtggcgggtgctgggttggaggatcgtggcctccattgtttggtccgtgttgtttctgcccatctgcactacagttttcatcatcttttccagaattgacctctttcaccctatccaatggttaagcgattcattttccgatctctactcctcctatgtgatcttttactttctgctactcagtgtggttattataatcattagtatcttcaacgtagagttctatgctgtcgtccctagtatcccctgcagcaggctggcgttgattggaaaaatcatccacccccagcagctgatgcatagctttatccacgctgctatggggatggtgatggcttggtgtgctgctgtcatcacacagggacagtacagcttcttggtggttccctgcacgggcacaaactcttttggctcacccgccgcccaaacctgtctgaatgagtaccaccttttcttcctcctgaccggagcttttatgggatattcttactcattactctacttcgtcaataatatgaattacctcccttttcccattatacagcagtataaattcctgcgctttaggagatctctcctgttgctggtcaaacatagctgcgtggaatccctgttcctggtccggaacttttgcatcctctactactttctcggatacatacctaaagcttggattagcacagccatgaatttgcacattgatgagcaagttcaccgcccactggataccgtttccgggctgttgaacttgagccttctgtaccacgtgtggctgtgtggggtttttcttctgactacctggtatgtgtcatggattctcttcaagatttatgctaccgaggctcacgtgttccctgtacaacctccattcgccgagggttcagacgagtgtttgccgaaagtgctgaactccaatcctcccccaattattaagtatctcgcattgcaggatcttatgcttctttctcagtatagtccaagtagaagacaagaagtattcagcttgtctcagcccggcggacatccccacaattggactgccattagtagagaatgcttgaatctgttaaatgggatgacccaaaagttaattctatatcaggaggctgccgcaaccaatggtagagtgagcagttcttatcctgttgagccaaaaaagttaaattctccagaggagactgcatttcagacccccaaatcctcccagatgccaaggcctagtgttcctcccctcgtgaagacctcactgttttcttctaaactttctacccctgacgtggtgagtcccttcggaacaccctttggatcctccgtgatgaacaggatggccggtatattcgatgttaacacatgttatggttcaccacagagtcctcaattgatccgcagaggcccaagactctggacctctgcttccgaccaacagatgactgagttctctaatccatctccaagcacatctatcagtgctgagggcaaaactatgagacaaccgagtgttatctatagctggattcagaataagcgggagcaaatcaagaattttttatccaaacgggtcctcatcatgtacttcttttctaaacatcctgaagcgtcaattcaggccgtgttctccgacgctcagatgcacatatgggccctggaaggcctctcacaccttgtcgcagcatccttcacagaggatcggtttggtgtggtgcagaccaccctgcccgcgatactcaatactctgcttacgctccaggaggccgtggataagtacttcaagctgcctcacgcaagtagtaagcccccaagaatttccggctccttggtggatacaagctacaaaactctgcgctttgcctttcgggcctccttgaaaacagcaatctaccgcatcaccaccacgtttggggagcaccttaacgctgttcaggcgtctgccgaacaccagaagcgcctacagcaatttttggaatttaaggagtag

SEQ ID NO: 209442 - DNA, 1020 bp, synthetic construct
  misc_feature 1..1020: note = Description of Artificial Sequence: Synthetic coding sequence
  source 1..1020: mol_type = other DNA
atgctgctgagccagtacagccccagccggcggcaggaggtgttctccctctcccagccagggggccacccacataactggaccgcaatcagtagggaatgcctcaatcttctaaatggtatgactcagaagctgatcctctaccaagaggctgctgcgactaacggtcgtgtgtcatcgtcttacccagtggaaccgaaaaaattgaacagccctgaggagactgccttccagacccccaaatcatcacagatgcccagaccttctgtgcccccactggtgaagacctcgctgttcagcagtaaactttctaccccagacgtggtaagtccgttcggaactcccttcggctctagtgtgatgaaccgtatggctggtatcttcgatgttaatacatgttacggttcgccacagtctccacaactgatccggcggggcccccggctgtggacttctgcgtccgaccagcagatgacagagttctcaaatccgtccccttccacatcaatctccgctgagggcaaaaccatgagacagccttctgtgatctattcctggatccagaacaagcgagagcagatcaaaaacttcttgagcaagcgggtcctaatcatgtacttttttagtaaacatccagaagcatccatccaggccgtgtttagcgacgcgcagatgcatatttgggcgctcgaaggcctgtcccatctagtggccgcttcatttacggaggaccgcttcggcgtggtgcagaccaccttgccagctattctcaacacactgctcacgctccaggaggctgtggacaaatactttaagttgccccacgcaagcagtaaaccaccccgaatatctggttccctggttgacacatcttataagactctgagattcgcatttagggcttcactgaagactgcaatataccgtatcaccacaacattcggggaacatctgaatgctgtgcaggcgagcgcagagcaccaaaaaagactacagcaatttctggagttcaaagaatag

SEQ ID NO: 209443 - DNA, 1629 bp, synthetic construct
  misc_feature 1..1629: note = Description of Artificial Sequence: Synthetic coding sequence
  source 1..1629: mol_type = other DNA
atggccaccgccgtgagccggccctgcgccggccggagccgggacatcttatggagagtactaggttggagaattgtcgcaagcattgtttggtcagtgctgttcctgccaatctgtacaacggtgtttatcatcttctctcgaattgacctcttccaccctatccaatggctcagcgatagtttctctgacctctatagcagctatgtgatattttatttccttttactgtccgtagtcatcattatcattagtatctttaacgtggagttttatgctgtggtcccgtccatcccgtgttcacgtctcgctctcatcgggaaaatcattcacccacagcaactgatgcacagttttatccacgctgccatggggatggtcatggcctggtgcgccgctgtgattactcagggacagtactcatttctggtcgtaccatgcaccggaactaacagcttcggcagcccagccgcccagacgtgcctcaacgagtatcatctctttttcctgctgaccggcgcatttatgggctactcctatagccttctgtacttcgtgaataatatgaactatctccctttcccaattatccagcagtataaattcttgagattccgtcggtcactgctcctgctggtgaagcattcctgcgtggagtctttattcttagttcggaatttctgtattctatattactttttgggttacatccccaaggcatggatcagcaccgcgatgaatctgcacatcgacgagcaggtgcaccgccccctggacaccgtgagcgggctgctgaatttatcattgctgtaccacgtttggctttgcggggttttcctgctcacaacatggtatgtgtcatggattcttttcaaaatctatgctacagaagcccacgtattcccagtgcaaccaccctttgcagaaggcagtgacgaatgcctccccaaagtcctaaactccaatccgccccctattattaaatatctcgctctgcaggaccttatgttgctgtcccaatactcccctagtcggcggcaggaggttttttccttgagccaaccaggcggacacccacataattggactgccatttcgagggaatgcctcaatctgctcaacggcatgacccaaaagcttatcctgtatcaggaggcagcggcgacaaacggtcgcgtgagctcctcatatcctgtggaacccaagaaattgaacagcccggaggagaccgctttccagaccccaaagtcttctcagatgcctagacccagtgtaccacccctcgttaagacctctctttttagttccaagttaagtactcctgacgtcgtctctccatttggaacacctttcggcagtagcgtcatgaatcggatggcgggcatattcgatgtcaacacttgctatggctcaccccagtctccacagctcatccgcagaggtcccagactttggacctccgcatcagaccagcaaatgacagagttctcaaatccaagtccatccacttcaataagtgcagaggccccacgcggccttcactcgggatgcttctttagatgtccaaacgcgtacctggggataaggcgctccgtggcactatcctcctctatcatatataggggatag

SEQ ID NO: 209444 - DNA, 1332 bp, synthetic construct
  misc_feature 1..1332: note = Description of Artificial Sequence: Synthetic coding sequence
  source 1..1332: mol_type = other DNA
atgcggctgacccggaagcggctgtgcagcttcctgatcgccctgtattgccttttttcgctctacgctgcctatcacgtctttttcgggcgccgtcgacaggcgccggcaggctcaccccgcggtctgcggaagggtgcagccccggcccgcgaacgcagaggaagggaacagtcgacgctggaatcggaggaatggaatccgtgggaaggggatgagaaaaatgagcagcagcatcgctttaaaacatcgctgcagatactggacaaatctacaaagggcaagactgacctgagcgtccagatctggggaaaagctgccataggcctgtatctgtgggagcatatcttcgaaggattgctggatccttccgatgtgactgcccagtggcgggagggaaagagcatcgtgggccgcacgcagtatagctttatcaccggcccggctgtgatcccggggtattttagcgtagacgtgaataatgtcgtgcttatcctcaacggccgagagaaagctaaaatattttatgctacacagtggctactgtacgcccaaaacttagttcaaatacaaaagctacagcaccttgccgtggtcttgctgggtaacgaacactgcgacaacgaatggataaacccctttttgaagcgcaacggcggattcgtggagctcctgttcatcatttacgacagtccctggataaatgacgtggatgtcttccagtggcctctgggcgtcgccacatatcgtaatttccccgtggtggaagcgagttggtcaatgctccatgacgaaaggccctatctctgtaatttcctgggaaccatttacgagaattcatctaggcaggccctgatgaatattttgaaaaaggacggtaacgataagctgtgctgggtttctgcaagagaacattggcaaccacaggaaactaacgagagcctgaaaaattaccaggatgctcttcttcagagcgacctgaccctgtgccctgtaggtgtgaacaccgagtgttaccgtatctatgaagcatgcagttacgggtctatccccgtggttgaggacgtcatgacagctgggaactgcggaaataccagtgtgcatcatggtgcgccgttacaactgctgaagtccatgggcgccccatttatcttcattaagaattggaaggagctgcctgccgtcctggaaaaggaaaaaaccataattctccaggaaaagatagaacgccgtaaaatgctgttacaatggtaccaacacttcaagacagaactgaagatgaaatttactaacattttagaatcaagcttcttgatgaataacaagtcttag

SEQ ID NO: 209445 - DNA, 774 bp, synthetic construct
  misc_feature 1..774: note = Description of Artificial Sequence: Synthetic coding sequence
  source 1..774: mol_type = other DNA
atggccgccgacggcgtggacgagcggagccccctgctgagcgccagtcattccggcaatgtgactccaaccgctccaccatacctccaggagtcctctccaagggccgagctcccccccccgtataccgccatcgcgagccccgatgcttccggcatacccgtgataaactgtagggtctgtcagtctcttattaacttggatgggaaactgcaccagcatgtggtaaaatgcactgtgtgtaacgaggccacccctattaagaaccctccaactggcaagaagtatgttcgttgcccatgcaattgtctcctcatttgcaaagatacctctcgcagaatcggctgcccccggcccaattgtaggcggattattaatctcggtcccgtaatgctgatctctgaagagcagcctgctcagccagccctgccaattcaacccgaggggacaagggttgtttgcgggcattgcggaaataccttcctgtggatggaactgcgttttaacaccctggccaagtgcccgcattgtaaaaagatcagcagtgtcggttctgcgttgcctcgccgcaggtgttgtgcatacattacaataggcatgatatgtatcttcattggggtgggactaactgtcggaactccagatttcgccaggcgttttcgggcaacgtacgtgtcatgggctattgcttacctcctgggcttaatttgtcttatacgcgcatgttattggggggccattagagtcagctatcctgaacactctttcgcatag

SEQ ID NO: 209446 - DNA, 2745 bp, synthetic construct
  misc_feature 1..2745: note = Description of Artificial Sequence: Synthetic coding sequence
  source 1..2745: mol_type = other DNA
atgagcctgagccactggccctacttccggctggtgctgaacttccgcccacaagtgatctgccttccacagcctccaaaagtgctcggataccgcctggaacccccacatctcactctcgcctgcacactcgaagggatgtacaacattatcgaggaaattctggagagagatatcaacgggacactgctcagccaggcgacctgcgaactctgcgatggcaacgagaactcattcatggtcgttaacgccttaggcgaccggtgcgtgcgatgcgagcctacttttgtcaatacatcccgttcgtgtgcttgctccgagcctaatatccttactgggggactttgcttttcaagcaccggcaacttccctttgagaagaatctcggctgctcgatacggggaagtggggatgtccctgacgagtgaatggtttgcaaagtacttgcagagctccgccgccgcctgttgggtgtacgctaacctcacgagctgtcaggccctaggcaatatgtgtgttatgaatatgaacagctatgactttgctaccttcgatgcctgtgggctgttccagtttatcttcgagaataccgccgggctttcaactgtgcacagcatttcattctggagacaaaatctgccatggctgttctacggcgatcagctggggttagcaccccaggtactttcctctaccagtctacctacaaacttttctttcaaaggagaaaatcagaataccaagctgaagtttgtggctgcctcctatgatatccgaggaaatttcttaaaatggcagaccttggagggcggagtgctccagctgtgtcctgataccgaaacccgccttaatgctgcttactccttcggcaccacataccagcaaaactgcgagattccaatctccaagattctgattgactttcccaccccaattttttatgacgtgtacctggagtacaccgacgaaaatcagcaccaatatatcctggccgtgcctgtgctgaacctgaaccttcagcacaataagatcttcgtaaatcaggattcaaatagcggtaagtggttactcacaagaaggatctttcttgtcgatgccgtaagtgggcgagaaaatgatctgggaacacagccgagggttattagggtagccacacaaatcagcctgtcggtccacttggtaccaaatactatcaatgggaacatctatccacccctcattaccatcgcctactccgacatcgatattaaggacgccaactcccagagcgtgaaggttagcttctccgtaacatatgaaatggaccacggagaagcccacgttcagacagatattgccctgggtgtgctcggcggacttgccgtgcttgcatcattgctgaaaacagctggctggaaacgtcgcattggaagcccaatgatcgatctgcaaactgtggtgaaatttttagtatactatgcaggagatctggccaatgtattctttatcattaccgtgggtacagggctctactggctcattttttttaaggcccagaagagtgtgagtgtgctgctccctatgccaatacaggaggaaagattcgtgacatatgtagggtgtgcctttgcactcaaagccctgcagtttctgcacaaacttatttcccagattactattgatgtattctttattgattgggagcgccccaagggaaaagtgctgaaagcagtggaaggtgaggggggtgttcggagcgccaccgtgccagtttccatctggcgtacctactttgttgccaacgagtggaacgagatacaaaccgtacgaaaaatcaattccctcttccaggtcctgaccgttctgtttttcctggaggtggtcgggtttaagaacctggcattaatggatagtagcagctccctgtccaggaacccacctagctatatagcaccgtattcatgcatcctccggtacgctgtcagcgctgccctttggctggcgatcgggatcattcaagttgtattctttgcggtattctatgaacggttcattgaagacaaaattcgccaattcgtggacctgtgctccatgagcaatatctcagtgtttcttctatctcacaagtgtttcggatattatatacacggacgtagtgtccacggacacgcagataccaatatggaggagatgaacatgaacctgaagcgagaggccgagaatctttgttctcagagaggactggtgccaaacacagacgggcaaacgtttgagatcgcaatatctaatcagatgcggcagcattacgatcgaatccatgaaacactaattcgtaaaaacgggcccgctaggctgctttccagttccgcatccacattcgagcagagcattaaggcctatcacatgatgaacaagttcctgggtagtttcatcgaccacgtgcacaaggaaatggattacttcatcaaggataaactattactcgagcgcatcttgggaatggagttcatggagccaatggagaaatctattttttataatgacgagggctattccttctcgtccgtgctgtattacggtaacgaggccaccttgttaattttcgacctgcttttcttttgcgtcgtggatttggcttgccagaatttcatcttggccagcttcttgacttacctacaacaagagatatttcgttatatccgtaacaccgttggacagaagaatctggccagtaaaaccctggtggaccagcgtttcctgatttag

SEQ ID NO: 209447 - DNA, 2988 bp, synthetic construct
  misc_feature 1..2988: note = Description of Artificial Sequence: Synthetic coding sequence
  source 1..2988: mol_type = other DNA
atggccacccggggcggcgccggcgtggccatggccgtgtggagcctcttatcggctagggctgtaaccgctttcctcctgctctttctgccgcgctttttgcaggctcagaccttctcttttccctttcaacagcccgaaaagtgtgacaacaatcagtatttcgacatctcagccctcagctgcgtcccctgcggggctaatcagcgccaagacgcacgggggactagttgtgtatgtcttccaggattccagatgatatccaataacggtggacctgctattatatgtaaaaaatgtccagagaatatgaaaggagttaccgaggacgggtggaactgcatctcctgcccatccgatcttactgctgaagggaaatgccactgtcccatcgggcacatccttgtggaacgagacattaatgggacactcctttcccaggccacatgtgaactgtgtgacggcaacgaaaattccttcatggtcgtgaatgccctgggcgacagatgcgtcaggtgtgaaccaaccttcgtcaatacctcccgcagctgcgcgtgtagcgaacctaacatcctgaccggtggcctgtgctttagcagcaccgggaactttccactgagaagaatttctgccgcaaggtacggggaagtgggcatgtccttgacatccgagtggttcgctaagtaccttcagtccagcgccgctgcttgctgggtctacgctaacctcacctcctgtcaagcgctggggaacatgtgcgtgatgaatatgaatagttacgactttgctacatttgatgcgtgtggcctattccaatttatattcgagaacaccgccggtctcagcactgtgcattccatttccttctggcggcagaacctgccatggctcttctacggagaccagttgggtctcgcaccgcaagtactgtcctctacaagcctccctaccaattttagcttcaaaggagaaaaccagaacactaagctaaagttcgttgctgcatcctatgatataagagggaattttctgaagtggcagaccctggagggaggtgtcctgcagctatgcccggataccgaaacccgcctgaacgcagcctattcatttggaactacctaccagcagaactgtgagatccctatttccaaaattctcattgattttcctactccaatcttttacgatgtttacctggaatacaccgacgagaaccagcaccagtacatcttggccgtccctgtgttgaatttgaaccttcagcataataagatcttcgtgaaccaagatagcaattctggaaagtggctgcttaccagaagaatttttttggtcgacgcggtgtccggccgtgagaacgatctcggtacccagcccagggtgatccgggtcgccacgcagatcagcctcagcgtacacctcgtgcccaatacgatcaatgggaacatttatccacccctcatcactatagcatactcggatattgatattaaagatgccaactcccagtccgtcaaggtttctttttccgtcacctacgagatggaccatggagaggcacacgttcagacagacattgccctcggcgttctcggcggcctggcagtcctggcctccctgctaaaaaccgcgggttggaagcgccgtattggttctcccatgatcgatctgcagaccgtagtcaagtttctcgtgtactatgccggtgatcttgctaatgtgtttttcatcatcaccgttgggactgggttatactggctgatattttttaaggcccagaaaagcgtaagtgtgttgctgccaatgcctattcaggaggagagatttgtaacctacgttggatgtgcatttgcactcaaggctctgcaattcctgcataagcttatctcacagataacaattgacgtcttctttatcgactgggaaagacctaaggggaaagtcttgaaagccgtggaaggtgaaggtggtgtgcggtcagcaacggtgccagtgtcgatctggaggacatacttcgtggccaacgagtggaacgaaatccagactgtccggaagataaactctttgtttcaggtgctgaccgttctttttttcctggaggtagtcggatttaagaatttggccctgatggatagctcttcgtcactgtctagaaacccgccttcctacattgccccgtatagctgcattttgagatacgctgtgagtgcggccttgtggttagcgatcggcatcatccaggtagtcttcttcgccgtgttctacgagcgatttatagaagataagattaggcagttcgtggacctatgttctatgtccaatataagtgtttttctactgtctcacaagtgcttcggctactacattcacggacgtagtgtgcacggtcacgcagatacgaatatggaagagatgaacatgaatctgaagagggaggccgagaacctgtgttcccagagagggttggtccctaacaccgatggacagacattcgagatcgctatctcgaaccaaatgcggcaacactatgataggatccacgagactttaatccggaagaatggccccgctcgtttgctgtcgagctctgcatccacttttgagcagagcattaaagcctatcatatgatgaataagttcctcgggtccttcattgatcacgtgcacaaagaaatggactatttcatcaaggataagctgctgctcgaacggatccttggcatggagttcatggagccgatggaaaagagtattttctataacgatgaggggtactccttcagctcagtcctttattacggtaacgaggccacattgctgatatttgatctgttatttttttgcgtggtagacctggcctgtcagaactttattttagcttccttcctgacctatttgcagcaagaaatcttccgctacattaggaacacagtgggtcagaaaaatctcgcctccaagaccctggtcgatcagcgctttttgatttag

SEQ ID NO: 209448 - DNA, 783 bp, synthetic construct
  misc_feature 1..783: note = Description of Artificial Sequence: Synthetic coding sequence
  source 1..783: mol_type = other DNA
atgctgttcctggccctgggcagcccctgggccgtggagctgcccctgtgcgggaggagaacagccctgtgcgcggccgcagcactgcgcggccccagagcctccgtctcgagagcgagctcctcgtctggacctagtggccctgtagccggatggtctacagggccttcgggtgccgctcgtttgctacgacggcctgggagggctcagatcccagtctattgggagggatatgtgagattcctcaataccccgtcggacaagtccgaagatggacgattaatatataccggaaacatggcaagagctgtgttcggtgtaaaatgtttctcatacagtacctctttgatcggactcactttcctcccctatatatttactcagaacaatgccatctctgagtccgtgcctctccccatccagataatcttctacggcatcatgggatcgttcaccgtgatcacacctgtgcttttgcacttcatcacaaaggggtatgttatacggttgtatcatgaggcaacgacagatacatacaaggccattacctacaatgctatgttggccgaaacctcaaccgtcttccatcagaacgatgtcaagataccagacgccaagcacgtctttactacgttctatgccaagacgaagagtctgcttgtgaaccccgtcttgttccccaacagagaagattacatccacctgatgggatacgacaaagaggaatttatcctttatatggaagaaactagcgaagagaaacggcacaaggacgacaagtag

SEQ ID NO: 209449 - DNA, 324 bp, synthetic construct
  misc_feature 1..324: note = Description of Artificial Sequence: Synthetic coding sequence
  source 1..324: mol_type = other DNA
atgctgttcctggccctgggcagcccctgggccgtggagctgcccctgtgtggcagaaggaccgctttgtgcgccgcagccgccctgcggggccctagagcctctgtcagtagggccagctcaagcagtgggccctcaggacctgtggccggatggtccaccggcccttccggcgctgcacgcctgttacgccgtcctggcagagcacagatcccggtgtattgggaaggctatgtgagatttcttaacacaccatcggataaatccgaagacggcaggttgatctacaccggcaacatggctagggcggtcttcggaaaatag

SEQ ID NO: 209450 - DNA, 918 bp, synthetic construct
  misc_feature 1..918: note = Description of Artificial Sequence: Synthetic coding sequence
  source 1..918: mol_type = other DNA
atggagctgcactacctggccaagaagagcaaccaggccgacctgtgcgacgcgcgggactggagctcccgcggacttcccggagatcaggccgatacggcagccactcgcgctgctctttgttgccagaaacagtgtgcatcgactccccgtgctacagagatggagggatctaagctttcttcctcaccagcctcaccttcatctagtctacaaaactctacgttacaacctgatgccttcccacctggcctgttacactccggtaacaaccagattaccgccgagagaaaggtctgcaattgttgttcccaagagctggagaccagtttcacatacgttgataagaatatcaatctcgagcaacgtaataggtcctccccctcagctaagggacacaatcatcccggagagctaggctgggaaaaccccaatgaatggagccaagaagcggcgatttctctgataagcgaggaggaagacgacacgtctagcgaagccacttcatctgggaaaagcatcgattacgggtttattagtgcaattctgttcttggtcaccgggatccttctcgtcatcattagctacattgttccacgggaggtgactgtcgatccaaacactgtggccgcccgggagatggaaaggcttgagaaagaaagtgcgaggttaggcgcccatctggataggtgcgtcatagccggtttgtgtctgctgacgctgggtggcgtcattctgtcctgccttttaatgatgtcaatgtggaaaggagaactgtatagaaggaatcgcttcgcttcaagtaaagagagcgccaaactgtatggaagctttaatttcaggatgaagacctctacaaacgaaaatacactggagctctctctggtcgaggaggatgcactggccgttcaaagctag

SEQ ID NO: 209451 - DNA, 951 bp, synthetic construct
  misc_feature 1..951: note = Description of Artificial Sequence: Synthetic coding sequence
  source 1..951: mol_type = other DNA
atgagcggcgacacctgcctgtgccccgccagcggcgccaagcccaagctaagcggtttcaaaggggggggtctgggcaacaaatatgtccagctgaatgtgggcggatcactgtactacacaactgtgagagctctgacgcgccacgacacaatgctaaaagcaatgtttagcgggagaatggaagtgctcaccgataaggaaggttggattctcatagaccggtgcggcaaacacttcgggacaattctgaattacttgcgggacgataccataactctccctcagaatcgacaggagattaaagaactgatggctgaggctaaatattacctgatacagggcctggtgaatatgtgccagagcgcgctgcaagacaagaaggactcgtaccagcccgtctgcaatattcctatcattactagtctgaaagaggaagagcggttaattgaaagctcaacaaaaccagtggtgaaattgttgtataaccggtcaaacaacaaatactcctacaccagcaatagcgatgaccatttactgaagaacatcgagcttttcgataagctgagtctacgttttaacggtcgggtgttgttcatcaaagacgtaatcggtgatgagatttgctgctggtccttttacggtcaaggaaggaaactggccgaagtgtgctgcaccagcatcgtatacgccacagagaaaaaacagaccaaagtcgagttccccgaagccaggatatacgaagagaccctgaacgttttgctctatgaaacaccacgggtcccggacaacagtttgctggaggccacaagtcgctcgcggtcgcaggcttctcccagcgaagacgaggagaccttcgagctgcgggacagggttaggaggatccacgttaagcgatactctacatatgacgataggcagctcgggcatcagtctacacatcgggactag

SEQ ID NO: 209452 - DNA, 210 bp, synthetic construct
  misc_feature 1..210: note = Description of Artificial Sequence: Synthetic coding sequence
  source 1..210: mol_type = other DNA
atgaccaccctgatccccatcctgagcaccttcctgttcgaggacttttctaaggcaagcgggttcaaggggcagcgccctgagactctgcacgagcggctgactctggtctctgtctatgcgccctacctccttattccctttattctgctgatattcatgctccggagcccttattacaagtatgaggaaaaacgcaaaaaaaagtag

SEQ ID NO: 209453 - DNA, 1125 bp, synthetic construct
  misc_feature 1..1125: note = Description of Artificial Sequence: Synthetic coding sequence
  source 1..1125: mol_type = other DNA
atggtgctgtgggagagcccccggcagtgcagcagctggaccctgtgcgaaggattctgctggctgctgcttctgccagtgatgctgctcattgttgctcgtcctgtgaaactcgccgccttcccaacttctctgagcgactgccaaaccccaaccggctggaactgttctgggtacgacgatagggaaaacgatctattcctgtgcgacacaaacacctgtaaatttgacggagaatgcttgcgtattggagataccgtaacatgcgtgtgccagttcaaatgtaataacgactatgtgccagtgtgtgggtccaacggagaatcgtatcagaatgaatgttatctccgccaagccgcttgtaaacagcagagcgaaattctcgtggtctcagagggttcttgcgccacagacgcgggcagcggcagcggtgatggtgtgcacgaaggaagcggagagactagccaaaaagaaacctctacctgtgatatttgccagttcggtgcagagtgtgacgaagacgctgaggatgtctggtgcgtctgtaatatagattgttcccagaccaacttcaacccactgtgcgcttctgacgggaagtcatacgacaatgcctgccagatcaaggaagcatcttgccagaaacaggaaaagatcgaggtgatgagcctggggcgctgccaggacaataccaccaccactactaaatccgaagacgggcactatgccaggactgactacgctgaaaacgcgaacaagttggaagagtctgcccgggagcatcatatcccctgccccgaacactacaacggtttttgcatgcacgggaaatgcgagcacagcatcaacatgcaagagccatcatgtcgttgcgacgcaggttacacaggccagcactgcgagaaaaaagattattcggtcttgtacgtagtccctggcccagttcgctttcagtacgtattgattgccgcggtgattgggactatccaaatcgccgtcatttgcgttgtagtgttgtgcatcactcgcaagtgtccacgatctaatagaatccaccggcagaaacaaaacaccggccattactctagcgacaatactacacgcgcttccactcggctgatctag

SEQ ID NO: 209454 - DNA, 528 bp, synthetic construct
  misc_feature 1..528: note = Description of Artificial Sequence: Synthetic coding sequence
  source 1..528: mol_type = other DNA
atggtgctgtgggagagcccccggcagtgcagcagctggaccctgtgcgaggggttctgttggcttctgctccttcccgtgatgttgctgattgtggcccgtcccgtaaagctggcggccttcccaacctccctgtccgattgccagacccctacgggatggaactgtagcggctacgatgatagagagaatgacttattcttatgtgatactaacacttgtaagtttgacggagagtgtctgcgcatcggggacaccgttacctgcgtctgccagttcaaatgcaataatgactacgtgcccgtctgcggaagcaatggggagagctaccagaacgaatgctatctcaggcaggcagcatgcaagcagcaaagtgagatcttggttgtgagcgagggaagctgcgcaacagacgccgggtcgggctcaggtgatggaggacgctcctgcctgttcacgtacctgaaaatatactggtggatccttctgtgcatatttacttacgtctgttccatcagcgatatatag

SEQ ID NO: 209455 - DNA, 2427 bp, synthetic construct
  misc_feature 1..2427: note = Description of Artificial Sequence: Synthetic coding sequence
  source 1..2427: mol_type = other DNA
atggccgagctgctggccagcgccggcagcgcctgcagctgggacttcccgcgtgctccaccctccttcccccctccagccgccagtaggggcggtctgggcggaacgcggagctttcgaccacacagaggcgctgaatctccacgcccgggacgggatagagacggtgtgagagttcccatggcgtcgagtcgatgtccagcccctagaggctgtcgctgcttgcccggagcatcactggcctggctcggtaccgtgctccttctgctggctgactgggtgctgctgaggaccgcactgccacgaatcttctctctgctggtgcccaccgccctgccactgttgagggtgtgggccgttggtctgtctaggtgggcagtgctgtggctcggtgcttgtggagtgctgagggccacagtggggtcaaaaagtgagaacgctggcgctcaggggtggctggctgctcttaaacctttggccgctgctctggggctggctctcccaggtctcgccctcttccgagagctgatttcctggggtgcacctggcagcgctgattctacccggctcttacactgggggtcacatcctactgcctttgttgtgtcttacgcagcagcactcccagccgcggccctgtggcacaaactgggcagcctgtgggtccctggggggcagggagggtcggggaacccagtaaggagactcctgggctgtttgggcagtgagaccagaaggttgtccctattcttggtgctggtggtgctctcgagcctcggagagatggcaatcccattcttcaccggccgcctgacagattggatcctgcaggatggcagtgccgacacattcacccgaaacctcaccctgatgtctattcttaccatcgctagcgctgtactcgagtttgtaggtgacggtatctataataataccatgggacatgttcacagccaccttcaaggtgaagtgtttggggctgttttacggcaagaaaccgaattcttccagcagaaccaaaccggaaatatcatgagtcgcgtgacagaggacacttctactctatcagattctctgagcgaaaatctgtcactgttcctgtggtatcttgtgagaggtctgtgcctccttgggatcatgctgtggggatctgtctctctcaccatggtgacactgatcactctgccacttctcttcctactccctaagaaggtcgggaaatggtaccagttgctggaagtccaagtaagggaatccctggcgaagagctctcaggttgctatcgaggctctgagtgccatgcctacagtgcggtccttcgcgaacgaggagggagaggcccagaagttccgcgaaaagctgcaggaaattaagaccctgaatcagaaggaggccgtggcttatgctgtgaactcttggaccacttcaatctctggaatgctgcttaaagtcggcatactgtatatcggaggacagttggtgaccagcggtgcggtaagttcgggcaatttggttactttcgtactgtatcagatgcagtttacccaggccgttgaggttctcctctccatctatccacgagtacaaaaggctgtgggctcttcagagaagattttcgagtaccttgatcgaacaccacgatgccctccgtctggcttactcacgcccctgcatctggagggtctagtccaatttcaggacgtctcttttgcctaccccaatcgccccgacgttctggtcctgcaggggctcacttttacactgcgtcccggcgaggtcaccgccctcgtgggaccaaacgggagcggcaaatccactgtcgccgcactcttgcagaatctctatcagccaacaggagggcagctcttgcttgacggcaagcccctgccacagtacgagcataggtacctccatagacaggtggcagcagtaggtcaagagccgcaggtgtttggtaggtccctgcaggaaaacatcgcatacggactgacccagaagccaactatggaggagataaccgccgcagccgttaaatccggcgcccattcgtttatttctggtcttccccaggggtacgatacagaggtagacgaggcagggagtcagctaagcggcggccagagacaggccgtggccctcgcccgtgctctgatccggaaaccctgtgtattaatccttgatgacgcaaccagcgccctcgatgctaactcccagttgcaggtagaacagctcctctacgagtcccctgaaagatatagcagaagcgtgctcctgattactcagcatctctctctcgtcgaacaggccgaccatatcttgtttctggaaggcggggcgatcagggaaggaggcacccaccagcagcttatggaaaaaaaaggatgttattgggccatggtacaagcgcccgcggacgctcctgagtag

SEQ ID NO: 209456 - DNA, 2427 bp, synthetic construct
  misc_feature 1..2427: note = Description of Artificial Sequence: Synthetic coding sequence
  source 1..2427: mol_type = other DNA
atggccgagctgctggccagcgccggcagcgcctgcagctgggacttcccccgagccccgccatcctttcccccaccagcggcttccaggggcggcttgggaggtacacggtcatttagaccgcataggggcgccgaatcaccgcgtcccggtagggatcgagatggtgttcgagtgcctatggcgtcttcgcgctgtccagcccctcgcggttgtagatgtctcccgggggccagtctggcctggttgggcacggttctattgttactggccgattgggtgctgctccgcacagcattgccccggattttttccctacttgtacccacggcactgcccctcttgcgggtatgggcggtgggactcagtagatgggcggtactatggctgggcgcttgtggagtcttgcgggctaccgttggctccaagagcgagaatgcgggcgcacaggggtggttggccgcgctaaaaccactcgccgccgccctcggccttgcgctccccggtctggcactgtttagagagttgatcagctggggagcccctgggtccgcggatagtacccgcttgctccactggggcagtcaccccaccgccttcgtggtttcatacgctgctgcgctgcccgccgccgccctctggcataaactggggagtctctgggtgccaggtggccagggaggttctggtaatcctgtgaggcggttgctcggctgtttggggtcggagaccaggaggctgtctctctttctggtcctcgtggtcctgtcctcgttgggcgagatggcaataccattcttcacaggtaggctcaccgactggatcctgcaggacggttcagctgatacttttacaaggaacctgaccctaatgtcaatccttacgatcgcctcagccgtcctggagtttgtgggcgacggaatctacaacaataccatgggtcacgtgcacagccacttgcagggagaagtgtttggagccgtgcttcggcaggagactgaattttttcaacagaaccagacgggaaacattatgagtcgcgtaaccgaagatacttccactctatccgattcgctgtccgagaacttgtccctattcctgtggtacctggtgcgtggtctttgtctgctcggaatcatgctctgggggtctgtgtcgttgacaatggtcacactcattacactgcctctgctctttcttctccctaagaaagtcgggaagtggtaccaactcttggaagttcaagtccgcgagtccctagcaaaaagctctcaggtggctattgaggcactcagtgctatgccaacggtccgaagctttgcaaacgaggaaggcgaagcacagaaatttcgggaaaagctgcaggaaatcaagacactgaatcaaaaggaagcggtagcttatgcagttaattcttggacaacgagcattagcggaatgctcctgaaagtcggcattttatacatcggcggccagcttgtgacgagcggtgccgtgtcatccggaaatctggttacctttgttctttatcaaatgcagttcactcaggccgttgaggtgcttctgtcaatctatccccgggttcagaaagctgttggttcctcagaaaaaatcttcgaatatctcgacagaacaccacgatgtcctccctcaggactgctgacacccctccacctggaaggcctggtccaatttcaagacgtgtccttcgcatatcctaaccggcctgacgtcctggttctgcaggggctgacttttaccttgcgccctggtgaagtcacagcactcgtcggccctaacgggtccgggaagtcaactgtggcagccctccttcaaaacctgtaccaaccaaccggaggacagctactgctggacggtaaacctcttccacaatatgagcaccgctatctgcatcggcaggtggctgcagtgggtcaggaaccccaggtctttggccgctcattgcaggagaatatcgcatacggcctgacccagaagccaaccatggaggaaattacagcagcagctgtgaaaagcggggcgcattcctttattagcggactgccacaaggctacgatacagaggtggacgaagctggtagccaacttagcggaggccaaaggcaggcagtggccctcgctcgggctttgattcggaagccctgcgtacttatcctggatgacgcaaccagcgccttagatgccaatagccagctgcaagtggagcagttgctgtacgaatcaccggagcgttactcaaggagtgtcctgttgataacgcagcatctgagtctcgttgaacaggctgaccacattctgtttctggagggtggagcaatcagggagggagggacccaccagcagctcatggaaaaaaaggggtgctactgggcaatggtgcaggctcctgcggatgccccagaatag

SEQ ID NO: 209457 - DNA, 2427 bp, synthetic construct
  misc_feature 1..2427: note = Description of Artificial Sequence: Synthetic coding sequence
  source 1..2427: mol_type = other DNA
atggccgagctgctggccagcgccggcagcgcctgcagctgggacttccccagggctcctccatcatttccgcctcccgctgcatcgcgaggggggctcggaggcacgcggtcctttcggccacatcggggggcagaaagcccgcgaccaggcagagatcgcgacggggtgagggtgcccatggcatccagcagatgcccagcccctcgtggctgccgatgtctccccggcgcctctctcgcctggctggggacggttttgctcctcctggccgattgggttctcctgaggactgcacttcctcgtatcttctctctgttggtgcccacagctcttcctctcctaagggtgtgggccgtgggactttctcgttgggccgtgctgtggctcggggcctgtggcgtgttacgcgctactgtgggtagtaagtcagaaaatgccggagctcagggatggctggcagctttaaagcccctcgccgcagcactggggctggctcttccaggacttgcactgttccgcgaactgattagttggggggcccccggaagcgctgactccacaagactgctacactgggggtcacaccctaccgcctttgtggtgtcatatgccgccgcgctcccagccgctgccctttggcacaagttaggtagtctctgggtaccaggcggccagggaggctccggaaaccccgtccgtcggctccttggttgtctggggtccgagacccggcggctctccctattcctggtgttagtggtcctaagctcccttggcgaaatggccattcctttctttaccggccggctgacggactggatcttgcaggacggctcagccgatacttttactcggaatctcaccctgatgtccattctgaccatcgcttcggccgtgctggagttcgttggtgacggtatctacaacaataccatgggccacgtccacagtcatctgcagggagaagtgttcggagcagttttgcgtcaggaaacggagtttttccagcagaatcaaacaggaaatatcatgtccagagtcactgaggataccagtacattaagcgacagcctcagtgagaatctgagcctatttctctggtacctcgtccgagggctgtgcttactgggaattatgctgtggggaagcgtgtcactcacaatggtcacgctgattaccctccctctgctctttctactacccaagaaggttggtaaatggtaccaactgctggaggtgcaggtcagggaatcattggccaagagctctcaagtagccattgaagccctgagcgcaatgcctacagtcaggtcttttgccaacgaggaaggggaggcccaaaagtttcgcgagaagttgcaggagataaaaacactgaaccaaaaggaagccgtggcctacgccgtgaactcatggaccacgagtatctctggcatgctcctgaaagtggggattctctatatcggggggcaattggtgacctccggagcagtgagcagcggcaaccttgtcacctttgtgttgtatcagatgcagttcacccaggcagttgaggtgcttctgtccatctatccacgcgtgcagaaagccgtggggagttctgaaaagatctttgagtacctggatcgcacgcctcggtgccctccatcagggcttttaacgcctcttcacttggagggcttagtgcaattccaggatgtgagttttgcgtatccaaatagaccagacgtgcttgttctacaaggacttacttttactttgaggcccggcgaagtgactgccttagtgggccctaatggctcaggaaagtcaaccgtcgcagcactcctgcagaacttgtaccagcccactggaggacagctactgctcgacggaaagccgctcccacagtatgaacacaggtaccttcaccggcaggttgctgccgttggccaggaaccccaggttttcgggcggagtctccaagagaatatagcgtacggcctgacccagaagccaacaatggaggagattacggcggctgctgtgaagtctggcgcgcacagctttatttcaggtctgccccaggggtacgacacagaagttgacgaagcgggctcccaattgtcaggcggccagaggcaagccgtggccctggcgcgggcgctcattcgcaagccttgtgtgctcatcctagatgacgccacctctgctttagacgctaacagtcagctgcaggtcgagcagctgctttacgaaagccctgagcgctactcacgatccgtgctgctgatcacacaacacctgtccctggtggagcaggctgatcacattctcttcctggaaggaggggctataagagaggggggaactcaccaacagcttatggagaagaaaggatgctattgggcgatggtgcaggctcccgctgacgctccagagtag

SEQ ID NO: 209458 - DNA, 2427 bp, synthetic construct
  misc_feature 1..2427: note = Description of Artificial Sequence: Synthetic coding sequence
  source 1..2427: mol_type = other DNA
atggccgagctgctggccagcgccggcagcgcctgcagctgggacttccccagagcgccgcctagcttcccaccccccgcagcctctcggggaggcctaggtgggacacgatcatttcggccccaccggggggcggaatcccctagacccgggagggatagggacggagtgcgggtgcccatggccagctccaggtgtcccgccccgaggggatgtcgctgcctcccaggagctagccttgcttggctgggcaccgtgctgctgctgctggctgactgggtactgcttaggactgcccttcctcggattttctctctgctagttccaacggctctgcctcttctccgggtctgggctgtcggtctgtccaggtgggctgtgctctggttgggcgcttgtggggtgctacgcgccaccgtcggcagcaaaagcgagaatgccggcgcgcaggggtggctcgctgcacttaagcccctcgccgccgctctggggctcgcacttccagggctcgctttatttagggagctaatttcttggggggcccccggcagcgcggattccacaaggctcttgcactggggatcacatcccactgcatttgtggtgtcctacgccgcagctctgcccgctgctgccctttggcacaaactgggcagcctatgggtgccagggggacagggaggctcaggcaatccagtgcgacgccttttgggctgcttggggtcagagacccggcggctttccctgtttctggtgctggtcgtactgtcatcattaggtgagatggccataccgttctttacgggcagactgaccgactggatcctgcaggacggctccgctgacacatttacaagaaacctgacacttatgagcattctgacgatcgcctctgccgtgctggagtttgtgggcgatggcatttataacaacacgatggggcacgtgcatagtcacctgcagggcgaggtttttggcgcggtgctcaggcaggagacggagtttttccagcaaaaccagacgggaaatatcatgagtcgtgtgactgaagatacgagtacgctcagcgactctttatcggagaatcttagtctgttcttgtggtacctagtccggggactatgcctcctggggataatgttgtggggaagtgttagtcttaccatggtaacactgatcactttgccccttctcttcctacttcctaaaaaagtgggtaaatggtatcagctcctggaggtgcaggtcagagagtctctggcaaagagctctcaagtggccatcgaagccttgtctgcgatgcccacagtcaggtcttttgccaacgaggagggtgaggcccaaaagttccgggaaaaactgcaggaaattaagaccctcaaccagaaggaagccgtggcttacgctgtaaacagttggacaacttctatcagcggtatgctgctcaaagtcgggattttgtatattggcgggcagttggtaaccagcggggcggtctctagtggtaatctagtgacgttcgtgctgtatcagatgcagtttacacaggctgtggaggtccttctgtcgatctaccccagagttcagaaagcagtcgggagctcagagaaaattttcgagtatctcgatagaaccccgcggtgtccgccttcgggacttcttacacctctgcacctggagggcctcgtgcagtttcaggacgtaagctttgcctatcccaatcggcccgacgtgttggttctgcagggactgacatttacgctcaggcctggggaggtcaccgcattggtcggacctaacggatcaggaaagtcgactgtagcagctctactgcagaacctgtatcagccaacaggcggccagctgctgcttgatgggaagccgctgcctcaatatgagcacagatacttacataggcaggtggccgccgtcggccaggaacctcaggtgtttggccgttctctgcaggagaacatcgcttacggcctaacacagaaaccaacgatggaggaaatcactgccgccgcagttaagagcggagcacacagcttcatttctggactgcctcagggctatgataccgaggtggacgaagcgggaagtcagctcagcgggggccagagacaggccgtggccctggcccgggccctgattagaaaaccttgcgtgttgattctagacgacgccaccagcgccctcgatgccaattcacaactccaagtagaacaactcctgtacgaatctccagaacgctacagccggagtgtgctgctgatcacacagcacttgagcctagtcgaacaggccgatcatatcctgtttttggagggcggggccattcgggaaggtggaacccatcagcagctcatggaaaagaagggctgctattgggccatggtacaggcacctgcagacgcgccagaatag

SEQ ID NO: 209459 - DNA, 2427 bp, synthetic construct
  misc_feature 1..2427: note = Description of Artificial Sequence: Synthetic coding sequence
  source 1..2427: mol_type = other DNA
atggccgagctgctggccagcgccggcagcgcctgcagctgggactttccgcgcgcccccccgtcgttcccccctcccgccgcaagcaggggtggattgggtgggaccaggtcgttcagaccacaccgcggggccgagtcccccagacccggcagagatcgtgacggggtgcgggttccaatggcttctagtagatgtccagccccaagaggctgcaggtgtctccctggagcctctctcgcttggctaggaacagtgttactgctcctggcggactgggtgctgctcaggacagcccttccacggattttcagtcttcttgtcccgacagccttgcctcttctgcgcgtgtgggcagtaggtctgtctcgatgggctgtgctttggctgggcgcttgcggcgttctgcgcgcaaccgtcggttctaagtccgagaatgccggagcccaaggatggctcgctgcccttaagcccttggcagccgcccttggtctggcactgcctggcctagcattgttccgagagctaatatcttggggcgcccccgggtctgctgacagcaccaggctgctgcattggggaagtcaccccactgcttttgtcgtgtcctacgcggctgccctgcctgcagcggctctctggcacaagctcgggtctctctgggtcccaggcggacagggcggcagtgggaatcccgtgaggcggctcctgggctgtttaggctctgagacgagacgtcttagtttgtttttggtactagttgttctgtcttcccttggggagatggccatcccttttttcactggccgactcacggattggatcctgcaggacggcagcgccgacacatttaccagaaatctgacactgatgagtatcctgacgatcgcctccgctgtcctggaattcgttggcgacggaatttacaacaataccatgggccatgtgcattcccatttgcagggagaggtcttcggggccgtccttcgtcaggagaccgaatttttccagcagaatcagacaggcaacatcatgtctcgtgtaacggaggatacgtccacactctccgacagcctctctgaaaacttgtctttgttcttatggtatctggttcggggcttgtgtctgctgggcataatgctgtggggtagcgtttccttaactatggtaacactgattactctacccctgctgttccttctccctaaaaaggtgggcaaatggtatcagctcttagaggtccaagttagagaaagccttgccaagtcaagccaggtggccattgaagccctcagtgcaatgcctacagtgaggagtttcgcgaatgaggagggcgaggcgcaaaagtttagggagaagcttcaggaaataaagacacttaaccagaaggaggcagtcgcatatgcagttaacagctggactacctccatttctgggatgctgctcaaagttgggattttgtacattggggggcaactcgtcacttcaggagcagtgtcatcaggaaatctggtcacctttgttctgtaccagatgcaatttacccaggccgtcgaggtgctgctctctatctacccaagagtgcagaaggcagttgggagttcagagaagatttttgagtacctagaccgcactccacgatgccccccaagcgggctgcttacgcccctgcatttggagggcctcgtacagtttcaggacgtcagcttcgcttaccccaaccgaccggatgttttagtgctccagggcttgaccttcaccttaagacccggagaggtcacggcactggtcggacctaatgggtcaggcaagtccacagtcgcagccctactccagaatttgtatcagccaacaggcgggcagctcctgctggacggaaaaccattgccccagtacgaacatagatacctgcaccgccaggtggccgccgttggacaagaaccacaggtcttcggccgctcccttcaggagaatatcgcctacggcctgacgcagaagcctactatggaagaaattaccgcagcagccgtgaaatcgggcgcccactccttcatcagcggcttgccccagggatacgacaccgaggtcgacgaagctggctcacagctgagcggcggccagagacaggcagttgctctggcacgagcattgatcagaaaaccttgcgtcctcatcctggacgatgcaactagtgcattagatgctaatagccaactgcaagtggaacaactgctatacgaaagccctgaacgatactctcggtctgtgctcctcattacccaacacctctccctagtggaacaggcagatcacatcctcttcttggagggcggagccattcgagagggcgggactcaccagcagctgatggaaaagaaaggatgctactgggcaatggttcaggcccccgctgacgctccagagtag

SEQ ID NO: 209460 - DNA, 1644 bp, synthetic construct
  misc_feature 1..1644: note = Description of Artificial Sequence: Synthetic coding sequence
  source 1..1644: mol_type = other DNA
atggccatccccttcttcaccggccggctgaccgactggatcctgcaagacggctctgcagatacattcacaaggaatcttactcttatgtccatactgaccatagcgagcgctgtgctggaattcgttggcgacgggatctacaacaacaccatgggacatgtgcattcacacttacaaggagaagtatttggggccgttctaaggcaggaaaccgagtttttccaacagaaccagacaggtaatatcatgagcagagtgaccgaggatacatctaccctttcagattccctgagcgagaatctgtccttattcttatggtacctggtcagaggattgtgtcttctgggcattatgctttggggctccgtcagcctgactatggtgaccctaattactctgccccttttattcctactgcctaagaaagtgggcaagtggtatcagttactggaggtccaagtgagggagtccctggctaaaagtagccaggttgctatagaggccttgagcgcgatgcccactgtgaggtccttcgcgaatgaggagggcgaggcccaaaagtttcgcgagaagttgcaagagataaaaaccctaaaccagaaggaggctgtcgcctacgccgtgaactcttggacgacgtcgatttctggaatgctcctgaaagtgggtatactatacattggcggtcaactggttacctcgggtgccgtaagctcaggcaatctcgtgacttttgtcttatatcagatgcagtttactcaggcggtcgaggtcttgctgagcatctatccccgcgtacagaaggctgtggggagctcggaaaaaatttttgagtatcttgaccgaactccacgttgcccaccttcaggccttctcaccccactacacctggagggtctggtgcagttccaggacgtctcttttgcctaccccaatcggcctgacgtgctggtgttgcagggacttactttcacgttaagacccggcgaagtgacagccctggttggccccaacgggtctgggaaaagtactgtggcagccttacttcagaacttgtaccagccaacaggcgggcagctcctcctagacggcaaaccactgcctcagtacgagcaccggtatctccatcggcaagtggccgcagtcggccaggagccccaagtgttcggacgttcacttcaggaaaacatcgcttatggcctcactcagaaaccgacaatggaagagattacagcggccgcagtcaagtctggtgcacatagcttcatctccggcctgccccagggatacgacaccgaagtagatgaggcaggctcccagttaagtggaggccagagacaagccgtcgctctggccagagctctgattcgtaaaccatgtgtgctcattctcgacgatgcgacatccgccttagatgcaaatagccagttacaggtggagcaactactatacgagtctcctgaacggtattccagaagcgtgcttcttataacccaacacctgtccctggtagagcaggctgaccatatcctgtttctggagggaggagctattcgtgaaggcggaacgcaccaacagcttatggagaagaaggggtgctattgggcaatggtccaagcccctgctgatgctcccgagtag

SEQ ID NO: 209461 - DNA, 2427 bp, synthetic construct
  misc_feature 1..2427: note = Description of Artificial Sequence: Synthetic coding sequence
  source 1..2427: mol_type = other DNA
atggccgagctgctggccagcgccggcagcgcctgcagctgggacttcccgcgcgctcctccctcatttcctccacctgccgctagcagaggcggccttggcggtactcgctcttttcgcccccataggggggctgaaagccctaggccagggcgggatcgagatggcgtgagagtgcctatggcctcctcccggtgccccgcgccacgggggtgccggtgcctgccaggcgcatctctggcttggctgggaactgtgttactcttgttggctgactgggtactgctacggacagctctgcctcgcatcttcagtctgctggtccctacagcactgccactcctgagggtgtgggcagtgggactctctcgttgggccgttctttggctgggagcgtgcggcgttttacgcgctaccggaggaagcaagtcggaaaacgccggagcccagggttggctggcagcactcaagccactggctgcagcccttgggctggccctaccaggcctcgcactctttcgggagctgatctcctggggtgcccccgggagtgccgattccacccgactgttgcactgggggagccaccctacggcttttgtagtctcttacgcagccgctctgcccgcagcagccctgtggcataaactggggtctttgtgggtacccgggggacagggtggcagtggaaatccggttcgtcgtctcttaggatgcttaggatcggagacaaggagactgtcactgtttctggtgctggtcgtcctatccagcctcggtgaaatggccatcccattttttactggccggctcacagactggattctacaagacgggagtgccgacacttttaccaggaaccttacccttatgagtatcttaactatcgctagtgcagtgctggagtttgtaggcgatggaatttataacaacactatgggacacgttcacagtcacctgcagggcgaagtttttggggccgttcttcggcaggagacggaattttttcaacagaaccagaccggaaatattatgagcagggtgaccgaagacacaagcacgctcagtgattccctgagtgagaatctgagcctgtttctatggtatttggtgcgcggcctatgtctgctaggcatcatgttgtggggctctgtctctttgactatggtcacgctgattacacttccactcttgtttttgctgcctaaaaaggtgggcaaatggtatcagctgctggaggttcaggtgcgtgaatcactggctaagtccagtcaagtggctatagaagcactcagcgccatgccaacggttcgcagctttgctaacgaagagggggaggcgcagaagttcagggaaaagcttcaggagataaagacattgaaccaaaaagaggccgtagcttatgccgtgaattcttggactacctccatatctggcatgctgcttaaagtggggatcttgtacatcggcggccagctggtaacctccggagcggtctcctctgggaacctggtgactttcgtgctgtaccagatgcagttcacccaggccgtagaggtactgttgagcatctaccctcgggttcagaaagccgtcggtagcagcgagaagatttttgaatatttggaccgcactccgaggtgtccgccaagcggcctcctgactcctctccaccttgaaggactggtacagttccaggatgtcagcttcgcctacccaaaccggccggacgtgctggttctacagggcctcacatttaccctcagacctggggaggttaccgcgttggtgggacctaacgggtctggcaagagtaccgtggccgccctgctacagaatctttaccagcccaccggcggtcagctgctgctggatgggaaacccctgcctcagtatgagcatcggtatctccacaggcaagtagctgcggtaggacaagaaccccaggtattcggtcgcagtctgcaggaaaacattgcctatggcttgacacagaagccaactatggaggagattacagccgctgctgtcaagtccggggcgcattctttcattagtggcctaccacagggctatgacactgaggtggatgaggctggcagccagctgagcggaggccaacgccaggccgttgccctggcaagggcactgatccgaaaaccgtgtgtgctaatcctggatgatgccacttctgcactagatgctaactcccaactgcaagtggaacagctgctctatgagagtccagagcgatattcgaggagcgtgctgctcatcacccagcatttgtccttggtggagcaagcagatcacatcttgttccttgagggcggcgccatacgcgagggaggtacgcaccagcagttaatggaaaagaagggctgttactgggctatggtgcaggccccagcagatgccccggagtag

SEQ ID NO: 209462 - DNA, 2427 bp, synthetic construct
  misc_feature 1..2427: note = Description of Artificial Sequence: Synthetic coding sequence
  source 1..2427: mol_type = other DNA
atggccgagctgctggccagcgccggcagcgcctgcagctgggacttccctagagctcctcctagctttcctcctcccgctgccagccggggtggactcggcggcactcggagttttagaccgcaccggggtgccgaatcccctaggccaggtagagatagggacggcgtgagagtgccaatggctagttccaggtgtcccgccccccgagggtgtcggtgcttaccaggggcaagtctcgcttggttggggactgtcctcctgctgttggcagattgggtgttgttaagaacagccctccctaggatcttcagcctcctggtgccaaccgcgctcccactcctaagagtatgggctgttgggctgtcgagatgggctgtgctgtggcttggggcctgcggtgtactgagagcgacagtgggttccaaaagcgagaacgctggcgcacaggggtggttggccgctctcaaaccactggctgccgcactggggctggcgcttcccgggctggcccttttcagggagctgatctcttggggcgccccaggtagcgcagattcaactcggcttctccactggggtagtcaccccaccgcctttgtggtgagctacgcggcagctctgccggccgctgcactgtggcacaagttgggctctctctgggttccgggaggtcagggcggttccggaaaccccgtcagaagattgctcggatgtctgggatctgagacaagacgcctgtcgctgtttctcgtcttagtggtgctgtcatctcttggggagatggccattccttttttcacagggcgcctgacagactggatcctccaggatgggtcagccgacactttcacgcgcaatttgaccttgatgagtatcctgactatcgcttccgcggttctagagttcgtgggagatggcatctataataacaccatgggtcacgtgcattcgcatctgcagggggaggtgttcggggcagttcttcgacaggagacagagttttttcagcagaatcagacaggtaacatcatgtctcgggtgaccgaagacacttctactctgagcgactccctgtccgagaatctctcactgttcttgtggtatctggtacgagggctatgcttacttgggataatgctgtggggatctgtttcactgactatggtcaccctgatcacattgcccctgctcttcctcctccccaaaaaggtgggaaagtggtatcaattgcttgaggtgcaggtgagggaatccttagccaagtcaagccaggttgctatagaggccctttctgccatgcccaccgttcggtcattcgcaaacgaagagggcgaagcacagaagtttcgggagaagcttcaggaaataaagaccctgaaccaaaaagaggccgtcgcttacgctgtgaattcctggacaacaagcatctccggaatgttactgaaagtggggatcctgtacattggaggccaactggttacatcgggagccgtcagctcaggcaatctcgtcacctttgtactgtatcagatgcaattcacacaagctgttgaagtgctcctgagcatataccctagggtgcagaaggctgttggttcttccgagaaaattttcgagtatctggacagaactccgaggtgtcccccttcaggcctgcttaccccactgcatctcgagggactggtgcaattccaagacgttagttttgcctaccccaaccggccagatgttctcgtgctgcagggactcacctttacgctccgtccaggcgaggtgactgcactggtagggcctaatgggtccggcaagtccactgttgccgcactgttgcagaacctctaccagcccaccggcgggcagctcctgctcgatggcaagcccctgccccaatacgaacatcggtatctgcaccgccaggtcgcagccgtaggacaggagccccaagtgtttggaagatcactgcaggagaatatcgcttatggactgacacagaaacctacgatggaggaaatcacggcagctgccgtgaagagcggggcgcatagtttcattagtgggctgccgcaggggtacgacaccgaggttgacgaggcaggctctcaattgtctgggggccagaggcaggccgtggcactcgcaagggccttaatcaggaaaccatgtgtcctcattctggacgatgccacttccgccctcgacgctaattcacagctccaggtggaacagctgttatacgagtctcctgaacgctattccagaagtgtactcctcatcacccaacatctttctttggtagagcaggctgaccatatcctcttcctggagggaggagcaatccgagagggtggtacacaccagcagctgatggaaaagaaggggtgctactgggcaatggttcaggcccccgctgacgccccagagtag

SEQ ID NO: 209463 - DNA, 2427 bp, synthetic construct
  misc_feature 1..2427: note = Description of Artificial Sequence: Synthetic coding sequence
  source 1..2427: mol_type = other DNA
atggccgagctgctggccagcgccggcagcgcctgcagctgggactttcctagggctcccccaagctttccaccacccgccgctagcagaggaggtctgggtgggacaagaagctttcgtcctcatagaggggcagagagtccccggccaggtcgggatagagacggagtgcgagttccaatggcaagctcaaggtgtccggccccacgaggttgtcgctgtctgcccggcgctagtctggcgtggctcgggactgtgctgctgctccttgcagattgggttttgctgaggactgctcttccacgcatctttagtctcctggtcccgacagcccttccattgctacgcgtctgggccgtgggcctgtcgagatgggccgtgctctggttgggggcttgcggggtactacgcgctactgtcgggtccaaaagtgaaaacgccggggcccaggggtggctagccgctctaaagcccttggccgctgccctgggcctcgctctgcccggattggcactgttcagggagctgatctcatggggagccccagggagcgccgatagtactcgactcctgcattggggctcacatcccacagcattcgtggtttcttatgccgccgcccttccggctgccgccttgtggcacaagttaggttccctgtgggtgcctggtgggcagggaggctccggaaatcccgtgcgcagacttttgggctgtcttggctccgagacacgccgtctctccctgtttctcgttcttgttgtgctcagttccctgggcgagatggcgatacctttttttacgggtagactgacagattggatcctgcaagatggcagcgcggacactttcacccggaatctcaccctcatgtccatcctgaccatcgcgagtgccgtgctggagtttgtgggggacggcatatacaataacaccatgggccatgttcactctcatttgcaaggtgaggtgtttggcgcggtgctgagacaggaaaccgaatttttccagcagaaccagactgggaatatcatgtcgagagtgactgaggacacaagcaccctgtcagattcattaagtgaaaatctgagcctattcctgtggtatctcgtgcggggtctctgcctgttggggatcatgctttggggctccgtctctctgacaatggtaactttgattacactgccgcttctgttcctgcttcccaagaaggtgggcaagtggtaccagctgctggaggtccaagtgagagagagtttggctaagtctagccaggttgccatcgaggccctgtccgctatgcccacagtgcgcagcttcgccaatgaagaaggcgaagcgcaaaaatttcgtgagaaactccaggaaatcaagaccctgaaccagaaggaagctgttgcctacgccgttaacagctggaccacttctatcagtgggatgctgctgaaagttgggatcttgtacattgggggacaattggtgacatcaggagcagtgtcttctgggaatctggtgacttttgtgctgtaccagatgcagtttactcaggcagtggaggtactcttgagtatatatcctcgagtgcagaaggccgtgggatctagcgaaaaaatatttgagtatttggacaggactccacggtgccccccttctgggctgctgacgccgctgcatctggaggggcttgttcagttccaagacgtgtcctttgcttacccaaatcgacctgacgttctggtgttgcaggggctcactttcactctccgacctggggaggtgacggccttggttggaccaaacggaagcggaaagagcacagttgcggccctcctccagaacctgtaccaacccacaggagggcagttgctccttgacggaaaacctttgccccaatacgaacaccgctatcttcaccgtcaggtagccgctgtgggccaagaaccccaggtatttgggcgcagtttgcaggagaacatagcgtacgggctgacccagaagccgaccatggaagagatcacagccgccgccgtgaaatcaggcgcccattcttttatttctggattgccccagggctacgacaccgaagtggatgaggccggcagtcagctgagtggcggccagcgacaggctgtagctctggctcgtgctctgattcggaagccatgcgttttgattttggatgacgctacatctgctctggatgccaattctcagctccaggttgaacagcttctgtacgagagccccgaaaggtactctcgcagcgtattactgattacacagcatttgagcctcgtcgagcaagctgatcatattctgttcctcgagggcggcgcaataagggaaggggggactcatcaacagcttatggagaaaaagggttgttattgggccatggttcaggcacccgcagatgcacccgagtag

SEQ ID NO: 209464 - DNA, 1644 bp, synthetic construct
  misc_feature 1..1644: note = Description of Artificial Sequence: Synthetic coding sequence
  source 1..1644: mol_type = other DNA
atggccatccccttcttcaccggccggctgaccgactggatcctgcaggacggaagtgcggatacgttcactaggaacctgaccctgatgtccattctcaccatagcaagcgccgtcctcgagtttgtgggagacggcatctataacaacaccatgggacacgtgcatagtcacctgcaaggcgaagtctttggtgctgtcctccgccaggagaccgagtttttccagcagaaccaaactgggaacattatgtctagggtgaccgaagatacaagtacactgtcagactcactgtccgagaacttatctttatttctctggtatctcgttaggggcctctgtctattgggtatcatgctgtgggggtcagtttctctcaccatggtaaccctgatcacactgcccctgctcttcctgctgcctaaaaaagttggcaaatggtatcaactgttggaagtgcaggttagagagtccctggctaaatcctctcaagtggccatcgaggccctcagcgccatgcctaccgttcgaagtttcgcaaatgaggagggcgaagcacagaagtttagggagaaactgcaggaaatcaagactctgaatcaaaaggaagccgtcgcatacgccgtgaattcgtggaccacgagtatcagcggaatgctgctgaaggtcgggatactgtatataggcggacagctggtgacatccggagccgtgtcttcagggaacctggtaacctttgtcctctaccagatgcagttcactcaggcggttgaggttctgctctcaatctatccccgcgtgcagaaagccgtgggatcaagtgagaaaatcttcgaatacctggacagaactcccagatgtcccccttccgggctcctgactccgctgcatttggagggactggttcagttccaggacgtgtcctttgcataccccaaccggcctgacgtgttagtgttacagggattgactttcacgctgaggccaggcgaagtcactgccctcgtaggccctaacggtagcggcaaatccaccgtggctgccctcctgcaaaacctataccagcccaccggtgggcagctgctgcttgacgggaaacctctccctcagtatgagcatagatatttgcaccgacaggttgctgcagtcggccaggagccacaggtattcggtagatctcttcaggagaacattgcctacggtctcacacagaagccaactatggaggagataaccgctgccgctgtaaagtctggggctcatagttttattagcggcctcccccagggctacgacaccgaggtggacgaagctggatctcagctcagtggcgggcagaggcaggctgtggcactggcaagggcccttattaggaagccttgcgtccttattctggacgacgcgacatctgccctggacgccaattcacagctccaagttgaacagctcctttacgagtcaccagagaggtattcgcggagtgtactgcttataacccagcacctttcattggtagaacaggcggaccacatccttttcttggaaggaggggcaattcgggagggaggcacacatcagcagctcatggaaaaaaagggttgctactgggccatggtgcaagctcccgctgacgcacctgaatag

SEQ ID NO: 209465 - DNA, 1644 bp, synthetic construct
  misc_feature 1..1644: note = Description of Artificial Sequence: Synthetic coding sequence
  source 1..1644: mol_type = other DNA
atggccatccccttcttcaccggccggctgaccgactggatcctgcaggacgggagcgctgacaccttcactagaaatctcaccttgatgagcatcctcaccattgcttcagctgtcctggaatttgtgggcgatggaatttacaacaatacaatgggccatgtacattctcacctgcaaggagaggtgtttggcgctgtcctgcggcaggagactgagttcttccagcagaaccagactggaaacatcatgagcagggtgacggaagatacatcaaccctttctgactccctgtccgagaacctgtccttgttcctttggtacctcgttcgcggcctgtgcttattagggatcatgctgtggggctccgtcagtctcactatggtgaccctcatcacgctccctcttttatttctccttcccaaaaaagtgggtaaatggtatcagcttctcgaggttcaagtgagagagtccttggccaaatcctctcaagtggctattgaagcgctgtctgccatgccaacagtcaggtcattcgctaacgaagaaggtgaggcccaaaagttcagggagaaattgcaggaaatcaagacgctgaaccaaaaagaagccgttgcttatgctgttaattcttggactacctctatttctgggatgctcctaaaggtggggattctgtacatcggaggccagctagtgaccagtggagcagtgagcagtggaaatctggtgacctttgttttataccagatgcagttcacgcaggcagtcgaggtactgttgtcgatctatccaagggttcagaaagccgtgggcagtagcgaaaaaattttcgaatatctcgaccgcaccccgagatgcccccccagtgggctcttgacccccctccacctggagggactagttcaatttcaggacgtatccttcgcctacccaaaccggccggatgtgctggtattgcaaggcctcacattcaccttgagaccaggtgaggttaccgccctggtgggacctaacgggtctgggaagtccactgtggcagcattgctccagaatctttatcagcctactgggggccagctcctgctggatggcaagccactcccccagtacgagcataggtatttgcatagacaagtggccgccgtgggccaggaaccacaggtttttggtagatcactacaggaaaatattgcttacgggcttactcaaaagcctaccatggaggagatcactgctgccgccgtgaaatcaggcgcacattccttcatcagtggattaccacaaggctacgataccgaggtcgatgaggcggggagccagctttctgggggtcagaggcaggctgtggcattagcccgcgccctgatccgtaagccctgcgtccttatcctggatgacgcgacaagcgccctggacgctaactcacagctccaagtagagcagctgctttacgagtcgcctgagcggtattctaggtccgtccttctcattactcagcacttgagtctcgtggagcaggccgaccatatcctgtttcttgaaggcggcgctatccgggagggaggcacacaccagcagctgatggaaaaaaaggggtgctactgggccatggtgcaggctcccgctgacgcccccgaatag

SEQ ID NO: 209466 - DNA, 1644 bp, synthetic construct
  misc_feature 1..1644: note = Description of Artificial Sequence: Synthetic coding sequence
  source 1..1644: mol_type = other DNA
atggccatccccttcttcaccggccggctgaccgactggatcctgcaggatggctccgctgatactttcacacgcaatctgactctgatgagtatactgacgatagcttcagctgtgcttgagttcgttggggacggaatttataacaacacaatggggcacgtgcactcacacttgcagggcgaggttttcggcgcggtcctccgtcaggaaacggaattctttcagcaaaatcagactggcaatattatgagcagagtgaccgaagacacaagcactctttcagatagtttgagcgagaatctgtccctttttttatggtatctggtcagggggttatgcctgctgggcataatgctgtgggggagtgtttccctcacgatggtgacactgattacactgcctctgctgtttctcctgccaaaaaaggtgggcaagtggtatcagcttcttgaggtgcaggtgcgagaatcactggctaagtcctctcaggtcgctattgaagctctctctgcaatgcccactgtgaggtcttttgccaacgaggagggcgaggctcagaagtttcgtgagaaactacaggagatcaagactctgaatcagaaggaagccgttgcctacgccgtgaatagctggaccacttctatttccggcatgttgttaaaagttggcattttgtatatcggcggccagctagtgacctctggggctgtgtcctcaggtaacctcgtgaccttcgtgctctatcaaatgcagtttacccaggccgtggaggttctgctatccatctaccccagggtgcagaaggcggtgggctcctcagaaaaaattttcgagtacctcgataggacccccagatgcccgcccagcgggcttctgacccctctccatctcgagggattagtccaatttcaggacgtgtcattcgcctatcctaaccgacccgacgttctagtattgcaggggctgacctttacacttcgacccggagaggtgacagccctcgtggggccaaacgggagtgggaaatccaccgtggctgcgctactacagaacctttaccaaccaacagggggccagcttctgctggatggcaaaccgctaccacagtacgagcaccgatatctgcatcgccaggtcgctgcggtggggcaggagccccaggtgttcggccgatccctgcaggaaaacatcgcttacggcctgacccagaaacccacaatggaagaaataacggctgctgctgtaaaatcgggggcccattctttcatatctggattgccacaagggtatgacaccgaagttgatgaggccggctctcagttaagtggcggccaacgccaggctgtggctctggccagagcacttatccggaagccatgcgtgcttatccttgacgatgccacctcagcccttgacgccaatagccagctgcaggtagaacagttgctctacgaatctccagagcggtactcccgtagcgtgctgctgatcacccaacacttgtcgttagtggagcaggctgaccacatcctgtttctggaaggcggcgccataagggagggcggtacacaccaacagcttatggagaagaagggatgttattgggccatggtgcaggctccagctgatgcccctgaatag

SEQ ID NO: 209467 - DNA, 1644 bp, synthetic construct
  misc_feature 1..1644: note = Description of Artificial Sequence: Synthetic coding sequence
  source 1..1644: mol_type = other DNA
atggccatccccttcttcaccggccggctgaccgactggatcctgcaggatggaagtgccgatacatttactcggaatctcaccctcatgtcgatcctcactatcgcaagcgccgttctggaatttgtgggggacggtatttataataatacaatggggcacgttcattcccatttgcagggcgaggtattcggtgctgtcctccgtcaagagaccgagttcttccagcaaaatcagacagggaatattatgagtagggttacagaagacacaagcacattgtcagacagccttagcgagaacctgtccctctttctttggtacctggtaagaggcttgtgcctgctggggatcatgctctggggttcggtctcacttacaatggttactttgataactttgcccttgctgttcctcctaccaaaaaaagtcggcaagtggtaccagctactagaagttcaagtacgggagagtctggctaagagtagccaggtggcgattgaggcgttatctgctatgccgacagtaagatcatttgccaatgaagagggcgaagctcagaaatttagagagaagctccaggagattaagaccctgaaccagaaagaggcggtcgcatatgccgtgaattcctggactacatccatctcgggtatgttactaaaggtcgggattctgtacatcggcggccagctcgtcacgtctggagccgtgagctctgggaacctcgttacatttgtgctgtaccagatgcagttcacccaagcagtggaggtattgcttagcatttaccctcgggtgcaaaaggccgttggcagctccgagaagatatttgagtatctggatcggacgccaaggtgtccaccttcaggccttttaactccccttcaccttgagggcctcgtgcagttccaggatgtttcctttgcctatcccaaccgccccgacgtgctagtcctccagggattgacgtttacgctgcggcctggggaggttaccgctttagtgggccctaatggcagcggtaagagtacggtggccgccctgttgcagaacctctaccagccaaccggaggtcagttgctgttggacggcaaacccctgccacaatacgaacaccgttatttgcaccgccaggtggctgccgtgggacaggagccccaggtatttgggcgctctctgcaagagaatatcgcgtatgggctgacccagaaacccaccatggaagagattaccgccgccgccgttaagtccggagcccactcattcatctccggactgccgcagggatatgacacagaggtcgatgaggcaggatcacagctttcagggggtcagcgacaggctgtggctctagctagggctttgatccgtaagccgtgtgtgttgatcctcgatgacgctaccagtgccctggacgccaactctcagttgcaggttgaacagcttctttacgagtctcctgagagatatagtcggagcgtcttactcattacacagcatttgagcctagtggaacaggctgaccacatactgttcctggagggtggagctattagggaaggcggcacacaccagcaattgatggaaaagaagggctgctactgggcaatggtgcaggcacctgccgatgcccctgaatag

SEQ ID NO: 209468 - DNA, 1644 bp, synthetic construct
  misc_feature 1..1644: note = Description of Artificial Sequence: Synthetic coding sequence
  source 1..1644: mol_type = other DNA
atggccatccccttcttcaccggccggctgaccgactggatcctgcaggacggctctgcagatacatttactaggaaccttacactgatgtccatcctgacgatagcgtctgctgttctggagtttgtgggggacgggatctacaataataccatggggcacgttcacagccacctccagggcgaggtctttggcgccgtgttgcggcaggaaaccgagttttttcagcagaatcagaccggcaacattatgtccagagttacagaggatacctctactctgtcagattcactgagtgagaatctttcacttttcctttggtacctggtcagaggcctgtgcctgctcgggatcatgctgtgggggagtgtgtcactcaccatggtgaccttgatcacattacctctcctgttcttattaccaaaaaaggtggggaagtggtaccagctcctcgaagtccaggttcgagaaagcctggctaagagctcacaggtggcaatagaggcactgagcgcgatgcccactgtgcgctccttcgcgaatgaagaaggtgaggcccagaagttccgcgagaaattgcaggaaattaagaccctcaaccaaaaggaagccgtggcctatgcagtgaattcgtggacaacatccatatccggcatgcttctgaaggtcggtatcctgtacatcggcggccagctggtgaccagcggcgcagttagtagcgggaatctcgttaccttcgttctgtatcagatgcagttcacccaagccgttgaagtgttgctttctatctacccccgggtgcagaaagccgtcggcagttcagagaaaatttttgagtacttggacagaaccccgcgatgccccccttctggcctgctgacccccctccatcttgaggggttggttcagttccaggacgtaagcttcgcatatcctaaccgaccggacgtgctggttttgcaaggacttactttcactctgaggcctggggaagtgacagccttagtaggacccaacggctctggcaagtccacagtggctgcccttctgcagaatctgtatcaacctactgggggccagcttctgctcgacggaaagcctctgccacaatacgagcaccgatacttacaccgtcaagtcgcagcggttgggcaggaacctcaggtttttgggcggtcactacaggaaaacatagcttatgggcttactcagaaacccactatggaagaaatcacagccgcggctgtgaagagtggagcacacagttttatctcaggactgccacaggggtatgatacagaagtggacgaggcaggaagtcagttgtccggcggccagcgacaggcagtagctttggcccgcgccctaataaggaagccttgtgttctgatcctagacgatgccaccagtgctttggatgccaatagccaactgcaggtcgagcagctcctctatgagagccctgagcggtatagtaggagcgtccttctgataacccagcatctgtccttagtagagcaggctgaccacatcctctttctggagggaggtgccatacgcgaaggcggaactcatcaacagctcatggagaagaagggatgttactgggcaatggtgcaggccccagccgacgccccagagtag

SEQ ID NO: 209469 - DNA, 1644 bp, synthetic construct
  misc_feature 1..1644: note = Description of Artificial Sequence: Synthetic coding sequence
  source 1..1644: mol_type = other DNA
atggccatccccttcttcaccggccggctgaccgactggatcctgcaggacggatcagcagataccttcacaagaaacttaactctgatgagtatcctgaccatagcctccgctgttctggagttcgtcggtgacgggatttataataatacaatgggacacgtacattcccacctgcagggagaggtgttcggcgccgtgttaaggcaggagaccgagttttttcaacagaaccaaaccggcaacataatgtcccgggtaactgaagatacatccactctctcagacagtctcagcgagaatctgtcccttttcctttggtacctcgtgagagggctgtgtctgctcgggattatgttgtggggtagcgtgtcactaacgatggtgacgctcatcactttacccctcctgtttttgctccctaaaaaagttggaaaatggtaccaattattggaggtgcaagttcgtgagagcttggctaagagtagtcaggtggcaattgaggccctgtccgccatgcccacagtccgctccttcgctaacgaagagggtgaggcccagaaattccgagaaaagctgcaagagattaaaacactgaaccagaaggaggcagtagcctacgcggtgaactcatggactacatcaatcagcggcatgctgcttaaagtcggcattctatatatcggaggccagctcgtaacctccggggccgtttcgtcaggtaacctggtcacattcgttctctatcaaatgcagtttacccaagccgtagaggttcttctcagtatttatcctcgtgtgcaaaaggctgtgggaagctctgagaagatttttgagtacctggacagaactcctaggtgccctccgagcggcctgcttaccccgctccatctggaagggttggtgcagtttcaggacgtgtccttcgcctaccccaacagacccgacgttctcgtgttacaggggcttacattcacactgcgccccggcgaagtaaccgccctggtcggccccaacgggagcggaaaatcaactgttgccgctctgttacaaaacctgtatcagcccaccgggggccaactcctattggatgggaaacctctgccacagtacgaacaccgttatttgcacaggcaggtggctgccgtcggacaggaaccccaggtcttcggtcggagcctccaagagaacattgcttacgggctgacccagaagcccacaatggaagagattacagctgctgcagtgaagagcggagcgcattcctttattagtggtctgcctcagggctatgacacagaagtggatgaggccggatcccagctcagcggcggacagagacaggccgtcgccctcgcaagggccctcatccgtaagccatgcgtgctgattctggacgacgctacatcagccctcgatgccaactcccagctacaagtggagcagttgctgtacgaatctcctgagcgatatagcagaagcgtgctcctcatcactcagcatttgagcctggtggaacaggcggatcacatactgttcctcgagggcggcgcaatccgtgaaggcggcacccaccagcaactcatggagaaaaagggatgctactgggccatggtccaagcccctgccgacgcgcctgaatag

SEQ ID NO: 209470 - DNA, 1644 bp, synthetic construct
  misc_feature 1..1644: note = Description of Artificial Sequence: Synthetic coding sequence
  source 1..1644: mol_type = other DNA
atggccatccccttcttcaccggccggctgaccgactggatcctgcaagatggaagcgcggatacatttacaaggaacctgaccctgatgagtattttgactatcgcctcagcggtgctggagttcgttggcgacggcatttataataatactatgggccacgtccattcacacctccagggcgaggtgttcggcgcggtcttgaggcaggagacagagttctttcagcagaatcagacaggcaatattatgagcagggtgacagaagatacctccactcttagcgactctttgtcagagaacttgagcctgttcctgtggtacctggttcgggggctgtgcctgctcggaataatgctctggggctctgtcagcctcaccatggtgacactgatcacactgcccctactttttctcttgccaaaaaaagtgggcaagtggtatcagctcctcgaggtgcaggtccgagagagtttggcgaaaagcagccaggtggccatcgaggccctgtctgctatgcccaccgtcaggagcttcgccaacgaggagggggaggcgcagaaattccgagaaaagctgcaggagattaaaacactgaaccaaaaagaagcagttgcctatgcagtgaattcttggacgacttccatcagcggcatgctgcttaaggtgggcattctctatatcggcgggcaactggtgaccagtggcgcagtgtctagcgggaatctggttactttcgtactctaccagatgcagttcacacaggccgtggaggtgctgctgtctatctatccccgcgtccagaaggcagtgggatcgtcagagaaaattttcgagtacctggaccgcaccccccggtgtcctccgtccgggctcttgactcccctccaccttgagggcctggtgcagttccaagacgtctctttcgcttatccaaatcgccctgatgtactggttttgcagggactcaccttcactctgcgacccggagaggtgaccgcgctggtcggtcccaacgggtctggaaagtcaacagtcgccgcacttctccagaatctttaccagccaacaggaggtcagctgctcttggatggaaaacctctgcctcaatacgagcaccgataccttcatcggcaggtagccgccgtcggacaagagccccaagtgtttggacgcagcttgcaggagaacatcgcttatgggctgacacagaagcctacgatggaagaaattactgccgctgcggtgaagagcggagcacacagcttcatctccgggttaccgcagggctatgataccgaggtggacgaggcggggagccagctgagcggtggccagcggcaggcggtcgctctcgctcgggccttaattaggaagccatgcgtccttatcctagacgacgcgacttccgccctggatgcgaactctcaactacaggtcgaacagttgttgtacgaatcaccggaacgttactctagatcagttcttctgatcacccaacatctatcattagtcgagcaagctgatcacatcttgtttcttgagggaggtgcgatacgtgagggaggaacccatcagcagctgatggagaagaaaggatgttattgggccatggtccaggctccggccgatgcccctgagtag

SEQ ID NO: 209471 - DNA, 2061 bp, synthetic construct
  misc_feature 1..2061: note = Description of Artificial Sequence: Synthetic coding sequence
  source 1..2061: mol_type = other DNA
atgcggctgcccgacctgcggccctggaccagcctgctgctggtggatgcagcccttctgtggcttctacagggccctctaggtaccctgctgccccagggactgccaggactatggctggagggaactctgagactcggcggcttgtggggactccttaaattacgcgggctgttggggtttgtgggaacgctcctgttgccactctgcttggctaccccactgactgttagcctgagagccctggttgctggcgcttcacgggctccacccgcccgtgtggccagtgctccctggtcttggcttcttgtgggatatggtgctgccggtttatcatggtctttgtgggccgttctgtctcccccaggcgcccaggaaaaagaacaggatcaggtgaataacaaggtgcttatgtggagacttctcaaattgtccagaccggacctaccgctactggtcgccgcgttcttctttttagtactggccgtgctgggcgagactctcattccccattacagcggaagggttattgacatactgggcggcgattttgatccccatgctttcgcatccgccatcttctttatgtgcctgttttcctttggcagctcactgagcgcaggatgtaggggcgggtgcttcacatataccatgagcagaatcaatctcaggattcgggagcagttgtttagcagcctgctccgccaggatttgggattctttcaggagaccaagactggcgaactgaatagtaggctctcatctgatacaactcttatgtccaattggctaccacttaatgccaacgtcttgctacgatcattggtgaaggtggtggggctatacggatttatgctctcaattagccctcgtctgactctgctgtccctgctccatatgcctttcaccattgctgcagagaaggtgtacaacacccgccaccaggaggtcctgagggagattcaggacgccgtggctcgagccggccaggtggtgcgagaagctgtgggcggcctgcagaccgtgaggagttttggggccgaagaacacgaagtatgccggtataaggaggcccttgaacaatgccggcaattatactggcgcagagatttggagcgagcactgtacctactggtacggagagttttgcacttgggcgtccagatgctcatgctgagttgtggcctgcagcagatgcaagatggcgagctgactcaagggagcctactctcttttatgatttaccaggaaagcgtgggaagctacgtacaaaccctggtctacatatatggtgatatgctgagtaacgttggtgccgccgaaaaggtgtttagctacatggaccgacagccaaacctcccttccccgggaaccctggcccctacaacattgcagggggttgttaagttccaggatgtgtctttcgcctatcccaaccgacccgacagacccgtgttgaagggactcacttttacccttagaccaggggaagtgactgccctcgtcgggccaaatggcagtggcaaatctactgttgccgcactgctgcagaacttgtatcagcccaccggtgggcaagttcttctggatgagaagccaatctcgcagtacgagcattgttatctccacagccaggtagtgtcggtcggtcaggagcctgttctgttcagcgggagcgtgcgcaacaacatagcctacggactgcagtcatgtgaagatgacaaagttatggccgcagcccaggccgcacacgccgacgattttatccaggagatggaacatggcatctatactgatgtgggcgaaaaggggtcacaactcgcggccgggcagaagcaacgtcttgccatcgcccgtgccctggtgcgcgacccaagggtacttatcctggacgaggctacctccgccctggacgtccagtgtgaacaagccttgcaggattggaactctagaggggaccggaccgtgctcgtcatcgcccacagactacagacggtacagcgagcccaccagatcttggtccttcaggagggtaagctgcaaaaactggcacagctgtag

SEQ ID NO: 209472 - DNA, 1962 bp, synthetic construct
  misc_feature 1..1962: note = Description of Artificial Sequence: Synthetic coding sequence
  source 1..1962: mol_type = other DNA
atgcggctgcccgacctgcggccctggaccagcctgctgctggtggatgcagcactgctctggttattacagggtcctctggggacactactgccccaaggactccctggattgtggctggaagggaccctgaggctgggtggactgtggggtctgctgaagctccgcggtttgctcggttttgttggtactctgcttctgcccctgtgcctggccaccccccttactgtgagcctgcgtgccttagtggctggggcgtcacgcgcgccacccgccagggttgcatccgctccatggagctggctgctagttggctatggtgcagctggcctcagctggagtttgtgggccgtgctgagtcctccaggggcccaggaaaaggagcaagatcaggttaacaacaaagtactgatgtggcgcctcctaaaattgtctcgcccggaccttcccctgctggtggccgctttttttttcctggtccttgctgtgttgggggaaaccttaattccgcactactccgggcgcgtgattgatattctgggaggggattttgaccctcatgcatttgcctcagccatcttttttatgtgccttttctccttcggatcctcactatccgccgggtgccgaggaggttgttttacttataccatgtcgagaatcaatctcaggattagggagcaacttttctcgtcattgttaagacaggatctaggattcttccaggaaaccaagactggggaactgaattcacgactgtcttcagacacaactctaatgagcaactggctccctttgaatgccaatgtgctacttcgatccctagtgaaagtcgtaggactgtatggatttatgctttcaatttcgccccgcttgacacttttgagcctgttgcacatgccctttacgatcgccgctgagaaagtctataatactcgccaccaggaggtgctcagagaaatccaggacgctgtcgctagagcagggcaggtagtacgggaggccgtgggtggactccaaacagtgcgaagcttcggcgctgaggaacacgaggtttgtaggtataaagaggccctagagcaatgtaggcagctgtattggcgcagagatttggaacgggcgctgtatcttttggtgagacgcgtgctacaccttggggtgcagatgttaatgctgtcatgcggcctgcagcagatgcaagatggcgagctgactcaggggagcttactgtccttcatgatctaccaagaatcagtaggatcctatgttcaaacgctggtctacatctacggggacatgttgagcaacgtgggcgctgccgagaaagtattcagctatatggatagacagccaaatctaccgagcccaggcacactagccccaactaccctccagggtgtcgtcaagtttcaagatgtgtccttcgcttacccaaacaggcccgaccgcccagtgctaaaaggcctcacctttaccttgcgacccggagaggtcactgctctggttggaccgaatggaagcggcaaatccacagtggcggcactgttgcaaaatctgtatcagcccacgggtgggcaggttctactcgacgaaaaacctatctcacaatacgaacactgctatctccactcacaagtcgtgagcgtcgggcaagaaccggtgctattctcagggtccgtgaggaacaatatcgcgtacggactgcagtcttgtgaggatgacaaggttatggctgccgctcaggccgcacacgccgatgactttattcaggagatggagcatggcatctacacagacgtgggcgaaaaaggaagccagctcgcagcaggacagaaacagcgcctggcaattgccagggccctggttcgagacccccgcgtgctcatcctcgatgaggcgaccagcgcactagacgtccagtgtgagcaagcgaaaaccctttggaaattcatgatcttttag

SEQ ID NO: 209473 - DNA, 2061 bp, synthetic construct
  misc_feature 1..2061: note = Description of Artificial Sequence: Synthetic coding sequence
  source 1..2061: mol_type = other DNA
atgcggctgcccgacctgcggccctggaccagcctgctgctggtggatgccgcgctgctgtggctgcttcagggcccgctgggcactttgctcccccagggtctgcccggactatggttagaaggaacgctgcggcttggtgggctctgggggctattaaaacttagaggattgctagggtttgttggcaccctgctgctgccactgtgtcttgccacccctctcacagtgtctttacgcgccttggtagcaggggcatcgcgagcgcctcctgcgcgcgttgcgtctgccccctggtcgtggctgctggtgggttatggagcggcagggctcagttggtccctttgggcggttttgtcgccccccggtgcccaagagaaggaacaagatcaggtgaataacaaagtactgatgtggcgactgcttaagctgagccgccctgatctgcccttattggtcgccgctttttttttcctcgtcctggccgtgctaggagagacactgattccacactactccgggcgggttatagacatcttggggggtgacttcgacccacacgcttttgcctctgccatctttttcatgtgtctgttctcgttcggcagctccctcagcgctgggtgtcggggtggctgtttcacgtacacaatgagcagaataaatctgaggatcagagaacagctctttagcagtttgctgagacaagatttaggattttttcaggagacaaagaccggagagctgaactccaggttgagcagtgatactacgttaatgtccaactggctcccactgaacgccaatgtgctgcttcggtcactcgttaaggtggtggggctgtatgggtttatgctttcaatttcacctcgactgaccctgctttccctgctgcatatgccctttacaatcgctgccgaaaaagtctataacactcgacaccaggaagtgttgcgcgagatacaagatgcagtagctagggctggacaagtggttagggaagcagtgggtgggcttcaaactgtgcgatccttcggggccgaagagcacgaggtgtgtagatacaaagaagctctggagcaatgccgacagctctattggagaagggacttggaacgcgccctgtacctactggtccgccgcgtcctgcatctcggggtgcagatgctcatgctctcctgcggcctgcagcagatgcaggacggagaattgactcaaggcagcttgctgagcttcatgatttaccaagagtctgtggggagttacgtgcagactcttgtttatatatacggtgacatgctaagcaacgtcggggccgccgagaaggtgtttagctacatggacagacaacctaacctgcccagtcctggcacccttgcccctaccacactgcagggagtggttaaattccaggacgtgtcattcgcctaccctaataggccggaccgcccagtgcttaagggcttgactttcactcttcgccctggtgaggtcacggctctcgtgggaccaaacggtagcggaaagtcaactgttgctgcactactgcagaacctgtatcagcctactgggggtcaagttctgttagacgaaaagcccattagtcagtacgaacactgttatcttcacagtcaagtggtttccgtcggccaggaacccgttctgttctcaggttccgtgagaaacaatatcgcctatggactgcaaagctgtgaagatgataaggtgatggccgctgcacaggccgctcacgctgacgactttattcaggagatggaacacggcatctatacggatgtcggggagaaggggtcgcaactggctgccggtcagaagcagagactggctattgcacgcgcccttgtgagggatccccgggttctgatactcgatgaagcgacatctgcactggatgtccagtgtgagcaagctttgcaggattggaatagcaggggtgatcggactgtgctggtgatcgctcacagactgcagacagtgcaacgggcgcatcagatcctggtgctgcaggagggcaaactgcagaagctggcacagttatag

SEQ ID NO: 209474 - DNA, 1962 bp, synthetic construct
  misc_feature 1..1962: note = Description of Artificial Sequence: Synthetic coding sequence
  source 1..1962: mol_type = other DNA
atgcggctgcccgacctgcggccctggaccagcctgctgctggtggacgccgcattgctttggctgctgcaggggccacttgggacgctgctgccgcaagggttgcctggcctgtggctcgagggaacgctcagacttggtggcctgtggggcctgcttaagctcagaggacttctgggattcgtgggcactctcttgctccctctttgcctggcaactcctcttaccgtctcgctaagagcactggttgctggcgcatccagggctccccctgcacgggtggcctccgccccgtggtcctggctgctggtgggctacggggcagctgggctgagttggtcattgtgggcagtgctcagtccaccaggggctcaagagaaagagcaggatcaagtaaacaacaaggtcctcatgtggaggctgctgaaactctcacggccagaccttcctctgctggtagcggcgttcttctttctggtccttgctgtgcttggcgaaaccttaatccctcactactccggcagggttatcgacattctgggaggcgattttgatccgcacgctttcgcgtcggccattttttttatgtgcctgttttcctttgggagctctctctccgcggggtgtcgaggcggctgtttcacctatacaatgtcgcggatcaatctgcgtatacgggagcaacttttcagcagtctgcttagacaggacctgggattcttccaggagacaaagaccggagaactcaactcgcggttgagtagtgacacaaccctgatgtccaactggctcccactaaacgcaaatgtgctcctccgctcgctagtgaaggtcgtaggactgtacggatttatgttgtccatctcgcctcggttaaccctgctcagcctcctgcacatgccctttaccatcgcagctgaaaaggtgtataacactaggcaccaggaggttctgagagagatccaggacgcagtcgccagggctggtcaagtggtgcgcgaagcagttggcgggcttcagactgtgcgctccttcggagcggaggagcacgaggtctgtcggtacaaggaagcgctcgaacagtgtaggcagctgtattggagaagagatttggaacgtgcactttacctgttggtacgcagagtactccaccttggcgtgcaaatgcttatgctgtcatgcgggctgcagcaaatgcaggatggcgaactgacccagggctcgttgctgagtttcatgatctaccaggagtcggttggatcttacgtgcagaccctcgtctacatttatggagatatgctctctaacgtgggcgcagcagaaaaggtattctcatacatggaccgccagccaaacctgccgtcccctgggacattagccccaacaaccctgcagggtgttgtcaaatttcaagacgtaagctttgcctaccctaatcgacccgataggcccgttttgaagggcctgacattcaccttgagacctggggaagtgactgccctggtggggccgaacggatccggaaagtccacagtggctgcgttgttgcagaatctgtatcagccgacgggaggacaggttctcctggatgaaaagccaatttctcagtatgagcattgttacttacactcccaggtggtgtccgtcggacaggagcccgtgctgttttccggctcagtcagaaataacatagcttacggtctgcagtcttgtgaggatgacaaggtcatggctgctgcccaggcggcacatgctgacgattttatccaggaaatggagcacggaatctacaccgatgttggtgagaaagggagtcagctggccgcaggacagaaacaacgcttggccatcgccagggcactggtgcgggatcccagggtacttatcctggatgaagccacatcagcccttgatgttcaatgcgaacaggctaaaaccctgtggaagttcatgatcttctag

SEQ ID NO: 209475 - DNA, 2061 bp, synthetic construct
  misc_feature 1..2061: note = Description of Artificial Sequence: Synthetic coding sequence
  source 1..2061: mol_type = other DNA
atgcggctgcccgacctgcggccctggaccagcctgctgctggtggacgccgccctgctgtggctgcttcagggtccactcggcactctattgcctcagggccttcctggcttgtggctggagggcaccctgcggcttggcggactatggggtctgctgaaactgcggggcttgttagggttcgtcggcaccctcctgttgccactctgtttagccactcctctgactgtgagcttacgggctttagtcgctggcgctagtagagccccccctgcccgagtggcctcagccccatggagctggctgttagtggggtacggtgcagccggtctatcttggagtctgtgggccgtgctgtctcctcctggagcgcaagagaaagaacaagaccaagtcaacaacaaagtcctgatgtggcgactgttaaagctctctaggcccgacctgcctctcctggtggctgccttcttctttctcgtgctggcagtgcttggggagacccttattccccactattcaggaagggtgattgatatcctcggaggcgacttcgatccacacgcatttgccagcgccatcttttttatgtgcctattttcctttgggtcatccctttctgcgggatgccggggaggctgtttcacatacaccatgtctaggattaacctgagaatcagggagcagctgttctctagtctgctccgccaggatctcgggttttttcaggaaaccaagacaggggagctcaactcccgattgagcagcgacactactttgatgtcaaattggctgccgctgaatgccaacgtcctgctacgttcacttgttaaagtggtcggcctatatggttttatgttaagcatatcacctagactgacattactgtctctcctacatatgccctttacaatcgccgccgagaaggtgtacaatactagacatcaggaggtccttagggaaattcaggacgctgtggcacgggcaggtcaggtggttcgcgaagcggttggcggacttcagacagtgcgaagctttggtgcagaggagcacgaggtgtgtcgctacaaagaggcactggaacaatgccgccagctgtactggaggcgggacttagaaagagccctctatctcctcgtaagaagggtgctccatctgggcgtgcaaatgctgatgttgagttgcggattgcagcagatgcaagatggggaactgacacaagggagccttctttcctttatgatctatcaggaatcagtgggctcctacgttcaaacactggtatatatttatggggacatgctgagcaacgtcggcgccgctgagaaggtgttcagctatatggatcgccagccaaatttaccaagcccaggcaccctggcacccaccaccttacagggggttgttaaattccaggacgtgtcctttgcatacccaaataggcctgaccgcccagtactcaaaggccttacgttcacgctcaggcctggagaagtgaccgcactggtgggcccgaatggttccggcaaaagcacagttgccgcgttgctgcagaacctgtatcagcctaccggcgggcaggttctactggatgagaagcccatcagccaatacgagcattgctatctgcatagccaggtagtgtcggtgggacaggagccggtgctgttttcaggttccgtaagaaacaacattgcctatgggctgcaatcctgcgaggacgataaggtgatggctgctgcccaggccgctcatgcggacgatttcatccaagaaatggaacatggcatttacacagatgttggtgaaaagggctctcaacttgccgccggccaaaaacagcgcctcgcaatcgcgcgtgctctcgtcagggatcctagagtcctgatccttgacgaggcaacctcagcacttgacgtgcagtgcgaacaggccctccaggattggaactcacggggggacaggactgtgctggttattgcccaccggctgcagactgtgcagagggcacatcagatcctagtgctgcaggaaggtaaactgcaaaagctggcgcagttgtag

SEQ ID NO: 209476 - DNA, 1962 bp, synthetic construct
  misc_feature 1..1962: note = Description of Artificial Sequence: Synthetic coding sequence
  source 1..1962: mol_type = other DNA
atgcggctgcccgacctgcggccctggaccagcctgctgctggtggatgccgctctgttgtggcttctgcagggaccgttgggcaccctgcttcctcaaggcctgcctggcctctggctggagggtacgctgcgtttgggcggcctgtggggactgctcaaacttcggggcctgttaggatttgttgggacacttctgctcccgctatgtctagcaaccccgctgaccgtgtcattgcgcgccttggtggctggcgcctcaagagcaccacctgcccgcgttgcttcggccccttggtcttggctcttggtgggctatggagccgccggcctgtcctggtccctgtgggcagtgttatctcctcctggcgcacaggagaaagagcaggatcaagttaacaacaaggtacttatgtggcggctgttaaagctcagcaggcccgatctgcctttgctcgttgccgccttctttttccttgtgctggcagtcctgggggagaccctcatcccccactatagcggaagggtgatcgatattctgggtggagatttcgacccccacgcattcgcatcagccatattcttcatgtgtctgtttagtttcggttcatctcttagcgctggatgccggggggggtgttttacctacactatgtcccggattaacctgagaatccgggagcagctgttctccagtctgctgaggcaggacttgggcttcttccaggaaactaagacaggagaattaaatagccgattatccagcgacactacgctgatgtccaactggctccctctgaatgcaaacgtcttgctgcgaagtttggtgaaggtggtcggcctctacgggttcatgctgagcatttcaccacgcctgaccctgcttagcttgctgcacatgcccttcacgatcgccgccgaaaaggtgtacaacacaagacatcaggaagtacttagagaaattcaggatgccgtggcacgtgcaggacaggtggtgcgcgaagccgtgggtggtttgcagactgtccgcagttttggcgctgaggagcatgaggtatgccgctacaaggaagccctagagcagtgcagacaattgtattggaggagggatttggagcgggccctttatctgctggtgcgcagggtgttgcatctgggagtgcagatgctcatgttatcatgcgggctccagcaaatgcaggacggagagctaacacaggggagtctgttatcatttatgatctaccaagaatctgttggtagctatgtgcagacacttgtctacatctatggagacatgttgtctaacgtaggggccgcagagaaagtcttctcatacatggataggcaacctaaccttcctagtccaggcacgttagcgccaaccacactgcagggtgtcgtcaaatttcaagacgttagtttcgcatatcccaatcgccccgatcggccagtgctaaaaggactgacgtttaccctacgccctggcgaggtcacggccctcgtgggtcctaatggcagtggaaagagtactgtggccgcccttctgcagaacctctatcagccgacgggagggcaggtcctgctggacgaaaagcctatatctcagtacgagcactgctacttgcactcccaggtggttagcgtgggccaggagcctgtgctattttcaggtagtgtgcgtaacaatattgcatacggcttacaatcctgcgaggacgataaagtgatggcagccgctcaggccgctcatgctgacgactttatacaggaaatggaacatggtatttataccgatgtgggcgaaaagggttcccagcttgccgccgggcagaagcagcgactcgctatcgccagagctctcgtcagggaccccagagtcctgattctcgacgaggccacttcagcactggacgtgcaatgcgagcaggcaaagaccctatggaagtttatgatcttctag

SEQ ID NO: 209477 - DNA, 1962 bp, synthetic construct
  misc_feature 1..1962: note = Description of Artificial Sequence: Synthetic coding sequence
  source 1..1962: mol_type = other DNA
atgcggctgcccgacctgcggccctggaccagcctgctgctggtggacgccgccctgctgtggctcttgcaaggaccactggggacactactgccccagggactgccagggttgtggctggaaggcaccctgcggctaggcggcttgtggggcctccttaagctgcgaggcctcttaggctttgtcggtactttgctgctgccactgtgtctcgccactcctttgacagtgagcttgcgggcgctggttgcaggggcctcccgagcaccccccgctagagtggccagcgccccttggtcctggctcctggtgggatacggggctgctggccttagctggagtctatgggccgtgctctcacctcccggtgcccaagaaaaggaacaggatcaggtgaacaacaaggtactaatgtggcggctgctgaaattgtctcgacctgacctacccttattggtggcagcgtttttctttcttgttctggccgtgctaggagagactttgataccacactactccggacgcgttatcgatattttgggcggagatttcgatccccatgctttcgcctctgcgatctttttcatgtgcttgttttcctttggttcttctttaagcgctgggtgcaggggaggttgcttcacatacaccatgtcacgaattaatctgaggattagggaacagttgttctcatccctgttaagacaagatttgggtttcttccaggaaacaaaaacgggcgagctgaactcgaggctgtccagcgataccacgctcatgagtaactggttacctctgaatgctaatgtgttgttacgctcccttgtgaaggtggtggggctatacggcttcatgctgtcgatctctcccaggctcaccctgctgtcccttctccacatgccattcacaattgcggccgaaaaagtgtacaacaccagacaccaggaagttctgcgcgaaatccaggatgccgtggcgagggctggacaggtggtgcgggaggccgtgggcggtctgcagaccgtccgctcttttggtgctgaggagcacgaggtttgcagatataaagaggcccttgagcagtgcaggcagctgtactggagacgggacctggagcgggcactgtaccttctcgtgcgtcgagtcttacacctgggagtgcagatgctgatgttgtcgtgcggactgcagcaaatgcaagatggcgagctgacgcaaggtagtcttttatcttttatgatttaccaagagtccgtcggaagctacgtgcaaaccctggtctatatctacggcgacatgcttagtaacgttggtgcggctgaaaaagtgttcagttatatggaccgtcagcccaacctgcccagtcctggaacactagctcctactacactgcagggcgttgttaagtttcaggacgtttcttttgcatatcctaatcgccctgacaggccggtgctgaaaggcctgaccttcacgctacgtcctggcgaggtgactgctctggttggacccaacggttctggcaagtctacagtcgccgcactcctacagaacctgtaccagccaacgggtgggcaggtactgctggatgagaaacctatctcacagtacgaacactgctatctacacagccaagtggtgtctgtgggacaggaaccggtcctgttcagcggctccgttcgtaacaatattgcatacggcctccagtcgtgcgaagatgacaaggtgatggctgccgcccaggccgcacacgcagatgactttattcaagagatggagcatggaatctacactgacgtcggagagaaaggcagccagctagccgccggccagaagcagaggcttgctatagcaagggctctcgtacgggatccccgggtcttaattctcgatgaggcaacttcggctttagacgtccagtgcgagcaagctaaaacattgtggaaattcatgattttctag

SEQ ID NO: 209478 - DNA, 2061 bp, synthetic construct
  misc_feature 1..2061: note = Description of Artificial Sequence: Synthetic coding sequence
  source 1..2061: mol_type = other DNA
atgcggctgcccgacctgcggccctggaccagcctgctgctggtggacgccgccctgctctggctgctgcaaggtcctttggggaccctgctgccccagggcctcccaggcctctggcttgaaggcacattgcggctcggtggcctgtggggactactaaagctgcgaggtcttttgggatttgtgggaacactgctacttcccttatgcctcgccacccccttaaccgtcagtctgcgcgcactggtggctggtgctagtagggctccgccagcgagggttgcaagcgctccgtggagttggctactggtgggttatggcgcggctggcctgagttggtccttgtgggcagtcctatctccacctggagcccaggaaaaggaacaagaccaagtcaataataaagtcctgatgtggagattactgaagctgtcgaggcccgacctgcccctgctggtggctgcttttttctttctggttcttgctgtcctcggggaaacattgatccctcattactccggacgcgtaatcgacatactgggtggcgactttgatccacatgcatttgcttccgctatattcttcatgtgcctgttcagcttcggaagttctctgtctgccgggtgtaggggagggtgcttcacgtatacaatgagcagaattaatctccgaatcagggaacagctcttctcctccttgttgcgacaggatcttggttttttccaggagactaaaacgggcgaactgaactcccgcctctccagcgacaccactctcatgtccaactggctccccctaaatgctaatgtgttattacggagcttggtcaaggtagtcggcctctacggatttatgttatctatatcccccaggctgacgcttttatccctactgcacatgccatttactatcgccgcagagaaagtatataacacacggcaccaggaggttttgcgagaaattcaagatgccgtcgccagagccggacaggtggtgcgcgaggccgtgggaggtctgcagaccgttcgttcttttggcgccgaggagcatgaggtgtgtaggtacaaagaggctctggaacagtgccgccagctctattggagacgggacctggagagggcactgtaccttttgatccggcgggtgctgcatctgggcgtacagatgctcatgctcagctgtgggctgcagcagatgcaggacggtgagttgacgcaaggctctttgttaagctttatgatttatcaagagagcgtaggtagttacgtgcaaaccctggtctacatctatggcgatatgttgagcaacgtgggagccgctgaaaaagttttcagctacatggatcgccagcccaatctgcccagcccagggacccttgctcctaccacattgcagggggttgttaaatttcaggacgtatctttcgcatatcccaaccggcccgatagacccgttctgaagggactgacatttactttacgccctggagaggtgactgcccttgtgggacccaacggtagcggtaaaagtacagtcgcagcactgctgcagaacctgtaccagccaactggcgggcaagtcctcctggacgagaaaccgataagtcagtatgagcactgctacctccacagccaagtggtttcagtgggccaggagccggttcttttttcaggctccgttcggaataacattacctatggcctgcagagctgcgaagacgacaaggtgatggccgcagctcaggcagcgcacgccgatgacttcattcaggagatggagcatggcatatacacagacgtcggagagaagggcagtcaattggccgctggtcaaaaacagcgtctcgccattgcccgtgcactagtgcgtgatcccagagttcttatcctcgacgaggctaccagcgcattggacgtccagtgcgagcaggccctccaggactggaactctaggggcgacaggactgtgctggtgatcgcacacagactccagaccgtacagcgggcacatcaaatacttgtgttgcaggaagggaagctgcagaagttagcacaactgtag

SEQ ID NO: 209479 - DNA, 1962 bp, synthetic construct
  misc_feature 1..1962: note = Description of Artificial Sequence: Synthetic coding sequence
  source 1..1962: mol_type = other DNA
atgcggctgcccgacctgcggccctggaccagcctgctgctggtggacgctgccctcctatggttactccagggccccctgggcacccttctgcctcaaggccttccagggctctggcttgagggcacgctgcgcctgggcgggctctggggcctgctgaagctgcgcgggctgctgggattcgtaggtacgctgctactccctctctgcctcgctacgccactcacggtctccttaagggcactggtggcaggtgcaagccgagcccccccagccagggttgccagcgccccatggtcttggttgctcgtgggctatggggccgcaggactctcatggtcactctgggccgtactctcccccccgggtgcacaagagaaagagcaggaccaggtgaacaacaaggtcctgatgtggaggctgctgaagctttcccgtcctgacctgccactgctagtggctgcgttcttttttctggtgctcgccgtgctaggtgaaaccctgatcccacactattctggcagggtgatcgatatcctgggaggcgacttcgacccccatgcgtttgcctccgcaattttttttatgtgtcttttcagcttcggtagttcactgagcgcaggatgccggggggggtgctttacttatactatgagtagaattaacctgagaatccgggaacagctcttttcttccttgcttcgacaggatctcggcttctttcaggaaacgaagaccggcgagctgaattccaggttgtcttcagacacgacactgatgtctaactggttgccgctgaacgccaacgtgctgctgcgctctttagtgaaagtagtgggcttgtatgggtttatgctgagcatctcccccaggcttacattgttgagcctgttgcacatgccatttaccattgccgccgagaaagtgtacaatacacgtcatcaggaggtactacgggagattcaggacgctgttgcccgcgccggccaggttgtgcgagaagccgtgggaggtttgcagaccgtccgctcttttggtgccgaggagcacgaagtgtgtaggtacaaggaagcactggagcagtgtagacagctatactggaggcgagacctcgagagggctctttatctgctggtgaggagggtgctccacctgggtgtccagatgctgatgctctcctgtggcctccagcagatgcaggacggagagctaactcagggaagcctgctgagttttatgatctaccaggaatcggtaggcagctacgtgcagacactcgtgtacatatacggcgacatgctaagtaacgtgggggccgctgagaaagtcttttcctatatggacaggcaacctaatctcccatcacctggcacactggcacctaccactctgcagggcgtcgtgaaatttcaggatgtatccttcgcctatccaaaccgtcctgaccggccagtactgaagggcctgaccttcactttgaggccaggtgaggtaaccgcactggtcggaccaaacggcagtggaaagtcgacagtagctgcactgctccagaatttgtaccaacccaccggaggccaggtcctgctagacgagaaacctatcagccagtacgagcactgttacctgcactcgcaggtggttagcgtaggacaagaaccagttctatttagtggctccgtcaggaacaatatcgcctatggtctgcaaagttgcgaagacgacaaagtgatggcagccgcacaggccgcacacgccgacgacttcattcaagagatggagcacggtatctatacagacgtcggcgagaaagggagccaactggcagcaggccagaagcagagactggcgatcgctcgggctcttgtgcgggacccacgggtgctcattctagatgaggctactagcgctctcgacgtgcagtgcgaacaggcgaaaaccctctggaaatttatgattttctag

SEQ ID NO: 209480 - DNA, 1962 bp, synthetic construct
  misc_feature 1..1962: note = Description of Artificial Sequence: Synthetic coding sequence
  source 1..1962: mol_type = other DNA
atgcggctgcccgacctgcggccctggaccagcctgctgctggtggacgcagccttactgtggcttttacaaggaccattgggcacactgttgccacagggcttgccgggcctttggctggagggcactctgcgactcgggggtctgtggggccttctcaaactcagggggctgttggggtttgtgggaaccttgctcctccctctctgcctggcaaccccattaactgtcagcctcagggctctcgtcgcgggcgctagcagagctccccccgccagggtggcctccgccccatggtcttggctgctggtgggatacggagcagccggcttgagctggtccttatgggcagtgctttcaccccccggggcacaggagaaggaacaggaccaggttaataacaaggtcctgatgtggcgcctgctgaaactgagcaggcccgacctgccacttttggtggctgcattcttctttctcgtgctagcagtactcggggagactcttattccacattattcagggagggtgattgacatacttggcggggacttcgaccctcacgcattcgcgagcgctatcttttttatgtgtttgttcagcttcggcagcagtctttctgctggatgccgcggcgggtgttttacctatacaatgagccggattaacctgcgtattcgagagcagcttttttcctccctgctgcgccaggacttgggcttttttcaggaaacgaaaacaggtgagctgaactctaggctgtcctctgacacgacactcatgtctaactggctcccattaaatgcgaacgtgctcctgcggtctctggtcaaggtggttgggttgtatgggtttatgctctcgatatctccccgcctgactctgctcagtctgctgcatatgcccttcacaatcgctgccgagaaggtgtataacacccggcatcaggaagttttacgggagattcaagatgccgtcgccagagccggacaagttgtccgagaggcggtgggcggccttcagacggtgcggtcgtttggtgcagaagagcacgaagtttgccgatacaaagaggccctagaacagtgtcgccagctttattggagaagagacctggagcgggcactttatctgcttgtacgccgcgtgttgcatctgggggtccagatgctgatgttgagttgtggtctccaacagatgcaggatggcgagctgacccagggcagtttactgagctttatgatttaccaggagtcagtggggtcatatgttcagacgttggtttatatttacggggacatgctctccaatgtgggtgctgcagaaaaggtattttcatacatggaccggcagccgaatctgccctccccgggcacactagcccccaccacattgcagggcgttgtcaagtttcaggacgtctcatttgcctatcccaacaggcctgatcgaccagttcttaagggcctaacctttactctgaggccaggtgaagtcaccgctctggtaggcccaaacggcagtggcaaaagtaccgtcgccgcgctgttgcaaaacctctaccagcctacaggtggtcaggtgctgctcgacgagaagcctataagtcagtacgaacattgttacctccattcccaggtggtttcggtaggtcaagaacctgttctcttctctgggtccgttcgcaacaatattgcctatgggctgcagtcctgcgaagacgacaaggtgatggccgcagctcaggccgcgcacgctgacgacttcatccaagagatggaacacggtatttatactgacgtcggcgagaaaggctcacagctggccgccggacaaaaacaacggctcgccatagctcgtgcactggtgcgggacccaagggtgctgatcttagatgaagccacttccgctttggacgtgcagtgcgaacaagctaagacgctttggaagttcatgatattctag

SEQ ID NO: 209481 - DNA, 2061 bp, synthetic construct
  misc_feature 1..2061: note = Description of Artificial Sequence: Synthetic coding sequence
  source 1..2061: mol_type = other DNA
atgcggctgcccgacctgcggccctggaccagcctgctgctggtggacgctgcccttctgtggctgctgcagggacctttaggcaccttactaccccaggggctaccaggtctctggttggaaggcacactccgtctcggcggactctggggattgctgaaattaagagggctgctgggctttgtcggtactctattgctgccgttgtgcctggccaccccgctaaccgtgagtttgagagcgctggtggctggagcatcccgtgcgccacccgctagggtcgctagtgccccatggtcttggctgttggtcgggtatggagctgccgggctgtcctggtcactgtgggccgtgctgtcccctccaggagcacaggagaaggaacaggatcaggtcaacaacaaggttctaatgtggaggctgctgaaactgtcccgtccagatctgccactacttgtggcagcatttttctttctggtgctggccgtgttaggcgaaacactcatccctcactactcgggaagggtaatcgatatcctggggggggacttcgatccccatgcctttgcttctgctatcttcttcatgtgcctgttttctttcgggtcatccctgtcggccggatgtcgcggtggctgcttcacctacacaatgagtcgcatcaatctgcgaatccgtgagcagcttttctctagtttgctgcggcaagacctgggcttcttccaggagaccaagacaggcgaactgaatagcaggctgtcttcagacaccaccttgatgtccaattggctgcctctgaatgctaatgtgctgctgagaagtctagtcaaggtcgtgggtctttacggattcatgctcagtatctcacctcgcctaaccctcctctcgcttctgcacatgccatttacgatcgctgcagagaaagtgtataatacacgccatcaggaggtgttgcgggaaatccaggacgccgtggcaagagcgggccaggtcgtgcgggaggccgttggcggcctgcagaccgttaggtcgtttggcgcagaggaacatgaagtttgtaggtataaggaggccctggaacagtgccggcagctatattggagacgggatctggaacgtgccttgtacttgctggtacgccgggtcttacacctgggggtgcagatgttaatgctctcctgtgggttgcagcaaatgcaagacggcgaacttactcaggggtccctgctgtcgtttatgatctaccaggaaagcgtcggaagctacgtccagacgctcgtgtacatctatggtgatatgctttctaatgtcggagcggcagagaaagtcttcagttatatggaccggcagccaaacctgccatcacctggcacactggctcctacaacccttcagggcgttgtcaagttccaggatgtgtcctttgcctacccgaacagacccgaccgccctgtgctcaagggccttacctttaccttgagacctggcgaggtcacggctctcgtgggacctaacggaagtgggaaaagcacggttgccgccctgctccaaaatctgtatcagcctaccggtggacaggtcctgctggatgagaaaccaatctctcagtatgagcattgttatttgcattcccaggtcgtatccgtgggccaggagccagtcctctttagtggctccgtgcggaacaacatcgcttatggactacaatcatgtgaagatgacaaagtgatggccgccgcacaggccgcccatgccgatgacttcattcaggagatggagcatgggatctacactgacgtgggcgaaaagggcagccagctggccgcaggtcaaaagcagcgcctagcgatagctagggccctggtgcgagatccacgcgtgttgatcctcgatgaggctacgagtgcccttgatgtgcagtgtgaacaagccctccaggattggaattcacgcggagaccgcaccgtcctggtgatcgctcatagactacagacggttcagcgagctcatcagattctggtactgcaggaaggaaagcttcagaaactagctcagctatag

SEQ ID NO: 209482 - DNA, 1962 bp, synthetic construct
  misc_feature 1..1962: note = Description of Artificial Sequence: Synthetic coding sequence
  source 1..1962: mol_type = other DNA
atgcggctgcccgacctgcggccctggaccagcctgctgctggtggatgccgctttgctgtggctcctccaagggccactgggtacccttctaccccagggactgccagggctttggctagagggcaccctgcggctgggcggcctctggggcctgctgaaattaaggggtctgctgggcttcgtggggacactgctgttacccctgtgcttggccacaccccttacggttagccttagagccctcgtggctggtgcttccagggccccacccgcacgagtggcgtccgctccttggagctggctgctggtgggctacggcgctgccggcctgtcatggagtttgtgggccgtgctttcaccccccggcgcacaggaaaaagagcaggaccaggtcaacaacaaggtcctgatgtggcggctccttaagttgagccgccctgacctccccctgctggttgcagctttcttctttctggtcctggctgttctgggagagactctgattccccattattccgggagagtgatcgatatcctgggtggagatttcgacccccacgccttcgcttccgctatatttttcatgtgcctcttttcattcgggtcttccctctctgcaggctgcagaggcggctgctttacatacaccatgtcccgcataaacctccggattagggagcagttattctcatccctgctgcgccaggatctgggcttttttcaagaaactaagactggagagctcaactctaggctatcctctgatacaacactgatgtctaactggctgccattgaatgccaatgtgctgctgagaagtctcgttaaggtggtaggcttgtacggtttcatgctgtcaatcagccctaggcttacactgctgtccttgcttcatatgccctttactatcgccgccgagaaggtttacaatacccggcaccaggaagtcttgagagagatccaggacgccgtcgctcgggctggccaggtcgtcagggaagcggtcggaggtctgcagactgtgaggagctttggagccgaagagcacgaggtatgtcggtacaaagaagccttggagcagtgcaggcagctgtactggagaagggatttagaaagagccttgtatctactaatcagacgtgtgctgcacctcggcgtccagatgctcatgctttcatgtggtctccaacaaatgcaagatggcgagttaacgcaggggtccctactgagtttcatgatctatcaggagtctgtcgggagctatgtccagaccttggtatacatttatggcgatatgctctctaatgtgggagccgcagagaaagtgttctcctacatggaccgccaacccaatctgccctcgcccggtaccttggcccctacgaccctgcagggtgtggtgaagttccaggacgtgtctttcgcataccccaatagaccagaccggccagtcctcaagggcctgacatttactcttaggccaggagaagtcacagcccttgtcggtcctaacggatctggcaagagcactgttgctgccttgctgcaaaacctttatcagcccaccggaggccaagtgttactcgacgaaaaaccaatatcccagtatgaacactgctacttgcactcccaggttgtgtccgtggggcaggaaccggtgctgtttagcggatcagttaggaacaacattacctatggcctgcagagttgtgaggacgacaaggtcatggcagcagcccaggcagcccatgctgacgatttcattcaggaaatggaacacggcatatacactgatgtgggagagaaagggagtcagctcgccgcaggtcagaagcagcggcttgcgattgcccgggccctcgtccgcgacccccgtgtcttaatcctcgatgaggccacctctgccctcgacgtacagtgcgaacaagccaagacactgtggaaatttatgatcttctag

SEQ ID NO: 209483 - DNA, 1962 bp, synthetic construct
  misc_feature 1..1962: note = Description of Artificial Sequence: Synthetic coding sequence
  source 1..1962: mol_type = other DNA
atgcggctgcccgacctgcggccctggaccagcctgctgctggtggatgcagcactcctgtggctcctacaggggccccttggcacacttctgccccaaggacttccagggctttggctggaaggaaccttgcggcttggggggctctggggcctgctcaaactgagaggactcctgggcttcgtgggaacgttgctcctgccgctctgtttagctacacctcttactgtctctctcagagcactggtggctggggcttcacgcgcccccccggctcgggtcgcctctgcaccctggtcatggcttctggtggggtacggggcagccggcctgtcctggtccctctgggctgttctgtccccaccgggtgcccaggagaaagaacaggatcaagtgaataataaagtgttgatgtggcggctgctaaagctgtctcgaccagatcttcccctgctggtggccgccttcttctttttagtgctagctgtcctcggagagacactaattccacactactccggcagagtgattgatattcttggcggcgactttgacccacacgccttcgcatctgctatcttctttatgtgtctgttcagcttcggatcttcgctctctgcaggatgtcgcgggggttgcttcacatatactatgagccgtattaacctccgtatccgcgaacaactattttcttcgctgctacgacaagacctggggttttttcaggagaccaagaccggggagttgaattctagactgtcatccgatacgacccttatgagtaattggttacctcttaatgccaatgtgttactgaggtccctagttaaagtcgtcgggctgtacgggttcatgctctccattagtcctcgcctcacactgctctcccttctccatatgccattcaccatcgccgccgagaaggtctacaacactagacaccaggaagtgctgagagaaatccaagacgccgtcgcgagggccgggcaggtggtgagggaagccgtgggcgggctgcagaccgtccgttcctttggcgcagaagaacatgaagtgtgcagatacaaggaagccctggagcagtgtcgccagctgtactggcgtagagatctggagagagcactttacttgcttgtgagaagggtcctgcacctgggagtgcagatgttgatgctgtcctgcggactgcaacagatgcaggatggagagcttacccagggctccctcctgagtttcatgatataccaagagtctgttggttcgtacgtccagacactggtttatatctatggggatatgctgtccaatgtcggagctgccgagaaggtgttctcctacatggaccgccagccaaatctgccatcccctggaacgctggcaccaaccaccctgcagggagtagtgaaatttcaggatgtgtctttcgcgtaccctaatcgcccagatcggcccgtgctgaagggcctcacatttacgttgcgcccaggcgaggtgaccgccctggtagggccgaacgggagtggcaaatctaccgtcgctgcactgctgcagaacctttatcagccaacaggcgggcaggtcctgctcgatgaaaagccaatatcgcagtacgagcactgctatctgcacagtcaagttgtgtctgtgggacaggaaccagttctgttctctggatctgttaggaataacatcgcgtacggtctgcagagctgtgaagatgacaaggtgatggcagctgcccaggccgcccatgccgatgattttattcaggagatggagcatggtatctacactgatgtcggcgagaaagggtcacagctagccgccggtcagaaacaacgcctcgccatcgccagagccctggtgagggatccaagggttttgatcctcgacgaggcaaccagcgctctcgacgtccagtgtgagcaggccaagacactctggaagttcatgatcttctag

SEQ ID NO: 209484 - DNA, 2112 bp, synthetic construct
  misc_feature 1..2112: note = Description of Artificial Sequence: Synthetic coding sequence
  source 1..2112: mol_type = other DNA
atgcggctgcccgacctgcggccctggaccagcctgctgctggtggacgcagctctgctgtggctgcttcaggggcctctgggaacactactccctcagggcctgcccggcctgtggctcgagggcactctccgtctcggggggttatggggactgctgaagttgcgcggcttactggggtttgttggcacgcttctgctccccctgtgtctggccactccactgaccgtctctctccgggcactggtggctggggcctctagagcaccacccgcccgcgtcgcctccgccccctggagttggcttctcgtgggctacggcgctgccggcctgagttggagcttgtgggctgtgctgtctccacctggagcacaggaaaaagaacaagatcaggtgaacaataaagtgctcatgtggcgccttcttaaattgagtagacccgatcttccactactagtggccgcatttttcttcctggttcttgcagtgctcggcgaaacactaatcccccattactccggacgggtcattgacattctgggcggagacttcgatccccatgcgttcgcctcagccatcttctttatgtgtctcttttcgttcggctccagtctgtctgccggatgccgaggaggctgttttacctacacgatgtcgcgaattaacttacgcatcagagagcagcttttctcaagcctactgagacaggaccttgggttcttccaagagactaagacaggcgaacttaactccaggttgtcgtcggatacgacgctgatgtcaaattggctcccactgaatgccaatgtgttgctccgctctcttgtgaaagtggtgggcctttacggcttcatgctatcaatatcccctaggctcacacttttgagcctactgcatatgccctttactattgccgctgaaaaagtatacaacacgagacatcaggaagtgctgcgagaaatccaagacgcagtggcccgcgctggccaggtagttcgggaggcagtcggtggactccaaaccgtgcgctcttttggagctgaagaacatgaagtgtgccgatataaggaggcactggaacagtgcagacagctttactggaggcgcgacctggaaagggcattgtatcttcttgtgcgccgggtactacacctgggtgtgcaaatgttaatgctgagctgcgggctacagcaaatgcaggatggcgagcttacccagggttcactgctgtcctttatgatttaccaagagtcggttggatcttatgttcagacactggtctatatctatggcgatatgctgagcaacgttggtgccgccgaaaaggtattctcttatatggacaggcagcctaatctaccttcccccgggacactggccccaaccactttgcagggtgtggtaaagttccaagacgtgtcatttgcctatcccaacagaccagatcggccagtcttaaaggggttgacttttacattgcgtcctggtgaggtgacggctttggtgggcccaaacggcagtggcaagtccactgtggccgctctcctccagaacctttatcagcctacagggggccaggtgctactcgatgagaaacccattagtcagtacgaacattgttatttgcattcacaagtcgtctccgtcggccaggaacccgtgctctttagtggaagtgtgaggaacaacattgcgtacggcctgcagagttgcgaggacgacaaggtgatggccgccgcccaggctgcacatgccgacgattttattcaggagatggaacatggaatctacaccgatgtcggcgagaagggatcacagctcgctgcaggccaaaaacagcggttggctattgccagggcacttgtacgggacccccgggtacttatattggacgaagccaccagtgcacttgacgtccagtgtgaacaagccctgcaagattggaactcaagaggagaccggaccgtgttggtcattgcccacagacttcaggccgttcagcgggcccaccagatcttagtgctgcaagaaggtaagctgcagaagctggcacagctgcaggaaggacaggatctctattctcgtctggtgcagcaacgactgatggactag

SEQ ID NO: 209485 - DNA, 2112 bp, synthetic construct
  misc_feature 1..2112: note = Description of Artificial Sequence: Synthetic coding sequence
  source 1..2112: mol_type = other DNA
atgcggctgcccgacctgcggccctggaccagcctgctgctggtggatgctgcactcttgtggctgctccaagggcccttggggacccttttgccacagggtctaccaggcctgtggctggaggggaccctacgcctgggagggctgtggggcctcctaaagttgcgcggtctcttaggcttcgtcggaactctgttactgcctctgtgcctggcgacccccctgacggtgtcactgcgcgccctggttgccggggcctctcgcgcaccaccagcacgggtagcatctgccccttggtcatggctgttagttgggtacggcgccgcgggcctctcctggtccctatgggccgtgctttcacctccaggggcgcaggagaaggaacaagaccaggttaataataaagtattgatgtggcgactactcaaactttcacgcccagacctgcctctgctggtagccgccttcttcttcttggtgctggccgtgctaggggagacgctgatccctcactattctgggcgtgtgatcgacatcctgggaggtgacttcgatccacacgccttcgcttcggcgattttttttatgtgtctgttttctttcgggtctagcctgtccgccggctgtaggggtggatgcttcacctacactatgtctcggataaacttgcgcatccgagagcagctgttcagcagcctactcaggcaggatctaggatttttccaggaaactaagaccggcgagctcaattcgcgtctctcctccgacactacactgatgagcaactggttaccgctgaatgcaaatgtcctcttgcgctcactggtcaaagtggtggggctttatggatttatgctgtcaatctctccgcggctgactctgctgagcttgctgcacatgcctttcactatcgctgccgaaaaggtctacaatactcggcaccaggaagtgcttcgggagatccaggatgccgtcgcccgagctggccaggtggtacgggaggctgtcggcgggctgcaaaccgttaggagctttggagccgaagaacacgaagtgtgtcgctacaaagaagctcttgaacagtgccggcagctctattggcgccgcgatctggagcgcgccctctacctgctggtgagacgggtcctgcacctgggcgttcagatgctcatgctgtcctgcggcctacagcagatgcaggacggagaacttactcagggtagtttgcttagctttatgatttatcaggaaagcgtcggctcctatgtacaaaccctggtgtacatttacggagacatgctgtctaatgttggggcagccgagaaggtctttagctatatggatcgtcaaccgaatctgccctctcctggaaccctagcccccaccactttgcagggggtggtgaagttccaagatgtgagctttgcttatccaaacagacccgataggcctgttcttaaaggtttgacattcaccctccgtccaggggaagtgacagctctagtcggtcccaacggcagtggcaagtccactgtggccgctctgttgcagaacctctatcagccaaccggaggacaggtactgctggacgaaaagcctataagtcagtacgagcattgctatctgcacagccaggtagtgagcgtcggccaggaacccgtgttgttttccggttctgtgcgtaacaacatcgcttatggcctccagagctgcgaagacgacaaggtgatggccgccgcacaggcagcccacgcggacgacttcatccaggaaatggagcatggtatttacaccgacgttggcgagaaaggttcccagctggccgctgggcagaagcagcggcttgctattgcaagggcacttgtgcgcgatccgcgagtactgatcctggacgaggctacaagcgctcttgacgtacagtgtgaacaagcactgcaagattggaattcgaggggtgataggacagtgttagtcattgcacacaggctccaggcagtacagagagcccatcagatcctcgtgctacaggaaggaaagctgcaaaaactagctcagttacaggaggggcaggatttatatagcagactggtgcagcagaggctgatggattag

SEQ ID NO: 209486 - DNA, 2112 bp, synthetic construct
  misc_feature 1..2112: note = Description of Artificial Sequence: Synthetic coding sequence
  source 1..2112: mol_type = other DNA
atgcggctgcccgacctgcggccctggaccagcctgctgctggtggatgccgccttactatggctgctccagggcccactaggtactttactgcctcagggactacccggactgtggctcgaggggaccctcagactgggtgggctatggggtctactaaagctgagaggccttcttggcttcgtgggaacactgctcctgcccttgtgtctcgccacccccctcaccgtctccctccgagcactagttgccggcgctagtcgagccccacctgcccgcgttgcctccgctccatggagctggcttttggtgggatatggtgccgcaggtttgagttggagcctctgggcagtgctttcacctcctggcgcgcaagaaaaggagcaagaccaggtgaacaacaaagtgctgatgtggagactgttgaagctgagtaggccagacttacccctactggtagccgccttcttctttctggtgttagcagtgcttggcgagacgttaatcccacactacagtgggcgagtgatcgacatcctgggtggggactttgacccccacgcctttgctagcgcaatctttttcatgtgcttattcagtttcggctccagcctgagcgctggctgccgcggtggttgcttcacttatactatgtcccggattaacctaaggatccgtgaacagctgttctcctcgctgctgcgacaggatctgggcttctttcaggagacaaaaacaggggagctgaactctcggctctcatctgataccacgttaatgtctaactggctacccctgaatgccaacgtgctcttgcgatcactggtcaaagtggtgggactatatggatttatgctctcaatcagtccacggctgaccttgctgagccttttgcatatgcctttcaccatcgctgccgagaaggtgtacaacacccgacatcaggaagtgctgagagagattcaagatgcagtggccagggccgggcaagtggtaagagaggccgtgggcggccttcagaccgttcgcagttttggggccgaagagcacgaggtttgcagatataaagaagctctcgaacagtgtcgacaactctattggagacgagacctggagcgggccctgtatctgctggtccgccgtgtgctgcaccttggcgtgcaaatgctcatgctgtcatgtgggctacaacagatgcaggacggggaacttacacagggctcacttctgtcttttatgatataccaggagtctgtgggatcctatgtgcagactttagtgtatatctatggcgatatgttatcgaacgtcggtgccgccgaaaaggtgtttagctacatggatcgtcagccaaatttgccttcccccggcaccctcgcaccaaccaccttacaaggcgtcgtcaaatttcaagacgtgtcttttgcgtacccaaaccggccagaccggcctgtgttgaaaggccttaccttcactctgaggccgggcgaagtgacggccctcgtgggtcctaatggttctgggaaaagtacagtcgccgctctgctccaaaatctataccaaccaactggtggtcaggtactgctggatgaaaagccaatttctcaatacgaacactgttacctgcattcgcaggtggtttcagtggggcaggaaccagtcctgtttagcggtagtgtgcgcaataatatcgcatatggtctgcaaagttgcgaggacgataaggttatggccgccgcccaggctgcccatgcagacgacttcatccaggagatggaacatggaatctacacagatgttggagagaaaggcagccagctcgctgcaggacagaagcagcggttagctatcgcaagagccctagtgcgcgacccacgggtattgatactcgatgaagctacctcagctctcgacgtgcagtgtgagcaggccctgcaggactggaactcaaggggtgatcgtacggtgctggtcatcgctcaccggttgcaggcagtgcagagggcccaccagatcctcgtgctgcaggagggaaagctccagaaactcgctcagctgcaggagggtcaggatctttactcgcggctggtgcagcagaggttgatggactag

SEQ ID NO: 209487 - DNA, 2310 bp, synthetic construct
  misc_feature 1..2310: note = Description of Artificial Sequence: Synthetic coding sequence
  source 1..2310: mol_type = other DNA
atgcggctgcccgacctgcggccctggaccagcctgctgctggtggatgcagccctactctggctcttacagggccctctgggtaccctcctgcctcagggcctccctggcctctggctggaagggaccctgcggctcggaggtttgtggggcctcctgaagctgcgggggttattggggttcgtgggaacactgcttctccctctctgcctggccaccccactgaccgtgagtttacgggctctggtggcgggcgcctctagagcccccccagcccgtgtcgccagcgctccttggagctggctgctggtgggatacggggcagctggtctgtcctggtctctgtgggcggtcctctcccccccaggggcccaagaaaaagagcaggaccaagtgaacaacaaagtactgatgtggcgcctgctgaaactttccaggcccgacctcccactgctcgtagctgcgtttttctttttagtgctggctgtgctgggggaaaccctcattcctcactactcaggcagagtcatcgacatcctcggaggggattttgacccccatgcattcgcaagcgccattttttttatgtgcctgttttcttttggtagtagcttaagtgcaggatgtagaggcggctgcttcacctacactatgagtcggattaacctccgtatccgggaacagctgttctcttcgctgttacgacaggacctgggcttcttccaagagacaaagaccggcgagctgaacagcagattgtcgagcgacaccaccttaatgtctaattggctcccactcaacgccaatgttctgctgcggagccttgtgaaggtcgtggggctgtacggcttcatgctctcaatctctccgaggctcaccctgctcagcctcctgcacatgccttttacgatagcagcggaaaaagtgtataatactcggcaccaggaggtgctcagggagatccaggatgccgtggcacgcgccgggcaggtagtaagggaagcagtgggaggcctccaaaccgttcgctccttcggtgccgaagaacatgaggtttgcagatacaaagaggcactcgagcaatgcaggcaactgtattggaggagagatttggaacgtgccttgtacctgctggtaagacgggtgctgcacctgggtgtccaaatgctaatgttgtcatgcgggctgcagcagatgcaggacggcgaactgacgcaaggttccctcttgtcatttatgatctatcaggaaagtgtgggatcttatgtccagacactcgtctatatatacggcgatatgttatctaacgtcggggccgcggaaaaggtgttttcttacatggaccggcagcccaacctgccgtctcccggaacactagctcctactaccctccagggggtggtcaagttccaagacgttagtttcgcttaccctaaccggccagacagacccgtcctgaaaggcctgacctttaccctgcgacctggagaggtgacggctctcgtcggaccaaacggtagtgggaaatccacagtcgctgctttactgcagaacctctaccagcccaccggagggcaggtgttactggacgaaaaaccgatctctcaatacgaacactgctatctgcattcccaagtcgttagtgtcggccaggagcccgttttgtttagcggctcagtgagaaataatatcgcctatggtctgcagagctgcgaagatgacaaagtgatggcagctgcccaggcagcccacgccgacgatttcatccaggaaatggagcacggcatctataccgatgtgggggagaaaggctctcagctcgccgccgggcagaagcagcggttagctatagccagggcactcgtgcgtgatccaagagtgcttatcttggacgaggccacgagtgctctggatgtgcagtgcgaacaggcaaacgggttttgggtcggcccactaggcggcgggtcagcaagcgaatcagatcccaccgggttccttcatgatagcagacacaggctttcaagtgacgtggggatgttcgttgccttgaccaaattgggccagccggacgcggagcagtggaatagtcgcctggacttactggaaagaagccgccaggctgtcgacggagtttgcaggcacaattatcgccttggggctccattcactgtggggaggaaggtccagccagaagtgactgtctatcctgaacggacacctctcctccaccagcacaatctcttgcattgttctgtgaccggcttttatcccggtgacataaaaattaagtggtttcttaacgggcagtag

SEQ ID NO: 209488 - DNA, 2310 bp, synthetic construct
  misc_feature 1..2310: note = Description of Artificial Sequence: Synthetic coding sequence
  source 1..2310: mol_type = other DNA
atgcggctgcccgacctgcggccctggaccagcctgctgctggtggatgccgcactcctgtggctccttcaaggaccattggggacccttttgccccaaggccttcctggattgtggcttgaaggcaccctgcggctgggggggctgtggggcctgttaaagctgcggggcctcttaggatttgtcgggaccctgctcctccccttatgtctggccacccctctcacagtatctctgagagccctggtcgcgggagcatctcgagcaccaccagctcgcgttgcctccgcaccttggtcatggctcttagtgggctacggagcagccggcctgtcatggtctctgtgggccgtcctgagtccaccaggcgcccaggaaaaggagcaggatcaggttaataataaagtgctgatgtggagacttctgaagttgagccggccagatctgcccttgcttgtggccgccttcttttttttggtcctggctgtcttgggagaaaccttaattccacattacagcggcagagtgatcgatatcctcggaggggacttcgaccctcatgcctttgcttcagcaattttttttatgtgcctcttttcttttggatcttccttgtcagccggctgcagaggtggatgctttacttataccatgtcacgaatcaacctccgaattcgagagcagctgttctctagtctcctccggcaggatctcggatttttccaggaaacaaaaactggcgagctgaattccagactgtcttcggacactacgttaatgtctaactggttgcccttaaacgccaatgtgctcctgaggtctctggttaaggtggtgggactctacggctttatgctctccataagtccgcgtttgactctcctctccctgctccacatgccattcactatcgcggccgagaaagtgtataatactagacatcaggaagtcttgagggagattcaggatgcggtggccagggctggccaggtagtcagagaggcagtcggcggcttgcaaactgtgcggtctttcggcgccgaggagcacgaggtctgtcggtataaggaagcactggaacagtgccgccagctctactggcgcagagatctggagcgggctctgtacctgctagtccgcagagtccttcaccttggagtccagatgctgatgctatcatgtggtttacagcagatgcaggatggagagctgactcaaggctctctgctgtcctttatgatctatcaggagtctgtcgggagttacgtccaaaccctggtgtacatctacggggatatgttaagtaacgtgggtgccgccgaaaaggtgttctcctatatggatagacagcctaaccttccctcacccgggacactcgcacccacaacactgcagggtgtcgtcaagtttcaggacgttagttttgcgtatcccaatcgccccgaccgccctgtgttgaaaggtcttactttcacactgcggccgggagaggtcaccgccttggtggggccaaacgggtctgggaagtctaccgtagccgcactactccaaaatctgtaccagccaacaggcggccaggtgctgcttgatgaaaagccgatttcccagtacgaacattgttacctgcacagtcaggtggttagtgttgggcaggaaccggtcctcttctcgggcagcgttagaaacaatattgcttatgggttacaatcatgcgaggatgataaggtgatggctgccgctcaggcagcccatgctgatgacttcattcaggaaatggaacatgggatatacaccgacgtgggcgagaagggctctcaactcgccgctggtcaaaagcaacgattggctatcgcccgagcacttgtgagggatcctagagtgctgattctggacgaggcgacttctgcactggacgtgcagtgtgagcaggcaaacgggttttgggtaggccccctcggaggcggctcggcgtctgaatccgaccccacaggctttctacacgactccagacaccgattgagttcagatgtaggcatgtttgtagccttgacaaagctgggacagccagatgccgaacagtggaactccagactcgaccttctggagaggtcacggcaggcggtggatggagtttgcaggcataactatcggctcggcgcgcccttcactgtcgggcggaaagtacagcccgaggtgacagtatatccggagcgaacgcccctgcttcatcagcacaacttgctccactgttctgtgaccggtttttatcctggcgatattaagatcaagtggtttcttaatggacagtag

SEQ ID NO: 209489 - DNA, 2310 bp, synthetic construct
  misc_feature 1..2310: note = Description of Artificial Sequence: Synthetic coding sequence
  source 1..2310: mol_type = other DNA
atgcggctgcccgacctgcggccctggaccagcctgctgctggtggacgcagccctgctttggttactgcaggggccactaggcactctgctgccccagggtctcccaggcctttggcttgagggcacactccgcttgggtgggctgtgggggctcctgaaactgcgtgggctgttaggttttgtgggcaccttactgttgcccctgtgtctggccaccccgcttactgtaagcctgcgcgctctggtcgctggggcctcaagggcaccacctgctagagtggcatctgccccttggtcttggctgctggtagggtatggtgcagctggcttatcatggagcctttgggcagtgttaagtcctcctggtgcccaggagaaggaacaagaccaggttaataacaaggtccttatgtggagactacttaagctcagccggcctgacctgccattgttggtggcggcatttttttttctcgtcctcgcggtgctgggtgagacccttattccacattattcagggcgtgtgattgacatcctggggggggacttcgatccacacgcctttgcaagtgccatcttttttatgtgtctattctccttcggaagtagtctctcagccggttgccgaggtgggtgcttcacctacactatgagccgcattaatctacgcattcgtgaacagctgttttcgtctctgctgaggcaggacctgggtttctttcaggagactaaaactggggagctgaactcccgtttatcgtccgacaccacattaatgagtaactggctgccactcaacgcaaatgtactcctccggtccttagtcaaagtggtcggtctgtatggctttatgctgagcatttctccccggctaacgctactctctctgctccacatgccctttacaatcgcagccgagaaggtgtacaatacacgacaccaggaagtgcttagggaaatccaggacgctgtggcaagagccggccaggtggtgcgggaagcagtcggtggccttcaaacagtgcgatcgtttggagcagaagaacatgaagtgtgcaggtacaaagaagccctcgaacagtgcaggcagctgtattggcgccgcgacctcgaaagggcactgtaccttctggtccgacgagttctgcaccttggggtgcaaatgttgatgttgagctgcggactgcagcagatgcaggacggggagcttactcaaggatcgctgctcagttttatgatctaccaggagagtgtggggagctacgtacaaacccttgtgtatatctacggtgacatgctgagtaacgtcggggcagcagaaaaagtctttagctatatggatcggcaaccaaatctgcctagtcccggcacccttgcccctacaacactccaaggggtggttaaattccaggatgtttcgttcgcctatcccaaccgacctgatagacccgttctcaaagggctgacatttaccctgaggcccggtgaggtcactgccttggttggcccaaacgggtcgggaaagtctacagtcgctgcactgctgcagaatttgtaccaaccgacaggagggcaggtcttgttggatgaaaaaccgatttcacagtacgagcactgttatctccactcccaggttgtgagcgtcgggcaggagccggtcctcttcagcggctcagtgcggaacaatattgcatatggcctccaatcctgcgaggacgataaagtcatggctgccgcccaggccgctcatgccgacgattttatccaagaaatggaacatggaatctacaccgacgttggcgagaaaggctctcaattggccgcggggcagaagcagagactggcaatcgcaagggctctggtgcgcgaccctagggtgctgatcctcgatgaagccacgtcagctctcgacgttcagtgcgagcaggccaacggcttttgggtggggcctctggggggaggatctgcgagtgagtcagatcccacaggctttctacacgacagcaggcatcgtctttcaagtgacgtgggcatgttcgtcgccttaacaaagttaggtcagcccgatgccgagcagtggaactctcgcctggacctacttgagcgctcccgacaggccgtcgacggcgtctgcaggcataattataggctgggagcaccattcactgtggggcggaaggtgcagcccgaagtcaccgtgtacccagaacgcaccccactgctccatcagcacaatctgctgcattgttctgtgacgggtttctacccaggagatatcaagattaaatggttcttaaacgggcagtag

SEQ ID NO: 209490 - DNA, 2310 bp, synthetic construct
  misc_feature 1..2310: note = Description of Artificial Sequence: Synthetic coding sequence
  source 1..2310: mol_type = other DNA
atgcggctgcccgacctgcggccctggaccagcctgctgctggtggacgctgcgctgctctggctgttacagggtcctctgggcactcttcttcctcagggactccccggactttggctggaaggcaccctgcggctgggggggttgtggggacttctgaaactacgagggctgctcgggtttgtcgggactctgctgctgccgctctgtttagctacaccacttacggtttctttgcgggccctcgttgctggcgcctcacgggcacctcctgctagagttgcttcagccccttggtcttggctgcttgttggttatggcgccgccggtctgtcgtggtcgctctgggcagtgctctcaccaccgggcgcccaagaaaaggagcaggaccaagtgaataacaaagttttgatgtggcgactgttaaagctgtccagacccgacttacctttattggtggccgccttcttctttctagttcttgccgtactgggcgagacccttattcctcactattctggtagagttatcgatatcctagggggcgattttgacccacatgccttcgcgtccgccatctttttcatgtgcctctttagctttggctccagtctgagtgccgggtgtagaggcgggtgcttcacttacacgatgagccggattaacttaagaattcgcgagcagttgttttcttctcttctgcgacaagacctaggattttttcaggaaaccaagaccggcgaactgaacagccggctgagtagcgacacgacactgatgagtaactggctgccgctgaacgccaatgtcttgctccgatctttagttaaagtggtaggcctctacggatttatgctgagcatctcaccccggctgacactgctcagcctcctgcacatgccattcacgattgctgccgagaaggtctacaatacccgccaccaggaggttctgagggaaatccaggacgcagttgcccgcgccgggcaagtcgttagggaggcagttggcggcctgcaaactgtgaggtcattcggagccgaagagcacgaggtctgccggtacaaagaggcacttgagcagtgcagacaactctactggcgccgggacctggaacgagccctctatctgctaatccgccgcgttcttcacctcggggtgcagatgttgatgcttagctgcggactccaacagatgcaggacggcgagctgacacagggaagcctgctgagtttcatgatatatcaggagagtgtggggtcttacgtgcagactctggtgtacatctatggagacatgctgtctaacgtgggtgcagctgagaaagtcttctcatacatggacagacagcccaatcttccttcaccaggcacacttgcccctactacactccagggagtggtgaagttccaagacgtgtcattcgcgtatccaaatcgccccgatcgcccggtgctcaaaggccttacatttaccctgaggcctggcgaggttacggccctggtgggcccgaatggctcggggaaatcaaccgtcgccgctctccttcagaacctgtaccagcctactgggggccaggtgctgctggacgaaaaacccatttcacaatatgaacactgttatctccattctcaggtggtcagcgtgggacaagagcctgtcctgttcagtggatctgtgcggaacaacattacttatgggctccaatcatgtgaggacgataaagtcatggcagcggcccaggccgcccacgctgacgacttcatccaggagatggagcacggaatctataccgacgtgggggaaaaaggctctcagctggctgccggtcagaagcagcgtcttgccatcgctcgtgctctggtacgagaccccagagtcctgattctcgatgaggctaccagcgcactcgacgtgcaatgcgaacaggccaatggcttttgggtggggcctctcgggggagggtccgcatccgagagtgatccaaccgggttcctgcacgacagcagacataggctgtccagcgacgtcggaatgttcgttgccctgactaagcttggtcagcccgatgctgagcaatggaatagtagactcgacctactggaaagatctcgccaggcagtggacggagtatgccgccataattaccgactgggggccccctttacagttggaagaaaggtccagcccgaggttacagtgtacccagaacgcaccccgctccttcatcagcacaacctcttacactgcagcgtaaccgggttttacccgggcgatatcaaaattaagtggtttcttaacggccaatag

SEQ ID NO: 209491 - DNA, 2310 bp, synthetic construct
  misc_feature 1..2310: note = Description of Artificial Sequence: Synthetic coding sequence
  source 1..2310: mol_type = other DNA
atgcggctgcccgacctgcggccctggaccagcctgctgctggtggacgctgcactactgtggctgctgcaggggcctctcgggacccttttgcctcagggattacctggtctgtggctggaaggtacacttagattgggcggcttgtggggactgctgaagctgcgggggcttttgggatttgtcggaactttgctgctcccattatgtttagcaactcccctgactgtctccttacgcgccctggtcgccggggctagtcgggcgcccccagccagagttgccagcgcaccatggtcctggcttctcgtgggatacggggcagccggattgtcttggtctctgtgggccgttctttcgccaccaggcgcccaggaaaaagagcaggatcaggttaacaataaggtgctgatgtggcgcttattgaaactcagccggcccgatcttcctctgctagtggcagcttttttcttcctagtgctggctgtactgggggaaacattaatccctcattactccggcagggtgatcgacattctgggaggtgatttcgacccccacgcattcgcatcagccatcttctttatgtgtctgtttagctttggttccagcctgtccgcaggatgtagaggcggctgcttcacttacaccatgtcccgcatcaatctgcgcattcgggagcaactgttttcaagtttactgcggcaggacctcgggttctttcaggagaccaaaacaggagaactcaattcccgcctctctagcgatacaacgctgatgtccaactggctccctttaaacgctaacgtcctgctccgatccttagtgaaggtggtaggcttatatgggtttatgctgtccattagccccaggttgactctgctcagcctccttcatatgccctttaccatcgccgcggaaaaggtttataatacaagacaccaggaagttttgagggagatccaggatgccgtggcaagagctgggcaggtagtgcgcgaggccgttggtgggctacagaccgtgaggtccttcggcgctgaggagcacgaggtctgtaggtacaaggaagctctggagcagtgtagacagttgtattggcggcgcgacctggagcgagcactgtatcttctcgtccggcgggtactgcacctgggcgtccagatgctgatgttatcttgcggcttgcagcagatgcaggacggtgaactgacacaaggctctcttctctcatttatgatctaccaggaaagtgtgggctcttatgtccagacccttgtgtacatatatggggatatgctgtcaaacgtgggagctgcagagaaggtctttagttacatggatcggcagcccaacctcccttctccggggacactggccccgactacacttcagggggtagtgaagtttcaggacgttagctttgcctacccgaaccgtcctgaccgtccagttctcaagggcctcacgttcaccttaagacctggggaggtgaccgctctggtcggacctaatggatctgggaagagcaccgttgccgctctgctccagaatctgtatcaacctacaggcgggcaggttctgttggatgaaaagcctatatctcagtacgaacactgctacctgcactctcaggtggtgtcagtcggccaagagccagtcctatttagcgggagcgtccgcaacaatatcgcatatggactgcaaagttgtgaggacgataaggtgatggcggctgcacaggccgctcacgcggacgacttcattcaagaaatggaacatgggatttatacagatgtgggcgagaaaggcagccagctcgctgccggacagaagcagcggctggctatcgccagggccctagtccgcgatccccgggttcttatcctagacgaagcgacatctgctcttgacgtccagtgcgaacaagcgaacgggttctgggtcggacctttgggaggcgggtcagcctccgaatcggaccctacagggttcctacacgacagccgacacagactgtctagtgatgttggcatgttcgtggctctcacaaagctgggacagccagacgcggagcagtggaattctcggttggatttgctggagcgctctaggcaggccgtagacggcgtgtgcaggcataactacagactcggcgcaccgtttacagtgggtagaaaagtccagccagaggttactgtatacccagagcgcacaccgcttcttcaccagcacaatctgttgcattgctcggtaactggattttaccctggagatatcaagatcaaatggttcctgaatggacagtag

SEQ ID NO: 209492 - DNA, 2310 bp, synthetic construct
  misc_feature 1..2310: note = Description of Artificial Sequence: Synthetic coding sequence
  source 1..2310: mol_type = other DNA
atgcggctgcccgacctgcggccctggaccagcctgctgctggtggatgccgccctgctttggcttctgcagggacctttaggcactctcctgcctcaaggcctgccgggcctatggctagagggtaccctgcggcttgggggcctttggggcctcttaaaattgcgggggttgcttggcttcgtgggcacgctgctcctcccgctctgtctggctactccactcaccgtgagccttcgcgcgcttgtagcaggcgcatctagagccccacccgccagggtggcatctgccccctggtcttggctgctggttgggtacggtgcagcagggcttagctggtctctatgggctgtactatccccacccggggcacaggagaaggagcaggaccaggtaaacaataaggtcctcatgtggcgcctgctaaagctatcccgtcccgatctcccactcctggtggccgctttctttttcctggttcttgctgtgctcggtgagacattgatcccacactacagcggccgggtaatagacattctggggggtgactttgatcctcacgctttcgctagtgctatcttcttcatgtgtcttttttcctttggatcgagcttatctgctggatgtcgtggcggctgcttcacttacactatgtcccggataaatttgcgcatccgcgagcagctcttctccagcctgttgaggcaagatctgggcttctttcaagaaaccaaaaccggtgaactgaactcccgcctcagctcagacactaccctcatgtctaattggcttccgctgaatgccaacgtgttgcttagaagtcttgtgaaagtggtgggcctctacggcttcatgttgagcatcagtccacgtctcaccttgctgtcattgctgcatatgcctttcacaattgcagcggaaaaagtttacaacacaagacaccaagaggtcctccgcgaaatacaggatgccgtagcgcgcgccggacaggtggtgcgggaagcagttggtggactccagacggtgaggtcatttggggcagaagagcacgaggtgtgtcgttataaagaagcgctggaacagtgtagacaactgtactggcgcagagacttggagagggctctatacctgttggtgcgtcgcgtgctgcacttaggggtccaaatgctgatgctaagctgcggcctgcagcagatgcaggacggcgaacttacgcaaggctccctcttaagcttcatgatttatcaggagagcgtaggatcctacgtgcagacccttgtgtacatttatggggacatgctgtcaaacgtcggtgcagccgagaaggtcttctcctatatggacaggcagccgaatctccccagccctggaactctggcccctactacattgcagggagtcgtaaaattccaggatgtcagctttgcctacccaaatcggcccgatcgcccagtgctcaagggtcttacattcacccttcgacccggtgaggtgacggctctggttggccctaatgggtcaggcaagagcaccgtggcggcattactccaaaatttgtatcagcctaccggtggccaggtgctcttggatgagaaacccattagccagtacgagcactgctatctgcacagccaagtcgtgtcggtgggacaggaacccgtgctcttctcaggcagtgttcgcaataatatcgcatacggattgcagtcgtgcgaggacgacaaggttatggccgcggcccaggccgcccacgctgacgacttcatacaggagatggagcacggtatttataccgacgttggcgagaagggaagccagctagcagctgggcagaaacaacgcctggctatagccagagccctcgtccgagacccacgggtgctgatcttagacgaggctacctcggccctcgatgtgcaatgcgaacaagccaatggtttttgggtgggccctctcggtggggggtcagcttctgagtctgaccccacaggatttctgcatgattcccgacatagactgtcctcggacgtcggcatgtttgtggcactaactaagctcgggcagcctgacgccgaacagtggaatagccgcctggatctgttggaaaggtcaagacaagccgtggatggcgtttgtcgccataattatcggcttggtgccccttttactgtggggcgaaaagtgcagcccgaggtgaccgtttaccctgagaggaccccattgctacatcaacacaatctgttgcattgttccgttactggattctaccccggtgacatcaaaatcaaatggtttctgaatgggcagtag

SEQ ID NO: 209493 - DNA, 2697 bp, synthetic construct
  misc_feature 1..2697: note = Description of Artificial Sequence: Synthetic coding sequence
  source 1..2697: mol_type = other DNA
atggtgtgggaccggcagaccaagatggagtacgagtggaagcccgatgaacagggtctgcagcagattctgcagttgttgaaggaatcccagagtccagacactacaattcagcgaaccgtgcagcagaagctcgaacagctgaatcagtaccccgattttaataactatctcatatttgtcctgaccaagctgaaatccgaggatgagccaacccgctcgctcagtgggcttatactgaagaacaacgtgaaggcccatttccagaacttccctaacggtgtaactgacttcatcaagtcagaatgtctgaacaatattggcgattccagccctctcattcgagctacagtgggcatattgattaccaccatcgcttcgaagggcgaattgcaaaactggcccgacttgttacccaagctgtgcagcctcctagacagtgaagactataatacttgtgaaggggcattcggggccctgcagaagatttgcgaagattcagccgagatcttagattctgacgttctggacaggcccctgaacattatgattccaaagttcctgcagttttttaaacactcctcccccaaaatccggtctcacgccgtcgcctgcgtgaaccagtttattatctcaagaacccaggctcttatgctccacatagacagctttattgaaaatctctttgccctggctggcgacgaagaacccgaggttcgcaaaaatgtttgcagggcgctggtgatgctcctggaagtccgcatggacagactcctccctcatatgcacaacattgttgagtatatgctccagagaacgcaagaccaagatgagaatgtcgccctcgaagcgtgcgaattttggctgactcttgctgagcagcccatctgcaaagacgtcctggtgcggcatttgccaaaactcatcccagttcttgtaaatggcatgaagtatagcgacatcgacattattctcttaaaaggggacgtggaggaggatgaaacaattccagactctgagcaggatatccgccccagatttcacagatcacgaaccgtggcccagcagcatgatgaagacggcattgaggaagaagatgatgacgacgacgaaatcgatgatgatgacaccatatcagattggaaccttcgaaagtgctccgcggccgccttagatgtgctagctaatgtgtacagggacgagcttttgccgcacatcctgcctcttcttaaagaactgctcttccaccacgaatgggtggtaaaggagagcggaatcctggtactgggggctatcgcggagggatgcatgcagggaatgattccctatctacccgagctgattccccatctgatacagtgcctttccgacaagaaggccctggtgagatcaatcacatgctggactctctcacgctatgcccattgggtcgtctcccaacctccggatacgtatctcaagcccctgatgacagagttattaaaacggatattggactctaataagcgggtacaggaagctgcgtgttctgccttcgctaccctagaggaggaggcatgcacagaattggtcccgtatttggcctacatactagatacattagtgttcgcgttttccaaataccagcataaaaacctgctcatcttatatgatgctattggcacgctggctgactcggttggccatcacctcaataagccggagtacattcagatgctgatgccccctcttatacagaagtggaatatgctaaaagatgaggataaagatcttttcccactgctggagtgtctctcctctgtggccactgctctccagagcgggttcctgccctattgtgagcccgtgtatcagaggtgcgtgaacttagtccagaagaccctcgcccaggctatgcttaacaatgctcaaccagaccagtacgaggcccctgataaagattttatgattgttgccctggacctcctgtctggcttggccgaggggcttgggggcaacattgagcagttggtggcacgcagtaacattttgacgcttatgtatcagtgtatgcaagacaagatgccagaggtgcgccagagtagtttcgctctgttgggagacctcacaaaggcatgtttccagcatgtgaaaccctgtatagccgattttatgccgatcctgggaacaaacctgaatcccgagttcatttccgtctgcaataatgcgacctgggctattggcgagatctcaattcagatgggaatagaaatgcagccatacatacctatggtgctccaccagttggtcgagattatcaaccgtccaaataccccgaagactcttctggagaatacggcgattacgatcggccgtcttgggtacgtatgtccgcaagaagtggctcccatgctgcagcagttcattaggccgtggtgtactagtctgcgaaacatcagagataatgaggagaaggactcagccttccgaggaatttgcaccatgattagcgtgaatcccagcggggtcatacaggacttcatctttttttgtgacgccgtcgcttcatggattaatccgaaggatgatctgagggacatgttttgcaaaattctccacgggttcaagaaccaagtgggtgatgaaaactggcgccgattttctgaccagtttccgttgcccttaaaagagcggctggctgctttttacggggtatag

SEQ ID NO: 209494 - DNA, 387 bp, synthetic construct
  misc_feature 1..387: note = Description of Artificial Sequence: Synthetic coding sequence
  source 1..387: mol_type = other DNA
atggagtacgagtggaagcccgacgagcagggcctgcagcagatccttcagctgctgaaagaaagccagagcccagataccaccatccagagaacagtgcagcaaaaactggagcagctaaaccaatatccagacttcaacaactatctaatcttcgtcttgacaaagctaaagagtgaggatgagcccacccgctctctgtctgggctcatattgaagaataatgttaaagctcactttcagaattttccaaatggggtgacagattttataaagtcagagtgcttgaataacattggcgatagctcccctctcatcagggccaccgtggggttaactctgttgcatgtcagcattagtctctcttccgttggtctgaaactgtag

SEQ ID NO: 209495 - DNA, 2547 bp, synthetic construct
  misc_feature 1..2547: note = Description of Artificial Sequence: Synthetic coding sequence
  source 1..2547: mol_type = other DNA
atggtgtgggaccggcagaccaagatggagtacgagtggaagcccgacgagcagggcttgcaacagattttgcaactgctgaaggaatcccaaagtcccgatacgacaattcagcgaaccgtacagcagaaactggaacagctcaatcagtaccctgactttaataactacttgatttttgtcttgactaaacttaaatccgaaggaatcttaatcacaactatagcaagcaagggagagctgcagaattggccagaccttcttccgaaactttgttcccttttggattctgaggattacaacacatgtgaaggggccttcggagcacttcagaagatttgtgaggattcagctgagattctcgactctgacgtcttagaccgcccactgaacatcatgatacccaaatttttacagtttttcaaacattcatcacccaagattcggagccacgctgtggcctgcgtgaatcagttcataatatcccgcacgcaggcactaatgctccacattgactcattcattgaaaacctctttgctcttgcaggggacgaggaacctgaggttaggaagaacgtttgccgagcactcgtcatgctcctcgaggttaggatggatcgtctgttgccccacatgcacaacatcgttgaatacatgcttcagcgaactcaggatcaggacgaaaatgtggcccttgaggcttgtgagttttggttgacccttgctgaacaacccatctgcaaggacgtgctcgtccggcacctcccgaaattaattcctgtcttggtcaacggtatgaaatattcagacatcgatattatcctgcttaaaggtgatgtggaggaggacgagacaatacccgactccgagcaggacatacgccctcgcttccacaggagcagaacagtggctcaacagcatgatgaggatgggattgaagaagaggatgatgatgatgatgagattgacgatgatgacaccatttcagattggaatcttcgtaagtgttccgctgccgcattggatgtgcttgctaacgtgtatagggacgagttactaccgcacattctgccgctgctgaaagaattactgttccaccacgagtgggtagttaaggagagcggcatcttggtgctcggagctatcgccgagggctgcatgcagggcatgattccgtacctcccagaacttattccccatctgattcaatgcctatcagataaaaaagcactggtacgtagtatcacctgctggaccctgtcccgctacgcacactgggtcgtatcacagcctcccgacacatatcttaagccactcatgaccgaattattaaaaagaattctcgacagcaataaacgggttcaggaagctgcatgttcagcgttcgctacgctggaagaggaagcatgcactgagctcgtgccatatttggcttatattctggatactttggttttcgccttttctaagtaccaacataaaaatctgctgattctgtacgatgccatcgggaccctggcagattccgtgggacaccacctgaataaaccagagtatattcaaatgctaatgccccctctgatccagaagtggaatatgctcaaggacgaggacaaagatctgtttcctctccttgaatgtctgtcttctgttgctaccgcgttgcaatccggcttcctcccctactgcgaacctgtctatcaacgttgtgttaatcttgtacagaaaaccctggcccaggccatgctcaacaacgcccagcccgaccagtacgaggcccccgacaaggactttatgatcgtggcactggaccttctgagtggactagcagaggggctggggggcaacattgagcagcttgtcgcacggtcaaacatcttaacgcttatgtatcagtgcatgcaggacaaaatgccagaggtgcggcaatcctctttcgcactcctaggtgatctcaccaaagcatgcttccagcacgttaaaccctgcattgccgactttatgcccattctgggtacaaacctgaaccctgaattcattagcgtctgcaataacgccacttgggccataggcgagatttccattcagatgggtattgagatgcagccctacattcctatggtcctgcatcagctggtagagatcattaaccgccctaatacccctaaaaccttgctggaaaacacggccatcaccatcgggagactgggctacgtttgcccccaggaagttgcccccatgctgcagcagttcattagaccttggtgcacttcactgagaaacataagggataacgaagaaaaagatagtgccttcagaggcatctgcacgatgatctccgttaacccttcgggagtgatccaggactttatctttttttgcgatgcagtagcttcttggattaatcccaaggacgatcttagggacatgttctgtaaaatcctccatgggtttaaaaaccaagtaggcgatgagaactggcgaagatttagcgatcagtttcctctaccactgaaagaaaggctggcagctttttacggcgtttag

SEQ ID NO: 209496 - DNA, 2673 bp, synthetic construct
  misc_feature 1..2673: note = Description of Artificial Sequence: Synthetic coding sequence
  source 1..2673: mol_type = other DNA
atggagtacgagtggaagcccgacgagcagggcctgcagcagatcttacaactcctgaaagagagccagtctccggacacaaccatccagcgaacagttcagcagaaacttgagcagctgaaccagtatccagacttcaacaactacctgatttttgtgctcaccaagttaaaaagtgaggatgaacccacccggagcctgtcagggctgatcctaaaaaataacgtgaaagcacacttccagaatttccccaacggcgtgactgatttcatcaaaagcgagtgtctgaacaatatcggggactcctccccgctgattagggccactgtgggtatcctcattaccaccatagctagcaaaggtgaactgcagaactggcctgatctcttaccgaaattatgctcattgctggattccgaagattacaatacctgtgaaggggcattcggagccctccagaagatttgtgaagactcagctgagattctcgattccgacgtccttgacagaccccttaacattatgatccccaaattcttacagttcttcaaacatagttcgcccaagatccggagccacgcggtggcctgtgtgaatcagtttataatatcaaggacgcaggccctgatgctgcatatcgacagctttatcgagaacctgtttgccctcgctggcgatgaggagccagaggtgcggaaaaatgtctgtcgggcactcgtcatgctcctggaagtgcgcatggaccgtttgctcccacacatgcacaacatcgtggagtacatgctgcagcgaactcaggatcaagatgagaatgtggccttggaggcttgcgagttttggctgacactggctgagcaacccatctgcaaggacgttctcgtgcggcatcttcccaagctgattccagttctcgtgaatggcatgaagtactcagatatcgatataatccttctgaaaggtgacgtggaggaggacgagaccatccctgacagtgaacaagatattcgaccgaggtttcataggagcaggactgtagcccaacagcacgatgaggatggaatcgaagaagaggatgacgatgatgatgaaatcgatgacgatgacacaatttcagattggaatctgaggaagtgcagtgctgcggcgctcgatgtgcttgccaatgtttaccgagacgaactgcttccacacattctgccacttttgaaagaactgcttttccaccacgagtgggtggttaaagagagcggaattctggtgctgggggcaattgccgaaggatgcatgcagggtatgattccatacctgcccgagctcattccccatctcatccagtgtctctccgacaaaaaggcccttgtgcggagcatcacttgttggaccctgtcccgatatgcccactgggtggtgagccagccccctgatacgtacctcaagccgctgatgaccgagttgctgaagaggatactggacagcaataaacgggtacaggaggccgcttgtagcgccttcgcaaccctggaggaggaggcctgcacagaactcgtgccatacttggcatatatcctcgataccctggtgttcgcattttccaaataccagcacaaaaacttgttgattttatacgacgccatagggacgctggccgactcggtgggtcaccacctcaataagcccgaatatattcaaatgctcatgccaccgctgatccaaaaatggaatatgctgaaggacgaggacaaggacttattccctctcctcgagtgcctctcatcagtagccacagctctgcagagcggtttcttgccgtactgtgagcctgtctaccagaggtgtgttaacttagtacaaaagactttggcccaagcaatgctcaacaacgcccagcccgatcagtacgaggcccctgacaaggactttatgattgtggccctggaccttctgagtggactagctgaaggtcttgggggcaatatagagcagcttgtggctcggtccaacatccttacattgatgtaccagtgcatgcaggataagatgcccgaagtacggcagagcagctttgccttactgggagacctcacaaaagcctgttttcaacatgtgaagccctgtatagcggattttatgcccattctggggacgaatctgaaccctgagtttataagcgtctgcaataatgccacctgggcaatcggtgagattagtatccagatgggcatcgagatgcagccctatattccaatggtattgcaccagctggttgagataattaaccggcctaacaccccgaagactctgctggaaaacactgcaattactatcggtcgcttgggctacgtgtgccctcaagaggtggcccctatgctgcagcagtttatcaggccctggtgcacctccctccgaaacattagagataacgaagaaaaagactctgcatttcggggtatctgcactatgatcagtgtgaatcccagcggagtgatccaggatttcattttcttctgtgatgctgttgccagctggattaatccaaaggacgatctgagggacatgttttgtaagattttgcatggatttaagaaccaggtgggcgacgaaaactggagaagattctcagatcagtttcccctacctctgaaagagcgcctggcggcattttatggtgtctag

SEQ ID NO: 209497 - DNA, 2664 bp, synthetic construct
  misc_feature 1..2664: note = Description of Artificial Sequence: Synthetic coding sequence
  source 1..2664: mol_type = other DNA
atggactggcagcccgacgagcagggcctgcagcaggtgctgcagctcttaaaggattcccagtcacccaatactgccacgcaacgaatcgtccaggataaactgaagcaattaaaccagtttccggacttcaacaactacttaatatttgtcttaacccgattgaagagcgaggacgagcccaccaggagcctgtcagggttgatcctgaagaataacgttaaggcccattaccaaagttttccacccccggtggctgatttcattaaacaagaatgcctcaacaacatcggcgatgcatcatccctgattcgtgcgactatagggattctgattaccaccattgcatccaagggcgagctccaaatgtggcccgaactgctgccgcaactctgtaacctgctgaatagcgaagattataatacttgcgagggcgccttcggagcgttgcaaaaaatctgcgaagactcctcggagctccttgattccgatgctttgaatagaccactgaatatcatgatacccaaattcctgcagttttttaagcactgttcccctaagatcaggtcgcacgctatcgcctgtgtaaaccaattcataatggaccgagcacaggctctcatggataacatagacacctttatcgaacatctattcgccctcgctgttgatgacgacccagaggtgcgtaaaaatgtgtgccgtgctctggtaatgctccttgaagtaaggatagaccgactcatcccacacatgcactcaatcatccagtatatgcttcagaggacgcaagatcacgacgagaacgtggctctggaggcttgcgagttttggttaacacttgccgagcagccaatctgtaaagaggtgcttgcgagccacttagtacagctgattcctattctagtgaacggcatgaaatactcagaaattgatataatactgctcaagggtgatgtcgaggaggatgaggcagtccccgattccgaacaggatatcaaaccccgtttccacaagtctcgaacagttaccctcccccacgaagcagaaaggcctgacggttcagaagatgccgaggacgatgacgatgatgatgcgctttccgattggaatctccgtaagtgcagtgcagctgctctcgatgttcttgctaatgtttttagggaagaacttctcccccatctgctgcccctgctgaaaggcctactctttcaccctgaatgggtggttaaggaatcaggaatcctagtgctcggagcaattgccgaaggctgtatgcagggaatggtgccttatctccccgaactgattccccatttaatccagtgtctatctgacaaaaaggctttggtccgaagcattgcttgttggaccctgtccagatacgcccactgggtcgtcagccagccgccagatatgcatctgaaaccacttatgactgagctcttaaaaaggatactcgacggaaacaagcgagtgcaggaggcagcctgctctgccttcgcaacccttgaggaggaggcttgcaccgagcttgtgccctacctttcgtacatactggatacgctggtcttcgctttcggaaagtatcagcacaaaaacctgctcatcctgtatgatgctatcggcacgctagcagattccgttgggcatcacttgaaccaaccggaatatatccagaagctgatgcctcccctaatccagaaatggaacgaattaaaagatgaggataaggatctattcccactccttgagtgtctgagctctgtcgcaactgcccttcagagtggcttcctgccttactgtgaaccagtgtaccagcgttgcgtgaccctggtgcagaaaactcttgctcaagcaatgatgtacacccagcaccctgaacagtacgaagcaccggataaggattttatgattgtggccctggatcttctgagcggtctcgccgaaggactcggaggtcacgtagagcagctcgtagcacgctccaacataatgacactgctgttccagtgcatgcaggacagcatgccagaagttcgacagagctccttcgcgctacttggtgacttgactaaggcttgcttcattcatgtcaagccctgtatcgctgaatttatgccaatcttgggtacaaacctgaaccctgagtttatctccgtttgtaacaatgctacatgggccataggcgagatctgtatgcagatgggtgctgaaatgcagccgtatgtgcagatggtgctgaacaacttagtagagattatcaatcgacccaacactcctaaaaccctcttagagaacaccgcaattaccatcggccgactggggtatgtttgccctcaggaagttgcccctatgctgcagcagtttattaggccatggtgcacgtccctgaggaacatccgtgacaatgaggagaaggactcagcattccggggaatttgtatgatgatcggggtcaaccccggaggagttgtgcaggactttatctttttctgtgatgctgttgcttcttgggtgagccccaaggacgacctgagagacatgttttacaagatactacacggatttaaagaccaggtaggagaggacaattggcaacaatttagcgagcagttccctccattgttgaaggagaggttggccgcattctatggggtctag

SEQ ID NO: 209498 - DNA, 2100 bp, synthetic construct
  misc_feature 1..2100: note = Description of Artificial Sequence: Synthetic coding sequence
  source 1..2100: mol_type = other DNA
atggactggcagcccgacgagcagggcctgcagcaggtgctgcagctgctgaaagactctcagagtcccaacaccgcaacccagaggatcgtacaggataaattaaaacagctaaaccagttccccgattttaacaattacctcatattcgttctcaccagattaaagtcggaagacgaaccaactcgctctctgagtggcctgatcctcaaaaataacgtcaaggcgcattaccagagcttccctccgccggtggcagactttatcaaacaggagtgtctgaataatattggcgatgcatccagcctgatacgcgccaccatcggtattctgatcactactatcgcctccaaaggcgagcttcagatgtggccagagttactgccacagctgtgtaatctgttgaactccgaggactataacacatgcgagggggcgttcggggctctccagaaaatctgtgaggactccagcgaactgctcgatagcgacgccctgaaccggcctctcaacatcatgatccccaaatttttgcaattcttcaaacattgttctcccaagatcaggtctcacgcaatcgcctgtgtcaatcaatttatcatggatagggcacaagccttgatggacaacatcgatacgttcatcgaacacctcttcgcactcgcggtagacgacgatcctgaggttcgcaaaaacgtgtgtcgggcgcttgttatgcttctggaagtacggatcgatcgactgattcctcacatgcactctatcattcagtacatgctgcaaaggactcaagaccacgatgaaaatgtcgcacttgaagcctgcgagttctggctcaccttagctgaacagcccatttgtaaggaggtgctcgccagccacctagtgcagttgattcccattttggtgaatggcatgaaatattctgagattgacattatccttcttaagggagacgtggaagaggatgaggctgtcccagattcagagcaagacatcaagccccgcttccataagtccagaactgtcacactgccgcatgaagcagaacggcctgacgggagcgaagacgcagaagatgacgatgatgacgatgcactgtccgattggaatctcagaaaatgttcagccgccgcacttgatgtgctcgcaaatgtgtttcgcgaggagctcctacctcacttactgcctctcctaaaaggactcctgttccatcccgaatgggtggtgaaagaatcaggaattctggtgctgggggcgattgccgagggttgtatgcagggcatggttccttatctgccggaactgataccacacctaattcagtgtttgtcggacaagaaagctttagtaagaagcatcgcatgctggaccttgtccagatacgcacactgggttgtgagtcagccccccgacatgcatctaaaaccgttgatgacagaacttctgaaaagaattctggatgggaacaagcgcgttcaggaggcggcctgtagcgctttcgccaccctggaggaggaggcgtgcacagagcttgtgccatatctgtcctacatcctggacaccctcgtgttcgcctttggaaaataccagcacaagaacctgcttatcttatacgatgccattggtacacttgcggacagcgtaggtcaccacctgaaccaacctgaatatatccaaaagctgatgcctcctctaattcagaagtggaatgaattgaaagacgaggacaaggatctttttcccctcttggaatgcctgagtagtgtcgctactgctcttcaaagcggattcctgccctattgtgagcccgtttatcagcgctgcgtaactctggtacagaagacactcgcccaggcaatgatgtacacacaacacccagaacaatacgaagctcccgataaagacttcatgattgtggctctggatctgctttccggactggcagaaggcctgggcggacatgttgagcagctcgtggcacacagcccctcatttccacctcacccactgccaccggcaggatcccgggtgtgcccattcgtgaccgtcctttgttgggggctggctcccaggtggagagagattccgctagtttag

SEQ ID NO: 209499 - DNA, 2694 bp, synthetic construct
  misc_feature 1..2694: note = Description of Artificial Sequence: Synthetic coding sequence
  source 1..2694: mol_type = other DNA
atggactggcagcccgacgagcagggcctgcagcaggtgctgcagttgttgaaagacagtcagagtccaaacaccgccacccagcggattgtgcaggacaaactgaagcagttgaatcaatttcccgactttaataattacttaattttcgtgttgactagactcaaatctgaggacgaacctaccaggagtctgagcgggctgatcttgaaaaacaacgtgaaagcccactaccagagttttcctcccccagttgcggacttcatcaagcaagaatgcctaaacaacattggcgacgcctcttccctcatccgcgctacaatcggcatcctgatcactacaatcgccagcaagggcgagctgcagatgtggccagagcttttgccccaactttgcaatcttctcaattcagaggattataatacatgtgaaggcgcctttggcgccctgcaaaaaatttgcgaagattcctctgagctcctcgatagcgatgcactgaatcggccgctgaatatcatgatcccaaagttcctgcaattctttaagcactgctcccccaaaattaggtcccacgcaatagcctgtgtgaatcagttcattatggatcgcgctcaggccctcatggataacattgatacattcattgagcacctcttcgctttagctgtggatgatgaccccgaagtcagaaaaaatgtgtgcagagctctggtaatgttgctggaggttcgcatcgatagactgattcctcacatgcacagtataatccagtacatgctgcagcgcactcaggatcatgacgagaatgtcgcactcgaggcctgcgagttttggctcaccctggctgagcagcctatttgcaaagaggtgctagcttctcatttagtccaactgattcctatcttggtaaacggcatgaagtactccgagatcgacattatccttctcaaaggcgacgttgaggaagacgaggccgtgcctgattccgagcaagatataaagccccgctttcacaaatctcgaaccgtgacactcccgcacgaagcagaacggccagacgggtcagaggacgccgaggacgatgatgatgatgacgcattgtccgactggaatctccgaaagtgttctgctgccgcgttagacgtgctggctaacgtgttccgcgaggagttacttccgcatcttctgcccttgctcaaaggtctgcttttccacccggagtgggtggtgaaggagtccggcatccttgtcctaggcgcaatcgccgaagggtgtatgcagggaatggtgccctacctgccagaactaattcctcacctcattcaatgcctcagcgacaagaaagccctcgttagatctatcgcctgttggacactatctaggtatgctcactgggtggtgtctcaacccccagacatgcacctgaaacccctgatgacagagctgctaaagcgcattctcgacgggaataagcgcgttcaggaggccgcttgctccgcgtttgccacactggaagaagaggcttgcacggaactggttccatacctgagctatatcctggacacactcgttttcgcgttcgggaagtatcagcacaagaatctcctgattttgtacgacgctattggcacattagccgattcagtgggtcatcatctcaaccagcccgaatatatccagaagctcatgccaccgctcatccagaagtggaatgagctcaaggatgaggacaaagacctcttccctctactcgaatgtttgagctccgtcgctaccgccctgcagagcggtttcctgccatattgtgaaccagtgtatcagcggtgtgtgactctggtgcagaagactctggcacaggctatgatgtatactcagcatcccgaacagtatgaagccccagataaggactttatgattgtggcactggaccttttaagcgggttggctgagggccttggaggacacgtcgagcagcttgtagcccgaagcaatattatgacactcctatttcaatgtatgcaggattcaatgcccgaagtgaggcagtcaagctttgcattgctcggcgacctgacaaaagcttgcttcattcatgtcaaaccatgtattgccgaatttatgcccatcctcggtaccaatttaaatcccgagttcatttcagtatgcaataatgctacctgggcaataggggaaatttgtatgcagatgggcgccgagatgcaaccctacgtgcagatggttctgaacaacttagtggaaataattaatcgccctaacacaccaaagaccctgcttgagaacacggggcgcttaacctctccatctgcgattcctgccataaccatcgggcgcttaggctacgtctgcccccaggaagtcgcaccaatgcttcaacagttcatccgcccatggtgcacgtcactgaggaacatccgcgataacgaggagaaggatagcgccttcagaggtatttgcatgatgatcggagtgaatcctggcggcgttgtccaagattttatctttttttgcgatgcggtcgccagctgggtgagtcccaaggacgacctccgggatatgttctacaaaattttacatggcttcaaggaccaggtaggagaagacaattggcagcagttcagcgaacaattcccaccacttctcaaagagcgcttggccgccttctatggcgtttag

SEQ ID NO: 209500 - DNA, 2664 bp, synthetic construct
  misc_feature 1..2664: note = Description of Artificial Sequence: Synthetic coding sequence
  source 1..2664: mol_type = other DNA
atggactggcagcccgacgagcagggcctgcagcaggtgctgcagcttctgaaagattcccaaagcccgaatactgccacacaaagaattgtacaagacaagttaaaacaactgaatcagttccccgatttcaacaattaccttatttttgtgctgacaagattgaaaagcgaagatgaaccaacacgcagcctgagcggcctgatactgaagaacaacgtaaaggcacattaccaatcatttccaccacctgtcgcagattttattaagcaggagtgccttaataatattggtgatgcctcttccctcataagagcgactatcggaatcctgattacgactattgcctctaaaggagaactgcagatgtggcctgagctcctgccccagctctgtaatcttctgaacagtgaagactataacacttgcgaaggcgccttcggagctctgcagaagatctgtgaagattcctccgaactgctggattcagatgcgcttaatcggcctcttaatatcatgatcccaaagtttcttcaatttttcaagcattgcagccccaagatccgctcccacgcaatagcatgcgtaaaccagttcatcatggacagggcacaggccctgatggacaacatcgatacctttatagaacacctgttcgccttagccgttgacgacgatcccgaagtccgaaaaaacgtgtgtcgcgcactggtgatgctgctggaggttcgaatcgatcggcttatccctcacatgcatagcattattcagtacatgctgcaaagaacccaggatcacgatgagaatgttgcactagaagcctgtgagttctggctcactctggctgaacagccaatatgtaaagaggtgctcgcctcccacctggtgcaactgattccaatcctagtgaatggcatgaagtactcagaaatcgacatcattctgctgaagggcgatgtggaggaggatgaggctgttccagatagcgagcaggacatcaaaccaaggttccacaaatctagaactgtaacgctgccccatgaggctgagcgtcctgatggctccgaggatgcagaagacgacgacgatgacgatgccctgtccgactggaacctccgcaagtgcagtgctgctgcactggacgtcctggcaaatgtgttccgcgaggagctcctgcctcatttgctaccgctactgaaaggactgctgttccatcccgagtgggtggtaaaggagtctggtatcctggtcctgggcgctattgcagagggttgtatgcaggggatggtgccttaccttcccgaactcattccacacctgatccagtgcctgtcagataaaaaggcccttgtcaggtcaatagcctgttggactttgtctcggtacgcgcattgggtagtatcccagcctcctgacatgcatctgaagcctttaatgaccgagctgctgaagcggattttagacggaaataaacgggtgcaggaggccgcatgtagcgcgtttgctaccttggaggaggaagcttgcacagagctggtgccctacttgagttatattctggataccctcgtcttcgcattcgggaaatatcaacataagaacctcctcattctctacgatgcaattgggacactcgctgactcagtgggtcatcatctgaatcagcccgaatatatccaaaagttgatgccccccttgatccagaagtggaatgagctgaaggacgaggataaggatctgttcccattgctagaatgcctgtcatctgtagcgaccgcattacagagcggattcctgccctattgcgagcctgtttaccagcggtgcgttactcttgtgcaaaaaactctcgcccaggcaatgatgtatacccaacatccagagcagtatgaagcacctgacaaagatttcatgatcgtcgccctcgacctgctgtcgggcttagccgaggggctgggtggacacgtggagcaactggtagcccgctccaacatcatgactttgttgtttcagtgcatgcaggacagcatgccagaagtgcgccagagcagctttgccttgctcggcgacctcacaaaggcctgcttcattcacgtcaagccctgtatcgccgagtttatgcctatacttggaaccaatctgaatccggagttcatcagtgtctgcaacaatgctacatgggcaatcggagagatatgcatgcagatgggcgccgagatgcaaccttatgtacagatggtcctgaacaacctggtcgagattattaatcggccaaacacccctaaaactttactggagaatacagccatcacgattggtagactcgggtacgtttgccctcaggaagttgctcccatgctacagcagtttatacgcccttggtgtacgtctctgaggaacattagagataatgaggagaaggattccgccttccggggcatctgtatgatgattggggtgaatcctggaggggtggtccaggactttatcttcttttgtgatgcagttgcatcctgggtgtccccgaaggacgatctgagggatatgttctacaaaatcctgcacggcttcaaagaccaggtgggcgaagacaattggcagcagttcagcgagcagttcccccctctactgaaggagcgtctggcagctttttacggggtgtag

SEQ ID NO: 209501 - DNA, 2694 bp, synthetic construct
  misc_feature 1..2694: note = Description of Artificial Sequence: Synthetic coding sequence
  source 1..2694: mol_type = other DNA
atggactggcagcccgacgagcagggcctgcagcaggtgctgcagctgttgaaggacagccagtcgcctaatacggccacacaacgtatcgtgcaagacaagctcaagcagctcaatcagtttcccgactttaataactatctgatcttcgtccttaccagactgaaaagcgaagatgagccaacgagatcgctgtctggtctgattctcaagaacaatgtgaaagcccactatcaaagcttccctccccccgtggctgattttatcaagcaggagtgtctgaacaacattggggatgcatcttcactgattcgagctaccatcggaatcctcatcaccaccatcgccagtaaaggggagctccagatgtggcctgaactgctgccgcagctatgcaacctgcttaactcagaagattataacacctgcgagggcgcctttggcgcactgcagaaaatctgcgaggacagttccgagttgttggactcagatgcacttaaccgccccctgaacatcatgataccgaagttccttcagtttttcaagcattgctctcccaagattcgctctcacgcaattgcatgcgtgaaccaatttattatggatagggctcaagctttaatggataatatcgatactttcattgagcacctatttgccctggctgtggatgacgatcctgaagtaaggaagaatgtttgcagagcccttgtcatgctcctcgaggtgaggatcgatagactcatcccccacatgcatagcattatccagtatatgctccagcgaacacaggatcacgacgagaatgtggctttagaggcctgtgagttctggctgacacttgccgagcagcccatctgtaaagaggtactggcctcgcaccttgtgcagcttataccgattctggtgaacgggatgaaatatagtgagatcgacatcattttgctcaagggcgatgtggaggaagatgaggctgttcctgacagtgagcaggatataaagccacggtttcacaaatctcggaccgtgacactccctcacgaggctgagcggccagacggaagcgaggacgcagaagatgatgacgatgacgatgctctaagcgattggaatctccgcaagtgcagcgccgccgccctcgacgtactcgcaaatgtctttcgggaagagttgctgccccatctactgccacttctcaagggcttgctgttccacccagagtgggttgttaaagaatcaggaattttagtccttggggcgatcgcagaaggttgcatgcaaggaatggtgccttacttgcctgagctgatcccgcatttaatccagtgcctcagtgataagaaggcattggtccgcagcatcgcttgctggaccctgagtagatacgcccattgggttgtgtcccaacctccagacatgcacctgaagccactgatgactgaacttctgaagaggatcctagatggcaacaagcgcgtccaagaggcagcctgcagcgcctttgccactctggaggaagaggcatgcaccgagttggtgccctatctgagctatatcctggacacgctggtcttcgccttcggcaagtatcagcataaaaacctactcatcctgtacgacgccatcgggaccctggcagacagtgtcggccaccacctgaatcagcccgaatacattcaaaagctgatgccccccttgattcagaagtggaacgagctaaaggacgaggataaggatctgtttcctctgctcgagtgcctgtctagcgtggcaactgcactgcagtccgggtttttgccttattgtgagccagtgtatcagcgttgtgtaacactggtccagaaaacactggcgcaggccatgatgtacactcagcatcccgagcagtacgaagcaccagataaggacttcatgattgtcgctctcgacctgctcagtggattggctgaagggctgggaggacatgtggaacaactcgtcgccagatccaatataatgacgctgttgttccagtgtatgcaagacagtatgcccgaagtgaggcaaagtagcttcgccctgcttggggacctgacaaaggcctgttttatccatgtgaagccttgcatcgctgaattcatgcccatcctcggcaccaatctgaatcctgagtttatcagcgtatgtaacaacgcgacttgggctataggagagatctgtatgcagatgggggcggaaatgcaaccctatgttcaaatggtactgaataacctggtcgagatcatcaaccgcccaaacactccgaaaacacttctcgaaaacacaggaagactgacgtcaccaagcgctatccccgcgattactatcggtcggctcgggtacgtttgcccccaggaggttgcccccatgttgcagcagttcattaggccttggtgcaccagcctccgcaatattagggacaacgaggagaaagattctgccttccgggggatctgtatgatgatcggcgtgaatccaggcggcgtggtccaggactttatctttttttgcgacgccgtggcctcctgggtgagtccgaaggatgatctgcgcgatatgttctacaagatcctccacggcttcaaggatcaggtgggggaggataactggcaacaattctcagaacagttccccccactattaaaagagaggctcgcagccttttacggggtgtag

SEQ ID NO: 209502 - DNA, 3156 bp, synthetic construct
  misc_feature 1..3156: note = Description of Artificial Sequence: Synthetic coding sequence
  source 1..3156: mol_type = other DNA
ggccagagcgtgggcggccggggcctgttccgggactgcgcctgcatcgaagaaacaaccggcgcgggggcactttctcggtctggggccgggccgctggatgtggaggctgctggacctagcccgtctcgttgtgaaggcggaggatccctgcgcgccaggagcaggggccagcgacatgggcctccctgggacgaaggatcatcactggggcctatgcgcattaggagggccccaccaccaccccccgtcgctcggtttcacatcccccctccagccctcccaagtccacgacttcggggaaggggatggcgcagttggaggggacctcgcacctgggctggcgttgacaggagacccccaccagtgcgccgtggccgaagtagaaggcacgcagcgaccgctgctagcggagctccaccaggatcacataccgagcctcagaggccatctgctgacccaggaccgtacctgcgctcattaccgtgcgctatggactggcaacctgatgaacagggcctgcagcaggtactccaacttctcaaagatagccaatcgcccaataccgctacacagagaatcgtgcaggacaaattgaagcaactgaatcagtttcccgacttcaataactacctcatctttgtcctgacacggcttaaatccgaggacgaaccaacacgctctctgtctgggctgattctgaaaaacaatgttaaggcacattaccagagcttccctcctcccgtggccgattttatcaagcaggagtgtttgaacaacatcggggacgcaagcagtctcatacgcgcaacaattggcatactgataaccacaatcgctagcaagggagaattgcaaatgtggccggaactcctgccacagctgtgtaacttgctgaattctgaggactataatacctgtgaaggcgctttcggtgccttgcagaagatctgtgaggactccagcgagctacttgactcagacgcactcaacagacctctgaatatcatgattccaaaattcttacagttcttcaagcactgttctccaaagattcggtcacatgctatagcctgtgttaatcagttcatcatggacagggcccaggcactgatggataatattgatacattcatcgaacatctgttcgcactggctgtcgacgacgatcctgaagtcaggaaaaacgtgtgccgtgccctggtgatgctgctcgaggtgcggattgatagattgatccctcacatgcactcaataattcagtacatgctgcaaagaactcaggatcacgatgaaaacgtggctctggaggcatgcgaattctggttaacgcttgccgagcaaccaatctgcaaggaagtgcttgcaagtcacttggtccagctcattcccatcctcgtaaatgggatgaagtacagtgagatcgacatcattttgttgaagggagacgtggaagaagatgaagccgtccccgatagtgagcaggacattaaacctcgcttccacaaatccaggaccgtgacgctcccgcacgaagcagaacgacctgacgggagcgaggatgcagaagacgacgacgatgatgacgccctgtccgattggaatctacgcaagtgttctgcagcagccttagacgtgttagctaatgtatttagggaggaattgctacctcacctgttgccactgctcaagggtctgctgtttcatccagaatgggtcgttaaggagtcaggcatcctcgttctgggtgccattgcggaaggctgcatgcagggaatggtgccttatttgccggagctgattcctcatcttattcagtgcctctccgataagaaagccctggtcaggagcattgcatgttggaccctgtctaggtatgctcattgggtcgtttctcagccccccgatatgcacctcaagccactgatgactgagctactgaagcggatcttagacgggaacaaacgggtgcaggaggcagcttgttcggcatttgccaccctcgaggaagaggcctgcaccgagctagtgccttacctctcgtatatcctggataccttggtgttcgcatttgggaaatatcagcacaaaaatttgctgatattatacgacgccatcgggacactggcagattctgtgggccatcatctcaatcagccagaatacatccagaaactcatgcccccattgatccaaaaatggaatgagctgaaagatgaggacaaggatctgttcccactgctggagtgcctctccagtgtcgccacagctctgcaaagtggattcctgccatattgtgagcccgtttaccaaaggtgcgtgaccctagtccagaagactctggcccaagctatgatgtatactcaacaccccgaacagtacgaggcacccgataaggattttatgatcgttgcccttgacctactttcagggcttgcggagggccttgggggccatgtggagcaactggtggccagatctaatatcatgactcttttgttccaatgtatgcaagacagcatgcctgaagtaaggcagagttctttcgctttgctgggagatctgaccaaggcctgtttcatccacgtgaaaccttgtattgctgaatttatgccaatattgggcactaacctgaatcccgagtttataagtgtctgcaacaacgccacatgggctatcggagagatctgcatgcagatgggggccgagatgcagccttatgtccagatggtgctgaacaatctggttgagatcatcaatagacctaacactcctaagaccctattagaaaatacagccattacaattggaaggctcggttacgtgtgcccacaggaagtggcccccatgctacagcagtttatacgtccctggtgcactagtctgagaaacatccgtgacaacgaagaaaaagactctgcttttcgcggcatctgcatgatgattggcgtgaaccccgggggcgtggtccaggactttattttcttctgtgatgcagtcgcctcctgggtatctcccaaggatgacctgagggacatgttttacaagatcctgcacggattcaaggaccaggtgggggaagacaattggcagcagttttcagagcaattcccaccattgctaaaggagcgactggccgctttttacggcgtttag

SEQ ID NO: 209503 - DNA, 2316 bp, synthetic construct
  misc_feature 1..2316: note = Description of Artificial Sequence: Synthetic coding sequence
  source 1..2316: mol_type = other DNA
atggactggcagcccgacgagcagggcctgcagcaggtgctgcagctgctcaaagacagccagagtcccaacactgccacccaaaggatagttcaggataaactgaaacagctgaatcagttcccagactttaacaactatctgatttttgtcctgactaggctgaagtctgaggacgaaccgacgcgctccctctccggtttgattttaaagaacaatgttaaggcccattatcaaagttttcccccaccagtggctgactttatcaagcaagagtgtctcaataatattggggatgcgagctcacttatacgtgcaaccatcggtatccttataacgaccattgcatctaaaggagagctccaaatgtggccagaattgcttccccagctttgtaacctcctgaactccgaggattacaacacttgcgagggagctttcggagctctgcagaagatctgtgaagactcttccgagctcctggactcagatgccctcaacagacctttgaacattatgattcctaaattcctgcagttttttaaacattgttctcctaaaatcaggagccatgccatcgcttgcgtgaaccagttcattatggacagggctcaggcactcatggataacatcgacaccttcattgagcatttatttgcactggctgtcgacgatgacccggaggtaagaaagaatgtgtgccgcgccctcgtgatgctactcgaggtgagaatcgaccggttgatcccacacatgcacagcataatccaatatatgcttcagagaacccaagaccacgatgaaaatgtggccctggaagcctgcgagttttggttgaccctagcggagcaacctatttgtaaagaggtgctcgctagccatttggtgcagctgatccccatcctcgtgaacggtatgaagtacagtgaaattgatattatcctgcttaaaggcgatgtggaagaggacgaagccgtgccagattccgaacaggacatcaagccccggttccataagagtaggacggttactctcccacacgaagccgagagaccagacgggagtgaggatgccgaagacgacgacgacgatgacgccctgagcgattggaatcttagaaaatgttccgccgccgcgctggacgtgcttgctaatgtgtttagagaggagctcctgccccatcttctccctctgctgaagggactcctctttcatcccgagtgggtggttaaggaatccggcatcctggttttgggggccatagctgagggatgtatgcagggtatggtgccctatctgccggaactgatcccccatctgattcagtgtttatctgataagaaggctcttgtccgtagcattgcctgctggaccctctctcgctatgctcattgggttgtttctcagccacccgacatgcacctgaagccactaatgactgagctactgaagagaatactggatggaaacaaacgcgtgcaggaggccgcatgctccgcttttgcgacactggaggaagaggcgtgcacagaactggttccatatctctcttacatcttggacactctagtgttcgctttcggcaaataccagcacaagaatttgcttatactctacgatgcgattggcaccctcgcagactccgttggacaccatcttaaccaacctgagtatattcaaaaactcatgcctcctcttatccaaaagtggaatgagctcaaagatgaagataaagacctgttcccactcctggagtgtctgtcgagcgtggccaccgctctgcagagcggttttctgccttactgcgagcctgtttatcagagatgtgtcactctcgtgcaaaagactctagctcaggccatgatgtacacccagcacccagaacagtacgaggcccctgataaggacttcatgattgtggcacttgacctcttgagcgggcttgccgaggggcttggaggccacgtagagcagttggttgctcgcagcaacattatgactctgctatttcagtgcatgcaggacagcatgcccgaggtgagacaaagtagtttcgccctcctcggagacctgactaaagcttgttttatccacgtgaagccatgtatcgccgagttcatgccgattctcggcacgaacctgaaccctgagtttatttctgtttgcaacaatgcaacctgggctatcggtgagatctgcatgcaaatgggtgccgagatgcaaccatatgtacagatggtcctgaataacctggttgagatcatcaaccgccccacaccaagtcaaaagcagaataagacaaagaagaataagtag

SEQ ID NO: 209504 - DNA, 2772 bp, synthetic construct
  misc_feature 1..2772: note = Description of Artificial Sequence: Synthetic coding sequence
  source 1..2772: mol_type = other DNA
atggagggcgccaagcccaccctgcagctggtgtaccaggccgtgcaggctttgtaccatgaccccgacccgtccggaaaagaaagagcctccttttggctgggggagttacagcgaagtgtacacgcctgggaaatctcggaccagttactccagatcagacaggacgtggagtcctgctatttcgccgctcaaacgatgaaaatgaagattcagaccagcttctatgagcttcccaccgatagtcatgctagtcttcgcgatagcctgttgacacatatccagaatctcaaagacctgtcccccgtcatcgtgacccagctggcactggccattgcagacctggccctccaaatgccatcgtggaagggctgcgtgcagactttagtagagaagtactctaacgacgtgaccagcctgccttttctgttggagattcttaccgttttgcctgaagaggtgcactcacgctccctgcggatcggcgccaaccggcgcacagagattatcgaagatctggcgttctactccagtacagtggtcagtctcctgatgacctgtgtcgagaaagcaggaactgacgagaagatgttaatgaaggtgtttcgctgcctcggctcttggtttaatcttggtgttttggattccaattttatggccaacaataagttgctggcgcttttgttcgaggtgctgcaacaggataagacaagcagtaatttgcatgaggccgcctccgactgtgtgtgctcagctttgtacgcaatagaaaacgtagagaccaacctgcccctagcaatgcaactgtttcagggagtgctcacacttgagacagcataccatatggcggtcgcaagggaggacctcgacaaagtgttgaactattgccgcatcttcacagaactctgtgaaacgttcttggaaaaaatagtttgcaccccgggacaaggcctaggtgatttgcggaccctggagctcttgctgatttgtgccggacacccccagtatgaagttgtggaaatatcatttaacttttggtaccggctgggagaacatctgtataagacaaatgacgaagtgattcacggcatttttaaggcttacattcagcggctcttacacgctttagctcgccactgccagctggaacctgatcacgaaggcgtgcctgaggaaaccgacgacttcggggagtttaggatgcgagtttcagatctagtaaaggacctgatctttctcataggcagtatggagtgctttgcccagctctattcaactcttaaggagggcaatcccccatgggaagtcacggaagcagtcctgttcataatggctgcaatcgcaaaaagcgtggatcccgaaaataatcccactttggtggaagttctcgaaggtgttgtgcggctaccagagacagtccacactgctgtgaggtacacatctatagagttagtgggcgaaatgtccgaggtcgtcgatcgcaaccctcagttcctggatcctgtactgggttatctcatgaagggattatgcgagaaaccactcgcctctgcggccgctaaagccatccataacatctgcagtgtgtgtagagaccacatggcccaacatttcaatggtcttttggagatcgcacgatctttagattctttcttgctatcaccagaagccgcagtgggcctgctgaagggcactgccctcgtattggcgagactgcctttggacaagattaccgagtgtttatctgaactgtgctcagtccaggtcatggctttgaagaaactgctctctcaagaaccatccaatggcatctcaagtgatcctaccgtcttcctcgacaggctggctgtaatctttaggcacaccaacccaatagtagaaaacggccaaacacatccttgtcagaaagtcattcaggagatatggcctgtgctaagcgaaaccttgaacaaacaccgggctgataataggatcgtagaaaggtgctgccgttgtttgagattcgccgttagatgcgtcggcaaaggctccgcggcgttgctgcagccactggttacccagatggtcaatgtgtaccacgtccaccagcattcatgctttctctatctcgggagtattttggtcgacgaatacggaatggaggagggctgccgccaaggcctactggacatgttgcaggctttatgcatcccgacattccaattgctggaacagcagaacggtctccagaaccatcctgacaccgtcgacgacttgtttagactggcgacgaggttcattcagcgctctcccgtcactctgctccgaagccaggttgtgattccaatcctccaatgggctatagccagcacaactctggatcacagggacgcgaactgttctgtgatgcgatttctgcgggaccttatacatacgggtgttgccaacgaccacgaggaagactttgagcttcgcaaggaacttataggacaggtgatgaaccagctgggccagcagcttgtcagccagctgctccacacttgttgtttctgcttgcccccatacacgctacctgatgtggcggaagttctctgggaaatcatgcaggtggatagacccaccttttgccgatggctggagaattcccttaagggcctgccaaaagagactacggtaggcgcggtgaccgttactcataaacagttaacagacttccataaacaagtaacctcagccgaagagtgtaagcaggtgtgctgggcgttgagagattttacaagactgtttcgctag

SEQ ID NO: 209505 - DNA, 2874 bp, synthetic construct
  misc_feature 1..2874: note = Description of Artificial Sequence: Synthetic coding sequence
  source 1..2874: mol_type = other DNA
atggagggcgccaagcccaccctgcagctggtgtaccaggccgtgcaggccctctaccacgaccccgacccctccggtaaggaacgggcttccttctggctgggcgagctgcaacggagcgttcatgcctgggagatatccgaccaattgttgcagattcgtcaggatgtggagagttgctattttgcagctcaaactatgaaaatgaagatacagacttccttttacgaactgccaaccgactcccatgccagtcttagagactcgctgctgacacatatccagaacctgaaagatctgtccccagtgatcgtcacacaacttgctcttgcaatcgcagatctggctcttcagatgccatcttggaagggatgtgtacaaaccctggtggagaagtattctaacgacgtaactagcctcccgttcttattggagattctgactgtgctccccgaggaggtacattcccgatccctgcggatcggggctaaccggaggactgaaataatcgaggacctggccttttattcttctacagttgtgtctcttttgatgacgtgcgttgagaaggctggcaccgacgagaagatgctcatgaaggtctttcgctgcctgggaagttggtttaatctgggcgtcttggactcaaatttcatggctaacaacaagttgctcgctctgctgttcgaagtgctgcaacaggataaaacaagttcaaatctccacgaagccgcctccgactgcgtctgcagtgccctatacgccatcgaaaatgtggagaccaatcttcctctggccatgcagctgttccaaggcgtgctcaccctggaaactgcttaccacatggcagtggcacgggaggatctcgataaggtactcaactactgcaggatattcaccgagctttgtgagacttttctggagaaaatcgtgtgcacacctggacagggacttggagacctgcggacactcgagctgctcctcatctgcgccggtcatccgcagtatgaagtagtggaaatatctttcaatttctggtaccgcctgggcgagcacctgtacaaaactaatgatgaggtcattcatggcatctttaaagcatacatccagcgcctccttcatgcattagcaaggcattgtcagttggagccagaccacgagggtgttcctgaggaaacagacgactttggcgaatttcgaatgagggtgtccgacctcgttaaggacctgatctttttgataggcagtatggagtgcttcgcgcaactatattccacactgaaggaggggaatccgccatgggaagtgactgaagctgtgttgttcattatggctgccatcgcgaaaagcgtagatcccaaaaagccattctccaatgccgtatgtcgtcattctctgctgttcggtcagaacattacgagcgagatcagtaattgtgagtatctgccgcccgtgctgcgggaaaataacccaactctggtcgaggttctcgaaggggtggttagactgccagaaactgtccacactgcagttcgctacacctcaattgaactagtaggggaaatgtctgaggtcgtggacagaaatccccagtttttggacccggtgctggggtacttaatgaagggactgtgcgagaagccgctagcttccgctgccgccaaggcgatacacaatatctgtagcgtgtgccgcgatcacatggcccagcactttaacgggctcttggaaatagcccgttccctcgactcgtttttattaagtccagaggccgccgttggactgttgaaagggaccgctctggtgctcgctagactgcctctggataagatcaccgagtgcttaagcgaactttgcagtgtgcaagtgatggcactcaaaaaactgttgtcacaggaaccttctaacggaatcagttcagatcccacagtatttctggatcggctggcggtcatctttcgccatacaaaccccatagttgagaacgggcagacccatccttgtcagaaagtgatccaggagatctggcctgtgctgagcgagacactcaacaaacacagggccgacaatagaatcgtggaacgatgctgtcggtgtctgcggttcgccgtgcggtgtgtaggcaagggatcagccgcactgttgcagccattggtcacacagatggtgaacgtataccatgtgcaccagcattcctgcttcttataccttggttcaatcctcgttgacgaatacggtatggaagaaggatgtcgccagggtcttcttgacatgctgcaggccctgtgtatccctacatttcagctgctcgaacagcagaacggattgcagaatcatccagacaccgtggacgacctgtttcgactggccaccaggtttattcaaagaagccccgtgacacttctgcgatcccaggtagttatccccatcttacaatgggctattgcttctaccacccttgaccatcgggacgccaattgcagtgttatgcgctttttaagagatttaatccacaccggggtggccaatgaccacgaggaggacttcgaacttcggaaggagctgatcggacaggttatgaatcaactgggtcagcagcttgtgtcccaactgctgcacacatgttgcttctgtcttcccccatacacgctgcccgatgtggccgaagtgctctgggagatcatgcaggtcgaccgccccactttctgtcgctggctagaaaattcattgaagggtctgcccaaggaaactactgtcggcgccgtgaccgtaacccacaagcagctgaccgatttccacaagcaggtgacgtccgccgaagagtgcaaacaggtctgctgggcactgcgagactttactcggctgttccgctag

SEQ ID NO: 209506 - DNA, 2874 bp, synthetic construct
  misc_feature 1..2874: note = Description of Artificial Sequence: Synthetic coding sequence
  source 1..2874: mol_type = other DNA
atggagggcgccaagcccaccctgcagctggtgtaccaggccgtgcaggctctgtatcacgaccccgacccatccggaaaagaacgggctagcttttggctgggtgaactccagcgttcagtccatgcctgggaaatctccgaccagctcttgcagatcagacaggatgtggaatcttgctacttcgctgcccagactatgaagatgaaaatccagaccagtttctacgagctgccaacagactcccacgctagtctacgggattccctgcttactcatatccagaatctgaaggacctgtctcccgtcattgtcactcagcttgccctcgctatcgccgatctggcactgcaaatgcccagctggaagggatgtgtacagacccttgtggagaaatattctaacgatgttactagcctgccctttctgctagagatcctgaccgtgctgcctgaggaggtgcacagtcgcagtttgcgtatcggtgccaacaggcgcaccgagattattgaagacttggccttttactccagcacagtggtctctcttctcatgacttgcgttgagaaggccggcaccgacgaaaagatgctgatgaaagtgtttcgctgcctgggcagttggtttaatctgggagttctggactctaatttcatggctaataacaagttgctggctcttctgtttgaagtcctccagcaagacaagactagttctaacctgcacgaagccgctagcgattgtgtctgcagcgccctgtatgctatcgagaacgtggaaaccaacctgccattggccatgcagctgtttcagggggttttgacattggagacagcctaccatatggccgtcgcacgggaagacttggataaagtacttaactactgtcggattttcacagaactttgcgagacgtttcttgagaaaatcgtttgcaccccagggcagggcctgggagatctgaggacactagagctcctcctgatatgcgcaggccatccccagtatgaggtcgttgagatttcatttaacttctggtataggcttggggagcatttgtataagaccaatgacgaagtgatacacggaatatttaaggcatatatccagcgtctcttacacgccctcgccaggcactgccagctggaacccgatcacgagggagtacccgaggaaacagatgattttggcgagtttaggatgcgggtcagcgatctagtgaaagatttgatctttctgatcgggagcatggaatgcttcgcgcaactctactccacactgaaagagggtaatccaccatgggaggtcaccgaagccgtgctgttcatcatggcagcaatcgctaagagcgtggacccaaagaaacctttttcaaacgcagtctgtcggcactcgttgctctttgggcaaaacataaccagtgagatcagcaattgcgaatacctcccaccagtcctccgggaaaacaaccccacgctggtggaggttcttgagggggtcgtcagactgcccgagactgtgcacacagctgtgcgatacacatccattgagctggtgggcgagatgagcgaggtggtagataggaacccccagtttctcgatcctgtattaggctacttgatgaaaggactgtgtgaaaaaccactcgcctccgccgcagccaaagccatccacaatatctgctccgtttgcagggaccatatggctcagcatttcaacggattactggagatcgctcgttctctcgactcgtttttgttgtcgcccgaggcagctgttggtctcctcaagggaaccgccctcgtcctcgcaaggcttcctctggataagattacagagtgcctctccgagctttgtagcgtccaggtcatggctcttaaaaaactgctctctcaggaaccctccaacgggataagctcagatcctaccgtcttcctcgacagactggctgtaatctttaggcacacgaaccccattgtggagaacggccaaacccatccatgccagaaggtcatccaggagatctggcccgtgctgtcagagacactcaacaagcacagggccgacaatagaattgtggagagatgctgtcgttgtctgagatttgctgtgcggtgcgtgggcaagggtagcgcagctctgctccaaccactggtgacccaaatggtcaacgtataccatgtgcatcaacattcttgctttctctacctcggctccattttagtggacgaatatggaatggaagaaggctgcaggcagggacttttagacatgctgcaagccttgtgtatacctacctttcagctgttggagcaacagaacggactacagaatcatcctgatacagtggacgatctctttaggctggccaccaggtttattcagcgaagcccagtgacattactgcgatctcaagtggtgatcccaattctgcagtgggctatcgcgagcaccacactggatcacagggatgcgaactgttcagtgatgaggttcctgcgtgacctcatccacacaggcgtagccaacgaccatgaagaggactttgaacttcgcaaggagctgataggacaggtcatgaaccagctgggacagcagctagtgtcccagttgctgcatacttgctgcttctgtcttcccccctatacactccccgatgtagcggaggttttgtgggagattatgcaggtggacaggcctaccttctgcagatggctggagaactctttaaagggcctccctaaggagacaaccgtaggggcagtaacagtaacccacaagcagttaactgactttcacaaacaggtgacttccgcagaagaatgtaaacaggtgtgttgggccctaagggactttacacggttgtttagatag

SEQ ID NO: 209507 - DNA, 2580 bp, synthetic construct
  misc_feature 1..2580: note = Description of Artificial Sequence: Synthetic coding sequence
  source 1..2580: mol_type = other DNA
atggagggcgccaagcccaccctgcagctggtgtaccaggccgtgcaggcgttgtaccatgatcctgatccaagcggaaaagagagggcctcattctggctgggagaactgcaacgcagcgtgcacgcatgggaaattagtgaccaactgctacagattcggcaggatgtggagtcctgctacttcgcggcccagactatgaaaatgaagatacagacaagcttttacgaattgcccactgattcacacgctagccttcgagactccctgctcacacatatacaaaacctgaaagacttgagcccagttattgtcacccaactcgcgctggcgatcgctgatctggcactccagatgccttcctggaaggggtgtgtccagacccttgtcgaaaaatattcaaacgatgtaacttccctcccattcctgttagagatcctaactgttctgccggaggaggtgcatagtcgatcgttacggattggagccaaccgacgcacagagatcatagaggatctggccttttactcttccacagtggtctctctgttaatgacctgtgtggaaaaggcaggaacggacgagaagatgctcatgaaggtgtttcgatgtctgggttcttggttcaacttgggcgttctggattccaacttcatggccaacaacaagctgctcgcgttgttgtttgaggtgttgcagcaggacaagacttctagtaacctccatgaagccgcttcagactgtgtgtgttcggctctgtacgctatagagaacgtggaaactaatctgcctcttgctatgcagctgttccagggggttctcactctggaaaccgcctatcacatggctgtcgcccgggaggatctcgacaaagtcctcaactattgtagaatcttcactgaactatgtgaaacatttcttgaaaaaattgtgtgcactcccggacaagggctgggtgatctcagaacactggaattgctactgatctgcgccggacacccacagtacgaggtggtcgaaatcagcttcaacttttggtatagactcggcgaacacctgtacaaaacaaatgatgaggttattcacggcatttttaaagcttacattcaaaggctccttcacgctctggccaggcattgccagcttgagccggatcatgaaggggtacccgaagagactgatgattttggagaatttaggatgagggtgagcgatctggtcaaagacttgatcttcctgatcggcagcatggagtgcttcgcccaactctattcaacactcaaggaaggtaacccaccttgggaggtgactgaggccgtcctctttatcatggcagcaatcgccaagagcgttgaccccgaaaataacccgaccctcgtagaagtactggaaggggtagtgaggctgcctgagacggtacacaccgctgttcgctatacatcaatagaactcgtgggcgagatgtcagaggtggtggaccggaatccccagtttcttggcaccgctctggtcttagctaggctgccactcgataaaattactgaatgcctttccgaattatgttcagtgcaggttatggcgctgaaaaaactgctgagccaggagcccagcaacggaatcagtagtgatcccactgtgttcctcgacaggctcgctgtaatctttagacatacaaatccaatcgtggagaatggccagacacacccctgccagaaagtaatccaagagatatggccagttctgtctgagactctgaataaacatcgagctgacaaccgcattgtggaaaggtgctgccggtgtctgcgctttgccgttcgatgcgtaggtaaggggtccgcagccctgttgcagcccctggtcacccagatggtaaacgtgtaccacgtccatcagcactcctgttttctctatctcgggagtatcctcgtggatgaatacgggatggaggagggctgcagacaggggctcctcgacatgcttcaggcactctgcattcctacatttcaacttctggaacagcagaatgggctgcagaaccatcctgacacagtggacgatctctttaggctggctacaagatttatccagcgatccccagtgactctcctgaggtcccaagtcgtaatccctatcctccagtgggccattgcctccaccaccctggaccatcgcgacgcgaactgcagcgtgatgcgatttctccgcgacttgatccatactggggtggctaatgatcatgaagaagactttgaactcaggaaggaacttataggccaggtgatgaatcagctcggccagcagctggtgtctcagttgctccacacatgttgcttttgcttgcctccatacacattgccagacgtggcagaagtgctctgggagattatgcaagttgaccgtcccaccttttgccggtggttggagaacagtctcaaaggcctgccaaaagagacaacggtgggagctgtaaccgtaacccacaaacagcttaccgatttccataaacaggtcacatcagctgaggagtgtaagcaggtgtgttgggccctgagggacttcacacggctatttagatag

SEQ ID NO: 209508 - DNA, 4236 bp, synthetic construct
  misc_feature 1..4236: note = Description of Artificial Sequence: Synthetic coding sequence
  source 1..4236: mol_type = other DNA
atggccgaggcccggaagcggcgggagctgctgcccctgatctaccatcacctcctcagggctggatatgtcagggctgcgagagaggtaaaggagcagtctggtcaaaaatgttttctggcacagcccgtcactctactggatatctatactcactggcaacaaactagcgagttgggtaggaagaggaaggccgaggaggatgctgcgctgcaggccaaaaagacacgagttagtgatccaataagtaccagtgagtcgtccgaagaggaagaggaggcagaggccgaaactgcaaaggctacacctcggctggccagcaccaactcctcggtcttgggtgctgacctgccttctagcatgaaggaaaaagccaaggcagaaaccgaaaaagcaggcaagacaggaaatagcatgcctcatcccgctacaggcaagactgtagccaatctgctgagcggaaaaagtcctagaaagtctgcagagccaagcgccaatacaaccttggtgtctgagacagaggaggagggaagcgtgcccgctttcggcgcggcagcaaaaccaggcatggttagcgccggacaggccgactcctcgagcgaggacaccagctcatcatccgatgaaacagacgtggaggtgaaagcctctgagaaaatcctgcaggttcgagccgccagcgctcctgcaaaaggaacaccgggtaagggagcaacacccgccccacccgggaaagccggggccgtggcaagccagaccaaggcaggcaagccggaggaggattccgaatccagtagcgaagagagtagtgactccgaggaggaaactccggccgccaaagcactgttgcaggcaaaagccagcgggaagacatcgcaggtaggcgcagccagcgcccccgcaaaggaatcccctagaaagggagccgcaccagccccgcctggaaagacaggtcccgctgtcgccaaagctcaggccggcaaaagggaggaagatagtcaatccagctcagaagaaagtgactcagaggaggaggctcctgcacaggctaagcccagcggtaaggctcctcaagtcagagctgccagcgctccggccaaggaaagtccacgtaagggtgcagccccagcccctccgcgcaagactgggcctgcagctgctcaggtccaggtggggaagcaagaggaagactctcggagctcttccgaggagtccgattccgatcgagaagctctggcagccatgaacgctgcccaggtcaagccactaggcaagagcccccaggtcaaacccgcatcaaccatgggaatgggtccgctgggcaagggcgctggccccgttcctcctggcaaagtcggcccagccacaccatccgctcaggtgggcaagtgggaggaagattccgagagcagttccgaagagagcagtgattctagcgacggtgaggtcccgactgcagttgccccagcccaggagaagtcactgggaaatatcctccaagcgaaaccaacgtctagtcccgccaaaggcccccctcaaaaggcgggcccagttgccgtgcaggtgaaggctgagaaacctatggacaattcagagtctagcgaggagtcaagcgattccgctgactctgaagaggcccctgcagccatgactgctgctcaggctaagcctgctcttaaaattccacagaccaaggcatgtccaaaaaaaacaaacacgactgcttctgccaaggtagcacccgtccgggtgggaacccaggccccgcgcaaggctggaaccgctacatcacctgctgggtccagccctgcggtagccggggggacccagaggccggctgaggactcttccagttccgaggagagcgactccgaagaggagaagaccggactcgcggtgaccgtggggcaggccaagtctgttggcaagggcttacaggtaaaggccgccagtgtgcctgtgaagggctccctgggtcagggcacagctccagtccttccagggaagactgggcccaccgtgacacaggtgaaagcagaaaagcaggaggactcagaatctagcgaagaagaaagtgacagcgaagaagctgccgcttctccagcgcaggtcaagacctcagtgaaaaaaacccaggccaaagctaacccagccgcagcccgcgccccgtcagctaagggcacgattagcgccccaggtaaggtggtaaccgccgctgctcaggctaagcaacggagccctagcaaagtgaagccaccagttcgcaatccacagaactctacggtgttggctaggggacccgcatcagtaccctcagttggcaaggcagtcgctaccgccgctcaagctcagaccggccctgaggaggattcagggtcttccgaagaggagtctgacagcgaggaagaggctgaaacactcgctcaggtgaaacctagcggaaagactcaccaaattcgcgccgcgcttgctcctgccaaggagtccccacgaaaaggggccgctcctactccacccggtaagaccggcccttcggcagcacaggccggtaagcaagacgatagtggttcttccagcgaggaaagcgactcagatggggaagcaccggctgcggtcacctctgcccaggtaataaagccacccctgatcttcgtggaccccaatcggtctccggccgggcccgccgccactcccgctcaagcccaggcagcctcaactccacgaaaagccagagcctcagagagcactgctcgatcatctagtagcgagtccgaagacgaagacgtcatccccgctacccagtgtttgacacccgggattagaactaatgtggtaacaatgcccaccgcccacccccggattgcgccgaaagccagcatggccggggcatcctcctctaaagaaagcagccggattagcgacgggaagaagcaggaagggcccgcaactcaagttagtaagaaaaacccagcttccctgcctttgactcaggctgccctcaaagtgcttgctcagaaagcgtctgaggcacaaccaccagtagctaggacccagccgagcagtggtgtcgattccgccgtgggcacgttaccagcaacatccccacaatccacctccgtgcaagcaaaaggtaccaataagctcaggaagcccaagttgccagaagtccagcaggcaactaaggctccagagtccagcgatgattctgaagattcaagtgattccagcagcggttctgaagaagatggggaggggccccagggtgcaaaaagtgcccacaccctgggcccaaccccaagtaggactgaaactctggtggaggagacagccgccgagagttcggaggacgacgtggtcgctccatcgcagagcctcctctccggttatatgactcccggactgactccagccaactcacaggcctccaaggctaccccaaagctagatagctctccttctgtaagcagcaccttggccgctaaggatgaccccgatgggaagcaggaggcaaagccccaacaggccgcagggatgttgagccctaagactggcgggaaagaagctgcatccggaacaacaccccagaagagccggaagcctaagaaaggcgctggtaatcctcaggcctcgaccttggctctgcagagcaacataacacagtgcttgctgggccagccttggccattgaatgaggctcaagttcaggcatcagtggtcaaagtgttaacagagctgttagaacaggagcgaaagaaagtggttgacaccactaaagagagtagccggaaagggtgggagtccagaaaaaggaagttaagtggggaccaacccgccgcacggacccctcgatccaagaagaagaagaaactgggggctggtgagggaggcgaggcgtccgtctcccctgaaaaaacaagtacaaccagcaagggtaaagccaaacgtgacaaggcttcaggagatgtcaaggaaaaaaagggcaaaggctccctaggaagccaaggggctaaagacgaaccagaggaggaacttcagaaggggatgggcacggtcgagggaggagatcagagcaatccgaagtctaagaaggaaaaaaagaagagcgataagagaaagaaggacaaggagaagaaggagaagaagaaaaaagctaagaaagctagcactaaggattccgaaagcccgtcacagaagaaaaaaaagaagaaaaaaaagactgcagaacagacggtatag

SEQ ID NO: 209509 - DNA, 4470 bp, synthetic construct
  misc_feature 1..4470: note = Description of Artificial Sequence: Synthetic coding sequence
  source 1..4470: mol_type = other DNA
atggccgaggcccggaagcggcgggagctgctgcccctgatctaccaccacctgttgcgagccgggtacgttagagccgccagagaggtaaaggaacagtctggacagaagtgctttctcgcccaaccagttacactcctcgacatctatactcactggcaacaaacaagcgagctgggccgcaagcgcaaagcggaggaggatgctgcgctccaggctaagaagaccagggtgtccgatcctatcagtacatctgaatcaagcgaagaggaggaggaagccgaggccgaaacagccaaagctaccccgcgcctcgcgtctaccaactcatcagttctgggtgccgacctgccgtcgagcatgaaggagaaagcaaaggctgagaccgaaaaggccggcaagaccggaaactccatgccccacccagccactgggaagacggtcgccaatttactgtctggaaaatcaccacgcaaaagtgctgagccaagtgcgaacaccactctggtgtctgagacagaggaggaaggctccgtgcctgcatttggcgccgcagctaagccagggatggtgtcggccgggcaggctgattcatccagtgaagacacaagctcaagcagcgatgagaccgacgtagagggcaaacctagtgtgaaaccagcccaagtgaaggcttcttcggtttcaactaaggagtcccccgcacgtaaagccgcccctgcccccggaaaggttggtgacgtcactccccaggtcaagggtggggccctgcctccagccaagcgagccaaaaaaccagaggaagagagtgaatcctctgaagagggaagcgaatccgaggaagaggcacctgccggaactcggagccaggtgaaagcatccgaaaagattctacaagtcagagctgccagcgctcccgcaaagggtacgccaggcaaaggtgctacccccgccccacccggcaaagctggagcggtggcctctcaaaccaaagcaggtaagccagaagaggactcggagtccagttctgaagagtcctctgattccgaggaagagacccctgctgctaaagcacttctgcaagctaaggcaagcggtaaaactagccaggtgggggcagcctcagctccagctaaagaatccccaaggaagggggctgctcctgctccccccggaaagactggacctgccgtggcgaaggcacaggccggaaagagggaggaagattcacagtcctcttccgaggaaagtgactctgaggaggaagccccagcccaggccaagccctccggtaaagcccctcaagtgagggcggcctcagcgcccgcaaaggagtcacctagaaagggtgcagcacctgcccctcctcgtaagacagggccagccgccgcacaggttcaggtggggaaacaggaagaagattctcggtcctcatcagaggaaagcgattctgacagagaagctcttgccgccatgaacgctgcacaggtgaagccccttggaaaatccccacaagtgaagcctgcctccacaatgggcatgggcccattgggcaagggcgctggacccgtgcctcccggtaaggtaggcccagccacaccttccgcgcaggttgggaaatgggaggaggactccgagtcatccagcgaggagagctccgacagcagtgacggcgaggtgccaactgctgtcgcccctgcgcaggagaaaagtctggggaatatcttgcaggcaaaacccacgagctctcccgccaaagggccacctcagaaagccgggccagtggctgtccaggtaaaagcagagaagccaatggataattccgagtccagcgaggaaagcagtgatagtgctgacagtgaggaggcgcccgccgcgatgactgcggcccaggccaagccggccctcaagattcctcagacaaaagcctgtccaaagaaaacaaataccacggccagtgctaaagtcgcgcccgtccgggtgggtacccaggcaccaaggaaggctggcactgccaccagtcccgccggctcttctccagccgtggcaggaggcactcaaaggcctgcagaggactccagcagctccgaggagtcagacagcgaggaggagaagaccggcctggctgtgacagtaggtcaggcaaaatccgtgggcaagggattgcaggtgaaagcagcctcagtgcctgtcaagggtagtctcggacagggcactgctccggtactacctggaaagacaggccccactgtcacacaggtcaaggcggagaagcaagaagacagtgagtcctctgaggaggaatcagatagcgaggaggccgctgcaagccctgcccaagttaagacttctgtcaagaaaactcaggctaaggcaaatcccgctgctgctcgcgccccttcagccaaaggaacaattagcgctccaggtaaagtggttaccgcagccgcccaggcaaagcagcgttctccatcaaaagtgaaaccccctgtgcgcaatccacagaactcaaccgtgttggcccgcggcccggccagcgtcccctctgtcggcaaggctgttgccaccgccgcgcaggcccagacgggcccagaggaggattccgggagttcagaggaagaaagcgattccgaggaggaggcagaaactctggcgcaggttaaacctagcggcaaaacccaccagattagggctgctcttgcccccgctaaagagtcccctagaaaaggtgccgctcccacaccgcccggcaagacgggccccagcgccgcccaagcaggcaagcaggacgactcgggctcctcctccgaagagagtgactccgatggtgaggctcctgccgccgtgacttctgcccaggtgatcaagcccccactgatatttgtcgatcccaataggagcccagcggggcctgcagctactcctgcacaggcacaggcagcgagcaccccacggaaggcacgcgcatcagagagcaccgccagatcaagcagtagcgagtccgaagatgaagatgtcattccagctactcagtgtctcacccccggcattcgaaccaatgtggtgaccatgcccaccgcccatcctagaatcgcgcctaaagctagcatggccggtgcatcatcaagcaaggaaagctcccgaattagcgacggcaaaaaacaggagggtcccgccacacaagtttctaagaagaatccagcgtcccttcccctgacacaggcagcactgaaagtgctagctcaaaaggcctcagaggctcagcctccagtggctcgtactcagccaagcagtggagtggattctgcagtgggcacactgcctgccacaagcccacaaagcacttccgtccaggcaaaaggtaccaataaattgaggaaacccaaactgcctgaggtccaacaagcaacaaaggcccctgagtcttccgacgattcagaagatagctcagactctagctcgggcagcgaagaagacggggaggggccacagggggcaaaatctgctcacactctcgtcggccctaccccaagccggaccgaaacactcgtagaggagactgcagccgagagctccgaagacgacgtcgttgcaccgagccagtcactgttgagtggatacatgacccctggactcacccccgctaacagccaggcctctaaggcaacgccaaagcttgattcctcaccctctgtatcaagcactctggccgctaaggatgacccggacgggaagcaagaggctaagccccagcaggccgctggtatgctgtccccgaagaccggtggcaaagaagcagcttcaggtaccacgcctcagaagagccggaaacccaagaaaggcgccggcaacccccaggcgagcaccttggccttacagtccaatatcacacaatgtttgcttggacagccttggccactcaatgaagcacaagttcaggccagtgtggttaaggtgctgaccgaactgctggagcaggagcggaaaaaggtggtagatacaaccaaggaatcttcacgcaaagggtgggaaagccgaaagcgtaagctttctggagaccagcccgctgctcggacacctcgttcgaagaaaaagaagaaactgggagcaggcgaagggggtgaggctagcgtgtcaccggagaagacctcaacgacaagcaagggcaaggccaagagagacaaagcctctggggacgtaaaggagaagaaaggcaaaggctccctgggctcccagggagcgaaggatgagccagaggaggaactgcaaaagggaatgggcacagtggagggtggggaccagtccaacccaaagtccaaaaaggaaaaaaagaagtcagataaaaggaagaaggataaggagaaaaaggaaaagaaaaagaaagccaagaaagcatcgactaaagactccgagtcaccatcccaaaagaaaaagaagaagaaaaaaaagacagccgaacagaccgtatag

SEQ ID NO: 209510 - DNA, 2877 bp, synthetic construct
  misc_feature 1..2877: note = Description of Artificial Sequence: Synthetic coding sequence
  source 1..2877: mol_type = other DNA
atggccgaggcccggaagcggcgggagctgctgcccctgatctaccaccacctgttacgcgccggctacgtgcgagccgccagagaagtgaaagagcagtctgggcagaaatgcttcttggcacagcccgtcacactgctcgacatctatacacactggcagcagacaagtgagctgggacgaaagagaaaggcagaggaggacgccgcactccaagccaagaagacccgggtgtctgatccgatcagtacatctgaatcgtccgaggaagaagaggaggcagaggcagaaacagccaaagcaaccccgcgcctggcctcgaccaatagtagcgtcttaggagcagacctgccctcctcgatgaaggagaaggctaaagccgaaactgagaaagccgggaaaacgggtaactctatgcctcaccccgctactggaaagacggtggccaacctcctctctggtaagtcccctcgtaagagcgcagagcccagcgccaatacaaccctggtgtctgagacagaggaggaagggagcgtgcccgcttttggggccgccgctaagccgggcatggtgagtgcgggccaggctgattccagcagcgaggatacatcaagcagctctgatgagactgacgtggaagggaagccatccgttaagcctgcccaggtcaaagcgtcctcagtgagcacaaaggaatcgcctgctcgaaaagccgcccctgcacctggaaaagtgggcgatgttacccctcaagtgaaaggaggtgcccttcctcctgccaagagagccaagaagccggaagaagagtctgaatcgagtgaagagggaagcgaatctgaggaggaagctcccgccggcaccagatcccaagtgaaagcttcagagaaaatactgcaggtgagggccgcctcggcccctgcaaaggggaccccgggcaaaggggccactcctgcgcccccaggaaaagctggagcagtggctagccaaacaaaggccgggaaacctgaggaagacagcgagtcctcttctgaggagtcctctgactctgaagaggagacccccgcagctaaggcacttttgcaggccaaggccagcggcaagacctcccaggtcggagcggcaagcgcacccgcgaaagagagcccccgcaaaggagccgccccggcacctccaggaaaaactggacctgcagtggcaaaagcccaagccggaaagcgggaggaggacagccaatcatccagcgaggagagtgactccgaggaggaagcgccagcccaggccaagccctccgggaaggcgccacaagtgagagccgcctccgcacctgccaaagaaagccctaggaagggcgctgcccccgctcctccaaggaagaccggtcccgcagcggcccaggtgcaggtcggcaagcaagaggaggattcacggagctcgagcgaagagtctgacagcgaccgtgaggcgctggctgcaatgaacgcagcccaggtgaagccactggggaagtcaccacaggtgaaacccgctagtactatgggaatggggcctctgggcaagggagctggaccagtccctccgggtaaggttggtcctgccaccccttccgctcaggtggggaagtgggaggaggactcagagtcaagctcagaagagtccagcgattcatccgacggggaggttcccacagcagtcgcccctgcccaggagaagtctctcgggaacatcctccaagctaaacccacaagctctcctgccaagggacctccccaaaaggctggacctgttgctgtgcaggttaaagccgaaaaacccatggataattccgagtccagcgaagaatcgtctgattcagccgactctgaggaggctcccgcagccatgactgctgcccaggccaaaccggccctcaagattcctcagaccaaggcatgcccaaagaagacaaacactacagctagtgctaaggtggcaccagtcagagtgggcacacaggccccccgcaaagccggcaccgctacctcacccgctgggtcttctccagcagtggcaggggggacacagagaccagcggaggattcctcctcgtctgaggagtccgatagtgaagaggagaagaccggactggccgttacagtgggacaggccaagtcagtggggaaagggcttcaggtgaaggcagccagtgttcctgttaaaggcagcctgggacagggaaccgctcccgtcctgcctgggaagacgggcccaaccgtgacacaggtgaaagctgagaagcaagaagattcagagagtagtgaagaagaaagtgacagcgaagaagcagccgcctctccagcacaagtgaagaccagcgtgaagaagactcaagctaaagccaaccctgcagccgctcgagcgcccagcgccaaggggacaatcagcgcccccggtaaggtcgtgacagcagcagctcaggcaaagcagcggagtccctctaaggtgaaacctccagtcaggaacccacaaaacagtaccgtactcgcccgggggcctgcaagcgtcccctccgtgggaaaagccgtggccaccgcggctcaggctcagaccggccccgaggaggatagtgggagttctgaggaagagtccgactctgaagaggaggccgaaacactcgcacaggtcaagccttctggcaagacccatcagatcagggcagcgctggcgccagctaaggagtcccccaggaaaggagccgcccccacacctccaggtaagacaggaccttccgccgcgcaggcgggtaagcaggacgattctggctcttcaagcgaagaatccgattcagacggcgaagcaccagcagccgtgacttcagcacaggaccaggagtcaagctag

SEQ ID NO: 209511 - DNA, 4245 bp, synthetic construct
  misc_feature 1..4245: note = Description of Artificial Sequence: Synthetic coding sequence
  source 1..4245: mol_type = other DNA
atggccgaggcccggaagcggcgggagctgctgcccctgatctaccatcaccttttaagagccggctatgttcgtgctgcccgggaggtgaaggagcagtccggacagaagtgttttctggcccagcccgtcacactgcttgatatctacacacactggcagcagacttcagagctgggaaggaagcgcaaggccgaggaggacgctgcgctgcaagcaaaaaagacgcgggtatctgacccaatcagcacgtctgagagttctgaggaggaggaggaggcagaagcggaaacagctaaagccacccctagattggcgtctacaaatagctccgtgttgggtgccgatctccccagttcaatgaaagaaaaagcaaaagctgagactgaaaaggcgggcaagaccggaaattcgatgcctcatcctgcgacgggaaaaaccgtggccaacttgttgagtgggaaatcacctcgcaaaagcgccgaaccttccgcgaatacaaccctggtcagtgaaactgaagaagagggatcagtaccggcgtttggcgcggccgcgaagccagggatggtgagtgccgggcaggccgattctagctccgaagacacgtcaagcagttctgacgaaacagatgttgaggggaaaccttctgtcaagccagcccaggtcaaagcaagttcagtcagcaccaaagagagcccagctcggaaagcagccccagcccccggcaaagtgggtgacgtcacaccccaggtgaagggaggcgcccttccacctgcgaagcgagccaagaagcccgaggaggagagcgagagctcagaagaaggctcagagagtgaagaggaagctcctgccggaacccggtcacaagtgaaggctagcgagaagatcctccaagtgcgggctgcctcagcccctgcgaagggaaccccaggcaagggggcgacaccggcaccaccagggaaagccggcgccgtggcatcgcaaaccaaggccggcaagcctgaagaagacagcgaaagcagttccgaagaaagctccgacagcgaagaagagacaccagcggctaaggccttattgcaggctaaagccagcggaaagacctcccaagtcggggcggcttccgccccagctaaagagagtccgcggaagggcgcagcacctgcacctcctgggaagactggtccagcagtggccaaggcgcaggctggtaaacgagaggaggactcccagtcatcgtccgaggagtccgatagtgaggaagaagcacccgcgcaggccaagcctagtggtaaagctcctcaggttcgagccgcctccgcaccagccaaggaatcgcctcgaaaaggagccgccccagcaccacccaggaagacaggaccagcagcagcccaggtgcaggtcggtaagcaggaagaagattctaggtcatcctccgaggaatccgacagtgatagagaggcactagcagcgatgaatgcagctcaagttaaacctctaggtaagtcccctcaggtgaaaccagcctccaccatgggtatgggacctctcggcaagggtgccgggccagtcccacccgggaaggtcgggcccgcgactcccagcgcccaagtgggcaagtgggaagaagacagtgagagtagctccgaagaatcatccgacagcagcgacggagaggtccccaccgccgtcgcccctgctcaggaaaagtcgctcggaaatattttacaggctaaaccgacctccagccctgccaagggacccccacagaaagccgggcctgtggccgtgcaggtcaaagctgaaaagcctatggacaatagcgagtcctccgaggagtcaagcgatagcgcggacagtgaggaagcaccagcggcaatgacagcagctcaggccaagcctgcactaaaaattccacagacaaaggcctgtcccaagaaaacaaacactactgcttcagccaaagtggcccctgtgagagtgggcactcaggctcctagaaaagctggtactgccacttctccagccggttccagccccgcagttgccggcggcacacaacgtcctgccgaagattcaagttcatccgaggagtccgacagtgaggaggagaaaaccggtctggcagtcacagttggacaggcaaaatcagttggaaaaggcctgcaggtgaaagctgcctccgtgccggtgaagggctcgcttggacaaggaaccgctccagtcctgccaggcaagacaggccccaccgtgacccaggtgaaggctgagaaacaagaggacagtgagtcttcagaggaggagtccgactccgaagaagctgcagccagtcccgcgcaggttaagacatctgtgaagaaaactcaggcgaaagccaatcctgcagctgcgcgcgcgccatcagctaaaggaacaatttcggcacctggcaaggtcgtcaccgccgcagcccaggccaagcagcgctccccctcgaaagtgaagccccctgtccgcaacccacagaactcaacagtgctggccagggggcccgcctccgtgccaagcgtaggtaaggccgtggcaaccgctgcgcaggcccagactgggcctgaggaggatagcggcagctccgaggaagagagtgatagcgaagaagaggccgaaaccctggcccaggtgaagccttccggaaagacgcaccagatcagggccgccctggctcccgccaaggagtctccacggaaaggagcagcccccactccaccaggcaaaactgggccaagcgccgcccaggccggcaagcaggatgatagcggaagctcttccgaggagtccgactctgacggcgaagcccctgctgccgtgaccagcgcacaggtaattaagcctcctctcatcttcgtggatccaaaccggagcccggccggtccggccgcaacgcctgctcaggctcaagccgcgtccacgcccaggaaagctcgggcgagcgaaagcactgctagaagcagctcgagtgaaagcgaagatgaagacgtgattcccgccacacagtgcctcactccaggaatcagaaccaacgtcgtcaccatgcctacagcccacccgaggatagcacctaaagcctccatggcaggtgcctcatcaagtaaagaaagtagtcgaattagtgacggaaagaagcaagaggggccagctacacaggtggattctgcggttggaacacttcctgcaacatcgccccagtctacttccgtgcaggctaaaggtaccaacaaactcagaaagcccaaactacctgaggtacagcaggccacaaaggctccagagagctcagacgactctgaagacagcagcgattctagcagtggcagcgaggaggacggggaaggaccacaaggagcaaaatctgcccatactcttggccccaccccaagccgtacagagacactggtggaagagacagccgctgagtcctctgaggacgacgtggtagctcctagtcaaagcctgctgtccgggtatatgacacctggactaactcccgccaacagccaggcttcaaaggcgaccccaaagctcgactcctctccgagcgtatcatcaactctagcagccaaggatgatccagatgggaagcaggaagctaaacctcagcaggccgctggaatgctatcacctaagactggggggaaggaagccgcctctggaacaacgcctcagaagtcacgaaagcctaaaaaaggtgcgggcaatccccaggcctccacgctcgccctgcagtccaacattacccaatgcctcctgggtcagccctggccactcaatgaggcccaagtgcaggccagcgttgtaaaagtgcttactgaactactggaacaggaacggaagaaggtggtagacaccactaaggagagcagccgaaagggctgggaatcacgcaagaggaagttatctggggaccagcctgcggcccgcacacctcgctcgaaaaaaaagaaaaagctgggcgcaggagaagggggggaagcgagtgtgtcaccagaaaagacatccaccacttcaaagggaaaagctaaaagggataaggcctcaggcgacgtgaaggagaagaaaggcaaagggtcactgggatcccagggcgccaaggatgaacctgaggaggaattgcagaaaggaatggggacagtcgaaggaggagatcaatccaatccaaagtcaaaaaaggagaagaagaaatcagacaagcggaagaaagacaaatag

SEQ ID NO: 209512 - DNA, 4356 bp, synthetic construct
  misc_feature 1..4356: note = Description of Artificial Sequence: Synthetic coding sequence
  source 1..4356: mol_type = other DNA
atggccgaggcccggaagcggcgggagctgctgcccctgatctaccaccacctactacgggccggatacgtccgggccgcacgggaagtcaaggaacaatcaggtcagaaatgtttcctcgcgcaaccagtgacccttctggatatatacacccactggcagcagacatcggagctgggtaggaaaagaaaagcagaggaggatgccgcactccaagctaagaaaacccgggtgtcggaccccatcagcacaagcgagtcaagcgaggaggaagaagaggcagaggcagagactgcgaaggcaactccgaggcttgcctccactaatagctctgtcctaggtgcggatctgcccagtagcatgaaggaaaaagccaaagcagaaacggagaaggcagggaaaactggcaattcgatgccgcatccagccacagggaagacagtagcgaaccttctgtccggcaaatcacctaggaagagcgccgaaccgtccgctaacacaactctggtgtctgagacggaggaagaggggtccgtgcctgccttcggagcagctgccaagcccgggatggtgagtgccgggcaggctgattccagcagcgaggatacttcatcatcttctgacgagaccgatgttgaaggaaagccaagcgtgaagccggcacaggtcaaagcatctagtgtatccacaaaagaatctcccgctcgaaaggccgccccagcgcctggcaaggtgggggacgtgactccccaagttaagggtggcgccctgccccctgctaagagggcgaagaagcccgaggaggaatccgagtcatccgaagagggatccgagtctgaagaagaggccccagcaggaaccagatcccaggtgaaggcaagtgagaagatacttcaggtccgggccgcatccgcaccggctaaaggaacacctggcaagggagctacgccggcgcctccggggaaggcgggtgccgtggcaagccagacaaaggcaggaaagcccgaggaagactcagaatcttcatcagaggaaagttctgactccgaagaagaaacccctgcagcgaaagctctgttgcaggccaaagcctccgggaaaacaagccaggtgggtgcagcttcagcccctgctaaggagagcccacggaagggagctgcccctgcacctcccgggaagaccggacctgctgtcgccaaggcccaggcaggcaagagggaggaggacagtcagtcctcaagtgaggaatccgattctgaagaagaagcccctgcccaggctaagccgagtgggaaagcccctcaggtgagggccgcgtccgcacctgccaaggaatctcctcgcaagggcgcagcacccgccccaccccggaagaccggcccagccgccgcccaggtccaggtggggaaacaggaggaagactctagatccagctctgaggagagtgactcggacagggaggctctggctgcaatgaatgccgctcaggtgaagcccctcggaaagagcccacaggtgaagccagcttcaaccatggggatggggccgctgggaaagggggcgggccccgttccaccaggtaaggttggtcctgctaccccctctgctcaggtggggaaatgggaggaggatagtgagagctcttctgaggagtcaagcgacagcagcgacggagaggtgccaaccgccgtggctcccgcacaggaaaaatccctgggtaacatcctccaagccaaaccgacgagctcccccgctaagggcccccctcaaaaagctggcccggtagccgtccaagtgaaggcagagaaacctatggataactccgagtctagcgaggagagcagcgatagcgctgattccgaggaagcaccagccgccatgacggccgctcaggctaaaccggctctgaaaattccacagacaaaggcctgtcctaagaaaacaaacaccacagcctccgccaaggtcgctcccgtgcgagtgggcacgcaggctccgcggaaagctggtaccgctactagtcccgccggttcatctcccgcggttgccgggggcactcagcgtccggcagaagactctagttctagcgaagaatctgactccgaagaggagaaaaccggcctggctgtgacggtgggccaggctaaaagcgtgggtaaggggctgcaggttaaagccgcctctgtgcctgtgaaggggtccctaggtcaggggacagccccagtcctgcctggcaagaccggcccaactgtgacccaggtgaaggcagagaaacaggaagactccgagagctctgaggaagagtccgactccgaggaggccgccgccagcccggcgcaagtcaagacctcggtgaaaaagacccaggctaaagccaacccggccgcagcccgggccccttccgccaagggaactatatcagctcctggtaaagtcgtgacagccgctgcccaagccaaacaaaggtcaccatctaaagttaagccacctgtgagaaaccctcagaacagcaccgttttggccagggggcccgcctccgttccctccgtgggaaaagccgtggcaactgccgcccaggcccaaaccggaccagaagaggactccggctctagcgaggaggaatccgatagcgaggaagaagccgagacactggcccaagttaagccatctggcaagacccaccagattcgcgccgccttggcccccgccaaggaatctcccaggaaaggcgcggctcccacaccgcccggtaagaccggaccttccgctgctcaggctgggaagcaggacgattcaggcagtagctccgaagaatccgactcggatggggaggctcccgctgcagttacgtctgcccaagtgattaagccaccattaatctttgttgaccccaacagatcccccgccgggccagcagccacaccggcgcaggctcaggctgcctccacccctagaaaggcccgagcgtccgagagtacagcgcgaagctccagcagcgaatcagaggatgaggacgtgatcccagcaacacaatgccttacccctggcattcggaccaatgtagttaccatgcccacagcccaccctagaattgccccgaaagcttccatggctggtgcttcctcttccaaggagagttcaaggatatccgacggcaagaagcaagagggtcctgcaacccaggtggactccgcagtaggaacgctgcccgccacaagcccccaatctactagcgtgcaggctaaaggaacgaacaagctcaggaagcctaagctgcctgaagtgcagcaggcaacgaaggctcccgaaagctccgacgattctgaggactcaagcgattcaagttcaggcagtgaggaggatggagaagggcctcagggtgccaaatctgcccacacactggtgggacctacgccctcgagaacggagacattagttgaggagaccgccgccgaaagcagcgaggatgatgtggtcgccccatcacagtcattgttgagtggatacatgacccccgggctgaccccagccaatagtcaggcaagcaaagcaacccctaaactggactcttcccccagcgtctcaagtacactggcagcaaaggacgaccccgacggcaagcaggaagccaagcctcagcaggccgctggaatgctgtcacccaagacagggggtaaagaagctgccagtggaacgacccctcaaaagtctaggaagccgaaaaagggggcggggaatccgcaggcctctaccctagcgctccagtcaaatatcacacagtgtcttcttgggcagccttggccactgaatgaagcgcaagtacaggcttccgtcgtgaaggtactcaccgaattgttagagcaggaaaggaagaaagtcgtggacactaccaaggaaagcagcagaaaagggtgggagagccggaagaggaagttgagcggggatcaaccagctgccagaaccccgcgttcaaaaaagaaaaagaagttaggcgccggggagggtggcgaagcaagcgtgagtccagagaaaacctctactacatcaaaggggaaagcaaaacgggataaggccagtggcgatgttaaagagaagaagggcaaaggaagcctcggctcccaaggagccaaagatgaacctgaagaagaactccagaaaggcatgggaactgttgagggtggcgatcaaagcaatccgaagtcgaaaaaagagaagaagaagtctgataagcgcaagaaggacaaagagaagaaggaaaagaaaaagaaagcgaaaaaggctagcactaaggactccgagtcacccagtcagaaaaagaagaagaaaaagaaaaagacagccgaacaaacggtgtag

SEQ ID NO: 209513 - DNA, 4239 bp, synthetic construct
  misc_feature 1..4239: note = Description of Artificial Sequence: Synthetic coding sequence
  source 1..4239: mol_type = other DNA
atggccgaggcccggaagcggcgggagctgctgcccctgatctaccatcatcttcttcgcgccggatatgtgagggcagcccgggaggtgaaggaacagagtgggcaaaagtgttttttggctcagcctgtcactctgcttgatatctatacacactggcagcagacctctgagctgggccgcaaaaggaaagcagaagaggacgcggcccttcaagccaagaagacccgtgtcagcgaccctatcagcacgtcagagtcaagtgaagaggaggaagaggccgaagccgagacagctaaagcgacgccaaggctcgcctctactaactcttctgttctgggcgcggatttaccgagctcaatgaaggagaaggccaaggctgagacagagaaggccggcaaaaccggaaattccatgccacaccctgcgaccggaaaaacagtcgcaaacctcctcagtggcaagtcccccagaaagagtgccgagccatccgccaatactaccttagtcagcgagacggaagaagaaggcagcgtgcccgcattcggtgccgccgcaaaacccggcatggtaagcgccggtcaggcggattcctcatctgaagatacatcatctagttccgatgagaccgatgttgaagtaaaagcatccgaaaagattctgcaggtccgggcggcttcagcaccagctaagggaactccaggcaagggcgccacccctgctcctcctggcaaggccggcgccgtggctagccagactaaggcaggaaaacccgaggaagattcagaatcctctagtgaggagagtagcgatagcgaggaggagacaccagctgccaaggccctgcttcaggccaaggctagcggcaagacctcccaagtgggggccgcgagtgctcctgcgaaggagagccctcgaaaaggcgccgcaccagcccccccgggaaaaacaggtcctgctgtggcgaaagcgcaggccgggaagcgggaagaggactctcagtcaagcagcgaggaatccgattcagaagaagaggccccagctcaggccaaacccagcggtaaggctccccaggtgagggcagccagcgcccccgcgaaagaatcacctcgaaagggggcagcaccagcgcctccaagaaaaactggccctgccgccgcacaggtacaggtgggcaaacaagaggaggatagtagatcctcaagcgaggaatctgattctgaccgggaggcactcgcagcaatgaacgccgctcaggtgaaacccttaggaaaatccccccaggtcaaacctgcgagtaccatgggaatggggccgctcggtaagggcgcagggccagttccccctggcaaggtcggccctgcaactcctagtgcgcaggtcgggaagtgggaagaagatagtgaatcctcttccgaagagtcctccgacagtagtgacggcgaagtgcccaccgccgtagccccggcgcaggagaagtccttgggaaatatcttacaggccaagcctacgagtagcccagctaagggccctccccagaaagctggccctgttgctgtgcaggtgaaggctgagaaacctatggataatagcgagtctagtgaagaaagttcagactccgccgattcagaggaagccccagctgctatgactgcagcgcaagccaaacctgctttgaagatccctcagacaaaagcctgccctaaaaaaaccaataccactgcttcagctaaggttgcacctgttagggtaggcacgcaggcccccaggaaagccgggactgccactagccccgcaggatcaagtcccgcggtcgctgggggcactcagcggcccgccgaagattccagtagcagcgaggaaagcgatagcgaagaggagaaaacagggctagccgtcacagtcgggcaggcaaaaagcgtcggcaaaggattgcaagttaaagcagcgtcggtaccggtgaagggaagccttgggcagggcactgcacctgtcctgccaggtaagaccgggccaaccgttacccaagtgaaagctgagaaacaggaggacagtgagtcctctgaggaggagtcggactcggaagaggctgctgctagtcccgcgcaggtgaaaacaagtgttaagaagactcaggccaaggcgaatcccgcagccgccagggccccctccgccaagggtacaattagcgccccaggcaaggtggtgaccgccgccgcccaggccaagcagcgctcgccttctaaagtgaagcccccggtccggaatcctcaaaacagcacggtgctcgccagagggcctgccagtgtcccctccgtcggcaaagccgtggccacagccgcacaggctcaaaccggccccgaagaagacagcgggtcatccgaagaggagtctgactcagaagaggaggccgagacactcgcccaagtgaagccgtctggcaaaacacaccagatcagggctgccctcgcccctgcaaaagagtccccccgcaagggcgccgcgcccacccccccaggcaaaaccggcccctcagctgcccaggccgggaaacaggacgactcagggagttcatcagaagaatcggatagcgatggcgaggcacccgctgctgtaactagtgctcaggtaattaagcctcccttgatcttcgtggatcccaacagatcaccggctggacccgccgctactccagctcaggcccaggccgcttccacacccaggaaagcgagagcctctgaaagcacagctcgctcatcgagctcagagagcgaagacgaagacgttatccccgccacacagtgtctgactccgggaatccgtacgaacgtggtgactatgcctactgcacatcctagaatcgcccctaaggcatctatggctggtgcttcatcaagcaaggagagttctcgcatcagcgacggcaagaaacaggagggtcccgccacacaggtcagcaagaagaaccctgcctccctacctctgacacaggccgccttaaaggtgctggctcagaaggcgagcgaagcccagccacccgtcgcaaggactcagccatctagcggcgtagatagcgcagtcggaactctgccggcaacatcgccgcaaagcaccagcgtccaggctaaaggaaccaacaagctccggaagcccaaacttcctgaagtgcaacaggccaccaaggcccccgagtcgagcgatgacagcgaggacagctcggactcaagtagcggctcagaagaggacggcgagggtcctcagggtgccaagtcagcccacacgttagttgggccgacgccctcgcggacggagaccctggtggaggaaaccgccgcggagtcatctgaggatgacgtggtggccccgagccagtctcttttgagcggctacatgacgccagggttgactcccgcaaatagccaggctagtaaagcgactcctaaattagacagttctccaagcgtctctagcactctggcggccaaggacgatcctgacggcaaacaggaggctaaacctcagcaagctgccggaatgctgtcacctaaaaccggcggcaaagaggccgcaagtggtaccacccctcagaagagccggaagccgaagaagggggctgggaatcctcaggcgagtaccctggcactgcagagtaacataacccagtgcctcctggggcagccatggccactcaatgaagcacaggtgcaggccagcgttgtgaaggttctgacggagcttctcgaacaggaacggaaaaaagtcgtagacactactaaggaatccagccgaaaaggttgggaatcacgcaagcgaaagttatcaggggatcaaccagccgcgcgaacaccgcgcagcaaaaagaagaaaaagcttggcgccggagaaggaggcgaggcttccgtttcccccgagaaaacttctacaactagtaaggggaaggcaaagcgggacaaggcgagcggggacgtcaaagaaaaaaagggcaaagggtcccttggaagccagggagctaaagatgagccggaagaggagcttcagaaaggcatgggtaccgtggagggcggggaccagagtaacccaaagagcaagaaagagaagaagaagagtgataagaggaagaaggacaaagagaagaaggagaagaagaagaaggctaagaaagccagcaccaaggattcagagagtccttctcaaaaaaagaaaaagaagaaaaaaaagactgctgaacagactgtgtag

SEQ ID NO: 209514 - DNA, 4578 bp, synthetic construct
  misc_feature 1..4578: note = Description of Artificial Sequence: Synthetic coding sequence
  source 1..4578: mol_type = other DNA
atggccgaggcccggaagcggcgggagctgctgcccctgatctaccatcacctgcttcgcgccggttatgtgcgggcagcccgagaggtgaaagagcagagcgggcaaaagtgtttcttagcccagccagtgactctgctcgatatctatacccactggcaacaaacaagcgagttgggccgcaaacgcaaagccgaggaagacgccgccctgcaggccaagaaaacaagggtgtccgatcctattagtacatctgaatccagtgaagaggaggaagaggcggaggccgaaacagccaaggccaccccccgtttagcatcaacaaattcatctgttctgggcgccgacctgccatccagcatgaaagaaaaggcaaaggcagagacagaaaaggccggaaaaacaggcaatagcatgccacaccctgccactggcaagactgtcgccaacctgctctcaggcaaaagccctagaaaaagtgctgagccgtccgctaatacaacgctggtgagcgaaaccgaggaggaaggatctgtgccagcctttggggccgccgccaagccaggcatggtctctgctggtcaagccgattcctcaagtgaggacacgagcagttccagtgacgaaactgacgtggaaggcaagccctccgtgaagcctgcgcaggtgaaggcctctagtgtatctacgaaggagagcccagccagaaaggctgcacctgctccggggaaagtgggggatgtgacaccccaggtgaaaggtggtgccttgccgcccgcaaagagggcgaaaaaaccagaggaggagtctgaatctagtgaagagggctcggagtccgaagaagaagcccccgccgggactagatcacaggtgaaggcctcggaaaagattttacaggtccgggccgcaagtgctcccgctaaaggcaccccagggaaaggggctacccccgcccctccagggaaagcgggggccgtggcttcacagacaaaggcgggtaagcctgaagaggattccgagtcctcctctgaggagagctcagactctgaagaagagacgcccgctgccaaggcgttgctgcaggccaaagcaagtgggaaaaccagccaggttggggccgccagtgcacccgccaaggagagccccaggaaaggcgcagcaccggcgccacctggcaaaactggacccgcagtagccaaggcgcaggccggcaagagagaagaggactcacagtcctccagcgaggaaagtgattcagaagaagaggcaccagcgcaggcaaaaccttctggcaaggctccgcaggttagggccgcttccgcccccgcaaaggagagcccccgcaagggggctgcccctgctccacctcggaagaccgggcctgccgcggcgcaggtccaagttggcaagcaggaagaggattctcggtcaagttctgaggaaagtgacagtgatagagaggctttagctgccatgaacgcggcacaggtgaagccgcttgggaagagtccccaagtgaaaccagcgtcaaccatgggcatgggtcctctgggaaaaggcgctgggcccgtgcctcccggcaaggtcgggccagcaacaccatctgcccaggtgggtaagtgggaggaggactctgagtcttcctctgaggagtcttcagactcatcagatggagaagttccgaccgcagtggcaccagctcaagaaaagtctctgggaaacattctccaggctaagcccacgagctctcccgcaaaaggccctccccagaaagccgggcccgtcgcagtccaggtaaaggccgagaaaccaatggataactccgaatcaagcgaagaatccagcgacagtgcagatagtgaggaagccccagccgctatgactgcagctcaggccaagcctgccctcaagatccctcaaacaaaagcctgtcctaagaaaaccaacactactgcctcagccaaagtcgctccagtacgcgtggggacacaggcgcccaggaaagccggcaccgccacgtccccagctgggtcttcgcccgctgtcgcaggagggacgcagcggccagcggaagacagctcttcatccgaagaaagcgactcagaagaggaaaagactggcctggccgtgactgtgggacaagcaaagtctgtcggtaaaggactgcaagtgaaggcagcaagcgtccctgtgaaggggagcttaggacaggggaccgcaccagtgctgcccggcaagaccggacccactgtaacgcaggttaaggccgaaaaacaggaagactccgaatcctccgaagaagaatctgacagtgaagaagcggcggccagcccagcccaagttaagacatccgtgaagaagacccaggcaaaggctaacccagcggccgcccgtgccccttccgccaaggggaccatatccgcgcctggaaaagtggttaccgctgctgcacaggccaagcagcggtccccttcgaaagtgaaaccacccgtgcgaaacccccaaaactctaccgttctggcccggggccccgcttccgtcccctcagtggggaaagcagtggccacagcagcccaggcacaaaccgggccagaggaggatagtggtagctcagaggaagagagcgactctgaagaagaggccgaaacattggctcaggtcaaaccctcaggaaaaacccaccagattcgggcagcgctggctccagcgaaggagtcaccaaggaaaggcgctgcccctaccccccccgggaaaaccggaccaagtgctgctcaggccggcaagcaggatgactccggcagcagcagcgaggagagcgacagcgacggagaggccccggccgcggtcaccagcgcccaaaaagattccaattcaaagccagcacggagtaagaccctagcgcctgcgccccctgaaaggaacacagaaggctcctctgagagcagcgaggaggagttacctttgacccaagtgatcaagccacctcttatatttgtggatccgaaccgctcccccgcgggccccgcagccacacctgctcaagcccaggcggcttccacgcctcgcaaggctagggcctctgaaagtacggcacgttccagttcctccgagagcgaggacgaggatgtgattcccgcaactcagtgcctgacccctgggattaggaccaacgtcgtgactatgcccacagcccatccccggatagcacctaaagcgagcatggccggagcctcttcaagcaaggagtcgagccggatttccgacggtaaaaagcaggaaggaccggcgacacaggtgagcaaaaagaatccagcatctcttccgcttacacaagccgctctgaaagttcttgcccagaaggcctccgaggcccagcccccggttgcgagaacccaacctagttcaggagtggactctgccgtgggaacccttcctgctacgtctcctcaatcaacctctgtacaggccaagggcaccaacaagctgcgaaagccaaagttgcctgaggtccaacaggcaacaaaggcacccgaatccagtgatgatagcgaggatagctcggacagcagcagcgggtctgaggaagacggcgaggggccgcagggtgcaaagagtgcccacactctcgggccaacaccatctcgtaccgagaccttggtggaggagaccgctgcagaatcttcagaagatgacgttgttgccccctctcagtcccttctgtcaggatacatgacccctggacttaccccagccaactctcaggcgagcaaggccacacctaagctggacagctctccctccgtgtccagtactctcgcagccaaagatgacccagacggcaagcaggaggctaagccacagcaggccgccggaatgctgagccccaaaactggcggtaaggaggccgcctctggcacaactcctcaaaagagccggaagccaaaaaagggagcaggcaatccccaagccagcactttagctcttcagagcaatattactcaatgcttactgggacagccatggcctctgaacgaagcccaggtgcaggctagtgtggtgaaagttctgacagagctactagaacaggagagaaaaaaggttgtggacaccactaaagaaagcagccgtaaggggtgggagtccaggaaacgaaagcttagtggcgaccagcccgcagctaggacccctaggagcaaaaaaaaaaagaaactaggagcaggagaagggggggaagcctcagtgagcccggaaaaaacttctacaacctccaagggcaaggctaaaagggataaagcttccggcgatgtgaaggaaaaaaaaggtaaaggctccctagggagccaaggagctaaagatgagccggaagaggagctccagaaagggatgggaacagtcgagggaggggatcaaagcaatcccaagagcaaaaaagaaaagaagaaatccgacaagcgcaagaaggacaaagagaaaaaagagaagaaaaaaaaggccaagaaggcctccaccaaagactcagaatccccaagccagaagaagaagaagaagaagaagaaaacagcagagcagacagtgtag

SEQ ID NO: 209515 - DNA, 4467 bp, synthetic construct
  misc_feature 1..4467: note = Description of Artificial Sequence: Synthetic coding sequence
  source 1..4467: mol_type = other DNA
atggccgaggcccggaagcggcgggagctgctgcccctgatctaccaccatctcctgcgggccggatacgtgagggccgctcgggaggtgaaggagcaaagtggtcagaaatgttttctggctcagccagtgacgctcttggatatctacacgcactggcagcagaccagcgaactagggagaaaacgcaaagccgaggaagatgcagctcttcaggctaagaagacccgggttagtgaccccataagcacatcggagtctagtgaggaggaagaggaagccgaggcagagactgccaaggcgactccaagactcgcatcaaccaactccagtgtcttaggagcggacttgccatcatccatgaaggaaaaagcaaaggcagaaactgagaaagctgggaaaacaggcaattccatgccccatccagccactggtaagacagtggcgaatcttctgagcggcaagtccccacggaagagcgccgaaccttctgcaaacacaactctggtttctgaaactgaggaagagggtagtgttcctgccttcggggccgccgctaagcccggaatggtatctgccggacaggccgactcctccagcgaggacacaagctctagctcggatgaaaccgacgttgaaggtaagcctagcgtgaaaccagcgcaggtcaaagcaagttctgtgagcaccaaagaatcacctgccagaaaagctgctcccgccccaggaaaggtcggcgatgttacaccccaagttaaggggggtgcactgcccccagcaaagagagcaaaaaaacccgaagaagaatcagagtcaagcgaggaagggagtgaatctgaggaagaggcccccgcggggacaagatcacaagtgaaggcctctgaaaagatcctccaggtcagggcagcgtctgcgccagccaagggaactcccgggaaaggagctactcccgcaccacctggaaaagcaggtgctgtcgcctctcagacaaaggctggaaagcccgaagaggacagcgaaagctccagcgaagagtcctccgattctgaagaagagacccctgctgcaaaggccctgctacaagctaaagcttcaggcaagacctcccaggtcggggccgcctctgcccctgctaaagagagcccgaggaaaggggcggctccagccccccctgggaagactggaccagctgtcgccaaggcacaggccggaaagagggaggaggacagccagtcctcctctgaagagtccgacagtgaggaagaagcacccgcacaggccaagcccagcggaaaggcgcctcaagtacgggcagccagtgcgcccgccaaagaaagcccccgaaaaggcgcagccccagcacctccccggaagaccggcccagcggcagcccaggtgcaggtggggaaacaagaagaagactcgcgaagtagcagcgaggagtcagattctgatcgagaagccctcgccgctatgaatgcggcgcaggtcaagccactcggaaagtccccccaagtgaaacccgcctccactatgggcatgggcccactagggaagggcgcaggccccgttcctcctggcaaggtggggcctgcaacacccagtgcgcaggtggggaagtgggaggaggatagcgagtcgtcatcagaggagagctccgattcttccgatggggaggttccaaccgccgtggctcccgcgcaagagaagagtctcggaaacattctgcaggccaagcccaccagctcaccggccaagggaccgccccagaaggccggtcctgttgccgttcaggtaaaagctgagaaacctatggacaattctgaatcctctgaggagagtagtgattccgccgactcagaagaggcccctgccgctatgacagctgctcaggccaaacccgcccttaagattccccagaccaaggcttgccccaaaaagacaaacacaactgcatccgctaaggtcgcccctgtaagagtggggacccaggctccccgtaaagccgggacagcaacatctcccgcaggatcttcacccgcagtggccggaggtacccagagacctgctgaagatagcagcagtagtgaagaatctgacagtgaggaagagaaaaccggcctcgcggtgacggtggggcaggctaagagcgttggcaaggggttgcaggtgaaggccgctagcgtccctgtgaaaggctcactaggccagggaacagctccggtgcttcccgggaaaactggccccaccgttacccaggtaaaagctgaaaaacaagaggactccgaatcctctgaagaggaaagcgattctgaagaggctgcagcatcaccggctcaggtgaagacaagtgtcaaaaaaacacaggcaaaggcaaatccagcagcggctcgggcaccctctgcgaaaggcactatctctgcccctggcaaggttgtcactgctgctgcccaagccaagcagcggtctccatcaaaagtgaaaccccctgtaagaaatccccaaaactccaccgtcctggcccgtgggccggccagtgtgcccagtgtgggaaaagccgtggcaactgccgcacaggctcagacggggcctgaagaagactcagggagcagcgaagaagaatcggacagcgaggaagaggcagaaaccctggcccaagtgaaacccagtggaaaaactcaccagatcagggccgccctagctcccgcaaaagaatctcccaggaaaggcgctgctccgacccctccaggcaagaccgggccgagcgcggctcaggccgggaaacaagacgattcagggtcatcctctgaggaatctgactccgatggagaagcacctgctgccgtaacctccgctcaggttataaaaccccctctgattttcgtggatcctaaccgctccccagctggtccagccgcaacaccagcccaggcccaggccgcctctacgcctcggaaggctcgtgcaagcgaaagcaccgcccggtcctcttcctcagagtctgaggatgaggacgtaattccggccacccagtgtctgacgcctggaatcaggacaaacgtcgtgacgatgcccacagcccacccaagaatcgcacccaaggccagtatggctggggcctcttcctctaaggagtctagtagaatctctgacggcaaaaagcaggaaggacctgcaacacaagtttccaagaagaacccagcatcactgcccctgactcaggcagccctcaaagtactggctcagaaagctagcgaagcccaaccaccagtcgcacgcacacagccatcctctggggtggatagcgccgttgggaccctacccgcgactagtccccagtccacttccgtccaagctaaagggaccaacaaactgcgaaagcctaagctgccagaagtgcagcaggccacgaaagccccagaatcttcagatgactcagaggactccagcgattcctcaagtggctctgaggaggacggggaggggcctcagggcgctaaatctgcacacactctgggcccaacaccatcccgaacggagactcttgtggaagaaacggccgccgagtctagcgaggatgatgtggtcgccccatcacagagcctgttgtcaggatatatgacccccggcctgacgccagcaaactcgcaggccagtaaggctactccgaaactggactcatctccaagcgtttcctctacgcttgcagccaaggatgaccccgatgggaagcaggaagctaagcctcaacaggcagccgggatgctgtctccgaaaaccgggggaaaggaagccgcctcaggaaccaccccacaaaagagtaggaagcccaagaaaggcgcgggaaacccgcaggcatccaccctggcactgcagagcaacatcacacagtgccttctcggacagccctggcccctcaatgaagctcaggtccaggcctccgtggtgaaggtgctgacagaactcctcgaacaggagcggaaaaaggtagttgatacaaccaaggagtcctcgaggaaaggatgggagtcacgaaaacgcaaactgagcggggaccagcccgcggctcgaaccccccgctctaaaaagaagaagaaactgggcgctggagaaggaggcgaagcaagcgttagtcctgaaaaaaccagtaccacctccaaaggcaaggcaaaacgggacaaagcgtctggcgacgtgaaggagaaaaagggaaagggcagccttggatcgcagggtgccaaggatgaacccgaagaagaactgcaaaagggtatgggtacagtagaggggggggatcaatcaaaccctaaatctaagaaggaaaaaaaaaaaagcgacaagcgaaagaaagataaggagaaaaaggagaagaagaagaaggcaaagaaagccagtaccaaggatagcgaatcacctagtcaaaaaaagaagaaaaagaaaaagaagaccgccgaacaaacagtctag

SEQ ID NO: 209516 - DNA, 255 bp, synthetic construct
  misc_feature 1..255: note = Description of Artificial Sequence: Synthetic coding sequence
  source 1..255: mol_type = other DNA
atggccaccatggagaacaaggtgatctgcgccctggtgctggtgtcgatgctggctctgggtacattggctgaagcccagacagagacgtgcacggtggcacctcgcgaacgccagaactgcggcttcccaggagtgacaccaagtcagtgcgcaaataagggctgctgtttcgacgacactgttagaggcgtcccatggtgcttctatcctaacactattgacgtacctcccgaggaggaatgtgagttttag

SEQ ID NO: 209517 - DNA, 390 bp, synthetic construct
  misc_feature 1..390: note = Description of Artificial Sequence: Synthetic coding sequence
  source 1..390: mol_type = other DNA
atgggccggcgggacgcccagctgctggccgccctgctggtgctggggctctgtgccctggcaggctccgaaaaaccttccccttgccagtgcagcaggctgagtccacacaatcggactaactgtggcttcccaggtattacaagtgatcaatgttttgataacggatgctgttttgatagcagcgtaacaggtgtcccctggtgcttccaccctctgcctaaacaggaaagcgaccagtgcgtaatggaagtcagcgaccgccgaaattgcggttacccaggcattagcccagaagaatgcgcctccagaaaatgttgtttcagtaatttcattttcgaagttccttggtgtttctttcctaagtctgtggaggattgccactattag

SEQ ID NO: 209518 - DNA, 1749 bp, synthetic construct
  misc_feature 1..1749: note = Description of Artificial Sequence: Synthetic coding sequence
  source 1..1749: mol_type = other DNA
atgcccggccggacctgggagctgtgcctgctgctgctgctgggcctcggtttggggtcacaagaagccctcccacccccttgcgagagcgagatatattgccatggagagctcctgaaccaggttcagatggccaaactgtatcaagatgataagcaatttgtcgatatgccactgtcaattgcgcccgagcaggtgcttcagacatttactgaactcagccgcgatcataaccactccatccctagggaacaattacaggctttcgtgcatgagcactttcaggctaaggggcaggagttgcagccatggactcccgccgattggaaggacagcccccagttcctccagaagatttccgacgcaaagcttagagcgtgggccggccagttacaccaactgtggaagaagctcggaaaaaaaatgaagccagaagttctcagccatcccgagaggttcagcctcatttacagtgagcacccatttatcgtgcctggtggcaggttcgtggagttttactattgggatagttattgggtcatggaagggctcttattgtcagaaatggctgaaactgttaagggtatgcttcaaaattttttagaccttgtgaaaacctatggacatgtgcccaatggaggcagagtgtattatctgcaacgctcgcagcctcctctcttaactctgatgatggattgctacttgactcataccaatgacacagctttcttgcaggagaacattgagaccctggcattggagctcgatttctggaccaagaatagaactgtcagtgtgtccctggagggcaagaattatctcctgaacaggtactatgtgccatacggtggcccgcggccggagagttatagcaaagatgttgagctcgctgatacgctgcccgaaggcgatagagaggccctctgggccgagttgaaggccggagccgagagcggatgggatttctcctctagatggttaattggtggaccaaacccaaattccctgtcaggcattcgtacatcaaagcttgttccggtagatctcaacgcattcctgtgccaggcagaagagctgatgagcaatttttactcccgattaggtaacgactcacaggccacgaagtacagaattctcaggtcacaaaggctcgcagccctcaataccgtgctgtgggacgagcagactggtgcatggttcgactacgacctcgagaaaaagaagaagaacagagagttttacccatcaaatctgacaccactgtgggccgggtgtttctctgatccaggtgtagccgacaaagctctgaaatacctcgaagataacagaattttaacgtatcagtatggcataccaacctcgctgcaaaagacaggccagcagtgggacttccccaatgcgtgggccccgctgcaagatctcgtgattaggggattggctaaggctccactccggcgagcccaggaagtcgcctttcaactggcacagaattggatacgcacaaacttcgacgtgtactcccagaagagtgccatgtacgagaagtatgacgtttccaacgggggccagcctgggggtggaggcgagtacgaggtccaggaggggttcggatggaccaatggcgttgtgctcatgctgctcgaccgctatggcgacagactcactagcggccccaagctgccattcctcgaacctcactgcctagctactctgctgccctctctcctgttaagtcttcttccttggtag

SEQ ID NO: 209519 - DNA, 1656 bp, synthetic construct
  misc_feature 1..1656: note = Description of Artificial Sequence: Synthetic coding sequence
  source 1..1656: mol_type = other DNA
atgcccggccggacctgggagctgtgcctgctgctgctgctgggcttggggttggggagccaggaagccctgccacctccctgcgagtcagaaatctactgccacggcgaactgcttaaccaggtgcagatggcgaaactataccaagacgacaagcagttcgtggatatgcctctgagtattgcccctgaacaggtacttcagacctttactgaattgagcagggatcacaaccactccattcctagagagcagctacaggcctttgtacacgaacacttccaggctaaggggcaagaactgcagccatggactccggctgactggaaagattcgccacagttcctgcaaaaaataagcgacgccaagctccgcgcatgggcaggtcagctgcatcaactgtggaagaaactcgggaagaagatgaagccagaggtgctttcacatcctgaaaggttctctcttatttactccgagcacccttttatcgttcctgggggcagattcgttgagttctattattgttacggacatgtgccaaatggcggccgggtgtactatttacaacgaagccagcctcccttactgaccttaatgatggattgctatctcactcacacaaatgacaccgcctttctccaggagaacattgagacactggccctggaactcgatttctggacaaaaaacagaaccgtgagcgtgtcccttgaagggaagaactacctactaaacaggtattacgttccatacggagggccaagaccggagtcttactctaaggacgtggaactcgctgatacactgccggaaggagacagggaagccctctgggccgagctgaaggcaggtgcggagtcgggttgggatttctcttctcgctggctaatcggcggtcctaacccaaactccttatctgggataagaacctcaaaacttgtccctgtggacttgaacgccttcctctgccaggccgaggaacttatgagcaatttctacagtcgccttggaaacgactcacaggctacaaaatacaggattctgcggagtcagaggttggcagcgctgaacacggtgctatgggacgagcagacaggtgcctggtttgattacgatcttgagaaaaaaaagaagaatagggaattctacccttctaacctgacgccgttatgggcgggctgtttcagcgacccaggcgtcgccgataaagccctgaagtatctcgaggacaacaggatactcacataccaatacggtattcctacatcacttcagaagacaggccaacagtgggacttccccaatgcctgggctcccctgcaggacttggtaatccgcgggcttgctaaagcgcccctccggcgggctcaggaagtggcattccagctcgctcagaactggattaggaccaattttgacgtttacagccagaaatcagcaatgtacgagaaatatgatgtctccaatggcgggcagcccggaggaggcggcgagtatgaggtccaggagggtttcggttggacgaatggggttgttttaatgctgctggaccgatacggtgataggcttacttctggacccaaactcccctttttagaaccacattgtcttgccacacttctaccctccctgctgctctcgctcctgccctggtag

SEQ ID NO: 209520 - DNA, 1380 bp, synthetic construct
  misc_feature 1..1380: note = Description of Artificial Sequence: Synthetic coding sequence
  source 1..1380: mol_type = other DNA
atgcccaactgcgtgcccggccagggcagctgcatcagcagcggccgaagttggggtagacgctaccagcggcccggacctgcccagggcctgacaaagggcacagaggagagaaacgtaccaggcgcgcacagcgtctttggtgcccagatacgggactcctattgggtaatggaaggcctgttactatcagagatggccgagaccgtaaagggcatgcttcagaactttttggacttggtaaaaacatatggacatgtgccaaatgggggcagagtctactacttgcagcggtctcaacctcctctgcttaccctcatgatggactgctatctcactcacaccaatgacactgcattcctacaggaaaatatcgaaacactggcacttgagctagacttttggacaaaaaatcgcactgtatcagtcagccttgaggggaagaactatctcctgaaccgttattatgtgccttatggtggtcctcggccagagagctattccaaagatgttgagctggccgacacgttgccagaaggcgaccgagaggcgctgtgggccgagctgaaagccggcgccgagagcggctgggacttttcatcccgctggcttattggcggtccaaacccgaatagcctctcagggatcaggacaagtaaactcgttcccgtggacttgaacgcgtttctgtgccaagctgaggagcttatgtcaaatttttatagtcggctcggcaatgactctcaggcgaccaagtatcggatcttacgatctcagaggctggctgccctgaatacagttctgtgggatgaacagacaggggcttggttcgactacgatctcgaaaagaagaaaaagaatagggaattttacccatcaaaccttaccccgctctgggcgggatgtttcagcgaccctggcgtagctgacaaggcactgaagtacctcgaggacaacagaatattgacatatcagtacggtatcccaacctctttgcagaaaacggggcagcagtgggacttccctaacgcatgggctcctctccaggacctagtgatccggggacttgcaaaggctccgctgagacgcgcacaagaagtcgccttccagctggctcagaattggatacgcacaaatttcgacgtgtactcacagaaatccgccatgtacgaaaagtatgacgtgtcaaatggcggccagccaggaggcggaggcgagtacgaagtgcaggagggctttggctggacaaatggtgtggtgctgatgttgctggatagatacggagaccgcctgacaagtggccctaagctgcccttcctcgaaccacactgcctcgccacgctgcttccatccttgctgctctcccttttgccctggtag

SEQ ID NO: 209521 - DNA, 1641 bp, synthetic construct
  misc_feature 1..1641: note = Description of Artificial Sequence: Synthetic coding sequence
  source 1..1641: mol_type = other DNA
atgcccggccggacctgggagctgtgcctgctgctgctgctgggcctcggtcttgggtctcaggaagccctcccgccaccctgcgaaagcgaaatctactgccatggggaactcctcaatcaggttcagatggcgaagctgtaccaggatgataagcagttcgttgacatgcccctgtccatcgcccctgagcaggtgctgcagacttttacggagctgagtagggaccacaaccactcaatacctcgggagcagctccaagccttcgtacatgaacacttccaggccaagggccaggagctgcagccatggactccagccgactggaaagattccccgcaatttctccagaaaatctccgacgctaagcttagagcatgggcgggccagcttcatcagctttggaagaaactcggcaaaaaaatgaagcccgaggtgctgagtcacccagaaagatttagtctgatatacagtgaacaccccttcatcgtgcccggcggcagatttgttgagttctattactgctacggccatgtcccgaacggggggcgcgtgtactacctgcagcggagccagccacctttactcactttaatgatggactgctacctgacacatacaaacgataccgcttttctccaggaaaacattgaaacgctagccctcgagcttgatttctggactaagaacaggacggtgtctgtgtcccttgagggtaagaactacctccttaatagatactacgtaccctacgggggcccacggcctgagtcctactccaaagacgtagaactcgctgacacccttcccgaaggcgacagggaggccttgtgggctgaactgaaggccggagcagaaagtggatgggattttagttctagatggctcattggtggccctaatcctaactctctgagcgggattaggacttcgaagctcgttcctgtggatctgaacgccttcctctgccaggcagaagagcttatgtcaaatttctacagccgtctgggtaacgactcacaagctacaaagtatcgcatattgcgcagccagcggctggcagcattaaataccgtgctgtgggatgagcagacgggggcttggttcgattatgacctggagaagaaaaagaagaatagagaattttacccctcgaacctcaccccactttgggcaggttgtttttccgacccaggtgtagccgacaaagccctgaagtacctagaggacaatcgaattctcacataccagtatggcatacctacatcactgcagaaaacggggcagcaatgggacttccctaatgcttgggcaccactacaagacctggtcataagaggcttagccaaggccccgttgcgccgtgcgcaggaggtggctttccagctggcccagaactggatcagaacaaacttcgatgtttactctcaaaagagcgcaatgtacgaaaaatatgacgttagcaacgggggacagcccggcggtggaggagaatacgaggtgcaagaagggtttggctggaccaatggcgtggttttgatgctgctcgacagatatggtgataggttaacgtccggaccaaaattaccatttctggagcctcactgccttgggcctcctttttgtccagccagctgttag

SEQ ID NO: 209522 - DNA, 1734 bp, synthetic construct
  misc_feature 1..1734: note = Description of Artificial Sequence: Synthetic coding sequence
  source 1..1734: mol_type = other DNA
atgcccggccggacctgggagctgtgcctgctgctgctgctgggcctgggactggggagtcaggaagctttgccgcctccctgcgaatcagaaatttactgccatggcgagcttcttaaccaggttcagatggccaagctctaccaagacgacaagcagttcgtggatatgcctctgtcaatcgctccagaacaggtacttcagaccttcactgagctctctcgggatcacaaccatagcatccctcgtgaacagctgcaggcgtttgttcatgagcactttcaggccaagggacaagaacttcaaccgtggactcccgcagactggaaagattcgcctcaatttttacagaagatcagcgatgccaaactgcgtgcttgggccggtcagctccaccagctctggaagaagctaggtaaaaaaatgaagcctgaggtgcttagccacccggaaaggtttagtctgatatattcggaacacccttttatcgtcccgggcggaaggttcgtggaattttattattgggacagctattgggtgatggaggggctcctactcagcgaaatggctgagaccgttaaagggatgttgcagaatttcctggatctcgtgaagacttatggacacgtccccaatggtggtagggtgtattacctacaaaggtcacagcctcctttactgactctcatgatggattgttacctaacacacacaaatgatacagctttcctacaagagaatatcgagaccctcgctctcgaactggatttctggacgaaaaacaggaccgtttccgtgtcccttgaaggaaagaattacctgctcaataggtattacgtgccctatgggggcccgaggcccgagtcttactctaaggacgtcgaactcgccgatactctcccggagggggaccgggaggctctctgggccgagttgaaggctggagccgaatctggctgggattttagctcccgttggctgattggaggtcccaatccaaattcgctctccgggatcagaactagcaaactggtaccagtggatctgaacgcattcttatgtcaggccgaagaactgatgagcaatttctacagcaggctgggcaacgactcccaggctacaaagtatcggatcctgcggtcccagcggttggctgctctgaacacagtcctgtgggacgagcagacaggcgcgtggtttgattacgacctagagaagaaaaaaaaaaatcgcgagttctatccctccaatctaacacctctgtgggccggatgtttttccgatccgggggtggcagacaaagcccttaagtacctggaggataatagaatcctgacctatcagtatggcatccctactagcctccagaagacaggccagcagtgggatttccctaacgcatgggctccactacaggatctggtcatccggggccttgctaaggctccgctcagaagggcgcaagaggtggcttttcagttggctcagaattggatcagaacgaatttcgacgtctacagccagaagtccgccatgtatgagaagtacgacgtttcgaacggggggcaacccggtggaggaggcgaatatgaggtgcaagaggggttcggctggacgaacggcgtcgttctgatgctcctggacaggtatggggaccgcttaacttctggtcccaagctaccgtttcttgagccccactgtctggggcccccattctgccctgcctcttgttag

SEQ ID NO: 209523 - DNA, 273 bp, synthetic construct
  misc_feature 1..273: note = Description of Artificial Sequence: Synthetic coding sequence
  source 1..273: mol_type = other DNA
atggaggagaccaccgactggatctacggcttcttcagcctgctgtccgacatcatcagcagtgaagacgaggaagatgatgatggtgatgaagataccgataagggagagatcgatgagcctcctctgcgaaagaaagaaatccacaaagacaagacggagaagcaggagaaaccagaacgaaagatccagaccaaagactggagtgctaacagcagcactatccggactttaaaattgacccaactcaagccgatttatatctgtacctag

SEQ ID NO: 209524 - DNA, 654 bp, synthetic construct
  misc_feature 1..654: note = Description of Artificial Sequence: Synthetic coding sequence
  source 1..654: mol_type = other DNA
atggaggagaccaccgactggatctacggcttcttcagcctgctgtctgacataatctcttctgaagacgaggaagatgacgatggagatgaggacacagacaagggggaaattgacgaaccacccctgagaaagaaagagatccataaggataaaaccgagaaacaggagaagccggagagaaagattcagacaaaagttacacacaaggaaaaggaaaagggcaaagagaaggtgagagagaaggagaagccagaaaaaaaggcaacacacaaggaaaaaatcgagaagaaggaaaagccggagactaaaacgttggctaaggagcagaagaaggctaagacagcagaaaagtccgaagaaaaaaccaagaaggaagtgaaaggggggaaacaggagaaagtgaagcagacagctgcaaaagtgaaagaggtgcagaaaaccccttcgaaaccaaaagagaaggaggacaaggagaaggccgcagtgtccaagcatgaacagaaagggttccccggacccggcatccgcaactccagctactactgccagtatataaaagggcagattaacgcttggaacgacctgcggacttcgctactgccgatcccatacctaagctgtggaaaaatgtgtagcaacttcaataattag

SEQ ID NO: 209525 - DNA, 2166 bp, synthetic construct
  misc_feature 1..2166: note = Description of Artificial Sequence: Synthetic coding sequence
  source 1..2166: mol_type = other DNA
atgaccgagatcaccgccgagggcaacgccagcaccaccaccaccgtcatcgattctaaaaatggaagtgttcccaagtcaccagggaaggtcttgaagcggactgtcacagaagacatagtgaccaccttctcaagtcccgcggcttggttgctcgtcatcgcccttatcattacgtggagtgcagtggcaatcgtgatgttcgatctcgtggactataagaacttctcagccagcagcatcgcaaagatcggttctgaccctttgaaacttgtgcgggatgccatggaggaaaccaccgactggatctatggattttttagtctgctctccgacataataagctctgaagacgaggaagatgacgatggagatgaggataccgacaagggtgagattgacgagcctcctttaaggaaaaaggaaatacataaggataagactgagaagcaggaaaagcccgagcgcaagattcagaccaaggtgacgcacaaagagaaagagaagggcaaggaaaaagttcgcgagaaggagaagcctgaaaaaaaggccacccacaaagagaagattgagaaaaaagaaaaaccggagaccaagacactggcaaaagagcagaagaaagctaaaactgcagagaaaagtgaagagaaaaccaagaaagaagttaagggaggcaaacaagaaaaagtcaaacagactgctgcaaaagtgaaggaggttcagaagacaccttctaaacctaaagagaaagaagataaagagaaggccgcggtgtctaaacacgaacagaaggaccagtatgccttctgtcgttatatgattgatattttcgtgcacggcgacctgaagcctgggcaatccccagcgatccctccgcccctgcctacggagcaggctagtcgcccaacccccgccagccctgcactggaagagaaggaaggcgagaaaaagaaagccgaaaagaaagttacatctgaaaccaagaaaaaagagaaagaggatatcaaaaaaaagtcggagaaggagacagcgattgacgtggaaaaaaaggaacctgggaaggcctccgaaacaaaacaaggcacagtaaagatcgccgctcaggcggcggcgaaaaaagatgagaagaaagaggacagcaagaagacaaaaaagcctgccgaagtagagcaacctaaaggcaagaaacaggaaaagaaggaaaagcacgtggaacctgcaaagtctcccaagaaagagcattctgtgccctctgacaagcaggtgaaagccaaaaccgagcgggctaaggaagagatcggtgccgtgtctattaaaaaagctgtacccggcaaaaaagaagaaaagaccacgaagaccgtagagcaagaaattcgcaaggagaaatccgggaaaacctcctctatcttgaaggataaagagccaatcaagggtaaagaagagaaggtgcccgcgtcattgaaagagaaggagccggagaccaaaaaggatgagaagatgtccaaggccggcaaagaggtcaaaccaaagcccccccagcttcaaggaaagaaagaggagaagccagagccccagatcaaaaaagaggccaagcctgctatcagcgagaaggtgcaaatacataagcaggacatcgttaagccagagaagacagtgtcccacgggaaacctgaagaaaaggtgttaaaacaggtaaaggcggtgaccatcgagaaaacggcaaagcctaaacccacaaagaaagccgaacatcgtgagcgggagcctccaagtatcaagactgacaaacctaagcctaccccaaaggggactagtgaagtaacagaaagtggcaagaaaaagacagaaattagcgagaaggagagcaaagaaaaagctgacatgaagcatttacgtgaggaaaaggtaagcactagaaaagaatccctgcagctgcacaacgtaaccaaggaagacgtcgaggacgtccccgccagtaagaaggcgaaggaaggaaccgaggatgtttctccaaccaaacagaaaagccctatttcattctttcagtgcgtgtacctggacggatacaacggctatggatttcaattcccgttcacaccagccgacaggcccggagagtcctctggccaggcgaacagtcccgggcagaaacagcaggggcagtag

SEQ ID NO: 209526 - DNA, 81 bp, synthetic construct
  misc_feature 1..81: note = Description of Artificial Sequence: Synthetic coding sequence
  source 1..81: mol_type = other DNA
tgaatccacaaggacaagaccgagaagcaggagaagcccgagcggaagattcaaacaaaagaagtggggcactccagctag

SEQ ID NO: 209527 - DNA, 456 bp, synthetic construct
  misc_feature 1..456: note = Description of Artificial Sequence: Synthetic coding sequence
  source 1..456: mol_type = other DNA
tgaacccacaaggagaaggagaagggcaaggagaaggtgcgggagaaggaaaagcctgagaagaaagcgacccacaaggaaaaaattgagaaaaaggagaagcctgagaccaagactcttgctaaggagcaaaagaaggccaagacagccgagaaatctgaagaaaagaccaaaaaggaggtgaaaggtgggaagcaggagaaagttaagcagaccgccgccaaagtcaaagaggtgcagaagacacctagcaaacccaaggaaaaagaggataaagagaaggcggcggtgagtaaacatgagcaaaaggggttccccggcccaggtatcaggaacagctcttactactgtcaatatatcaagggccaaatcaatgcctggaacgatctgcgcacgtctctcttgcccatcccctacttgtcatgtgggaaaatgtgctccaactttaacaactag

SEQ ID NO: 209528 - DNA, 2196 bp, synthetic construct
  misc_feature 1..2196: note = Description of Artificial Sequence: Synthetic coding sequence
  source 1..2196: mol_type = other DNA
atcgtggagatctacccccagggcaacgccagcaccaccaccaccgtcatcgatagcaaaaacggttctgtgcctaagtccccgggaaaagtgctgaaaagaactgtgaccgaggacatcgtaaccactttttccagcccagctgcatggctcttagttatcgcattgatcataacctggagcgccgtggcaatcgtgatgttcgatctggtggattataagaacttctctgcctctagcattgccaagatcggttctgaccccctaaaactcgtccgggacgctatggaggagaccaccgattggatctacggctttttcagtcttcttagcgatattatcagctctgaggatgaggaggacgatgatggggacgaagatacagacaagggcgaaattgacgagccccccctcagaaaaaaggagatccacaaggacaaaacagagaaacaggagaaaccagagcggaagattcagacaaaagtgacgcataaagaaaaagaaaaagggaaggagaaagttagagagaaagaaaaacctgaaaaaaaggctacacacaaagaaaagatcgagaagaaggagaagcctgagactaagacgcttgcaaaggaacaaaaaaaagccaagaccgctgaaaaaagcgaagagaaaactaagaaggaagtgaagggcggaaagcaggaaaaggttaaacagactgcagcgaaggtcaaagaggtgcagaaaactcctagtaagcctaaggagaaggaagataaggagaaggccgcagtctccaaacacgagcaaaaggatcagtatgctttttgtcggtacatgattgatatcttcgtccatggcgacctgaaacctggccagtctcccgccatcccaccgcctctgcccaccgagcaggcatcccggccgaccccagcaagccccgcgctggaggagaaggagggcgaaaagaagaaagcggagaagaaggtaacctccgagaccaaaaaaaaagagaaggaagatatcaagaaaaagagtgaaaaagagacagccatcgacgtggaaaagaaagtccaggaacccggcaaggcctcagaaactaaacaagggacagtgaaaatcgcagcccaggcagccgctaagaaggatgaaaagaaggaggacagcaagaagaccaaaaagcctgctgaagtagaacaacccaaaggcaaaaagcaagagaagaaggaaaaacacgttgagcctgccaagagccccaaaaaggaacattctgttccatcagacaagcaggtcaaagctaagactgaacgtgccaaagaggagatcggcgctgtctctattaaaaaggccgtccccggcaagaaggaagagaagaccacaaaaacagtcgaacaagagatacgtaaagaaaaaagcggaaaaactagctcaattcttaaggacaaggaaccaattaaagggaaggaggaaaaggtgccggcctcgctcaaagagaaggaacctgaaaccaaaaaggacgaaaaaatgtcaaaagccggtaaggaggtcaaaccaaagcccccacagttgcagggtaaaaaggaagagaaaccagagccccagatcaaaaaggaggccaaacccgccatttccgagaaagtgcaaatccataaacaggatatcgtaaagccagagaaaaccgttagccatggtaagcccgaggagaaggtgttgaagcaagttaaggcagtcacgatcgaaaaaacagcaaagcctaagcccacaaagaaggccgagcacagagagcgagagcctcccagtattaagacagacaaacccaaaccaacgccaaagggaacaagcgaggttactgagtcagggaaaaagaaaacagaaattagcgagaaggaatccaaagagaaggcagacatgaagcacttgcgcgaggaaaaggtgtctactagaaaggagtcattgcagttacataatgtaaccaaagctgaggaggtggatagcaccctggaagatgttgaagacgttccggcgagcaagaaagcgaaggagggcactgaggatgttagccctaccaagcagaaaagcccgatctcattttttcagtgtgtgtaccttgatgggtacaatgggtacggcttccaattcccctttactccagccgatagaccgggggaatcgtctgggcaggccaattctccaggccagaagcagcagggccagtag

SEQ ID NO: 209529 - DNA, 2190 bp, synthetic construct
  misc_feature 1..2190: note = Description of Artificial Sequence: Synthetic coding sequence
  source 1..2190: mol_type = other DNA
atgaccgagatcaccgccgagggcaacgccagcaccaccaccaccgtgattgatagcaagaacggatcagtaccgaagtcacctggaaaggtattaaagcgcaccgtgacagaggacatcgtgacaaccttctcctcaccagcagcctggctcttagtgatcgccctgatcatcacatggagcgctgtggccatcgttatgttcgacctcgtcgattacaagaatttttcagcctcttccattgcgaaaattggctccgacccattgaaactggtgagagatgcaatggaggagactacggactggatatatgggttcttctctctgttgtcagacataattagcagcgaggatgaggaagatgatgatggggatgaggacacggataaaggtgaaatcgatgagccccctctgaggaagaaggaaatccacaaggataaaacggaaaaacaggagaaacccgagcgcaagattcagacaaaggtaacacataaggagaaggaaaaagggaaagagaaggtgcgtgagaaggagaagccagagaagaaggccacgcataaggaaaagattgaaaaaaaagaaaagccagaaaccaaaaccctagccaaagagcagaaaaaggcaaaaaccgcagagaaaagcgaagaaaaaactaagaaggaagtcaaaggcggaaaacaggaaaaagtgaaacaaacagccgccaaggtgaaggaggttcagaaaaccccgtctaaacctaaggaaaaagaagacaaagaaaaagccgccgtgtctaagcacgagcagaaagatcaatatgcattctgccgttatatgattgatatctttgtacatggcgatctgaaaccggggcagtctccagcaatcccacctccactgcccactgaacaggctagccgtcccaccccggcttcccccgccctggaggagaaagaaggcgaaaaaaaaaaagctgaaaaaaaagtcaccagtgagaccaagaaaaaggaaaaggaggatatcaagaagaagagcgagaaggaaacagctatcgatgtagagaagaaagagcctggcaaagcatccgagacaaaacaaggcaccgttaaaattgcagctcaggccgcagccaaaaaagatgaaaaaaaagaagattcgaagaagacaaagaaaccggcggaggtggaacagcccaaagggaagaagcaagagaaaaaagaaaaacacgtggagcctgcgaagtcgcctaagaaagaacacagcgtgcccagcgataagcaagtaaaggcgaagaccgagagagccaaagaggagatcggcgcagtcagcattaagaaggccgtccctggcaaaaaagaagaaaagacaaccaaaacagtcgagcaagagattcggaaagagaagtcagggaaaacgagtagtattctcaaggataaagagcccatcaaaggaaaggaggaaaaagtgccggcatctctgaaggaaaaggagcccgagacaaagaaagatgaaaagatgtccaaagctgggaaggaggtgaagccaaagcctccccagctccagggaaaaaaggaagaaaagcccgaaccccagattaagaaagaagctaagcctgctattagtgaaaaggtgcagatccataagcaggatattgtaaagcctgagaagactgtgtcacacggtaaacctgaggaaaaagtcctgaagcaagtgaaagctgtgactatcgagaaaaccgctaagccaaagccaacaaaaaaagccgaacacagagagcgagagccgcccagcattaaaaccgataagcccaaacctacgccaaaaggcacctccgaagtgactgagtccggcaagaagaaaactgaaatcagcgagaaggagagcaaggagaaggcagacatgaagcacttacgcgaagagaaagtttcaacacgcaaggagtcgctgcagcttcataacgtgacaaaggccgagaagccagcccgtgtatctaaggatgtagaagatgtgccagccagtaagaaggcaaaagagggcactgaggacgtgtcccccaccaagcagaaatcgcccatctcctttttccaatgcgtttatctcgacggatacaacggttatggtttccagttccccttcacccccgccgataggccaggggagtcatcggggcaagctaattcccccggtcagaagcagcagggtcagtag

SEQ ID NO: 209530 - DNA, 135 bp, synthetic construct
  misc_feature 1..135: note = Description of Artificial Sequence: Synthetic coding sequence
  source 1..135: mol_type = other DNA
tgaatccacaaggacaagaccgagaagcaggagaagcccgagcggaagatccagaccaaggattggtctgcaaacagtagcaccataagaacactgaagctgacacagctgaaaccaatctacatttgcacttag

SEQ ID NO: 209531 - DNA, 1038 bp, synthetic construct
  misc_feature 1..1038: note = Description of Artificial Sequence: Synthetic coding sequence
  source 1..1038: mol_type = other DNA
atcgtggagatctacccccagggcaacgccagcaccaccaccaccgtcattgattctaaaaacggcagtgttcccaaatctcccgggaaggttctgaagagaactgtgacggaggatatcgtcactacctttagcagccctgccgcctggctcttagtgatcgctcttattatcacctggagtgccgtggccattgttatgttcgatctggtggactataaaaacttctccgcaagctcgatagcgaaaattggttctgaccccttaaagctggtgagggatgccatggaggaaacaacagattggatttacggttttttttcattgctctccgacatcatttccagcgaggatgaggaggatgacgacggcgacgaagacacagacaaaggcgagatcgacgagcctccactgagaaagaaagagattcataaagataagaccgaaaagcaggaaaaacctgaacgaaagattcagacgaaggtgacgcataaagaaaaggagaaaggcaaagagaaagtgcgggaaaaagagaagccagagaagaaggctactcataaagaaaagattgagaaaaaggagaagcctgaaacaaagacactcgccaaggagcagaaaaaagcgaagacagccgagaaatctgaggagaaaaccaaaaaagaagtcaaaggcggaaaacaggagaaagtcaaacagaccgccgccaaagtaaaggaggtgcaaaaaaccccctcgaaacctaaggaaaaagaagacaaagaaaaggctgccgtgtctaagcacgagcagaaagaccaatatgctttttgtagatatatgatagacatcttcgtccacggtgatctgaagcccggtcagagcccagccatcccgcccccgttgcctactgagcaggcatctaggcccactcccgccagtcccgccctggaggagaaagagggagagaagaaaaaagctgaaaagaaggtcacttctgagacaaagaaaaaagagaaggaggacatcaaaaagaagaagaagaagaaaaagaaaaaatag

SEQ ID NO: 209532 - DNA, 504 bp, synthetic construct
  misc_feature 1..504: note = Description of Artificial Sequence: Synthetic coding sequence
  source 1..504: mol_type = other DNA
atgaccgagatcaccgccgagggcaacgccagcaccaccaccaccgtaatagatagtaaaaatggcagcgttccaaagagtcctgggaaagtccttaagcgcaccgtgactgaagatatagttacgacattctcctcccctgcagcgtggctcctggttatagccctcattattacctggagcgccgtggccatcgtgatgttcgatcttgtggactataagaacttcagtgctagttccattgcaaagatcggcagcgatccactgaagttggtccgcgacgcaatggaagaaactaccgactggatatatggttttttcagcttactttctgatattatttcaagtgaggatgaggaggacgacgatggggatgaggatactgataagggcgagatcgatgagcctcccctccgaaaaaaggagatccacaaggataagaccgaaaaacaagagaaacctgaacggaaaatccaaacaaaggaagtgggccactccagttag

SEQ ID NO: 209533 - DNA, 987 bp, synthetic construct
  misc_feature 1..987: note = Description of Artificial Sequence: Synthetic coding sequence
  source 1..987: mol_type = other DNA
atgaccgagatcaccgccgagggcaacgccagcaccaccaccaccgtgatcgactccaaaaatggttctgttcctaaatccccgggaaaagtcttaaaacgaacagtgactgaggacatcgtcaccaccttctctagcccagccgcttggttgctggtcatcgccttgattattacctggagcgccgtggcgatcgtgatgtttgatctggtagactacaagaatttctctgccagtagcatcgctaaaataggatctgatcctctcaaattagtgcgggacgctatggaagagacgacggactggatctacggatttttctcgctgctatccgatatcatcagctccgaagatgaggaagacgacgatggagatgaggacactgacaagggcgaaatcgatgagccgccactgagaaaaaaggaaattcataaagacaagactgagaagcaagaaaagccagaaagaaagatccaaacgaaagtcacacataaggaaaaagaaaaaggcaaagagaaggtgagagagaaggagaagcctgagaagaaggctactcacaaggagaaaattgagaaaaaagagaaacctgagaccaaaacactggccaaggagcagaaaaaggcaaagaccgccgagaagagcgaagagaagactaagaaagaagtgaaggggggaaaacaggagaaagtcaagcaaaccgccgccaaggtaaaagaagtacagaagactccttctaagcccaaggaaaaggaggacaaagaaaaggctgctgtctccaagcacgagcaaaaggaccagtacgctttttgccgttatatgatcgatatcttcgtacacggcgatctcaagcctggacagagtcccgccatccctccaccccttccgactgagcaggcgagccgccctaccccagccagtcccgccttggagggcgataaggcctccaaagagaagaagaggaagatgaagcggatgtccgagaaatag

SEQ ID NO: 209534 - DNA, 894 bp, synthetic construct
  misc_feature 1..894: note = Description of Artificial Sequence: Synthetic coding sequence
  source 1..894: mol_type = other DNA
atgaccgagatcaccgccgagggcaacgccagcaccaccaccaccgtgattgactctaagaatggcagcgtacctaagtcccccgggaaggtgttgaaaaggaccgtgaccgaagatattgtgaccactttctcctctcctgccgcatggctgctcgtgatagctttaattatcacctggtctgcggtggctattgtgatgttcgatctggttgattacaaaaacttttctgcatctagtatagctaaaattggctcagatcctcttaaactcgtccgtgatgcaatggaagagaccacggattggatttacggattttttagtttactgtccgatatcatcagctcagaagatgaagaggacgacgacggagacgaggataccgataagggcgagatcgatgagcctcccttaaggaagaaagagatccataaggacaagaccgaaaaacaggaaaaacctgagcggaagattcagaccaaagtgactcataaggagaaagagaaaggtaaggagaaggtgagagagaaagaaaaaccagaaaagaaggccacacataaagagaagatcgagaaaaaggaaaaacccgaaactaaaaccctggcaaaagagcagaaaaaagccaagaccgccgagaagagtgaagaaaaaactaagaaggaggtcaaaggtggtaagcaggaaaaagtgaagcaaaccgctgctaaagtaaaagaagtgcagaagactccttccaaacccaaagagaaagaggacaaggaaaaagctgcagtatccaagcatgaacaaaagggtcagagcccagcgatccctcctcctcttccgaccgagcaggccagcagaccaacccccgcctcacctgcactggaaggtaaatacttctttttctcctag

SEQ ID NO: 209535 - DNA, 5832 bp, synthetic construct
  misc_feature 1..5832: note = Description of Artificial Sequence: Synthetic coding sequence
  source 1..5832: mol_type = other DNA
atgagccccctgctgcggagcatctgcgacatcaccgagatcttcaatcagtacgtatctcatgactgcgatggcgctgctctgacaaagaaggacttaaagaacctccttgaaagggaatttggtgctgtactgagaaggccacacgaccctaagacagtcgaccttattctggaacttttggacctggattctaatggacgagtggacttcaatgagtttctcttatttatctttaaagtggcacaggcttgttattatgccctcggacaggctaccggcctggatgaggaaaagcgcgctaggtgcgacgggaaggagagcctgctccaagaccgcagacaagaagaggatcaacggaggttcgaacctcgcgacaggcagctcgaggaggaacccgggcagcgaaggagacagaagcgtcaagaacaggaaagagaactggccgagggagaggagcaatctgagaagcaagaaaggcttgaacagagggatagacaacgaagagatgaagagctgtggcggcagcgccaagagtggcaggagcgggaagagaggagagccgaagaggagcaacttcagtcctgtaagggtcatgaaacggaagagtttccagacgaggaacagcttcggcgtagggagctgctcgagttgcggcgcaagggccgcgaggagaagcaacagcagaggagagagcgacaggatcgcgtgttccaggaggaggaagaaaaggagtggcgcaagagagaaacggttttacggaaagaagaggaaaagctccaggaggaagagccccaacggcagagggagcttcaggaggaggaggagcagttgcggaaactggaacggcaggaacttagacgggaacggcaggaggaggagcagcagcaacagagactgagacgcgaacagcagttgagacgaaagcaggaagaagagaggcgcgagcagcaggaggaaaggagggaacagcaagaaaggcgggaacagcaagaggaaagacgggaacaacagttgagaagggagcaggaggagcggagagagcagcagctccggagagagcaggaagaggaaagaagagagcagcagctgaggagggaacaagaagaagagaggcgcgagcagcagttgagacgcgagcagcagttgaggagggagcagcaactcagaagagagcagcagcttaggcgggagcagcagctgcggcgggaacaacagctgcgcagggagcagcagctgcgacgcgaacagcagctccgaagggaacagcagctccgaagggagcaagaagaggagcggcatgaacaaaagcacgagcaggagaggcgggagcagaggttgaagcgcgagcaggaggagcgacgagactggctgaagagagaagaggagacggagaggcacgagcaagagaggcggaagcagcagttgaaacgggatcaggaggaagagcgaagagaaagatggcttaagcttgaggaggaggagcgcagggagcagcaggaacgtcgggaacagcaattgcgacgcgagcaggaggagagacgcgagcagcggctaaagcgccaggaagaagaggagagacttcagcagaggctgcggtcagagcaacaactcagaagagagcaggaggagagacgtgagcagttgctgaagcgggaggaggagaagcgcctggagcaggagcgtcgggaacaacgccttaagagggagcaagaagaaagacgcgaccagttactaaaacgagaagaggagcgccggcagcagcgcctgaaacgcgaacaagaagagcgactggagcagcgcctgaagcgtgaagaggtggagcggctcgaacaggaagaaaggagagagcaacggttgaagagggaagaacctgaagaggagcgcagacaacaattgctgaaatcggaggaacaagaggagcgtcggcaacagcagctgagacgggaacagcaagaaagacgagaacagcggcttaagcgcgaggaagaggaagagaggctcgagcagaggctcaagagggagcatgaggaagagcggcgggagcaggaactggccgaggaggaacaggagcaggctagagagcgtataaagagccggatacccaagtggcagtggcaacttgaaagtgaggcagatgccagacagtctaaagtgtattccaggcctaggaaacaggagggccaacggcgtagacaggagcaggaggagaaaaggcggcgcagggaatcagagttgcagtggcaggaagaggagcgggcacatcgccaacaacaggaggaggagcagagacgcgacttcacttggcagtggcaggctgaagagaaaagtgagcgaggtaggcaaagactgtctgcgagacctcccctgcgtgagcagagagaacgacaactgagagccgaagagcgccagcaacgagagcagcgcttcttgcctgaggaagaggagaaggaacagcgccgaagacaacgcagagagcgagagaaagagttacagttcttggaggaggaagagcagttacagaggagggaaagagcccagcagttgcaggaggaggaggacggactccaggaggaccaagagcggcggcgcagtcaagagcagcgcagagatcagaagtggaggtggcagttggaagaggagcgcaaacggcgtcgtcacacactctatgccaagccagcccttcaagagcagctgcgaaaagagcagcagctcctgcaagaggaagaggaggaactacagagagaggagcgagagaaacgccgtagacaggaacaggagcgccagtaccgggaagaagagcaactacaacaggaggaggaacagctcctgagggaggaacgggaaaagcggcgtaggcaggaacgtgaaagacagtataggaaggataaaaagctccagcagaaagaggagcaactgctgggggaggagcccgaaaagagacgtaggcaagagcgcgagaaaaaatacagagaagaggaggagttacagcaggaggaggagcagttgctgcgagaagaacgcgaaaaacggcgtagacaggagtgggagcgacagtatcggaagaaggacgagctgcagcaggaggaggaacagctgctccgggaggaacgtgagaaacgaagacttcaggagcgcgagcgtcaatacagggaagaggaggagcttcagcaagaagaggaacagttgttgggagaagagcgagagacgcgccgccgccaggagctggagaggcagtatagaaaggaggaagaactccagcaagaggaagagcaactgttgagggaggagcctgaaaagagacggcggcaggagagggagcggcaatgtcgcgaagaagaggagctgcagcaggaggaggaacagctgctgcgcgaggagcgtgagaagaggcgcagacaggagcttgagcgtcagtacagggaggaggaggaagtgcagcaagaggaagaacagctattgagagaggaaccggagaagagaaggaggcaggaactcgagcgccagtatcgcgaggaggaggagctgcaacaggaagaggaacagctgcttcgggaggaacaggaaaaacgacggcaggaacgtgagcgacagtacagagaggaggaggaactccagcgacagaaaaggaaacagaggtaccgggatgaggatcaacggagcgatctcaaatggcagtgggagccagaaaaagagaatgctgtacgcgataacaaggtgtactgcaaaggaagggaaaatgaacagtttcgacagctggaagactcccagctccgggataggcagagtcagcaggatctgcaacatctgctcggagaacagcaagagcgcgaccgggagcaggaacggcgcagatggcagcaaagggatcgacacttccccgaagaggaacagctggagagggaagaacagaaagaagcaaagcgaagggataggaagagccaggaggaaaaacagcttttgcgggaggagagagaggagaaacgacgccgccaggagacagacaggaagttcagagaggaagaacagctgttgcaggagcgtgaggagcagcctcttcgtcgccaggagcgtgataggaagtttagagaggaagaacttaggcaccaagagcaaggtcgcaagttcctggaggaggagcagcggttacgcagacaagagagggaaaggaagtttctgaaggaggagcagcagcttcgctgtcaagaacgagagcaacagttgcgccaggaccgagatagaaaattcagggaagaagaacagcagctgtctcgccaagaacgcgatcgtaagttccgagaggaggagcagcaggtgagaaggcaggagagagagagaaaattcctcgaggaggaacagcaactgcgccaagagcggcaccgaaagttccgagaagaagaacaattactacaggaaagagaagagcagcagctgcacaggcaggaaagagatcgtaagttcctagaagaggagcagcagcttcgtaggcaagagcgggacaggaagttccgagagcaggagcttaggtctcaggaacccgaacggaaattcttggaggaggagcagcaactccatagacaacagcgccagcgcaaatttctacaggaggaacagcaactccgccggcaagaacgagggcagcagcggcgccaagaccgcgatcgaaaatttcgagaagaggaacaactgaggcaagaacgggaagagcaacaactgtcccgacaggaacgggaccgcaaattcaggttagaagaacagaaggtcaggcggcaggaacaggagagaaaattcatggaagacgaacagcaactcagaaggcaggaagggcagcagcagctccgccaagagagggacagaaagtttcgagaagatgagcaattactgcaagagcgggaggagcagcaactgcataggcaagagagggatcgcaaattcttggaagaagaacctcagctcaggaggcaagaacgcgagcagcagctaaggcacgacagggataggaaatttcgggaggaagagcagctgctccaagaaggtgaagagcaacagctgagacgacaggagcgtgacagaaaatttcgggaagaagaacagcagttacgacggcaggagcgggagcgaaagtttctgcaagaggaacagcaattgcggaggcaggagctcgagagaaagttcagagaggaggaacagcttcggcaggagactgaacaagaacagctacgccgacaagagaggtaccggaagatcctggaggaagaacagctgcggcccgaaagagaggagcagcagctgcggaggcaggagcgcgaccgtaaattcagagaggaagagcagctccggcaggaacgggaggagcagcagctgcgaagtcaagagtctgacaggaagttcagggaggaggaacagttgcgtcaagagcgcgaggagcagcagttgaggccgcagcagagggatggaaagtatcgctgggaggaggaacagcttcaacttgaagaacaggagcagcgcctgagacaagagagagatagacagtaccgtgcagaagagcagtttgctactcaggagaagagcaggagagaggaacaggagctatggcaagaggaggaacagaagagaagacaggagcgcgaacggaaattgcgggaggagcacattagaaggcagcagaaggaagagcagcgtcatcgccaagtcggtgagatcaaatcacaggagggcaaagggcacgggaggctcttagaacctggcacgcaccaattcgctagcgtccccgtcaggagttcgccgctttatgaatacattcaagagcagcgaagccagtacagaccctag

SEQ ID NO: 209536 - DNA, 540 bp, synthetic construct
  misc_feature 1..540: note = Description of Artificial Sequence: Synthetic coding sequence
  source 1..540: mol_type = other DNA
atggccaagaccgccatggcctacaaggagaagatgaaggagctgtcgatgctgtctctgatttgttcatgtttctaccctgagcctagaaatatcaacatttatacttacgatgatatggaagtgaaacaaatcaataagcgggcatcagggcaggcattcgagcttatactgaagcctccaagcccaatatctgaagctccccgcacgctagccagtcctaaaaaaaaagatttgtcccttgaggaaatccaaaagaaactggaagccgccgaggaaagaaggaaaagtcaggaggcccaggttctaaagcagttggcagagaagagagagcacgagagagaagtgctgcagaaagccctcgaagagaataacaacttttctaagatggcggaggaaaaactgatattgaaaatggaacagattaaggagaacagggaggctaacctcgccgctatcatcgagagactgcaggagaaggaacggcacgctgcagaagtccgcaggaacaaagagctgcaagtagagctgtcaggttag

SEQ ID NO: 209537 - DNA, 3885 bp, synthetic construct
  misc_feature 1..3885: note = Description of Artificial Sequence: Synthetic coding sequence
  source 1..3885: mol_type = other DNA
atgccctacgaggtgaacgccggctacgacttcaccaacatggtgaggaagaagaatccccccctccgaaacgtggcctccgagggcgagggccaaatcctcgagccaatcggaaccgagtcgaaggtgtctgggaaaaataaggagttttcagccgatcaaatgagtgagaatacggaccagagcgatgctgccgagttaaaccataaggaagaacacagcctgcacgttcaggatccatcaagtagttccaaaaaagatttgaaaagtgctgtgctctcagagaaggccgggttcaattatgaaagcccctccaaaggggggaattttcctagctttccacacgatgaggttacagaccggaatatgttagcctttagtagtcccgctgcgggtggagtgtgtgaacctctcaagtcgcctcagcgagctgaagcagacgacccccaggatatggcttgcacaccctcaggagactcactcgaaacgaaggaagatcaaaaaatgagtcctaaggcaaccgaggaaacagggcaagctcagtccggccaggccaattgtcagggcctgtcacccgtctcggtagctagcaagaatcctcaggtgcccagtgatgggggcgtaaggctgaataagtcaaaaacagacctgcttgtgaacgataacccagatcctgctcctctttctccagaacttcaggacttcaagtgcaacatttgcgggtacggttactacggcaacgaccccaccgatctgataaaacatttccggaagtatcatctaggactgcacaacaggacaagacaagatgccgagctagacagcaagatcctggccctgcacaatatggtccagtttagccattccaaggatttccaaaaagtgaacagatcagtctttagcggagttctgcaggatattaactcttcaagaccggtactccttaatggaacatacgatgtgcaggtgacatcaggcggtacatttattgggataggcagaaagacacctgattgccagggaaataccaaatatttccgctgcaaattttgcaattttacctatatggggaacagctccaccgagttagaacaacactttctgcagactcaccctaataagatcaaggccagtttgccttctagcgaagttgccaaaccttcagagaagaattcaaataagagtatacctgccctgcagtccagtgactctggggatctcgggaagtggcaggacaaaattaccgtcaaagcaggagatgataccccggtgggttactccgtacctatcaagcctctggactcatcgagacagaatggcactgaggctactagctactactggtgtaagttctgcagcttttcttgtgagtcatcctcaagtctaaaattgctggaacactatgggaaacagcacggagccgtccagtccggcggcctgaaccctgaactgaatgataagctgtcacgaggctcagtgatcaaccagaatgaccttgccaagtcttctgaaggcgaaacaatgacaaaaaccgacaagtcctctagcggggctaaaaagaaggatttctcttccaaaggagcggaagataatatggtgaccagttacaattgccagttttgcgactttagatacagcaagtctcatgggcccgatgtgatagtggtggggcctttgcttagacactaccagcagcttcacaatatacacaaatgcacgattaaacactgtccattctgtccccgaggactgtgttctccggaaaagcatcttggcgaaatcacctatccctttgcctgtagaaagtcaaattgctctcactgcgccctattacttctgcatctctctccgggcgccgccggctcctcacgagttaaacatcagtgtcatcagtgctccttcactaccccagacgtagatgttctcctttttcactatgaaagcgtgcatgagtctcaggcatcagacgttaagcaggaagctaatcaccttcaaggttcagacgggcagcagtctgtgaaagagtctaaggagcactcatgcactaaatgcgactttattacccaggtcgaggaagagataagtcgtcattaccggagagcacatagttgctataagtgtagacagtgttccttcactgctgctgacactcagagcctccttgaacactttaacaccgtgcactgccaggaacaggatataactaccgcaaatggcgaagaggatggacatgcaataagtaccattaaagaagagcctaaaatagattttcgcgtatataatctccttacgcctgattcgaaaatgggggagcccgtgtctgagtctgttgtcaagcgggagaagttagaggaaaaggacgggcttaaggagaaagtgtggacagaaagttccagcgatgatctgcgcaatgtaacttggcgaggtgctgacatcctgagaggctcacccagctatactcaggcctccctgggtctgctcaccccagtttctggaactcaggagcagacaaagactctcagggactctcctaatgtcgaagcggcccacctcgctcggccgatttacggcctggccgttgaaacaaaaggcttcttgcagggggcacctgctggcggtgagaaaagtggagccctgccccagcagtacccagcttccggcgagaacaagagcaaggatgagtcccaaagcctgcttcgcagacggcgcggctctggggtgttttgcgcaaattgcctgactacaaagaccagcctttggagaaagaatgccaatggcggatacgtatgcaatgcctgtgggctgtatcagaagctgcattctactccgaggccactgaatattatcaagcagaacaatggcgagcagattattagaagacgaacaaggaaacgattaaatcctgaagctctgcaggctgagcagctgaataaacagcaacgaggatccaacgaagagcaggtcaacggaagtcccctcgaacgacggtcggaggaccacctcaccgaatcccaccagcgcgaaatccccctgccctctctgagtaaatacgaggcccagggcagccttacaaaatcccactctgcccagcaacctgtgctggtgtcccagaccctcgacatccataagcggatgcagccgctgcatatccagatcaaaagcccacaagaatctacaggggatcccggaaatagctcatccgtgtctgagggtaagggtagttccgagagaggttcccccatcgagaagtacatgaggccagctaagcatccaaactattcaccacccggcagtcccattgaaaaatatcaatacccattgttcggtctcccttttgtacacaatgattttcagtcagaagctgattggctcaggttctggtcgaagtataagctgagcgtgccaggtaacccgcattacctcagccacgtgcccgggcttcctaatccttgtcaaaattacgttccctatcccacctttaatctgcccccccatttctctgcagtgggatctgataatgatataccactcgatctggctatcaagcattcaaggccggggcctacagctaatggagcatccaaagaaaagaccaaagctcccccaaatgttaagaacgaagggcccctcaatgtggttaagactgaaaaagtggatcggagcacccaggatgagctgtcaaccaaatgcgtccattgtggaatcgtttttttggacgaggtgatgtacgccctccatatgagctgccacggggatagcgggccctttcagtgttccatctgccagcatctgtgcaccgacaagtatgactttaccactcacattcagagggggttgcatagaaataatgcacaagtcgaaaagaacggcaagcctaaggaatag

SEQ ID NO: 209538 - DNA, 3858 bp, synthetic construct
  misc_feature 1..3858: note = Description of Artificial Sequence: Synthetic coding sequence
  source 1..3858: mol_type = other DNA
atgcagagcaacatggtgcggaagaagaacccccccctgcggaacgtcgccagcgaaggcgagggccagattttggaacctatcggaacagaatccaaggtgagcggcaaaaataaagaatttagcgcggatcagatgagcgagaataccgatcaatccgatgccgccgaattgaatcacaaagaggagcattctttgcacgtgcaggatccctcctcctcctctaagaaggatctgaaatctgccgttctcagcgagaaagctggtttcaattacgagtccccctcaaaggggggtaacttcccttctttccctcacgacgaagtgaccgaccggaacatgctggctttctcctccccagccgccggaggcgtgtgcgagcccctgaagtcaccgcagagggctgaggccgacgatcctcaggatatggcgtgcaccccaagcggcgacagtctcgaaactaaagaggaccagaaaatgtctccaaaagccactgaggagacaggtcaagcccagtccggtcaggccaattgtcagggcctgtcacccgtgagtgtggccagtaaaaatccacaggtgccatcagatggaggcgtgaggcttaataagtcaaaaaccgatttgctcgttaacgataatcccgacccagccccactgtcccccgagctgcaagacttcaaatgcaacatttgcggctacggttattatggaaacgaccctaccgatctgatcaagcactttcggaagtatcacctcggcctccacaacagaactcggcaggacgcagaattagattcaaaaattctagcgctccacaacatggtccaattttctcatagtaaagattttcagaaagtgaacaggtcggtgttcagcggtgtgctgcaggatattaacagttcaagaccagtgctgcttaatgggacatatgacgtgcaggtgacatctggaggcacgttcatcggaatcggccgcaaaacaccagactgtcagggtaacacaaagtattttagatgcaaattttgtaacttcacttatatggggaatagctccaccgagctggaacagcatttcttgcagacgcacccaaataagattaaagcctccctgccctcctctgaagtggctaagccgtctgaaaaaaattccaacaagtcaattcctgcccttcagagctccgattcgggtgatcttggtaagtggcaagacaagataacagtcaaagccggcgatgacacacctgttggctactcagtaccaataaagcctctggatagctcacgccaaaatggaaccgaggctactagctactattggtgtaagttctgttcctttagctgtgaaagctcttcaagtctaaagttgctggaacattacggcaagcagcatggagcagtgcagtccggcggcctgaaccccgagttaaatgacaagctgtctcggggcagcgttattaaccagaacgacctcgcaaagtcgtccgaaggtgaaaccatgaccaagacagataaatcctcgtccggcgcgaagaaaaaagacttcagttccaagggtgcagaggacaatatggtcacatcctacaattgccagttctgcgattttaggtattcgaagagtcacgggcccgatgttatcgtggtgggtcctctgctgagacattatcaacagcttcataatattcataagtgtactattaaacactgccccttctgtcccagaggtctgtgcagccccgagaagcacctgggagagatcacctatccctttgcttgcagaaagtctaactgttcacactgcgccctactcctgctgcacctctctcccggggctgctggttccagcagagtcaagcatcaatgtcaccaatgttctttcactactccagacgtcgatgttttgctcttccactatgaaagtgttcacgagtcccaggcgagcgatgtgaaacaggaagcaaatcatttacaggggtccgatggacagcagagtgtcaaagagagcaaagagcatagctgtacgaagtgtgattttatcactcaggttgaggaggagatatccagacattaccggagagcccactcctgctacaaatgccgccagtgttcctttaccgccgccgatacccaatctttactggaacactttaatacagtccattgtcaagagcaggacatcacaaccgccaacggagaggaggatgggcacgctatttcaacaattaaggaggagcccaagatagattttcgcgtatacaatctgctcacccctgatagcaaaatgggtgagccagtaagtgagtcagtcgtgaaaagagagaaactggaagaaaaagacggtctaaaagaaaaagtgtggaccgagtcaagctcagacgacctgcgcaatgttacgtggcgcggcgcggatatcctgcgcgggagccctagctacacccaggcaagcttaggtttactcactcctgtctcaggaacgcaagagcagacaaagactttgagagacagtcccaacgtagaagctgcccacctggcaaggccaatctacgggctggctgtagaaacaaagggatttctgcaaggagctcccgctggcggcgagaaatccggcgctctcccgcaacagtatcctgcttccggggagaataaatctaaagatgagtcccagtcactcctgaggagaaggaggggttccggcgtcttctgcgcgaattgtcttacgactaaaacatccctttggcggaagaatgcgaatggcgggtatgtgtgcaacgcctgtggtttgtatcagaaacttcactcgaccccgaggccactcaatataatcaaacagaataacggcgaacagatcatcaggcggcgcacacgaaaaaggctgaatcctgaagcactgcaggctgagcagctaaacaagcagcagcggggctccaacgaagagcaggtgaatggttctccattagaaagacgctccgaggaccacctgaccgaaagccaccagcgagagatccccctcccctcgttgtccaagtacgaagcacagggatccttaacgaagagccactccgcacagcagccagttctcgtctctcagactctggacatacacaaacgtatgcagcctttacatatccagatcaagtccccgcaagaatccaccggcgatcctggaaattcttcaagcgtgagcgaaggcaagggctcttcagaaagaggcagccccatagagaagtacatgcgtcccgcaaagcacccaaattatagcccacccgggagtcctatagaaaagtatcagtacccccttttcgggttgccttttgttcataacgacttccagtctgaagcagactggctccgattctggtctaagtacaagttgtctgtacctggcaatcctcattatttgagccacgtgcccgggctccccaatccttgtcagaattatgttccttaccctacatttaatctccctcctcactttagtgctgttggatctgataacgacattccactggacctcgccataaagcattctcgtcccggtcccaccgcaaatggagcaagcaaagagaagaccaaggccccccctaacgttaaaaatgagggccctctgaatgtggttaagaccgaaaaggtggacagatctacacaggatgagttgtcaacaaaatgtgtgcattgcgggatcgtgttcttagacgaggtgatgtacgcactgcatatgtcctgtcacggcgactccgggcccttccagtgtagcatttgtcagcacctgtgcacggataaatacgatttcacgactcatatccagagagggttgcatcgtaacaatgcacaggtagagaaaaacggcaaacccaaagagtag

SEQ ID NO: 209539 - DNA, 705 bp, synthetic construct
  misc_feature 1..705: note = Description of Artificial Sequence: Synthetic coding sequence
  source 1..705: mol_type = other DNA
atgcggaagacccggctgtggggcctgctgtggatgctgttcgtgagcgaattacgcgcggccacaaagctcacggaggagaagtacgagctcaaagaagggcagaccttagatgtaaagtgcgactataccctcgagaagttcgcttctagtcagaaggcctggcagatcattagagacggcgagatgcccaagacactagcatgtactgagcgccccagcaagaactcacatcccgtgcaggtcggcaggatcattctggaagattaccatgaccatgggctgctgcgcgtcagaatggtgaacctgcaggtggaagactccggcttgtaccagtgtgtgatctaccagcccccgaaagaaccacacatgctgttcgaccgcatcaggctggtggtcacaaagggattctccggaacgcctggatctaatgagaacagtactcagaacgtgtataagattcctcctacaactacgaaggccctctgcccgttgtacacatcgccgagaaccgttactcaggccccccctaagtccacagcagacgtatcgactcccgacagcgagatcaatttaaccaatgtgaccgatatcatcagggttccggtgttcaatattgttatactcctcgccggaggcttcctctcgaagtcactggtgtttagtgtcttatttgctgtgaccctcagatcctttgtaccctag

SEQ ID NO: 209540 - DNA, 453 bp, synthetic construct
  misc_feature 1..453: note = Description of Artificial Sequence: Synthetic coding sequence
  source 1..453: mol_type = other DNA
atgcggaagacccggctgtggggcctgctgtggatgctgttcgtgtctgagctgcgcgccgccacgaagcttacggaggagaagtatgagctcaaggagggtcagaccctagacgtgaagtgtgattacaccctcgagaagtttgcatcttctcaaaaagcgtggcagatcattcgcgacggagagatgcccaagaccctggcttgcactgaacgacccagcaaaaattctcacccagtgcaagtgggtcgaattatcctggaagactaccacgaccacgggcttctgagggtccggatggtaaaccttcaagtggaggatagtggactgtatcagtgcgtgatttaccagccaccaaaggagccacatatgttattcgatagaattcggctcgtcgtcaccaaggggttcaggtgtagcacactttcattcagttggctggtcgacagctag

SEQ ID NO: 209541 - DNA, 678 bp, synthetic construct
  misc_feature 1..678: note = Description of Artificial Sequence: Synthetic coding sequence
  source 1..678: mol_type = other DNA
atgcggaagacccggctgtggggcctgctgtggatgctgttcgtgtctgaactccgggctgctacaaagctgactgaggagaagtatgagctgaaggaaggtcagacgctggacgtcaagtgcgactatacactggaaaaatttgcgagctctcagaaagcatggcagatcatccgggatggggaaatgcctaagaccctcgcctgtactgaacgtccttctaaaaattctcacccagtgcaagtcggccgcattattctggaggactaccacgatcatggtctcctgcgggtgcggatggtgaatctacaggttgaagactccggtctgtatcagtgtgttatctatcaaccaccgaaagagccccacatgctgtttgaccgtatccggctggttgtgaccaaggggtttagtggaactcctggtagcaacgaaaactccacccagaatgtatataagatccctccaactaccacaaaggccctatgccccctgtatacaagcccgcgaacggtgacccaggctcctcccaagtccaccgctgatgtcagtactcccgattccgagatcaaccttaccaacgttactgatatcatacgctattcctttcaggtaccgggacctctcgtatggactctgagtccactgtttcccagcctttgtgccgaacgcatgtag

SEQ ID NO: 209542 - DNA, 501 bp, synthetic construct
  misc_feature 1..501: note = Description of Artificial Sequence: Synthetic coding sequence
  source 1..501: mol_type = other DNA
atggagcccctgcggctgctgatcctgctgttcgtgaccgagctgagcggggcccataatacaactgtgtttcagggcgtggccggccagtccctgcaggtgtcttgcccgtacgacagcatgaaacattggggcaggagaaaggcatggtgcagacaactgggcgaaaaaggaccttgtcaacgggtggtttctacacacaatctatggctgctaagtttcctacgaagatggaatggctccacagcaattacagatgacactcttggaggaaccctcaccatcactctccggaatctgcaaccccacgatgccgggctttatcagtgccagtcgctgcatggtagcgaagcagatacactccgaaaggtcttagtcgaggtattagcagacccgcttgaccatcgggacgcgggcgatctgtggttccccggggagtctgaatcttttgaagatgcccacgtcgagcacagcatctcaagggcagagcgacacgtttag

SEQ ID NO: 209543 - DNA, 693 bp, synthetic construct
  misc_feature 1..693: note = Description of Artificial Sequence: Synthetic coding sequence
  source 1..693: mol_type = other DNA
atggagcccctgcggctgctgatcctgctgttcgtgaccgagctgagcggcgcccacaacactaccgtcttccaaggagtcgctggacagagcctgcaagtgtcctgcccctacgactcaatgaagcattgggggagacgcaaggcctggtgccgccagctcggcgagaagggaccttgtcagagggtggtttcaactcacaatctgtggctgctaagcttcttgcgacggtggaacggcagtactgcgatcaccgacgatacacttggcggtacgcttaccattacactaagaaaccttcagccgcatgacgcaggtctctatcaatgtcagtccctgcacggctcagaagctgatacattgcgaaaggtactcgtagaggttctggccgacccactggatcacagagatgcaggagacctctggtttcccggggaaagcgaatccttcgaggatgcacacgtggagcacagtattagcagatctctgttagaaggcgagatcccgttccctccaacgagcattcttcttctcctcgcctgtatctttctcatcaagattctggcagccagcgccctttgggccgctgcttggcacggccagaagcctggaacccatccaccttctgagctcgactgtggccacgacccagggtatcaactgcagacgctccctggcctccgagacacgtag

SEQ ID NO: 209544 - DNA, 660 bp, synthetic construct
  misc_feature 1..660: note = Description of Artificial Sequence: Synthetic coding sequence
  source 1..660: mol_type = other DNA
atggagcccctgcggctgctgatcctgctgttcgtgaccgagctgagcggagctcataacactactgtgttccagggagtcgccggacagtctttgcaggtgagttgtccatatgactccatgaagcattgggggaggcgcaaagcttggtgcaggcagctcggagaaaaaggaccctgtcaacgggttgtgtccacacataatctctggttactttcttttctgagaaggtggaacgggagtactgctatcactgatgacacattgggtggtaccttaacaatcactctgcggaatctgcagcctcatgatgccggtctgtaccagtgccagagcctgcacggctccgaggcggatacactgcggaaagtgttagtggaagttctggccgaccccttagatcatagggacgccggtgatctgtggtttcctggcgaatctgagtccttcgaggatgcccatgttgagcattcgattagtagggccgaaaggcatgtcaaagaggacgatggacgcaagagccccggagaggtgcctcccggaacctcccctgcctgtatactcgccacttggccacctggtctcctggtcctgctgtggcaggaaaccacactccctgaacattgtttctcctggaccctggaagccggtacagggtag

SEQ ID NO: 209545 - DNA, 936 bp, synthetic construct
  misc_feature 1..936: note = Description of Artificial Sequence: Synthetic coding sequence
  source 1..936: mol_type = other DNA
atgggcctgaccctgctgctgctgctgctgctgggcctggagggccagggcatcgttggctccctgccagaagtgcttcaggccccagtgggatcctcaatccttgtacaatgccattacaggttgcaggacgtgaaggcccaaaaagtgtggtgccgctttctgcccgagggttgtcagccgttagtgagttctgcggtggatcggcgggcccccgcgggacggcggacgtttctgacagatttgggaggcggcttgctgcaagttgagatggtgaccctgcaggaagaggacgcaggagaatacggatgcatggtcgacggcgccagaggccctcaaatcctgcatcgggttagccttaacatcttgccccccgaggaggaggaggaaacccataagatcggatcactcgccgagaatgcgttcagcgaccccgctggtagcgctaacccactggagcccagtcaggatgaaaagtctattcccttaatctggggtgccgttttactggtggggctgttggtggctgccgtggtgctgttcgccgtgatggccaagaggaagcaaggcaataggcttggagtatgtggaaggttcctctcatcccgtgtttctggaatgaacccaagctcagtcgtgcaccacgtgagcgatagcggaccagccgctgaattgccacttgacgtccctcatatcaggctggattccccaccttcattcgacaacacaacttatacttccctgccacttgattcaccttccgggaaaccttctctgccagcaccctcctctctcccccctttgcctcctaaagtgctggtgtgcagtaaacccgtgacatacgccactgtgatctttccaggagggaacaaaggcggcggaaccagttgtgggccagcccagaacccaccaaataaccagaccccttcatcttag

SEQ ID NO: 209546 - DNA, 600 bp, synthetic construct
  misc_feature 1..600: note = Description of Artificial Sequence: Synthetic coding sequence
  source 1..600: mol_type = other DNA
atgggcctgaccctgctgctgctgctgctgctgggcctggagggccaaggcattgtaggctcccttccagaggtgttgcaggccccagtgggctcttccatcctggtacagtgtcactacaggttgcaggacgtgaaagcgcagaaagtctggtgcaggttcctgccagagggttgccagcctctggtctcttccgctgttgatcgccgggcacctgctggcaggcgaaccttcctgacagatctcggagggggactgctgcaggtcgagatggtgacgcttcaagaagaagatgctggtgagtacggctgtatggtcgacggggcgcgcgggcctcagatcctccatagggtgagtctgaacattcttcctcctgaagaagaagaagagacccacaagatcggctcattggccgaaaacgccttttctgatcccgccggctccgctaaccctttggaaccttcccaagacgaaaagagcatcccgctgatttggggcgccgtactgcttgttgggctgctcgtcgctgcagtcgtgctgtttgctgtgatggctaagaggaagcaggaaagcttgcttagcggaccaccccgccaatag

SEQ ID NO: 209547 - DNA, 603 bp, synthetic construct
  misc_feature 1..603: note = Description of Artificial Sequence: Synthetic coding sequence
  source 1..603: mol_type = other DNA
atgggcctgaccctgctgctgctgctgctgctgggcctggaggaggaagaggaagagacccacaagattggttctctggccgagaacgccttttctgaccctgcagggagtgcaaacccactggagccgtcccaggacgaaaagtcaattccacttatttggggagcagtgttgcttgtagggctgctggtcgcagccgtggtgctgtttgcagtaatggccaagcgtaaacaagggaacagattaggtgtctgtggcagatttctatccagcagagtgagcggcatgaacccaagctctgtggtccatcacgtgtccgattctgggccagcggccgagcttccacttgatgtgccccacatcagactcgatagcccaccttcgttcgataacacaacttatacctctcttcctttggactcaccaagcggcaagcccagcctgcccgcgccatccagcctgccccccctgccccccaaagtgctggtgtgtagtaaaccagttacttatgctacagttatcttccccggcggaaataaaggagggggaacaagttgcggtcctgcacagaaccctcctaacaatcaaaccccaagttcttag

SEQ ID NO: 209548 - DNA, 966 bp, synthetic construct
  misc_feature 1..966: note = Description of Artificial Sequence: Synthetic coding sequence
  source 1..966: mol_type = other DNA
atggcccccgccttcctgctgctgctgctgctgtggccccagggctgtgttagcgggccaagcgctgattctgtgtacacaaaggtgaggcttctcgaaggcgagactctgagcgtgcagtgtagttataagggatacaaaaacagggttgagggcaaggtgtggtgtaagataagaaaaaaaaagtgtgagcctgggtttgctcgcgtgtgggtaaaagggccccggtatctcttgcaggacgatgcccaagcaaaggtggttaatataaccatggtggccctcaagctacaagatagcggacggtactggtgcatgagaaacacgtccggcatcttatatccccttatgggctttcagttagacgtctctcctgccccacagaccgaacgcaatatcccttttacccacctcgacaacattctcaagagtggtactgttacaacaggccaagcccctacaagcggccctgacgccccgtttaccacgggcgtgatggtgttcactcctgggctgataaccttaccacggcttctggcttctactagaccagcatctaagaccggatattcttttacagctactagcacaacttcacagggcccccgacggacaatggggtcccaaaccgtcacagcctctccttcaaatgcacgcgatagttctgcaggaccagagagtatttctacgaaatccggtgacctgtccactcggtcccccactactggtctgtgcctcacctcacggagccttctgaaccgcctgcctagtatgccgagcattcgtcaccaagatgtttactcaacagtgttaggagttgtgttaacgctgctagtcttgatgctcattatggtgtacggattttggaagaaacgccacatggcctcctactcaatgtgcagtgatccgagtactagggatccaccgggccggcccgagccttacgttgaggtgtacttgatatag

SEQ ID NO: 209549 - DNA, 2562 bp, synthetic construct
  misc_feature 1..2562: note = Description of Artificial Sequence: Synthetic coding sequence
  source 1..2562: mol_type = other DNA
atgtgctgcgagaagtggagccgggtggccgagatgttcctgttcatcgaagagagggaggattgtaagattctttgcctatgcagtagggcctttgtggaggatagaaagctgtataacctaggtctgaagggatattacatccgagattcaggcaacaattccggggatcaagcaacagaagaggaagagggaggatactcatgcgggaccgccgaatcccatgactcgaaaggaatcgggctcgatgaaagcgagctggattccgaggctgagttgatgcgctccatgggacttccactccagtttgggcgcatcaccgcccacaaagattttgaggtcagtatgaatactcgcaataaggtcaagataaagaaaaagaagcaccagaagaaatatctagatgagatcgtccaggaaagctggcgaaaggaatacgaggaggatgatattctagcatcagacgatccttcatctattgaacaatacgaaaacacaaggacgtacgagttgcagtccaagaaagacactgaaacagaaaacccacccgtggagaacactctgtccccaaagcttgagatcacggagaaatgggaaaaatactggaacgagtacggtgggggcctcctgtggcagtcctggcaggagaagcatcccggccaggcactgagtagtgagccctggaacttccccgataccaaggaggagtgggagcaacattattcacaattgtactggtactacttagagcagttccagtactgggaagcacagggatggacgttcgacgcctctcagtcttgtgatactgacacgtacacctctaagaccgaagccgatgataagaatgacgaaaaatgtatgaaagtcgatctcgtgtcattcccatccagtcccattatggtcgataatgacagctcaggaacttctgacaaggatcattctgaaatcctggacggaatcagcaatattaaactaaatagcgaggaggtgactcagtctcagctggatagctgcacctcacacgatggccaccagcagctgtcagaggtgtcatctaaaagagagtgccccgcttcaggtcagtcagaaccccgcaacggagggacaaatgaggaatccaacagttccggaaataccaacacagatcccccagcggaagacagtcagaagagctcaggcgcgaatactagcaaggatcggccgcatgcctccggcacagacggcgatgagagcgaggaggatcccccagagcacaaaccttcaaaactaaaaagatcccacgagctggatatcgacgaaaatcccgcctctgatttcgacgattcagggtctctgcttggcttcaagtatggatctggccagaagtacgggggcattcccaacttttctcaccgccaggtaagataccttgagaagaacgtgaaactcaaatccaaatacttggatatgcggcggcaaataaaaatgaaaaacaagcacatcttcttcactaaggaatctgagaagcccttctttaagaagtcaaagatcctctccaaagtcgaaaaattcctgacttgggtgaacaagccaatggacgaagaagcttcccaagagtcatcctcacacgataacgtccacgatgccagcacatcttccgattcagaggaacaggatatgagtgtgaaaaagggcgatgacttgcttgaaactaacaacccagaacccgagaagtgccagtctgtgagcagcgccggggagctggagacagagaactatgagcgggacagcctcctggctacagtccccgatgaacaggactgtgtcacccaggaagtgccggatagtcgccaagcggagacagaggctgaagtcaaaaaaaagaaaaataagaaaaagaacaagaaggtgaacggactgccaccagagattgccgccgtccccgagctcgcaaaatactgggcacagagatatagattgttctctcgctttgatgacgggattaaactggacagagaaggctggttctccgttacacccgagaagatcgcggaacatatcgcagggagagtttcgcaatctttcaagtgtgatgtagtcgtagatgcattctgcggcgtcggcggaaacacaattcagttcgccctgacggggatgcgcgtcatagctattgacatcgaccctgtgaaaatcgcattggcccgaaacaacgccgaagtgtacgggatcgctgacaaaatcgaattcatatgcggagatttcttgctgctggcatcatttttgaaagccgacgttgtgttcctctcacctccttggggcggacccgattatgccaccgcagagactttcgatattagaacaatgatgtcccctgatggctttgaaatctttagactcagcaaaaagattactaacaatatcgtgtactttctgccgaggaacgctgatatcgatcaggtggcaagtctggccggcccaggggggcaggtggagattgagcaaaattttctgaacaacaagctgaagactatcacagcgtacttcggcgacctgattaggcggccagccagcgaaacctag

SEQ ID NO: 209550 - DNA, 1266 bp, synthetic construct
  misc_feature 1..1266: note = Description of Artificial Sequence: Synthetic coding sequence
  source 1..1266: mol_type = other DNA
atgtggtaccaccggctgagccacctgcacagccggctgcaggacctgctgaaaggcggggtgatctatcccgcccttccgcagccaaatttcaagtctcttctccctttagctgtccactggcatcatactgcctccaagagcttgacttgcgcctggcagcaacatgaggatcacttcgagttaaagtatgccaacacggtgatgcgatttgactatgtgtggctcagagatcactgccgcagcgccagctgctataattctaagactcaccagcgatctctggacacagcttctgtagacctctgtattaaaccgaaaaccatccgactggatgaaaccaccctgttcttcacttggccggatgggcatgtgacgaaatacgatcttaattggctcgttaaaaactcctatgaaggccaaaaacaaaaggtaattcagccccgcatactgtggaatgcagagatttatcaacaggctcaggtgccatccgtggactgccagagttttttggagaccaacgagggactcaaaaagttcttgcaaaactttttgttgtacgggatagcttttgttgaaaatgtcccccccacccaggaacacacagagaaactcgccgagcgcatcagtctgattagggagaccatttatggcaggatgtggtatttcacgagcgatttctcccgcggtgacactgcgtacactaagctcgccctagaccggcacaccgatacaacctactttcaagagccatgcggtattcaggtgtttcactgcttaaagcatgaagggaccggcggccggaccttacttgtggatggcttctatgccgccgaacaggttttgcagaaggcccctgaagagttcgaactgttatcgaaggtcccgctgaaacacgagtacattgaggatgtaggggagtgccacaaccacatgataggaattggtcctgtgctgaacatatacccttggaacaaggagttgtatctcatccggtacaataattatgaccgggctgttatcaataccgttccttacgacgtggtccaccggtggtataccgcacatcgaactctcactatcgagctgcgcagaccagaaaacgagttttgggtcaaattgaaacctggacgggtgttgtttatcgacaattggcgcgtgttgcacggtcgagagtgcttcacaggctaccgccagctgtgcggctgctatctcacaagagatgatgtgcttaatacggcgcgcctgttgggcctacaagcctag

SEQ ID NO: 209551 - DNA, 1131 bp, synthetic construct
  misc_feature 1..1131: note = Description of Artificial Sequence: Synthetic coding sequence
  source 1..1131: mol_type = other DNA
atgtggtaccaccggctgagccacctgcacagccggctgcaggacctgttgaagggcggggtgatctacccagcactgccgcaaccaaacttcaagtcactcttgcctttggccgtgcattggcaccacaccgcgtccaagtccctcacttgtgcatggcagcaacacgaagaccacttcgagctcaagtatgctaacacagtgatgcgatttgattacgtatggcttagagaccattgcagaagcgcttcatgctacaacagcaaaactcatcaacgctcgctagataccgcatcagtggacctgtgtattaaacccaagacaattaggctagacgagacgaccctgtttttcacttggcccgatggccatgtgaccaaatacgacctgaattggctggtcaagaacagttacgaaggccagaagcagaaagttattcagccccgtatcctgtggaacgcagaaatctatcagcaggcgcaagtcccgtcagtggattgccagagcttccttgaaacgaacgagggcctgaagaagttcctgcagaatttccttctgtacggcattgcgtttgtggagaatgtacccccaacccaggaacacactgagaagttggctgaaagaattagcctgatccgagagacgatttatgggcgtatgtggtactttacctccgatttttctcgcggagatacggcttatactaaacttgctcttgatcgccataccgacacaacttactttcaggaaccatgtgggatccaggtgttccattgcttgaagcatgaggggaccggcggccggaccctgctcgtggacggattctacgcagctgaacaggtgttgcagaaagccccagaggagttcgaattactgtcaaaagtgccattgaagcatgaatatatagaagatgtgggcgagtgccataaccacatgatcggcatcggacccgtgctcaatatctatccctggaacaaggaactgtatctaatccgcctgtttaaggaaaagcagaacacagtgaatagacaatggaattcttctctccaatgcgacattcccgagcggatactgacatatcgccacttcgtgtctggaacaagcatagaacaccggggaagcctgatttag

SEQ ID NO: 209552 - DNA, 5889 bp, synthetic construct
  misc_feature 1..5889: note = Description of Artificial Sequence: Synthetic coding sequence
  source 1..5889: mol_type = other DNA
atgcgggagctggaggccaaggccaccaaggacgtggagcggaacctctccagggatctggtgcaagaggaggaacagctgatggaagaaaagaagaagaagaaagatgataagaaaaagaaggaggctgcacagaaaaaggctactgagcagaagattaaagtgcctgagcagatcaagcccagtgtatctcagccccagcctgccaattccaataacggtacctcaactgccacgtctacaaataacaacgccaaaagagccacagcaaataaccagcagccccagcagcagcagcagcagcaacaaccacagcaacagcaaccacagcaacaaccgcagcctcagcctcagcagcagcagcctcaacaacagcctcaggcactcccaagataccccagggaagtacctcccaggtttaggcaccaggaacataaacagctgttgaaaagggggcagcatttccctgtaattgcggcgaatctggggagcgctgtcaaggtgcttaacagccagagtgaatcttctgcactgacaaaccagcagcctcaaaataatggcgaggtccagaactctaagaatcagagtgatattaaccactccacctccgggtcccactacgagaatagtcaaagggggcctgtatccagcacaagcgactcatccacaaattgtaaaaatgcagtggtctctgacctttcagagaaggaggcctggccaagcgcaccaggatctgaccccgagctggcttcagagtgtatggacgcagattccgccagttcgagtgagagcgaaagaaacatcacaattatggcctctggaaacaccggcggcgaaaaggacggtcttcggaattctaccggtctgggatcgcagaacaaattcgttgtgggatcgtcctcaaataatgttgggcacgggtcctctaccgggccatggggcttcagccacggagcaattatctcaacttgccaggtcagtgtggatgctcccgagtccaagtctgagagcagcaataataggatgaacgcttggggaacggtgtcttcctcgtcgaatggaggcctgaacccgagtacccttaactccgcctcaaaccatggagcctggccagtgttggagaacaatggcttagccttgaagggaccagtgggttctggcagctcaggtatcaacatccagtgtagcactatcggccagatgccaaataaccagtcaatcaactcgaaagtgtcgggagggagcacccacgggacgtgggggtcactccaagagacctgtgagagcgaagtctctggaactcagaaagtctccttctccgggcagcctcagaacataactaccgaaatgaccggtccgaacaacacaaccaatttcatgacatcatcactgccgaactccggatcagttcagaacaatgaacttcccagttcgaatacaggagcctggagagtgagcacaatgaatcaccctcaaatgcaggcaccgagcggaatgaatggtacatccttgtctcatctgtcaaatggtgagagcaaaagcggcggaagctacggcaccacatggggagcctacgggtctaattatagcggcgataagtgctctggaccaaatggacaggcaaacggagatacagtgaacgctaccctgatgcaacccggtgtaaacggacctatgggtacgaactttcaggtgaacactaataagggcggaggcgtgtgggagagcggggctgccaattcgcaatcaacgtcatgggggtccggtaatggagcaaactccggcggcagccgccggggctggggaaccccagcccaaaataccggaacgaatctcccaagtgtcgagtggaataaactgccttcaaaccaacattccaatgatagtgccaatggcaatggtaagactttcactaatgggtggaagagtacagaggaggaagaccagggctctgcaacctcccagaccaatgagcagtcctcggtatgggccaagacaggcggtacggtcgaaagcgatggatctactgaatccacgggcagactagaagaaaagggtactggtgagtcacagtccagggacagaagaaaaattgatcagcacaccttgctgcaaagtatcgtgaatcgcactgatttggacccgagggtactcagcaattccggatgggggcagacaccaatcaagcagaatactgcctgggacaccgaaaccagcccacgcggcgagaggaaaacagataacggcaccgaagcctggggatcatcagccacgcagacatttaacagtggggcatgtatcgacaagacctctccgaatggcaatgatacatctagtgtctcagggtggggagatccgaaacccgctctgcggtggggggacagtaaaggaagcaattgtcaagggggctgggaagatgattctgctgccactggcatggttaagtcaaaccaatggggtaactgcaaagaagaaaaagctgcgtggaacgatagtcaaaagaataagcagggatggggcgacggccagaaaagctctcagggatggagtgtttcggcttccgacaactggggcgaaacctcccgcaataatcattggggcgaggctaataagaaatcttcatccggaggtagcgattccgaccgcagtgtgtctggttggaatgaactgggcaaaacaagctcttttacttggggcaataatattaatccaaacaattcctctggatgggacgaatcatccaagcccaccccttctcagggttggggggatccccctaaaagcaaccagagcctagggtggggggactcctctaaaccagtgtcgtccccagactggaacaaacaacaggatatcgtgggttcctggggaattccacccgctacggggaagccacctgggacaggttggctgggcggtcccatccccgctcccgcaaaggaggaagaaccaaccggatgggaggagccttctcccgaaagtatacgacgtaaaatggaaatcgacgacgggactagtgcgtggggcgatccatctaagtacaactataaaaacgttaacatgtggaacaagaacgtgcccaacggcaattcccggagtgaccagcaggcccaagtgcatcagctcctgacccccgcaagcgcgatatcaaataaggaagcttcatccggctcaggatggggcgaaccttggggggagcccagcacgcccgctaccacagttgacaatggaacgtccgcctggggcaaaccaatcgattccggcccctcctggggagagccaattgcggctgctagcagcacctccacctggggatccagcagtgtgggccctcaagccttaagtaagtctggtccaaagagcatgcaggacggttggtgcggcgatgacatgccgctgcccgggaacaggcctactggctgggaggaagaagaagacgtcgagattgggatgtggaactctaatagcagtcaagagctgaattcttcgcttaattggcctccctataccaagaaaatgagttctaagggattatctggtaagaaaagacgtcgagagcgcgggatgatgaagggtggcaataagcaggaagaagcttggattaacccctttgtcaagcagttcagtaacatctccttctctcgcgattccccagaggagaacgtgcaaagtaataaaatggatctcagtgggggcatgttacaggataaacggatggagatcgacaagcacagcttgaatataggagactataatcgcactgtagggaaaggtccagggagccggcctcagatctcaaaagagtcttccatggagcgaaatccgtactttgacaaggacgggattgtggctgatgaaagtcagaacatgcagttcatgtcaagccagagcatgaaactgcccccttcaaacagcgccctgcccaaccaagctctgggaagcatcgccgggctgggcatgcagaacttgaattccgtgagacaaaatgggaacccctctatgttcggggtgggcaacaccgccgcccagcccagaggaatgcagcagccacctgcacagcctctgagctctagccagcctaacctgcgggcccaagttccgccaccactactgtctccccaagtgccagtcagcctgctcaaatacgcccccaataatggaggcctgaatcctttgttcggcccccaacaggtggctatgctcaatcagctgagccagctaaatcagctctcgcagatctcccaacttcagcgcttactggctcagcagcaacgtgcacagtcacagcgctcggtgccctcagggaaccgcccccagcaggatcagcagggcaggccactgagcgttcagcagcagatgatgcagcagtcacgccagctggaccccaatttgcttgtgaaacagcagacccccccgtcccagcagcagcctctgcatcagcctgcgatgaaatctttcctcgacaacgtgatgccacacacaactcctgagctgcagaagggcccaagccccatcaacgccttcagcaactttcccattggcttgaattcaaacctgaacgtgaatatggatatgaacagcatcaaagagccccagtcccgcctgagaaagtggacgaccgtcgactcaatcagcgtgaatacaagtttggaccagaatagctccaagcatggagctatcagcagtggattccgcctggaagaatcgccctttgtgccgtatgactttatgaacagcagcacgtctccggcctctcccccgggtagtatcggagatgggtggccgcgggctaagtctcccaacggctcttcttcggtgaattggcctcctgagttcaggcctggcgagccttggaaagggtacccaaacattgacccggagactgacccatacgtgacccccggtagcgtgatcaataacctaagcatcaacaccgtgagggaagtcgaccatttacgagaccgcaactctggaagttcatccagcctgaatacaacattgccatccacttctgcctggtcgtccatccgcgccagcaattataatgtccctctcagcagtacagctcagagcacatccgcccgcaactctgatagtaaacttacctggtctcctggctcagttaccaacacatcactagcacacgagctgtggaaagtgcccttgcctcctaagaatattacagcccctagtaggccccctcccggactgacgggccagaaaccgccactcagtacttgggataactcccctcttagaatcggaggcggatggggcaatagcgacgctaggtacactcccgggtcctcctggggagagtccagttccggccggatcactaattggctcgtactgaagaatcttaccccacagattgacggaagtaccctgcgcaccctctgcatgcagcacgggccactaatcacctttcacctgaatctgccacatggcaatgctctagttagatactcatccaaggaggaggtggtcaaggcacagaagagtctacacatgtgtgtgcttgggaacactactatcctggctgagttcgcctctgaggaggaaatttccagattcttcgcccagagccagtccttgacgccatcgccgggctggcagagcctggggtcttcccagagccgcttgggttcactggactgctcccactctttcagctcgcggactgacttgaatcactggaacggggccggactgtctgggactaactgcggcgacttgcacggcactagtttgtgggggaccccgcactatagtacatcactttggggacctccatcttcttctgacccccgtggtatttccagtccctcaccaatcaatgcattcctgagcgtggaccacctgggaggaggtggcgaatccatgtag

SEQ ID NO: 209553 - DNA, 1323 bp, synthetic construct
  misc_feature 1..1323: note = Description of Artificial Sequence: Synthetic coding sequence
  source 1..1323: mol_type = other DNA
atggacatgaacagcatcaaggagccccagagccggctgcggaagtggaccacagtggacagtatcagcgttaacacgtctttggatcagaactccagtaaacacggtgctatcagcagtggcttccggctggaggagtcaccctttgttccctatgacttcatgaactcgagcacttccccggccagtcctcctggaagcattggtgatggctggccccgcgccaagtctccaaacggatctagctctgtgaattggccacccgaattccgtccaggtgaaccgtggaagggctatccgaacatagaccccgaaacggatccatacgtgacccccggaagcgtgatcaacaatctgagtattaacaccgttagggaggtggaccacctccgcgatagaaacagtggatcttcctcgagcctgaatacaaccttaccatctacgtcagcgtggtctagcattcgtgcctctaactacaatgtgccgctctccagtaccgcacagagtactagcgctaggaatagcgactccaaacttacatggagcccaggatctgtgacaaatacatccctggcccatgagctgtggaaggtccccctcccacccaagaacataacggccccttcgaggccccctcctggattgaccggacaaaagcctcctctttctacgtgggataacagtccactccgtatcggaggtggctggggcaactctgacgcacgctacacaccaggttctagctggggggagtcctctagtggtaggatcaccaactggctcgttttgaagaacctgacccctcagattgacggatctacgctgaggacgttgtgcatgcagcacgggcccctgatcacattccacctaaatcttcctcacggaaacgcactggtgcgctatagctcgaaggaagaggtggtaaaggcacagaaatctcttcatatgtgtgtgctcgggaacacaaccatcctggccgagttcgctagtgaagaggagatctcaagatttttcgcccagtctcagtctctgacccctagtcctggctggcagtccctgggatcgtctcagtccaggctgggaagtttagattgttcccacagtttcagctctcggacagatctcaaccactggaatggggccggccttagcggtacaaactgcggggacctgcacggcaccagtttatgggggaccccccattatagcacaagtctgtggggcccgccctcaagcagcgacccaaggggcatttcgagccctagtccaatcaatgcctttctcagtgtggatcaccttgggggcggcggggaatcaatgtag

SEQ ID NO: 209554 - DNA, 5073 bp, synthetic construct
  misc_feature 1..5073: note = Description of Artificial Sequence: Synthetic coding sequence
  source 1..5073: mol_type = other DNA
atggccaccggcagcgcccagggcaacttcaccggccacaccaagaagaccaacgggaataatggaaccaacggggccttagtgcagtccccatcgaatcagagcgctctcggcgcaggcggcgccaactccaatgggtctgcagctcgggtgtggggagttgccacagggagttcctcggggttggcccactgcagcgtatctggaggagacgggaaaatggacaccatgatcggggacggacgatctcagaactgttggggagcatcgaactctaacgctggaattaatctcaatctgaaccctaacgcgaatccagccgcgtggcccgtgctcggtcacgaggggaccgtcgcaacaggcaacccctcttccatttgctctccggtgagcgccattggtcaaaatatgggcaatcagaacggcaaccctaccggtactctcggagcctgggggaatctgctgccccaggagtccactgaacctcagaccagtaccagccagaacgtgagcttttccgctcagccacagaatctcaatactgatggcccaaacaacactaatcccatgaacagtagtcccaaccccattaatgccatgcagaccaacggcttgccaaattggggcatggccgtgggtatgggggcaattattcccccacatctgcagggcttgccgggcgccaacggcagcagcgtaagtcaggtgagcggcgggtcagccgagggtatctcaaattcagtctggggattgtcacccggcaacccagctacagggaatagcaactcaggattctcacaagggaatggcgacaccgtcaattctgcactgagcgctaaacagaacggctctagctctgccgtgcagaaggagggatccggcggcaatgcatgggatagtgggcctccagccggacccggaatacttgcttggggcagggggtccggcaataatggagtcggcaacatccatagcggagcctggggacacccttcaagatctactagtaacggagtgaacggtgagtgggggaagccaccaaatcagcacagtaactccgacatcaatggaaaaggatccacaggttgggaatccccctcggtgacttcccagaatcctaccgtgcaacctggcggtgagcacatgaatagctgggccaaggccgcaagctccgggacaaccgcctctgagggctcctccgacgggagcggcaaccataacgaaggatccacaggcagggaaggaactggagaagggcgacgacgggataagggaatcatcgaccagggccatattcagctacctaggaacgatttggacccccgtgtgttgagcaacaccggctggggacagactcctgtcaagcagaacacagcttgggaattcgaggagtcaccgcgctccgagcggaagaacgacaatgggacggaggcgtggggttgcgcagccacacaggccagcaattcggggggaaagaatgacggctcaataatgaattcgactaataccagttccgtgtcagggtgggtgaatgcacctcctgccgccgtgcccgctaacaccggctggggggatagcaacaacaaagccccaagcggccccggcgtttggggcgacagcatttcatctaccgccgtctcaacagcagcagctgctaagtccggacacgcttggtccggcgccgccaaccaggaggacaagagtcccacttggggggaaccacccaagccgaaatcgcagcactggggtgatggacagagatcaaaccccgcttggtctgcaggaggaggagactgggctgacagctcatcggtactcggccatctgggagacgggaagaagaacggatccggttgggatgcggacagtaacagatccgggtccggctggaacgataccactcgctctggaaactctggctggggcaatagcaccaacaccaaagccaacccaggaaccaactggggtgagacccttaagccaggacctcagcaaaactgggcatcaaaacctcaggataataatgtgtccaattggggcggcgccgcatccgtaaagcagaccggcactgggtggattgggggcccggtcccagtgaagcagaaagatagcagcgaggcaaccggctgggaggagccctccccaccctccattcggcgtaagatggagatcgacgacggcacctctgcatggggcgacccttccaattacaacaataaaactgtgaacatgtgggaccgcaataaccctgttatccagagttcgacaacgaccaataccaccacgaccacaaccaccaccacatcaaatacaacacatcgcgttgaaaccccccccccccaccaggcaggaactcagctgaatcggagcccactgctgggacccggtcgcaaagtaagcagcggctggggcgagatgcccaatgtgcatagtaagacagagaactcttggggcgagcctagcagcccatccaccctggtcgacaacggcaccgcagcctgggggaagccaccctcctctggcagtggatggggcgaccatcctgccgaaccaccagtggccttcggcagggctggggccccggtggcagcgagcgcactgtgtaagccagcctccaaatctatgcaggaaggctgggggagcgggggggacgagatgaatctttcgactagtcagtgggaagacgaggagggggatgtttggaacaatgctgcctctcaggagagtacctctagctgttcaagctggggcaatgcgcccaagaaaggcctgcagaaggggatgaagacatctggcaagcaagatgaggcctggatcatgtctaggctgattaagcagttgaccgacatgggttttccgcgagaacccgctgaagaagccctgaagagtaacaacatgaatcttgatcaggctatgagcgcgctcctggagaagaaagtggacgttgacaagagaggcctcggagtgacagatcataacggtatggcagctaagccactagggtgccggcctcctatctccaaggaatcctctgtcgaccgaccgacgtttttagacaaggacggcggacttgtcgaggagcctacaccctcaccttttctgccctcaccaagcttaaaactccccctttctcattcagccttaccctcccaggctctgggtggaatcgcttcaggcctaggcatgcaaaatttgaatagctctaggcagatccctagcgggaatctgggcatgtttggcaactccggcgcggctcaagcccgcactatgcagcagccaccccagcctcctgtacaacccctgaattcgtcccagcccagcttgcgggctcaggtcccccagtttctgagcccccaggtgcaagctcaactgctccagttcgccgctaagaacattgggctgaatccggccttactcacatctcccatcaatccacagcacatgaccatgcttaatcaactgtatcagttgcagctggcataccagaggctgcagatccaacagcagatgctacaggctcagaggaacgttagcggttccatgcgacagcaggagcaacaagtggcccgcacgatcacaaacctccaacagcaaatccagcagcaccaaaggcagctggctcaggctcttctcgtgaaacagcctcccccgcctcctcctcctccccacctcagcttgcatccaagcgccgggaaatcggctatggattccttcccctctcaccctcagacacccggactgcccgacctccagacgaaagagcagcagtcttcaccaaacaccttcgccccttatccactggccggcttgaatcctaacatgaacgtgaattctatggacatgacagggggtctgtccgtcaaagacccttcacagtctcagtctcggctcccacagtggacacacccaaattccatggacaacttgcccagtgcagcttcaccgctggagcagaatcctagtaagcacggggccatacctgggggcctctctatcgggccgccgggcaagagtagcatcgacgatagctacggcagatatgatcttatccagaatagtgaaagtcccgcctccccccccgtcgccgtcccgcattcttggagtagagcaaaatccgattccgataagatttccaacggatccagcatcaactggccacctgagttccacccaggtgtgccttggaaggggctacagaatatcgatcccgagaacgatcctgatgtcacccctggatccgtgcctaccgggcccacaataaacacaactattcaggacgtgaatcgatatttactgaagagtggcggaaaactgtccgatatcaaaagcacatggagctccggtccaacgagccatacccaggcgagcctgtctcatgagctttggaaggtcccgcggaattcaaccgctccaacacgcccacccccaggtctgacaaacccgaaacccagttcgacctggggggcatccccacttggctggacctcttcgtacagctccggttcggcgtggtccactgatacttccgggcgaacgtcttcctggttggtactgcgtaacttgacccctcaaattgatggaagcactctccgtactctttgtctccagcacggcccactcataacattccacctcaacctgactcaagggaatgcggttgtgaggtattcttcgaaagaggaagccgccaaggctcagaagagtcttcacatgtgcgtgctgggcaacacaactatcctcgctgaatttgccggagaggaggaggtgaatcgattcttggcccaagggcaggcccttccgcctacttcttcatggcagtccagctcagcctcatcacagcctagactgtcagcggccggtagctctcatggcctcgttcgctcagatgccggacactggaacgccccttgcctgggggggaaaggcagttccgaattactgtggggtggggtcccgcagtattcgtctagcctctggggcccgccatccgccgatgactcaagagtgatcggatccccgacccccctgaccacactgctaccaggcgatcttctgtcgggggagtccctgtag

SEQ ID NO: 209555 - DNA, 5181 bp, synthetic construct
  misc_feature 1..5181: note = Description of Artificial Sequence: Synthetic coding sequence
  source 1..5181: mol_type = other DNA
atggccaccggcagcgcccagggcaacttcaccggccacaccaagaagacaaacggcaacaacggaacaaacggtgctctggtgcagtcacccagtaaccagtccgcactgggagccgggggagccaattcaaacggctccgccgcccgcgtttggggggtggccacgggatcatcaagtgggttggcccactgctcagtgagtggaggggatggaaagatggacactatgattggcgatggacgctcccagaactgttggggagcaagcaattctaatgctggaattaacctcaaccttaaccctaatgccaacccggctgcatggccagtgctcggccatgagggcacggtcgccactgggaatccctcttcaatctgttcccccgtcagcgctatcggccagaacatggggaaccagaatggcaatcccaccggaaccctgggagcatgggggaacttgctgccacaggagtctaccgaaccacagacttctaccagccagaacgtctcgtttagcgctcagcctcagaatctcaatactgacgggcctaacaacactaaccccatgaatagttcaccaaacccaattaatgcaatgcagaccaacggtctgcccaactggggcatggctgtgggcatgggtgctataataccacctcacctccagggtttgcctggagccaacggatcgtctgtctctcaggtcagcggaggcagcgcagaagggatatccaacagcgtgtgggggctgtcgcctggaaacccagccaccggcaatagtaacagtggcttttcacagggaaatggcgacactgtgaactccgcactctctgccaaacagaatgggtcttcttccgccgtacagaaggaaggcagtgggggcaacgcctgggactctggcccacctgctgggcctgggatacttgcctggggcagaggaagcggcaacaatggcgtgggtaatatccacagtggtgcttgggggcaccccagccggagtacttctaatggcgtcaacggggagtggggaaaaccaccgaaccaacacagtaactctgacataaacgggaaaggctctactggatgggaatctccgagcgtgacttctcagaatcctactgtacagcctgggggcgaacacatgaattcctgggcaaaggccgcaagttccgggaccaccgcatcagagggttcctcggacggcagtggaaaccacaatgaggggtctactggaagagagggaactggcgaaggaaggagaagagacaagggtattattgatcagggccatattcagctcccgagaaatgacctggaccctcgggtgctatccaacacgggatgggggcagacgccggtgaaacagaacacagcgtgggagttcgaggagtctccccggtcagagcggaagaatgataatggtacagaggcctgggggtgcgcagcgacccaggcatccaatagcggggggaagaatgacgggtcaattatgaatagcactaatacttccagtgtcagcggctgggtgaatgcccctcctgctgcagtgcccgcaaatactgggtggggggatagtaacaacaaggcgcccagcggcccaggcgtctggggcgattccatttcctctactgccgtgtcgaccgcagcggcggccaaaagcggccacgcctggtccggggctgccaaccaggaggacaagtctcccacatggggggagccgcccaagcccaaaagccagcattggggcgacgggcagagaagtaatccggcatggtccgccggaggaggcgattgggccgactcctcctcagtcctgggccacttaggtgacggcaaaaagaatggctcaggatgggacgctgacagtaatcggtcagggtctgggtggaatgacacaaccaggtcagggaatagcggctggggcaatagcacaaatacaaaagcaaatcctgggacgaattggggcgaaactctgaagccagggccgcagcagaactgggcgtctaaacctcaggataataacgtatcgaactggggaggggcggctagtgtgaaacagacaggtaccgggtggattggcggacccgtcccagtaaaacagaaggattcctccgaggccacaggatgggaagagccatctcctccaagcatccgacggaagatggaaatagacgacggtactagcgcctggggcgacccttccaactataataacaaaaccgtcaatatgtgggaccgtaataatcctgtcatccagagttccacaacgacaaatacaaccactacaacaacgaccactacatccaataccacacatagggttgagacccctccccctcaccaagcaggcactcagctcaatcgtagccccctgcttggccctgtgagtagcggctggggcgagatgcctaacgtccactccaaaaccgagaacagctggggcgagccaagttccccctcaactttggtggacaatggaacggctgcatgggggaaacctcctagctccggctctggctggggggatcaccccgccgagcccccggtcgcttttggccgagctggcgcacccgttgctgccagtgccctatgcaaacccgccagtaagtcaatgcaagagggatggggctccggaggggacgaaatgaacctttccacctcccaatgggaagatgaggaaggtgacgtctggaataacgccgcctctcaagaaagtacctccagttgttcttcctggggtaacgctccaaaaaaggggttgcagaaaggcatgaagacctcaggcaagcaggacgaggcatggattatgtctagacttatcaaacaactgacagacatggggtttcctagggaacccgctgaagaggcattaaagagtaataatatgaatctggatcaagcaatgagcgccctcttggagaagaaagtggatgtagataagaggggcctgggagtgacagatcacaacggtatggctgccaaacctctcggctgcaggcctccgatatccaaggagtcctcagtggaccgtcccacatttctggataaggatgggggattggtggaggagccgactccctctccatttctgccttcaccatccctgaaactgccactgtcgcacagcgccttaccctcgcaggccctgggcggtatcgccagcgggctgggaatgcagaatctgaacagttccaggcaaatcccgtcaggtaacctggggatgttcggtaattcgggcgccgcccaggccagaaccatgcagcagccgccacagcctccagtgcaaccattgaattccagccagcctagcctgagagcccaagttccgcaatttctgtcaccacaggtgcaggcccagctactccagtttgccgcaaagaatatagggctcaaccctgccctgcttacatcgcccattaatccgcagcatatgaccatgctaaatcagctctatcagctgcaacttgcctatcagagattgcagatccagcaacaaatgctgcaggcccagcgcaatgtcagtggatccatgcggcagcaagagcaacaggttgctcggactataacgaacctgcagcagcagatccagcaacatcagcgacagcttgctcaggcacttctggtcaaacaaccaccacctcctccgccgccaccgcatctgagtctgcacccctctgccgggaaaagcgccatggactccttccccagccacccacagaccccaggtctaccggacctgcagactaaggaacaacagagcagccctaatacttttgcaccctatcccctggctgggcttaatccaaatatgaacgttaacagcatggatatgacaggtgggctctctgtgaaagaccccagtcagtcccagagccggctccctcagtggacgcaccctaacagtatggacaatctcccatccgctgcctcccctctagagcagaacccgtcaaagcatggcgcaattccaggcggcctctccatcggcccacctggaaagtcatctatcgacgacagttatgggaggtacgatctgattcagaatagtgaatctcccgcctcacccccggtggctgtcccacactcctggagcagggccaaatcagattctgataaaatttctaacggcagctctattaattggcctccagagtttcaccccggcgtcccttggaaaggcctccagaacatcgaccccgagaatgatccagacgttacgccaggcagcgttccaacaggccccacaattaacaccaccatccaagacgtcaacagatacctgctaaaatcagggggctccagtccccccagctcgcaaaacgctacattgcctagctcgagtgcctggcctctctccgcaagcggttatagtagcagcttcagcagtatagcctccgctccttccgtcgcagggaaactaagcgacatcaagtcaacgtggagtagtggaccaacctcacatacacaagcaagtttaagtcatgagctttggaaggtccctcgcaattctaccgcacctactagacccccacccggccttaccaatcctaagccttcttcaacttggggcgcaagtcctttagggtggaccagtagctattcgtctggatctgcatggtcaacagatacttctggcaggacgtctagctggctagtgctgcgcaatctaactccccagatcgacggctcgaccctgcgaaccttatgtctacaacacggtccattgatcacctttcacctgaatctgactcaaggaaacgctgtcgtgaggtactcgagtaaagaggaagctgcaaaggcacagaagagcttgcacatgtgtgtgctggggaatacaactatcttggccgaatttgctggtgaagaagaggtgaatcgtttcctcgcccaaggacaggccctcccgccaactagttcctggcagtcatcgtccgccagctctcaaccacgactatccgctgccgggtcctcccacggtctggtacgctccgatgccggccactggaacgccccttgtctcggcggtaagggttcatcggagttgctgtggggaggagtcccacaatatagttcaagtctgtgggggccgccctctgccgatgattcaagagtgatcggttctcccacccccttaaccacactcctgcctggagacttgctttctggcgaatctctgtag

SEQ ID NO: 209556 - DNA, 5181 bp, synthetic construct
  misc_feature 1..5181: note = Description of Artificial Sequence: Synthetic coding sequence
  source 1..5181: mol_type = other DNA
atggccaccggcagcgcccagggcaacttcaccggccacaccaagaagaccaatggcaataatggcacgaacggtgccctggtgcagagtccttcaaatcaaagtgccttgggcgccgggggtgcaaactctaacggatccgctgccagagtatggggggtggctacaggctcttcctcaggcttggcacattgcagtgtgtctggcggcgatgggaagatggatactatgattggagatggacgctcccagaattgttggggtgcgtcaaacagcaatgcagggatcaatttaaatctaaacccgaatgcaaaccctgccgcctggccagtcttggggcatgaggggactgttgccaccggaaacccttcgagcatctgtagccccgtctctgccattggacagaatatgggaaaccagaatggaaaccctaccggcactctaggagcgtgggggaatcttttgcctcaagaatctactgagcctcagacaagcacttcacagaacgtgagcttcagcgcacaaccccaaaacctgaacacagacggacccaataacaccaatcccatgaattcatcccctaacccaatcaatgcaatgcagacaaatggactacctaattggggcatggctgtgggtatgggagccattatacctccccatttacagggccttccgggcgctaatggttcaagtgtgtcccaggtcagcggtggaagtgccgaggggatctccaacagcgtctggggtcttagcccaggcaaccctgccaccgggaacagcaattctggattctcacagggtaacggcgatacagtgaattctgctttaagcgctaagcaaaacgggtccagctccgcggtccagaaggaaggaagtggcgggaacgcctgggattcagggcccccagccggccccggaatcctcgcctggggtcgcggcagcggcaataacggtgtggggaatatacatagtggggcatggggtcatccttcacggtctacttccaatggggtcaatggtgagtggggaaaaccccccaatcagcactctaatagcgacatcaatggtaaaggatctacaggttgggaatcccctagcgttacatcacagaacccaacggtgcagcccgggggcgagcatatgaactcctgggccaaggctgcatcgagtgggaccacagcttctgaaggctccagtgatggcagcggtaaccacaatgaagggtccacaggaagggaaggcacaggagaaggacgcaggcgagacaagggcattatagatcagggccacatccagctgccccggaatgacctggacccccgtgtcctttctaacactggatggggccagacaccggtcaaacaaaataccgcttgggagtttgaagaaagccctcgctcagaacggaagaatgataacggaactgaggcctggggatgcgcggccacacaggcaagtaattctggaggcaaaaacgacggatcgatcatgaattcaaccaacacctctagcgtttcagggtgggtgaatgctccccccgccgctgtaccagcaaacacaggctggggcgacagtaataacaaagctccatccggccctggagtatggggggacagtatcagcagcaccgccgttagcaccgcggccgcagccaaatctggtcacgcctggtcgggcgccgcgaatcaggaagataaatcacctacatggggcgaaccaccgaaacctaagtcccagcactggggcgatgggcagaggtccaacccagcttggagcgcaggcggaggagattgggctgatagtagctccgttttggggcacttaggagacggcaagaagaacgggtcaggctgggacgctgatagcaacagaagtggaagcggatggaacgacacaactaggtcaggcaactccggatggggcaactccactaataccaaagcaaatcccggcaccaattggggtgagacccttaagccagggccacagcagaattgggcctcgaaaccgcaggacaataacgtcagtaactggggtggcgcggcctccgtaaaacagaccggtaccggatggatcggcgggcccgtgccagtgaaacagaaagatagttcggaggccaccggatgggaagagccttcacctccctcaatccggagaaagatggagatagatgatggcacgagtgcttggggtgacccatctaattacaacaataagactgtgaacatgtgggatcgtaacaaccccgtaattcagagtagcacaaccacaaatacaaccaccaccaccaccacgactacttctaacaccacacaccgagtcgaaacgcctccccctcaccaggccggtacacaactcaacaggagccccctgctcgggccggtgtcttcgggatggggagaaatgccaaacgtgcacagcaaaactgaaaactcgtggggcgaaccttcaagccccagtaccctggtggataatggaacagccgcctgggggaaacctccatcttctggctccggatggggagaccaccccgccgagcctccagtggcctttggacgtgcgggagcgcctgtggccgcctctgctttatgtaagccagcctccaagtcgatgcaggaggggtggggtagtggaggggacgaaatgaatttatccaccagccagtgggaagacgaagaaggagacgtttggaacaacgcagcgagccaagagagcaccagcagctgcagctcttggggcaacgctccgaagaaagggctacagaagggcatgaaaacctccggtaagcaagatgaagcatggataatgagccgcctcatcaaacagttaaccgatatggggttcccgagagagcctgccgaagaagcgctcaaatctaataatatgaacctcgaccaagcgatgagcgctctgctggaaaagaaggtagatgtggacaaacgggggctcggggtgaccgaccataacgggatggcggcaaaacctctgggctgtaggcccccaattagcaaggagtcatcagttgaccgacctaccttcttggataaggatggcggactggttgaagaacctactccatctccattcctcccctctccaagcctcaaattgcctctgtcacatagtgccctaccttcgcaggccctgggaggcatagcctccgggctcggtatgcagaatcttaactcatcaagacagatccctagcggaaaccttggcatgttcgggaattccggggcagctcaggctagaactatgcaacagcctcctcaaccccccgtccagcccctgaatagttcccagccaagcctccgtgctcaggtcccacaatttctgtcaccgcaggttcaggcccagttactgcagtttgccgcgaaaaacatcgggctgaacccagccctgctgacttctccgatcaacccacaacacatgacaatgcttaaccagctgtatcagcttcagctagcgtatcaacgactgcagatccagcagcagatgttgcaggcccagaggaacgtaagtggatccatgaggcaacaggaacaacaggtggccaggaccatcaccaacttacaacaacaaatacaacaacaccagcgacaactggctcaggcactcctcgtcaagcagccaccgccgcccccaccacctcctcacttaagtctgcacccaagcgctggaaaatccgccatggacagctttccctcgcatccccagactcccggcctcccggaccttcagactaaagagcagcaatctagccctaacacctttgccccatatccattggcgggcctgaatcctaacatgaacgtgaattccatggacatgacagggggcctgagcgttaaggatcccagccaatcacagagcaggctgcctcaatggacccacccaaacagcatggacaacctgccttcagccgcgtcacctctggaacagaatcctagtaagcacggggccattcccggaggcctttccatcgggcccccaggaaaatcttcaatcgatgactcatacgggaggtacgatctcatccagaactctgaaagtcccgcttccccgccggtggccgtacctcactcttggtcacgagccaaatccgactctgataaaatttcaaacgggtctagcattaattggccaccggaatttcatcctggagttccatggaaaggcctgcagaacatcgatcctgagaacgatcctgacgtcacaccagggtcagtccccacgggccccaccataaatactacaatccaagacgtcaataggtacctcctaaaatcggggggatcctcacccccatcatcccagaacgcgacactcccatcatcctcagcctggcccctgtcagcttctgggtactcaagcagtttctcatcaattgcttcagctccctccgtggctgggaagcttagcgatatcaaatccacatggtccagcgggcctacatctcacacccaggccagcttaagccatgagctttggaaagtgccacgcaactccacagcccctacaaggccaccacccgggcttacaaatcccaaaccatcctcgacgtggggcgcttcacctttagggtggaccagttcatactcttccggttccgcatggagtaccgacacttctggccgcacttcctcctggcttgtactcagaaatctcactccacagatagacggcagcactttacgcactctgtgcctccagcacggcccactcattacattccacctgaacctgacacagggtaacgcagtcgtgagatattcttctaaagaagaggccgcgaaagctcaaaagagcctgcatatgtgcgtgttgggaaacaccactatactcgctgagtttgccggtgaggaagaggtgaaccgcttcctcgctcagggccaggccttgccccccaccagctcctggcaatcctcatccgcctcctcccagccacgattgtcagccgcaggaagttctcacggcttggttagatctgacgccgggcactggaacgcaccttgtttgggtggcaaggggtcatccgagctgctgtggggcggggtgccccagtattcgtcctcactttggggacctccaagcgccgatgacagccgggtgatcgggagcccaaccccactgaccacactcctgccaggagaccttctcagcggagagtcattgtag

SEQ ID NO: 209557 - DNA, 5073 bp, synthetic construct
  misc_feature 1..5073: note = Description of Artificial Sequence: Synthetic coding sequence
  source 1..5073: mol_type = other DNA
atggccaccggcagcgcccagggcaacttcaccggccacaccaagaagacaaacgggaataatggtacaaatggcgctctggtgcagtctccgtccaatcaaagtgcgttgggcgcgggcggagctaatagtaatggtagcgccgcccgagtgtggggggtggctaccggctcctcttcagggttggcccattgctctgtaagcggaggcgacggcaagatggataccatgattggtgatggcaggtcgcagaactgctggggagccagcaactccaacgccggcattaacctaaatctgaaccccaatgccaatcctgccgcgtggcccgtgcttgggcatgagggcacagtagcaaccggaaacccttcgagcatctgcagtcctgtgagcgcaatcgggcagaatatgggaaatcagaatggaaatccaaccgggacgctaggagcttggggaaatctgctgccacaggagtctacagagcctcaaacgtctacttcccagaacgtaagtttctcggctcagcctcagaacctgaataccgatggtccaaacaacaccaatccaatgaattcctcccccaacccaattaatgccatgcaaactaacggactgcccaattggggtatggctgttggcatgggcgcaatcatcccgccgcacctacagggcttgccaggggccaacggcagctctgttagccaggtgagcggcggctccgcggagggcatctccaattcagtctggggattaagtcccggaaatcctgctaccggcaacagcaattcaggctttagtcagggtaatggtgatacagtaaacagtgccctttccgccaagcaaaacgggtcatcatccgccgtccaaaaggagggcagcggggggaacgcatgggatagcggtcccccagcgggacctggtatcctggcttgggggagaggatcaggcaacaatggggtggggaacatccacagtggcgcctggggccacccttctcgttcgacaagcaacggggtgaatggcgaatggggcaaaccacccaatcagcatagtaatagcgacatcaatggaaagggaagcaccggttgggagtccccgagcgttacctcgcagaatcctacggtccaacccggtggcgagcacatgaactcctgggccaaggccgccagtagcgggactacagcatctgagggaagctctgatggctccgggaaccataacgaagggtccaccgggcgcgaggggaccggtgaagggcgccgaagagacaagggtatcattgaccaaggacacattcagctgccccgcaatgatctggaccccagagtgcttagtaacaccggctggggccagactcctgtgaagcagaatactgcttgggagtttgaggaaagcccacgtagtgaacgtaaaaacgataacggcactgaggcgtggggatgtgccgcaacccaggccagcaactccggaggcaagaacgatggcagtatcatgaactccacgaacaccagttctgtgtctggctgggtgaacgccccacctgctgccgtaccagccaacacagggtggggcgattcgaacaacaaagcgcccagcggccccggagtgtggggagacagcataagcagtactgctgtgtcaaccgccgccgctgctaagagcggacacgcctggtcaggtgcagcgaaccaagaagacaaaagccccacttggggtgaacctcctaagccaaagtctcaacattggggggatggtcagaggagcaacccggcttggtcagccggcggcggcgactgggcagattctagcagcgttttgggccatctgggtgacgggaaaaaaaatggctccggatgggatgccgactcgaatcggtccgggagcggttggaatgatactacaagatcaggcaactcaggctggggcaattctaccaacactaaggccaatcctggtacgaattggggagagacactgaagcccggcccccagcagaactgggcctccaagccacaagacaacaacgtatctaactggggaggggccgcatcggtgaaacaaacaggaacagggtggatcgggggacctgttccagtaaagcagaaggactcatcagaggctacgggatgggaagagccaagccccccatctatccggcggaagatggagatagatgacggtacttcagcctggggcgatccttctaattacaataacaaaacagtgaacatgtgggatagaaacaatcccgtgatacaaagctctactaccacgaacacaaccacaacaaccactaccaccacatccaacaccacccatagagtggaaactcccccgccacatcaggcaggaacccagcttaaccgctctcctcttctgggaccagggaggaaggtttcgtccggctggggtgaaatgccgaatgtccactccaagacagagaactcatggggagagccgtcgagtccctccaccctggtggataatggtaccgccgcatgggggaagcccccgagctccggctcgggatggggcgaccatccagcagagccacctgtggcctttggcagggcaggggccccggtcgcagcatcagccctctgtaagccagccagcaaatctatgcaggaggggtgggggtctggcggagatgagatgaatctgtccacttcccagtgggaagacgaagagggtgatgtttggaacaatgcagcctcccaggagtccacttcctcctgttcgagttggggcaacgcaccgaaaaagggtctgcaaaagggtatgaaaacaagcggtaagcaggatgaagcatggattatgtctcggctgatcaagcaactcaccgacatggggttcccacgcgagcctgccgaggaagccctgaagagcaataacatgaacctggaccaggccatgtctgctctgctggaaaagaaagtcgacgtggataaacggggcctgggtgtgacagaccacaacggaatggccgccaaaccactcggatgtcgaccaccaatatctaaggaatcctctgttgaccgccccaccttcttggataaagatggggggctagtggaagaacccaccccttccccgtttctgccatccccatcccttaagctcccccttagtcattctgctctgccttcccaggccctgggaggaatcgccagtggattgggtatgcagaacctgaactcaagtcggcagatcccctccggtaaccttggaatgttcggaaattccggggcggcccaggcccggactatgcagcagccaccacaaccccctgttcagcctctgaacagctcgcaacctagcctgagagcccaggtgccacagtttctgtccccgcaggttcaagcccaacttctgcagttcgccgcaaaaaacattggcctaaatccagctcttctgacgtcaccgataaatccccaacacatgacgatgcttaaccagttataccagctccagctggcatatcagcggctgcaaatccaacagcaaatgttgcaggcgcagcgtaacgtgagtgggtccatgcgtcagcaggagcagcaagtagcccgcactataaccaatcttcagcagcaaatccagcagcatcagaggcagttggcccaggcgctcttggtgaaacagccccccccaccaccacctcccccacacctctcattgcaccctagtgctggcaagtccgccatggattctttcccgagtcacccacagaccccagggcttcccgaccttcagacaaaagagcaacagtctagccccaacaccttcgcaccctacccactggctggcttgaacccgaacatgaatgttaacagtatggacatgaccgggggactgtctgttaaagatccatcccaaagtcagtctcgcctgccacagtggactcacccaaatagtatggataacttaccatcagccgccagcccgctggagcagaacccaagcaaacacggggcaatacctggcgggcttagtatcggtcctccaggcaagtcctccatagacgactcctacggcaggtatgatcttattcagaactcagaatctcctgcctcccctcccgtcgctgtgccccatagctggagccgcgcaaagtccgactcagataagatttcgaatggctcgtctataaattggccacccgagttccatcccggcgtgccatggaagggtctgcagaatattgaccccgagaatgacccagatgttactccaggttctgttcctacagggcccaccatcaataccacaatacaagacgtcaacagatacctgctgaaatccggtggcaaactgtctgacatcaagagcacctggagctccggtcccactagccacacgcaggcgtccctcagccatgagttgtggaaagtgccccggaatagcacagcgccaacccgaccgccgcccggtctcacgaacccgaaaccgtcttctacatggggagcaagcccccttggctggacctcatcctatagctctggttccgcgtggtccaccgacacctctgggaggacaagctcatggctggtcctgagaaatttgacgccacaaattgatggatctactctacggactctgtgcctgcagcacggacctctgatcacttttcacttaaatctaactcagggcaatgcggtggtgagatatagttccaaggaggaggccgctaaggcgcagaagtccctccatatgtgtgtgctcggcaatacgacaatcctcgcagaattcgccggggaggaggaggtgaatcgctttctggcccaagggcaggccctcccccctacttcatcctggcagagttccagtgcaagcagccagccaaggctgagtgccgctggctcctctcacggactggtgaggtcagacgccggccactggaacgccccctgcttgggcgggaaagggagtagcgagctcctgtggggaggagtgccccagtacagttcttcgctgtgggggccgccctctgcggatgacagtcgggtgatcggctcgccaaccccattgacaacgctactgccaggggatttgctgtctggggagtccttatag

SEQ ID NO: 209558 - DNA, 5073 bp, synthetic construct
  misc_feature 1..5073: note = Description of Artificial Sequence: Synthetic coding sequence
  source 1..5073: mol_type = other DNA
atggccaccggcagcgcccagggcaacttcaccggccacaccaagaaaaccaatgggaacaacggaaccaatggtgccctggtgcaatcacccagcaatcaaagcgcactcggtgctggcggcgcaaacagcaacggcagtgcagcccgcgtgtggggcgtggccacgggatcctcatctggattagctcattgttctgtgtctggcggagatggcaagatggataccatgatcggcgatggccgtagccagaattgttggggtgcatccaatagtaatgctggaatcaacctgaatctcaaccccaatgccaacccggccgcttggccagtgctgggacatgaggggacagttgcaactggaaatccaagctccatctgctcccccgtaagcgccattggtcagaacatgggaaatcaaaacgggaatccaacgggcacactgggtgcctgggggaatctcctgccccaggaatcaacagagccacagacgtcaacatcacaaaacgtctcattttccgcgcagccacagaacctgaatactgacgggcccaataacacaaatcctatgaattcctctcctaaccccatcaacgctatgcagacaaatggcctacctaactggggaatggcggtcgggatgggcgctataatccctcctcacctgcaggggcttcctggcgcgaacggatcctctgtctcccaggtgtctgggggctccgctgagggaattagtaattctgtgtggggtttatctcctggcaatccagccactgggaactccaattcagggttctcgcaggggaatggagacaccgtgaatagtgctctgagcgccaaacagaacggctctagtagcgctgtgcaaaaggagggttcaggtggaaatgcttgggactcaggaccccccgccggacctgggattctcgcttggggaagagggtcgggcaacaatggcgtggggaatatacattctggtgcttgggggcaccctagccgcagcacatcgaatggtgtaaatggagagtggggtaagcctccaaaccagcactcaaatagtgacatcaatgggaaaggttccacggggtgggagtcacctagcgttacctcgcaaaacccgaccgtgcagcccggtggagagcacatgaattcatgggccaaagctgcctcatctggtacaactgcgagtgagggctcctctgacggatcagggaaccataacgaaggttccacgggaagagagggaacgggagaggggaggcggagagacaaaggtattatcgatcaaggccacatccagctcccacgcaatgacctggatccccgcgtgctgagcaacacgggatgggggcagaccccagtgaagcagaataccgcgtgggaatttgaggagagcccgaggagcgaacgcaagaatgataatggaacagaggcttggggctgtgccgccactcaggcctctaatagcggaggaaaaaatgatggttcaatcatgaatagcactaacacgtcatctgtgagtggttgggtcaacgcgcctccagccgcggttcccgcaaatactggatggggcgactcaaacaacaaggctccctccgggccgggggtgtggggagacagcatctctagcactgccgtgagtaccgccgccgccgctaagtcaggacacgcatggtccggcgccgcgaatcaggaggacaaatcacctacttggggagaaccgcccaagccaaagtcccagcactggggagatggacaacggtctaatcctgcatggtcagctgggggcggagattgggccgattcctctagtgtgttgggccacctgggggatggtaagaagaatgggtctgggtgggatgccgacagcaatcgctccggtagtggttggaatgatacgacccgaagcgggaattccggatgggggaactcaaccaacacaaaggctaacccaggcaccaattggggtgaaacccttaagcctggtccacagcaaaattgggcatccaaacctcaggataataacgtttctaactgggggggtgcagcctctgtgaagcagacaggcacaggttggattggcggtccagtcccggtaaagcagaaagattcgtcagaggcgactggttgggaggagcccagtcccccttccatcaggcgcaaaatggagatcgatgatggaaccagcgcctggggggacccatctaattataataataagactgtgaacatgtgggacaggaacaaccccgtgatacaatcttcaaccaccacaaatacgaccacaaccaccacaacaacaacctctaacacaactcaccgcgtggagacccctcctccgcatcaggccggaactcagctgaatcgcagtccactcctggggcctggccggaaagtgtcatctggctggggcgaaatgcccaacgtccattccaagacagagaacagctggggcgaacctagctccccctccacgcttgttgacaatggcaccgcagcctggggcaaacctcctagttccggatctggctggggagatcaccctgctgagcctccagtagcctttggtcgggcgggtgctccagtggccgcttctgctttatgtaaacccgcctccaaatctatgcaagaggggtggggctctggtggtgatgaaatgaacctgtcaactagtcagtgggaggatgaagagggagacgtctggaacaatgcagcatctcaggagagtactagttcatgcagctcatggggtaacgcccctaagaagggcctgcagaaaggtatgaaaactagtgggaagcaggacgaggcatggattatgtcacgtctcatcaaacagcttacggacatgggctttccgcgggagcctgccgaagaggctctgaagagcaacaatatgaacttggaccaggctatgtctgctttgctggaaaaaaaagtagatgtggataagcgcgggcttggagtgacagatcataacgggatggccgcaaaacccctgggatgccgtccccccatcagtaaagagtcctccgttgacaggcccacatttctggacaaagatggcggtcttgtggaagagccgacacccagcccctttctcccatcaccatccttaaagctccctctcagtcactcagcccttccaagtcaagccttgggaggcatcgcaagtggcctgggtatgcagaatctaaatagcagtaggcagattccctctgggaacctgggaatgttcggcaacagcggggccgcccaagcaaggacaatgcagcagccaccccagccacctgtccaaccacttaatagcagccagcctagtctgcgagctcaggtaccacaatttctgtctccccaggttcaggcccaactgctccagtttgccgctaaaaacatcggcctgaacccagccctgctgacaagccctatcaatccacagcacatgactatgctgaaccagctgtaccagctccaactggcgtaccagcgactacagattcagcagcagatgctacaggcccagcgcaatgtgagcggtagtatgcggcaacaggaacagcaggtggccaggaccataacaaacttacagcagcagatccaacagcaccagcggcagctagcccaggctttactggtgaagcaacccccccctcccccacctccgcctcacctgagtctgcatccctctgccggtaagagcgccatggacagctttccgagccaccctcaaacccccggactgcctgacctgcagacaaaagagcagcaatcctcccctaacacgtttgcaccctaccctttggctggacttaatcccaacatgaatgtcaatagcatggacatgacaggtggccttagcgtgaaggaccccagtcagtcacaatctcggttgccacaatggacacaccctaattcaatggacaatcttcccagcgctgccagtcctctggaacagaacccgtccaagcacggggcaatcccagggggattgagcattggccctcccgggaaaagttctatcgacgattcatatggccgttacgacctcatacagaacagcgagtctcctgcatctccccccgtggccgtgcctcatagctggtcacgcgccaagagcgatagtgataaaatcagcaatggtagcagtatcaactggcctcctgaatttcacccgggagtaccgtggaaaggcctgcaaaatatcgacccggaaaatgacccggatgttaccccaggaagtgtcccaactggaccaaccattaacactacaatacaggacgtgaacagatacctgctcaaaagcggcggcaaattgtctgatattaagagcacttggtctagtggtcctaccagccacactcaggcaagtctcagccacgaactttggaaggtgccacgcaactccacagctcccacgcgtccaccccctggcctgacaaatccaaaacctagctccacttggggggcttccccgctcggatggacaagctcttattcatctggttcagcctggtcaaccgacacatctggcaggaccagtagttggctcgtcctcaggaacctgacaccgcagatcgacggttcgacccttaggacactgtgtctccagcacggtccactgataacctttcacctcaatcttactcagggcaacgctgtggtgcggtactctagtaaagaggaggccgctaaggcgcagaagagcttgcatatgtgcgtgctgggaaacaccacaatcctagcagaatttgccggcgaagaagaagttaaccgctttctagcacaagggcaggctttaccccctacaagcagctggcagtcatccagcgcctcttcacagcctaggctgagtgcggccggttcaagccacggtctggtccggagtgacgcaggccattggaacgccccatgtctgggtggaaaggggagtagcgaactgctgtggggcggggtgccacagtacagttcctctctctgggggcccccctccgccgatgacagtcgggttattggaagccccacgcctctgaccactctcctgccgggggatctgttgagtggtgaaagcctgtag

SEQ ID NO: 209559 - DNA, 5181 bp, synthetic construct
  misc_feature 1..5181: note = Description of Artificial Sequence: Synthetic coding sequence
  source 1..5181: mol_type = other DNA
atggccaccggcagcgcccagggcaacttcaccggccacaccaagaaaaccaacggaaataatggtaccaacggtgctctggtgcagtcccccagcaatcagtccgccttgggtgccggcggggccaatagcaacggctctgcggcaagagtgtggggcgttgcaaccggctcttcttccggtctcgcccattgttctgtttcggggggagacggtaagatggatacaatgattggggatgggagatctcagaactgctggggcgcctccaactcgaacgccggaattaatctgaacttgaatccgaatgccaaccccgccgcatggcccgtactgggacacgaagggaccgtcgccaccgggaatcctagttctatttgttcccccgtcagcgctatcgggcagaatatgggaaaccagaacgggaaccccacaggcacgctgggcgcctggggcaacctgctgccccaagaaagcaccgagccccagaccagcacaagccagaatgtatctttctcagcccagccccagaatcttaatacagacggaccgaataatactaatccaatgaactcaagccccaaccctatcaacgccatgcagaccaatggtctccccaactggggtatggctgtggggatgggcgccataatacctccacatctgcaggggctgcccggtgccaatggatcatcagtttctcaagtctcaggaggatccgcagaaggaatcagcaattctgtatggggtctgagcccagggaaccccgccacagggaactctaacagtggattttcacagggtaatggcgacaccgtcaactccgcccttagcgcaaagcaaaatggctcgtcttcagccgtccaaaaagagggctccggaggcaatgcctgggactcaggccctcccgctggacctgggattctggcttggggaagagggtcaggcaataatggtgtaggcaacattcatagtggcgcatgggggcatccctctagatctacatcaaacggggtaaatggcgaatggggaaagccacctaaccaacattcaaatagcgatattaatggaaagggctccactggttgggaaagtccaagcgtaacatcccaaaacccgacagtgcaaccaggtggtgagcacatgaacagttgggctaaggccgcctcatctggcacaaccgcatcagaaggctctagcgacggttcgggcaaccataacgaaggatcaacaggcagagaaggcacgggggaaggtagacgtagggacaaggggattatcgatcaggggcacatccagctgcccaggaatgatctggatccacgggtgttgtctaataccgggtggggtcagacacccgtgaaacagaacacggcctgggaattcgaggaatccccccggagcgagagaaaaaatgacaacggtaccgaagcttgggggtgcgcagcaacacaggccagtaacagtggagggaaaaacgacggctccatcatgaattccaccaatacctcctccgtgtctggctgggtgaacgcccctccggcagcggtgcccgctaatactggatggggggacagcaacaacaaggccccgagtggaccaggggtgtggggcgactctataagctccactgcagtctctactgccgctgccgcaaagtctggccatgcctggtccggagcagctaatcaggaggacaagtcccccacatggggagagcccccaaagccaaaaagtcagcattggggcgacggtcagcgatccaatcccgcatggtcagcgggaggcggagattgggcagacagttcctccgtcctgggccatctgggcgatgggaagaagaacggaagcggatgggacgctgactcgaatcggtcagggtcaggctggaacgacaccacacgctctggcaattctgggtggggcaactcgaccaatacaaaggccaacccaggcacaaactggggtgagacattgaagcctggccctcaacaaaattgggcatctaagccacaagacaataatgtctcaaattggggcggcgcggcctccgtcaaacagaccggaaccggatggataggtggacccgttcccgtaaagcaaaaggactccagcgaagcaacgggatgggaggagccatccccgccgagcataagacgtaagatggagatagacgatggaaccagtgcttggggcgacccctcaaactacaataataagacggttaacatgtgggatagaaacaacccggtcatccaaagtagtacaactacaaatactacgacaactacaacgaccaccacatctaataccacacaccgagtggagacccctcctccacatcaggcagggacacagctaaacaggtcgccattgttaggaccggtgagcagcgggtggggagaaatgccaaacgttcattctaagaccgaaaactcatggggagaaccttccagccctagtaccctggtcgacaacgggaccgcagcctggggtaagcctccgtcttctggttcaggttggggggatcaccccgcagagccgccggtcgcattcgggcgcgcgggcgctccagtggcagcctcagccctatgtaagccggcttctaaatcaatgcaagagggctggggttccggtggggacgaaatgaacctgtccacttcgcaatgggaggacgaggagggggacgtgtggaataatgctgctagccaggagagtaccagtagctgctcatcatggggcaacgctcctaagaaagggctgcaaaagggcatgaagacttctggtaagcaggacgaagcgtggattatgagccggcttataaagcagctcacagacatgggattccctcgagagccagcagaggaagcgctaaaaagcaataatatgaatcttgaccaggccatgtccgccctcctggagaaaaaggtggatgtggataaacgcggcctcggcgtgactgaccacaatgggatggctgctaaacccctgggctgtagaccccctatttccaaggaatcgtcggtagatcgcccaactttcctggacaaggacggaggcctcgtggaagaaccaacaccttcccccttcctaccctccccaagcctcaagctccctctgtcacacagtgccttgccttcgcaggccctgggaggcatagccagcggactgggaatgcaaaatctcaactcatccaggcaaatcccctcaggaaacttgggtatgtttggcaacagcggagccgctcaggcgcgcacaatgcagcagccccctcagcctcctgttcaacctcttaacagctcacaaccttcactgcgcgcacaagtcccccagtttctatctcctcaggtacaggctcagttgcttcaatttgcggccaagaacattggcctgaatcccgcgttgctgacctccccaatcaatccccagcacatgactatgctcaatcagctgtaccaactgcaactggcctatcagcgcctccagattcagcaacagatgctgcaagcccaacggaacgtttctggatctatgagacagcaggagcagcaggtggccagaaccataaccaacttgcagcagcaaatccagcagcatcagagacagctcgctcaggcccttctggtgaaacagcccccacctccgcctccgcccccccacctgtctctgcacccatccgccggaaaatccgcaatggatagtttcccaagtcacccccagacaccaggcttgccggatctgcagaccaaagaacagcagtccagtcccaatacgtttgccccataccctcttgcgggcctcaatccaaatatgaacgtcaacagtatggacatgaccgggggtctaagcgtgaaagacccctctcagagtcagtccagactccctcagtggacccaccctaactcaatggataatttgccatcggcagcctctccactggagcagaatcccagtaagcacggcgcaatccccggtgggctttccataggcccgccaggcaagtctagcatcgacgattcttacgggcggtacgatctgatacagaattccgaatctccagctagccctccagtggccgtgccccattcttggagtagagccaagtcagactctgataagatttctaatggttcatctatcaattggcccccagaatttcaccccggcgtcccatggaagggacttcagaatatagaccctgagaacgatccggacgtgacacctgggtcagtgcctacgggcccgacaatcaacaccactatccaggacgtgaataggtatttactgaaatcagggggttcctccccccccagtagccagaacgccaccctccccagctcttcggcctggcctctgagtgccagcgggtattcctcatccttttcgagtatcgcatccgccccctccgtggctggaaagctctctgacattaagagtacttggagctctggccctactagtcacacccaggcatccctgagccatgaactgtggaaggtcccgcgaaactcaaccgcccccacaagaccgccccctggcttaactaatccaaagccgtctagtacctggggcgcatctcccttaggatggacctccagctactccagtgggtctgcctggagtactgatacaagtggacgtacctcctcctggctcgtgctgaggaacttgactccgcaaattgatggaagtacactgcgtaccttgtgtctgcagcacggacccctgataacctttcacttaaacctaactcagggaaatgcagtggttaggtactcatctaaagaagaagccgctaaggcacagaagtcgttgcacatgtgtgtgctcggcaatacaactattctggctgagtttgctggcgaggaagaggtgaaccggtttctggctcagggccaggcactacctcctacttcgtcctggcagtcaagctctgccagttcgcagccgcgtctcagtgctgctggttcttcccatggactggtcagatcagatgctggacactggaacgcaccctgcctgggcggcaaaggctccagcgaactcttgtggggcggggtcccccaatactcctcctcactatggggacccccaagtgccgatgactccagggtaataggctcccccactcctttgactacccttttaccgggggacctcctgagtggggaatcgttatag

SEQ ID NO: 209560 - DNA, 1959 bp, synthetic construct
  misc_feature 1..1959: note = Description of Artificial Sequence: Synthetic coding sequence
  source 1..1959: mol_type = other DNA
atgggcggctggaagggccccggccagcggcggggcaaggagggcccagaggcgagacgacgggccgccgaacggggaggtggcggaggcggtggcggagtgccagcccctcggtccccagcacgcgaaccaaggcctcgaagttgtctgctgctcccaccaccttggggagctgctatgactcccgatctcctgaactttaagaaaggctggatgtcaatcctggatgagcctggtgagccacccagtccgtccttgacgaccactagtacttcacagtggaaaaagcactggtttgtgttgactgactcctctctgaagtactacagagactccacagcagaagaagcggacgaactggatggtgagatcgacctccgcagctgtacagacgtgacagagtacgccgtacagcggaattacggcttccagatacatactaaggacgcagtctatactctttcagctatgacgtctggtatccgccggaattggatcgaagctctgcggaaaacagtacgacctaccagcgctcctgatgttacgaaattgtccgattccaataaggagaatgccttacattcctactccacacagaaaggccctctcaaagcgggggaacaaagagctggctctgaagtgatctccagaggaggacctaggaaggccgatggccagcggcaggcactggattacgtggagctgtccccacttacacaagcttcaccccagagagcccgaactcctgcccgaacacctgaccgtcttgctaaacaggaggaattagagcgggacctggcccagcgcagcgaggagagaagaaagtggttcgaggcaaccgattccaggactccggaggtgccagcaggtgaggggccccgccgcggccttggtgctccgctaactgaggaccaacagaaccgactgagtgaagaaatcgagaaaaagtggcaagagttggaaaagctgccactgagagaaaacaagcgagtgcccttgacagcactgctgaaccagtctcgcggggagagacgaggccctccttctgatggacacgaggcactggagaaggaagtgcaagccctacgggcccaattggaggcctggaggctccagggagaggccccccaaagcgctctgcggagccaagaggacggacatatccctcctgggtacatctcccaggaagcttgcgaacgtagtctggctgaaatggaatcctcccaccaacaggtgatggaagaacttcagcggcaccacgagcgggagcttcaacggttgcagcaggagaaagaatggctattggcagaggaaacggcagcaacagcgtccgctattgaggccatgaaaaaagcttaccaggaggagctctctcgggagctgagcaagacccgtagcttacagcagggacctgatggcctgaggaagcagcaccaatctgacgtggaggctctgaagagagagctgcaagtgctgtctgaacagtacagccaaaagtgtctcgaaattggggccctcatgcgacaggccgaggagcgggagcatacgctgcgacgatgccaacaggagggccaggagctgctgcgtcataatcaagaactgcatggaagactttctgaagagattgatcagctgagggggtttatcgcatctcaaggaatggggaacggttgcgggcgcagtaatgagcgttcttcatgcgagctggaagtgttgcttagagttaaggagaatgagctgcagtacctcaaaaaagaggtccagtgcctgcgcgatgagttgcagatgatgcagaaagataaacgcttcacgagcggcaagtaccaggacgtttatgtcgagctatcacacattaagactaggtccgaaagagaaatcgaacaacttaaggagcatctgcgccttgccatggctgcccttcaggagaaagaatcaatgcggaattcactagcggagtag

SEQ ID NO: 209561 - DNA, 7098 bp, synthetic construct
  misc_feature 1..7098: note = Description of Artificial Sequence: Synthetic coding sequence
  source 1..7098: mol_type = other DNA
atggaggaggtgcccggcgacgccctgtgcgagcacttcgaggccaacatcctaactcagaaccgctgccagaactgttttcatcccgaagaggctcacggagcgcgctatcaggagctcaggagcccatccggcgcagaggtgccatattgtgatctgccaagatgcccacctgccccggaggaccccctgagcgcctccactagtggatgtcagtccgtagtggaccctgggctgagacctggccctaaaagaggcccaagcccttctgccggcttgcccgaagaaggaccaaccgcagcgcctcggagccggagcagagaactggaagctgtgccctatctggagggattgaccaccagcctttgcgggtcttgcaatgaggatcctggatccgaccctaccagctccccagactctgccactcctgacgatacttccaacagttcgtctgtggactgggacacagtggaaaggcaggaggaggaagcaccctcatgggatgagttggctgtgatgattccccggagaccgcgtgagggcccaagggctgactcctctcagcgtgctccgagccttctaactcggtcacccgttggcggtgacgctgctggccagaaaaaggaggacacagggggcggtggacggtctgcgggacagcactgggctaggctcaggggcgagtccggcctgagcctggaacgccatagaagtacactgactcaggcgagctctatgacacctcacagcgggcctagaagcactacttctcaggcaagccctgcccaaagggacaccgcacaggctgcaagcaccagggagattccacgggctagtagtccccatcgcattacccagagagacacatcaagagcctcatcgacacagcaggagatcagccgagcttcaagcacacagcaggagacgtcccgggcttctagcacacaggaagacacccctcgcgcctctagcacacaagaggacacccccagggcaagctcaactcagtggaatacccccagggcctcaagcccaagtcgtagcacgcagctcgataacccccgcacatcctcgacccagcaagataatccacaaacaagcttccccacatgtactcctcaaagggaaaatccacgcaccccgtgcgtgcaacaggacgatcccagggcttcatcccccaataggaccacacagcgggagaattctcggacaagttgtgcccagcgtgacaatccgaaagctagtagaacaagctctcccaaccgagcaacccgggacaacccaagaacctcctgcgcgcagcgcgacaacccacgggcctctagcccaagtagagcaacccgagacaaccccaccaccagctgcgctcagagggacaacccccgcgctagtcggacatcctcacctaaccgggctacaagggataacccaagaacaagctgtgcccagcgggacaaccctcgggcaagtagcccctcccgtgctacgcgggacaacccaaccacctcctgcgcccaacgggataatccacgcgctagtaggaccagctcgcctaatcgggcaaccagagataatccgcgcacgtcttgcgctcagagagataacccccgggcctccagtcccaatcgcgccgccagggacaacccgacaacctcatgcgcccagcgggacaatccccgcgcgagtcgcacatcaagcccgaaccgggccactagagataatccccgaaccagctgtgctcagcgggataacccgagggccagctcccctaaccgagcgacacgcgacaatccaaccacgtcctgtgcccagcgggacaatcctagagccagccgtacgtcaagtcctaatcgcgccactcgggataacccacgcacctcttgcgcccagagggacaatccacgagcctcatcacccaatcgcacgacacagcaggactctccaaggacatcatgtgcccgcagagatgatccccgagccagttctcccaatcgtaccatccagcaggagaatccacggacaagttgcgcactgcgtgataatccaagggcatcttcgccgtccagaaccatccaacaagagaaccccaggacttcctgtgcccagcgagacgatcccagggcatcatcaccaaaccggacaactcagcaggagaatcctagaacctcctgcgctaggcgcgacaatcccagggcctcgtcccggaatcgcacaatacagcgcgacaatcccagaacaagttgtgcacagcgcgataacccccgagcatcatctcccaacaggaccattcagcaggagaacttgcgcacaagctgcaccaggcaagacaacccacgaacctcttcccctaaccgcgctacaagagacaaccccaggacaagttgcgcgcagagggacaacctgagagcctcttccccaatccgcgccactcagcaggacaatcccagaacttgcatccagcagaatatacctagatcgagcagcacacagcaggacaatccaaagacaagctgtaccaaaagggataatctgaggcccacctgtacacaaagggaccggacacaatctttttcttttcaaagagataacccaggaaccagttcgagccagtgttgtacacaaaaggagaacctgagaccatcgtcaccacacagaagtacccaatggaataacccaagaaattccagcccacaccgcaccaataaagacattccttgggcaagtttccccctgcgtcctacgcaatccgacggaccacggacaagcagtccatctaggtcaaaacaatcggaagtcccatgggcgtcaattgccctgagacctactcagggggacagaccgcaaaccagcagtccttctaggccagctcagcacgaccctccccaatcttcattcggccccacccagtataatctgccttctcgtgctacctcttccagccataatcccggccatcagtctacttctagaactagcagccctgtgtaccctgccgcttatggcgctccgctgacttcccccgagcccagtcaaccaccttgtgccgtgtgcatcgggcatcgggacgccccacgggcaagctccccacctaggtacctacaacacgaccctttccccttctttcctgaaccgcgcgcaccagagagcgaacccccccaccacgagcctccttacattccaccagctgtgtgtattgggcaccgggatgcgccgagagccagctcaccaccgcgacacacccagttcgatccttttccgtttttacccgatacaagcgacgccgagcatcaatgtcagtctcctcagcatgagcctctgcagcttcctgcaccagtgtgcattgggtaccgggatgcgcctcgggcatcgagcccaccacgacaggccccagagcctagccttctcttccaggatctcccaagggctagcaccgagtccctcgtgccttcaatggattctcttcacgagtgtccgcacatccctacccctgtatgcattggccacagggatgctccatcattctccagcccacctcgacaggcaccagaaccgagcctcttctttcaggaccctccgggcacctcgatggaatctctggccccctcgacggactcattgcacgggtcccctgtgctcattcctcaagtgtgcatcggtcatcgcgatgccccacgtgctagttcgccccctcgccacccccccagcgacctggcctttctggcaccatctcctagtccaggaagctccggcggaagtcgtgggtccgcacctccgggcgagaccagacacaatctcgagcgcgaagagtacacagtccttgctgaccttccaccgcctcggagactcgcccaaagacaacctggaccccaggcacaatgttccagcggcggacgcacacacagccctgggcgggccgaagtggagcgccttttcggccaggagcggcgaaaaagcgaggctgcaggcgcattccaggcccaagatgaggggagatcacagcagccaagccagggtcagagccagctcctccgcaggcagtcatccccagcacccagtaggcaagtgaccatgcttcccgctaagcaggcagaactgacccggaggtcccaggccgaaccaccacatccgtggtcacctgaaaagcgcccagagggagatcggcagctgcaagggtctcccttacctccccgaacttcagctcgtacaccagagcgagagctgaggacacagagacccctggaaagcggccaggccggcccccggcagcctctgggcgtatggcaaagtcaggaggagcctcccggaagccagggaccacacaggcacctggagaggtcttggtcttcccaggaaggcgggctgggtccaggtgggtggtggggttgtggggagccctccctgggtgctgcaaaggcgccagagggagcatggggcggtacgagtagagagtacaaagaatcgtgggggcagccagaggcctgggaagagaagccgacccatgagttgccacgagaactcggtaagcgctccccattgacgagcccgccagagaattggggcggccctgcagaaagtagtcaatcttggcattccgggacacctactgccgtgggttggggtgctgagggcgcatgtccatacccccgaggctctgaacgaaggccggaactggactggcgggacctcttaggcttgttacgcgcacccggagagggcgtctgggcccgggtgccgtctctagattgggagggtctgctggagttactacaggcaagattaccgagaaaggatccagctggccaccgtgatgacctggctcgagctcttgggcctgaactgggccctcctggaaccaatgacgttcccgagcaggagtcccacagccagccggagggctgggccgaagcgacccctgtaaatggccactcccccgctcttcaatcacaaagtcctgtgcaactgccaagccctgcatgcactagtactcagtggcccaagattaaagtgacccgtgggccagcaaccgcaaccctagcagggttggagcagacaggacccctaggtagtcgttcaacagcaaagggcccctccctacctgagctgcagttccagccagaagaacccgaggagagcgagccttctaggggccaggatcctctgacggatcagaagcaggccgattctgccgacaagcggccagcagaggggaaggcaggaagccctcttaaggggagactggtgactagctggaggatgcctggggatcgccccaccctgttcaatccttttctcctttctttaggagtgctcagatggaggcggcctgatcttctaaacttcaaaaaaggttggatgtcaatattggatgaacccggtgagcctccatccccaagtcttaccacaacctctacgtcccagtggaagaaacattggtttgtactcaccgattccagcctgaaatattaccgggattctaccgcagaagaagcagatgagttagacggcgaaattgacttacggtcgtgtacagatgtgacggagtatgccgtgcagcgtaattacgggttccagatacacactaaagacgctgtgtacacgctgtctgctatgacatctggcatcaggagaaactggatcgaggctctgagaaagactgtacgccccacaagtgctcccgacgtgacaaagctgtcagattctaataaggagaacgccctgcacagctacagcacccagaaagggcccctcaaggctggcgagcagagagccggctccgaggtaatttctaggggcggaccaagaaaggcggatggacagaggcaggctctggactatgtggagctgtctccacttacccaagccagtccacagcgagccagaacgccagcccgaaccccggatcggctggccaagcaggaggagctcgagcgagacctggcccagcggtccgaagagcggaggaaatggttcgaggctaccgactctagaacaccggaggttcccgcaggtgagggccccaggcggggactaggcgcccctcttacagaagaccagcagaacagactgagcgaggagatagagaagaagtggcaggaattagagaaactgcctttgcgggaaaacaaaagagtccctctgactgccttgctcaaccagtccaggggagagcgacggggccccccatctgatggccatgaagctcttgagaaggaagttcaggccctcagagcacagctggaagcttggaggttacagggtgaagccccccagagcgctttgaggagccaagaagacggccatatacctcccggctatatctcccaggaagcgtgtgagcgaagcctggcggagatggagtcatcacatcaacaggtgatggaggagctccagagacaccacgagcgggagctgcagcggctgcagcaggagaaggagtggctccttgccgaggagaccgcagcaaccgcctctgctatcgaggctatgaagaaggcctatcaggaggaattatcccgggagcttagtaaaaccagatccttacagcaaggccccgacggcctccgtaagcaacaccaatcagatgtcgaggcgctgaaacgggagcttcaggtgctatctgaacaatatagtcaaaaatgccttgaaatcggcgccctgatgaggcaggccgaagagcgagagcacaccctgcggcgctgccagcaggaaggccaagagctccttagacataaccaggagttgcatggtcgcctcagcgaggagatcgatcagctgcgcggtttcatcgccagccagggcatgggcaatggttgcggtagatcaaacgaacggtcctcatgcgaattggaggttcttttaagagtcaaagagaacgagctccagtacctgaaaaaagaagtgcagtgcctgcgggacgagcttcagatgatgcagaaagataaacgcttcacttcgggaaagtaccaggacgtgtacgtggagctcagccacataaagaccagatcggaaagggaaatcgaacagctaaaagagcacctgaggctagcgatggccgcattgcaggaaaaggagagcatgaggaacagtttggctgagtag

SEQ ID NO: 209562 - DNA, 1296 bp, synthetic construct
  misc_feature 1..1296: note = Description of Artificial Sequence: Synthetic coding sequence
  source 1..1296: mol_type = other DNA
atgggcggctggaagggccccggccagcggcggggcaaggagggccccgaagcccgacggcgagccgccgagcgggggggcggcggtggaggcggtggtgtgcccgctcctcggagtcctgcacgggagccaagaccacggagctgcttgcttctgcctcccccatggggagccgcaatgacgccagacttgctgaacttcaagaagggctggatgtccattttggatgagcccggggagcctcccagtcctagtttaaccacaacttctacatcccagtggaaaaaacactggttcgtgctgacggatagttctctgaaatattacagagattcgaccgccgaagaagccgatgagctcgacggggaaatcgacttacggagttgtacagacgtcaccgagtacgccgtccagcgcaactatggattccagattcatacaaaagatgccgtttataccttatcagcaatgacctccgggattaggcgcaactggattgaagcactccggaagacggtgcgcccaacttctgcacccgacgtaacaaagctgtcagacagcaacaaggagaatgctctgcattcctattcgactcagaaaggaccccttaaagccggggagcaaagggccgggagtgaagtgattagtaggggcggccctcgcaaggccgatggccagcgccaggcactggactacgtggagctgagccctctgacccaggcatcccctcagagggccagaacaccagcgcggacccccgataggctcgcgaagcaggaagagctcgagagagacctggctcagcgcagcgaggagcgacgcaagtggtttgaggcaacagattcccggactccagaggtcccggctggggagggccctcgaagagggctgggcgcgccgctcaccgaggaccaacagaatcggctgtctgaagaaatcgaaaagaaatggcaagaactggaaaaactgccactccgcgagaataaacgggtaccactgactgcccttctgaatcagtccagaggagagagacggggccccccatctgatgggcacgaagcacttgagaaggaggtacaggctctgagagctcagcttgaggcttggagattgcagggtgaggcaccgcagtcagccctcaggagccaggaggacggacacatcccacctggctacattagccagctggtgggtgtgataactgtgcccgttctgcagacgaggccgcttagctctgagaggctgtgcgacctccccaaggtcacccctccagctgggctgaagggtggcatatag

SEQ ID NO: 209563 - DNA, 5070 bp, synthetic construct
  misc_feature 1..5070: note = Description of Artificial Sequence: Synthetic coding sequence
  source 1..5070: mol_type = other DNA
atggaggaggtgcccggcgacgccctgtgcgagcacttcgaggccaacattctaacccagaaccggtgtcaaaattgtttccatccagaggaagcccatggggcacggtatcaagagctgcgttctccgagcggtgcggaggtaccctattgtgacctgccgcgttgcccaccagcccctgaagacccgctaagcgcaagtactagcggatgtcagtcagttgtggatccgggcctgcggcctggacccaaacgaggaccatcacccagcgcagggctacccgaggagggtccaaccgccgcaccgaggtctaggagccgtgagctcgaagccgtcccatacctggagggcctgaccacgagcctgtgcgggagctgcaatgaggacccagggagcgatcctacttccagtcccgatagtgcaacgcctgatgacacgagcaattccagtagtgtcgattgggatacagtggagcggcaagaagaggaagcaccttcctgggatgagctggctgttatgattcctcgccggcctcgtgaggggccaagagctgatagttcccagcgagcaccctcgcttttaaccaggagccctgtggggggcgacgctgccggacaaaagaaagaagatactggtggcggcggccggagcgctggccaacattgggcccgcctccggggcgaatcgggcctcagcctagagaggcacagatcaacactgactcaggcctcctcaatgactccacactctgggccccgctctaccacaagtcaagcttctcccgcgcaaagagatactgcccaggccgcaagcacacgggaaatccctcgcgcttctagcccacacaggatcacccagagggacaccagccgagcatcgagcacgcagcaggaaatctccagggcctcatcgacccagcaggagaccagccgtgcctcctcaacccaggaagacactccacgcgcatcctccactcaggaagacaccccccgagcttcatcgacacagtggaacaccccccgagcaagttcaccaagcaggtccacacagctggacaacccccgcacctctagcacccagcaggataacccccagactagttttccaacttgcacgccgcaaagagaaaatccccgcacaccgtgcgtgcaacaggacgacccccgagcatcttcccctaataggacaacgcagcgggagaacagcagaacatcctgcgcccagagggacaatcccaaggcctccagaacgagtagtcctaacagagcgacacgcgacaatcctagaacttcatgcgctcagcgcgataatcccagggcaagttcgcccagccgggctacccgggacaaccctacaacctcttgtgcacaacgcgataaccctcgagcttctcgaaccagctctcctaacagagctactcgtgacaacccgaggacgagctgcgcccaacgcgacaatccaagggcttcttcccccagtcgcgcaacacgcgacaaccccacaacaagttgtgcacaacgggacaaccctagagcttccagaacctcgtctccaaaccgggccacacgggacaatcctaggactagctgcgcacagcgggataatccacgggctagcagtccaaaccgcgctgctcgcgacaatcctacaaccagctgtgcccaacgggacaaccctcgggcctctcggaccagttcccccaatcgcgcaacccgggacaatccccgcacttcatgcgctcagcgcgacaatccccgcgcctcctcgcccaaccgggcaacgcgggataatcccaccacatcctgtgctcagcgcgacaacccccgggcctccaggaccagttcaccaaacagagctacaagggacaaccctcgcactagttgtgcgcagcgggataatccacgggcatcttctcctaaccgcactacccagcaagattctccgaggacatcatgtgctagaagggatgatcccagggcttcatcgccgaataggaccattcagcaggagaaccccagaacctcttgcgccctgagagataatcctcgagctagcagccccagtcgcaccattcaacaggagaaccctcgaacttcatgcgcacaacgggacgatccacgggccagctcccccaaccggacaacacagcaggagaatcctaggacaagctgtgccagacgcgacaacccacgagcgtcatcacgaaatagaacaatccagcgcgacaaccccaggacttcatgcgcacagagagacaatccgcgggccagtagccccaaccgcacaatccagcaagaaaatcttcgcacctcatgtactagacaggacaatccacgcacctccagcccaaaccgggctactcgcgacaatcctagaaccagttgcgcccagagggacaatcttcgggcctcaagtccaatcagggcaacccagcaggataacccgaggacatgtatacagcagaacattccccggtcctcaagtacccagcaagataaccctaaaacctcatgtacaaagcgcgataatttgcgcccaacatgtacacagcgcgatagaacgcagagcttctcatttcaaagagacaacccaggaacctcttcttcccaatgttgcacacagaaggagaatttacgccccagcagcccgcatagatcaacccagtggaacaatcccaggaatagttctcctcacagaactaacaaggatattccctgggcgagcttcccattgcggcctactcaaagcgacggacccaggacaagttcaccctctaggtcaaaacaatcagaagttccgtgggcctctattgctctgcggccaacccagggcgatagacctcagaccagctctccctctcggccggctcaacacgatccaccccagtcttctttcgggcctacacaatataacctcccatctcgcgccacttctagctctcataatcctggccatcagtcaacaagtagaacatccagccccgtgtatccggccgcatacggcgcaccactgacgagccctgagccatcccagccgccatgcgctgtgtgtataggccatcgggacgcgcctagagcgagtagtcccccccgctacctgcagcacgaccccttccccttctttcctgaaccacgagctcccgaatcagagccgcctcaccacgagcctccttatattccgcccgctgtatgtatcgggcatcgcgatgcaccgagggcgagtagcccacccagacacactcagttcgaccccttccccttcctgccggacactagtgacgcggaacaccagtgtcagtctccacagcatgaaccactgcaactaccagcgccagtgtgcatcggatacagagatgctccgcgggcatctagcccccccaggcaagctcctgagccttctcttctgtttcaggacttaccaagagcatctacagaaagcctcgtgccctcaatggacagcctgcacgaatgtccacacatcccaactcctgtctgtatcgggcatcgcgatgctccaagttttagtagcccccccaggcaggcacctgaacccagcctgttctttcaggatcctccaggtacaagcatggagagcctcgctcccagtacagacagtcttcatggatcacccgtgctgatccctcaggtgtgtatcgggcaccgcgacgccccccgtgcatctagcccaccccgccatcccccctctgatttggcttttctcgcccctagcccatcacccggatcaagcggggggtcccgaggttcagctccaccgggagaaactcggcacaatctcgaacgagaagagtatactgtgttggcagatctacccccccctagacgccttgctcagcggcagcccggaccacaggcccagtgttcttccggcgggaggacccactcgcctggcagagctgaggtcgagcggttatttgggcaggaacgacgcaccatgcttccggctaaacaagccgaactgacccgaagatcccaagctgagcctccgcacccatggtcccctgagaaacgaccggagggtgatcgccaattacaaggctccccgctgccacctaggaccagcgctaggacaccggagcgcgaactgcgtactcagcgcccgctggagagcgggcaggccggtccgcgtcagcctctgggagtgtggcagtcacaggaggaacctccgggctcccagggaccccatagacatttagagagatcctggtcgtcgcaagaaggcggtttgggccccggagggtggtggggttgtggcgagccttcactcggggcagcaaaggccccagagggcgcttggggcggtacttccagagagtacaaggaaagctggggacagcctgaggcgtgggaggaaaaacctacacacgaacttccaagggaattagggaaacgtagccctcttacaagccctccagagaattgggggggacctgcagaatcttcgcagtcatggcattctggaactccgaccgccgtgggttggggggcggaaggcgcctgcccttacccccgaggaagcgagcgccgccccgaattagattggcgcgacctcctaggcctgcttagagccccgggagagggggtctgggcacgggtgccatcacttgactgggaaggtctcctggaactgctgcaagcccggctgccccgtaaagaccctgccggtcacagggatgatctagcccgagctcttggcccagaattaggccctcccggtaccaacgacgtgccggaacaggaaagccatagtcagcccgaggggtgggccgaggctacgccagtgaacggacattctcctgcccttcagtcccagagcccagttcagctgcctagccctgcttgcacctctacccaatggcccaagatcaaggtgacacgcggacccgcaaccgcaaccttggccggtttagaacaaacgggacctctgggttctcggagtaccgcgaaagggccaagtctcccggagcttcaattccagcccgaggaaccagaagagtctgagcccagcagaggccaagaccccctgacggatcagaagcaggctgactcatag

SEQ ID NO: 209564 - DNA, 771 bp, synthetic construct
  misc_feature 1..771: note = Description of Artificial Sequence: Synthetic coding sequence
  source 1..771: mol_type = other DNA
atgagcatcctggacgagcccggcgagccccccagccccagcctgacgaccacttcaacatctcagtggaaaaagcattggtttgtgttgaccgatagcagcctgaaatactaccgggactctacagcagaagaggcagatgaactggatggcgagatagacctgcgtagctgtaccgatgtgactgaatacgctgtgcagagaaattacgggtttcagatccatactaaggatgcagtttacaccctctcggccatgacaagcggaatcaggcggaattggattgaggcgttgcgcaaaaccgtgagaccaacttccgcgcccgacgtgacaaagttatcagattcaaacaaagagaacgcccttcactcctattcgacacagaaagggcccctgaaagcaggcgagcaaagggctgggtccgaagtgatctcgaggggtggcccaagaaaagccgatggacagcggcaggcattggattacgtggaactctctccccttacacaggcctcacctcaacgggcaaggactcctgcacgcaccccagataggcttgctaaacaagaggagcttgagcgagacctagcgcagaggtccgaggaacgtcggaagtggtttgaggccactgactcacggacccccgaggtccccgccggggaaggtcctcggcgtggcctgggcgcccccctgaccgaagaccagcagaataggttatcagaagagattgagaaaaagtggcaagaactggaaaagctgcccctacgggaatag

SEQ ID NO: 209565 - DNA, 252 bp, synthetic construct
  misc_feature 1..252: note = Description of Artificial Sequence: Synthetic coding sequence
  source 1..252: mol_type = other DNA
atgagcatcctggacgagcccggcgagccccccagccccagcctgacaacaacttctacatcgcagtggaaaaaacactggttcgttctgacggacagtagcctgaaatattacagggacagcacggcagaggaggctgatgagctagatggcgaaatcgacctgcgttcctgtacagatgtcaccgagtacgcagttcagcgcaactatggattccagattcacaccaaagatgcagtgtatacgttgtag

SEQ ID NO: 209566 - DNA, 2577 bp, synthetic construct
  misc_feature 1..2577: note = Description of Artificial Sequence: Synthetic coding sequence
  source 1..2577: mol_type = other DNA
atggccgagctgagcgaggaggccctgctgagcgtgctgcccaccattagggttcccaaagccggcgacagagtgcataaggatgagtgcgcattttcatttgacactcctgagagtgagggaggcctgtacatctgtatgaacaccttcctcgggttcggaaagcagtacgtggaaagacacttcaataaaacaggccagagggtctacctacacctgcgcagaactagaagaccaaaggaagaagatcccgccaccgggaccggagacccacctaggaaaaaaccaacacgcctggccatcggagtggaaggtggtttcgacctaagtgaggagaagttcgagttggacgaggacgtcaaaattgtgattcttcccgactatctcgagatcgcccgggatgggctggggggtctccctgacattgtacgcgatagagtgacaagtgcagtggaggccctgctttctgcagacagcgcctcacggaaacaggaggtgcaggcatgggacggcgaagtgaggcaggtctccaaacatgcttttagcctgaaacagcttgataatcctgctcggatccctccctgtggttggaagtgctcaaaatgcgatatgcgagagaacctgtggctcaacctcacagacggctcaatcttgtgtggtagaaggtacttcgatggcagtggtggaaacaatcatgccgtcgaacactatcgcgagaccggctacccgcttgcagtgaagctgggtacaattacccctgacggcgccgacgtctactcctatgatgaggatgatatggtgctggatcctagtcttgcagaacacctgtcccactttggcatcgacatgctgaagatgcagaaaacggacaagacaatgacggaactcgaaattgatatgaatcagaggatcggggagtgggaactgattcaggagagcggcgtgccccttaaacccctcttcggtcccggctacacaggaatcaggaatctgggaaactcctgttaccttaactctgtggtacaagtactgttcagtatcccggactttcagcgcaaatacgtggacaagttggagaaaatctttcagaacgcccctacggaccctacacaggatttctctacgcaggtggccaaactaggccacggactgctgagtggggaatacagcaagccggttcccgagagcggagacggagagagagtcccagagcaaaaagaagttcaggacggaatagcccctcggatgttcaaggctttgatcggaaaggggcacccagaattcagtacgaataggcaacaggacgctcaggaattctttctgcatcttattaatatggtagagaggaattgtcgttcctctgagaatccaaacgaggtctttcgctttttagtagaggagaagatcaagtgcctggccacggaaaaggtaaagtacacacagcgtgtagattacatcatgcaactgccggtccccatggacgctgcgctgaacaaagaagaactgcttgagtacgaagagaaaaaacgtcaggctgaggaagagaaaatggcactgcccgagctggttagagcacaggtgccattctcatcatgtctggaagcctacggagcccctgagcaggtggacgacttctggtccaccgccctgcaggctaagtcagtggccgtaaagacgacccgctttgcgagctttcccgactacctggtcatccagatcaaaaaattcacctttggtctagactgggtgcccaaaaagttggatgtaagcattgagatgcccgaagaattagatatcagtcagctacggggcacaggcttgcagccaggggaggaggaactcccggacattgcacctcctctcgtgactcctgatgaacctaagggctctttgggcttctacgggaacgaggacgaggactcattctgctctccccatttctcatccccgacatcccccatgcttgacgagtccgtgatcatacagcttgtggaaatgggattccccatggatgcatgcaggaaggccgtttattatacgggcaacagcggagcagaggctgcaatgaattgggttatgagccacatggacgaccccgacttcgcgaacccgctcatcctccccgggagctcaggaccagggagcacttccgcagctgctgatccaccacccgaggattgcgttaccacgatcgttagcatggggttctccagggatcaagctcttaaggccctacgggccacaaacaattccttggaacgggcagtcgactggatttttagccatattgacgatcttgacgcagaagcagcgatggacatctcagagggccgcagcgctgccgacagcatctcagagagcgtcccagtgggacccaaggtgcgggacggcccagggaaatatcagctatttgcattcattagccacatgggcacgtcgaccatgtgcggacattacgtctgccacattaaaaaggaaggacgctgggtgatttataatgatcagaaagtttgcgccagcgagaagccccctaaagaccttggctacatttacttctaccaaagagtcgccagttag

SEQ ID NO: 209567 - DNA, 750 bp, synthetic construct
  misc_feature 1..750: note = Description of Artificial Sequence: Synthetic coding sequence
  source 1..750: mol_type = other DNA
atggcccccagccggaagttcttcgtgggcggcaactggaagatgaacgggcgcaaacagtctctcggtgaattaatcggcaccctaaatgctgccaaggtccctgccgataccgaagtggtttgcgcaccacccaccgcttacattgactttgcccgacagaagctggaccctaagatcgcagtcgctgcccaaaactgctataaagttaccaatggggcttttaccggtgagatcagtcccggtatgatcaaggactgtggggcgacatgggtggtgttgggacacagtgaaagacgccatgtgttcggagagtccgacgagctgattggtcagaaggtggcacacgccttagctgagggcctcggagtcattgcatgcatcggtgaaaaactggacgagcgagaggcaggcatcaccgaaaaggtggtctttgaacagaccaaagttatagcagacaacgtaaaggattggtccaaagtagtgctggcttatgagcctgtctgggccataggcactggaaagacagccacccctcagcaggcccaggaggttcacgaaaagcttagaggctggcttaagagtaacgtttcagatgccgtggcacaatctaccagaattatctatgggggtagcgtgactggggctacctgtaaagagttggccagtcaaccagatgttgatgggttcttggtcggaggagcctctctcaagcccgaattcgtggacatcataaatgcaaagcagtag

SEQ ID NO: 209568 - DNA, 504 bp, synthetic construct
  misc_feature 1..504: note = Description of Artificial Sequence: Synthetic coding sequence
  source 1..504: mol_type = other DNA
atgatcaaggactgcggcgccacctgggtggtgctgggccacagcgaaaggcgccatgtcttcggcgagtctgacgagctgattgggcaaaaggtagctcatgctctagccgaggggcttggcgttatcgcatgtatcggagaaaaattggacgagcgcgaggcagggataaccgagaaagtggtattcgagcagaccaaggtgatcgccgacaacgttaaggactggtccaaggtggtgttggcttacgagcctgtttgggccatcggtaccgggaagaccgcaacacctcagcaggcccaggaggttcatgaaaaattgcgcggctggttgaagagtaatgtcagtgatgctgtagcccagtccaccaggattatttatgggggcagtgttaccggagccacttgtaaggagctggctagtcaaccagacgtggatgggtttctggtcggaggtgcctccctgaagccggaattcgtggacatcattaacgcaaagcagtag

SEQ ID NO: 209569 - DNA, 1233 bp, synthetic construct
  misc_feature 1..1233: note = Description of Artificial Sequence: Synthetic coding sequence
  source 1..1233: mol_type = other DNA
atggacgtgatggagctgctggaggaggacctgacctgccccatctgctgtagcttgttcgacgatcctagggtgctcccctgctcccataatttttgcaaaaagtgtttggaaggaattttagaagggagcgttcggaatagcctatggcgtcctgccccattcaagtgccctacatgccgaaaagaaacctccgccactggcataaattctctccaggtcaactatagcctaaagggcatagtggagaagtataacaagattaagatctcaccgaaaatgccagtgtgtaagggacatctggggcagcctctgaacatcttctgcttaactgacatgcagctgatttgtggaatctgcgctaccagaggcgaacataccaaacacgttttctgcagcattgaagatgcctatgctcaggagcgcgacgcattcgagtccctattccagtcttttgagacctggcgccggggggacgcactgtcaagactggatacactggagacctcaaagagaaaaagcctgcagttactgacaaaggattccgataaggtcaaggaattcttcgaaaagctgcagcacaccttagatcagaagaaaaacgagattcttagcgatttcgaaacgatgaaactggcagtaatgcaggcctatgatcctgagatcaataagttgaataccatcctccaggaacagaggatggccttcaatattgccgaagcctttaaggatgtgtctgagcccatcgtgttcctgcaacagatgcaggaattcagagagaagatcaaggttattaaggagacccctctgccgccctcaaaccttccagctagccccctcatgaagaatttcgacacaagccaatgggaagatattaagctggttgatgtggacaagttgtctctgccacaggataccgggacattcatttcaaagattccctggtcattctacaagctgttcctgcttatcctgctgttaggattggtaatagtgtttggccctactatgttcctggaatggtcactattcgacgacctggcaacttggaaagggtgtctgagcaacttctcctcttatctgaccaaaacagccgacttcattgagcagtcagtgttttactgggaacaagtgacagatggtttctttatctttaatgaacgattcaagaactttacgctggtggtcttgaacaacgtggctgaatttgtatgtaagtataagcttctgtag

SEQ ID NO: 209570 - DNA, 1233 bp, synthetic construct
  misc_feature 1..1233: note = Description of Artificial Sequence: Synthetic coding sequence
  source 1..1233: mol_type = other DNA
atggacgtgatggagctgctggaggaggacctgacctgccccatctgttgtagcttgttcgatgatccacgcgttcttccttgcagccacaacttttgtaagaagtgcctggagggtattctcgaggggtctgtgaggaacagtctgtggcgcccggcaccctttaagtgtcctacatgccgaaaagaaacaagtgctacaggcatcaactcgctgcaggtgaactacagcctgaaagggattgtcgagaaatacaataagattaaaatttcacccaaaatgcctgtatgtaaggggcacctaggccaaccactgaatatattttgtttgaccgacatgcagctgatttgtgggatatgcgcaacccgtggcgagcacaccaagcacgtgttttgcagcatcgaagacgcctacgcccaggaacgagacgcctttgaaagtctgtttcagtcattcgagacctggaggaggggagatgcactgtcccggctcgacactctcgaaacatcaaaacgtaagtctctgcagctgctaactaaggacagcgacaaagtgaaggaattctttgagaagcttcagcatacactggatcagaaaaagaacgagattctctctgactttgagaccatgaaactagccgttatgcaggcctatgatcctgagatcaataaactgaatactattctgcaagaacaaaggatggcttttaacatcgccgaagccttcaaagatgtgagcgagccaatagtgtttttacagcagatgcaggaatttcgtgagaagatcaaagtgatcaaggaaacccctttacctcccagcaatctccctgcaagccctctgatgaagaactttgacacgagtcaatgggaggacattaagttggttgatgtggacaaattatctttacctcaagataccgggactttcatctctaagattccatggagtttctataaacttttcctgctgatcctgttacttgggctggtgattgtgtttggccctacaatgtttttggagtggtccctctttgacgatcttgcgacctggaagggatgtctaagcaattttagctcttatctgactaagacagcagacttcatcgagcaatcagtgttctactgggaacaagttacagacggatttttcatcttcaacgagcgctttaagaactttactttagtagtcttaaataacgtggctgaatttgtgtgcaaatacaagctgctctag

SEQ ID NO: 209571 - DNA, 1224 bp, synthetic construct
  misc_feature 1..1224: note = Description of Artificial Sequence: Synthetic coding sequence
  source 1..1224: mol_type = other DNA
atggagctgctggaggaggacctgacctgccccatctgctgcagcctgtttgacgatcccagagttctcccatgctcccataacttctgtaagaagtgcctggaaggaattctagaaggcagcgtccgcaacagcctgtggaggcccgcaccgttcaagtgtccaacgtgtaggaaggaaaccagtgccactggcatcaactctttgcaggtgaactacagcttaaagggcatcgtggaaaaatacaacaaaattaagatctctccgaagatgccagtatgtaagggacacttggggcagcccctgaacatcttttgcctgaccgacatgcagttaatttgtggaatttgtgcaacacggggggaacacacaaagcacgtgttctgtagtatcgaagatgcatatgcgcaagagagggacgctttcgaatcactgtttcaatcttttgagacctggcgcaggggcgacgctctctctaggctcgacaccttggaaacttcaaagcgaaagtctctgcaactgttgacgaaagattctgacaaggtcaaggagttctttgagaagctgcagcataccctggaccaaaagaaaaatgagatcctctccgacttcgagactatgaaacttgccgttatgcaggcatacgacccagagataaacaaattaaatacaatcctgcaagaacagaggatggcatttaacatcgcagaggctttcaaggacgtatccgagccgattgtgtttctgcaacaaatgcaggagttccgcgagaagattaaggtgattaaggaaacccccctcccaccgagcaatttaccggcttctccccttatgaagaacttcgatacctcacagtgggaagacatcaaacttgtcgatgtcgacaagcttagccttccacaggataccgggacatttatcagtaagattccctggagtttttacaaattattcctccttattttactcctggggcttgtaatcgtgttcggacccacaatgtttctggagtggagcctcttcgacgacctcgccacatggaaaggctgcctgtctaacttttccagttatctgaccaagacggccgacttcatagagcagtctgtgttctattgggagcaggtgacggacgggttctttatctttaacgagagattcaaaaacttcacattggttgtgttgaataacgtggccgaatttgtctgtaagtataagctgctgtag

SEQ ID NO: 209572 - DNA, 801 bp, synthetic construct
  misc_feature 1..801: note = Description of Artificial Sequence: Synthetic coding sequence
  source 1..801: mol_type = other DNA
atggagctgctggaggaggacctgacctgccccatctgctgcagcctttttgacgaccctagagtgctgccatgcagtcataatttttgcaaaaagtgtctcgagggtatactggagggaagtgtgcgaaatagcctgtggaggcccgctcccttcaagtgtcctacgtgcagaaaggaaacctccgctacaggcatcaactcccttcaggtaaactacagtctcaagggcatcgtggagaaatacaacaagattaaaatctctccaaagatgccagtttgcaagggtcacctgggacagcccctgaacattttctgcttaacagatatgcaactaatctgtggaatttgcgcaacaagaggagagcataccaagcacgtcttttgttcaattgaggatgcgtatgcgcaggaaagagacgctttcgagtccctgtttcagtccttcgaaacatggaggaggggggacgccttgagtcgtctggacaccctggagaccagcaagcgtaaatccctgcagctcctcacaaaggactccgacaaggtaaaagagttctttgaaaagcttcagcacactcttgatcagaaaaaaaacgaaatactgagcgactttgagactatgaaactcgccgtgatgcaggcttacgaccccgaaatcaacaagctgaacacaattcttcaggaacagcgaatggcctttaatatagccgaagctttcaaggacgtcagtgaaccaattgtctttctgcagcagatgcaagagttcagagagaagatcaaggttataaaagaaactccctag

SEQ ID NO: 209573 - DNA, 1224 bp, synthetic construct
  misc_feature 1..1224: note = Description of Artificial Sequence: Synthetic coding sequence
  source 1..1224: mol_type = other DNA
atggagctgctggaggaggacctgacctgccccatctgctgcagcctcttcgatgaccctcgggtgttaccatgctcccacaatttctgcaaaaagtgtttggagggcatcctcgagggttcagttaggaactctctgtggcgtcccgcacctttcaagtgtcctacctgtcgcaaggagacatccgccacaggcatcaattcactgcaagtcaactattccttgaaggggattgtggaaaagtataacaaaatcaagattagccccaagatgcccgtgtgcaagggacacctgggacagcctttgaacatcttctgtctgaccgacatgcaattgatatgtggcatctgcgcaacccggggggagcacaccaagcatgttttctgctctatcgaagatgcgtatgcacaggagcgagacgctttcgagtctctcttccaatctttcgaaacatggagaaggggggacgccctaagtagacttgacacgctcgagacctctaaaaggaaatccctccaactcttgacaaaggacagcgataaggttaaggaattctttgagaagctccagcataccctcgatcagaaaaagaacgaaatcctctccgatttcgagaccatgaagctcgccgtcatgcaagcctatgaccccgagataaacaagctgaacaccatcctgcaggaacagcgaatggcattcaatatcgccgaggccttcaaggatgtgtccgaaccaattgtgtttctccagcagatgcaggagttcagagagaagatcaaggttataaaggaaacccctctcccaccttctaacctccccgcttctcctcttatgaaaaacttcgacaccagtcagtgggaggacatcaagctggtggatgtagataagctctcactacctcaggatacagggacgtttataagcaagattccctggagcttctacaagcttttcctgttgatccttctgctgggcctcgtgatagtgttcggaccaacaatgttcttagaatggtctctctttgacgatttagctacttggaaaggatgcttgagcaacttctcttcatatctgactaaaaccgctgatttcatagagcagtcagtcttctattgggaacaggtgacagatggattctttattttcaacgagcggttcaaaaactttacactcgtggtgctgaacaatgtggccgagttcgtttgtaaatacaaactgttgtag

SEQ ID NO: 209574 - DNA, 390 bp, synthetic construct
  misc_feature 1..390: note = Description of Artificial Sequence: Synthetic coding sequence
  source 1..390: mol_type = other DNA
atggagctgctggaggaggacctgacctgccccatctgctgcagcttgttcgacgatccaagagtgctgccctgttcccacaacttttgtaaaaagtgcctagaaggaattctcgagggatcggttcgtaactcactgtggcgtcccgccccatttaagtgcccaacttgccgaaaggagactagcgcaactggaatcaactctctgcaggtgaattatagccttaagggaatcgtggagaagtataataagattaaaatctctccaaaaatgccagtgtgtaaaggccaccttggtcagcccctcaacatcttttgtctgacagatatgcagctcatctgtgggatttgcgccacacgcggggagcataccaagcacgtattctgctag

SEQ ID NO: 209575 - DNA, 1224 bp, synthetic construct
  misc_feature 1..1224: note = Description of Artificial Sequence: Synthetic coding sequence
  source 1..1224: mol_type = other DNA
atggagctgctggaggaggacctgacctgccccatctgctgcagcctgttcgatgatcctcgcgtccttccgtgttctcataatttttgcaaaaaatgtctagaagggatcctggaggggtccgtgagaaacagcctgtggcggcctgcacctttcaaatgtcccacatgccgtaaggagacatccgcaaccggaataaactctcttcaggtcaactatagccttaaaggcatcgtggagaagtataacaagataaagatttcacctaaaatgccagtctgtaaaggccatctcgggcagccactgaatattttctgtttgacagacatgcaactaatctgtggtatatgcgcaaccaggggggaacacaccaagcacgtattttgtagcattgaagatgcctatgctcaggagcgggacgccttcgaatctctctttcagtcctttgagacatggcggaggggcgatgccctgtctcgacttgatacattggagacctcgaagaggaagtccctgcagctgctaaccaaagacagtgacaaggtaaaagaattttttgaaaagctgcagcataccctggatcagaaaaagaatgagatcctctccgattttgagactatgaagcttgctgtgatgcaggcttatgaccctgaaattaacaagctaaacactatcctgcaggaacaacggatggcattcaatatcgctgaggccttcaaggacgtgtccgagcctatcgtcttcctgcagcagatgcaggagttcagggagaagatcaaggtaatcaaagagacaccacttcctccatctaaccttccggcctcacccctgatgaagaacttcgacaccagtcaatgggaggatattaaactcgttgacgtggacaaactctctttacctcaggatacgggaacattcattagcaaaatcccctggtctttttataagctcttcctgcttatcctgcttctgggactggtcatcgtgttcgggccaaccatgtttctggagtggagcctgtttgatgacttagccacttggaaaggctgcctgtctaactttagctcctatctcactaagaccgccgattttattgaacagtctgtgttctactgggagcaggtgacagacggtttttttatcttcaatgaacggtttaaaaattttactctggtggtgcttaacaatgtggccgagtttgtgtgcaagtataagctgctgtag

SEQ ID NO: 209576 - DNA, 669 bp, synthetic construct
  misc_feature 1..669: note = Description of Artificial Sequence: Synthetic coding sequence
  source 1..669: mol_type = other DNA
atgaacgacctgagcaaccgggtgtggagcatcagccaggagcccgatcctgtccagcggctgcaggcatataccgccaccgaacaggagatgcaacaacagatgtctttaggcgaactatgtcacccggtgccactgtctttcgagccggtgaagagcttctttaagggactggtggaagctgtggaatctacactgcagacacccctcgacatcaggttgaaagagtccatcaactgtcagctgtcagacccttcaagcaccaagccaggcactttactgaaaacatcccccagccctgagagatcccttctgctgaaatcctgttgggcagcctggggtccatgtccatgttgcggcagcacacgttccggcaagtgttggctggtcacagcatccccccccgccgccactactggtcggcttacctgcagaaggcgagcccccgccgggggatgggctaggcccacccccccattcggcgctgcaggacctcggccacccccagcttgggcagcaacagcgtctcctggcgcatcaagtgcaactacgctgtctacaggaccttctaccacggcctctgccgcagcatgtggcccagcaaccacaagcaccgggagtgctagcagctggacgactagaccagcctcttcaccttccaccacatag

SEQ ID NO: 209577 - DNA, 1329 bp, synthetic construct
  misc_feature 1..1329: note = Description of Artificial Sequence: Synthetic coding sequence
  source 1..1329: mol_type = other DNA
atggccggcgccgccaccggcagccggacccccggccggagcgagcttgtggaggggtgtggctggcggtgccccgaacacggagaccgagtggcagaactgttctgccggagatgccgcaggtgtgtgtgcgcactgtgtccggtgctgggggcacaccgggggcacccagtaggtttggccctcgaggctgctgttcacgtacaaaaactgtcacaagagtgtctcaagcagctggcaatcaaaaagcagcagcacatcgacaatattacacaaattgaggacgccaccgaaaaactgaaggccaacgcagagtcctctaaaacttggttgaagggcaaattcactgagctgagattgctgctggacgaagaggaagcactcgcgaagaaatttatagataagaacacccagctgactctacaggtctacagggagcaggctgactcttgtcgcgaacagctggatatcatgaatgatctgagcaaccgcgtgtggagcatttcccaggagcccgatcctgtgcaaagactgcaggcctacaccgctacggaacaggagatgcagcagcagatgagcctgggggagctgtgtcatccagtaccactgtcgttcgagcctgttaaaagcttcttcaagggcctagtcgaagccgtcgagtctaccctgcagacaccactggacattcgcctcaaggaaagtattaattgtcagcttagcgacccgagctccactaaaccgggcaccctgctcaagacatcgccatcacctgagaggagcctcctgctaaaatatgcaaggacacccactctcgatcccgacactatgcatgctagactgcgcctgagcgcagacaggctgactgttaggtgcggtctgctgggaagtctgggtcccgtgcctgtgcttcggtttgacgcattgtggcaggtgctggcgagagactgttttgctactggaaggcactattgggaggtggatgtgcaagaagcgggagctggatggtgggtaggagctgcctacgcttcattgcggcgacgcggagcgtcagctgcggcccgcttggggtgcaaccgccagtcttggtgtctgaagcgatacgacctcgagtactgggcctttcacgacgggcagaggagccggttgagacccagggacgatttagacaggctaggcgtctttctcgattatgaagctggagtcctggcattttatgacgtaaccgggggcatgagccacttgcatacttttagagccactttccaagaaccactttaccccgccctccggctatgggaaggagctatatcgataccgcgccttccgtag

SEQ ID NO: 209578 - DNA, 1329 bp, synthetic construct
  misc_feature 1..1329: note = Description of Artificial Sequence: Synthetic coding sequence
  source 1..1329: mol_type = other DNA
atggccggcgccgccaccggcagccggacccccggccggagcgagctggtcgaggggtgcggatggcgctgtcctgagcatggagaccgggtggccgaactgttttgtcggcgatgtcgacgttgcgtgtgcgcactttgcccagtactgggcgcgcacagaggtcaccctgtggggttggcattggaagctgctgtacatgtgcagaaactatcacaggagtgtctgaagcagctcgctatcaagaagcagcagcatattgataatatcactcagatcgaggacgctaccgagaaactcaaggccaatgccgaatccagcaagacctggctgaagggaaagttcactgagttgagactgctgctagatgaagaagaggccctggccaagaagttcatagataagaacacccagcttactcttcaagtgtatagggagcaagcggactcttgcagggagcagcttgatatcatgaacgatttaagcaaccgcgtgtggagcataagccaggaaccagaccctgtgcagagactccaggcttacacagcgacagaacaggagatgcagcagcagatgtcactgggcgagctgtgccatcctgtgcctctctcctttgagcctgtgaagagcttcttcaaaggactggtggaagctgtggaaagcaccctgcaaacaccgctggacatacgtttaaaggagtcaatcaattgtcagctcagcgacccctcgagcaccaaacctggcactctccttaagacatctccctctcccgagcggagccttctgctgaaatatgccagaaccccgacgctcgacccggacaccatgcatgctcggctacgcctcagcgcggacagacttaccgtgcgctgtgggctgcttggatcactgggacccgtacctgtgctaaggttcgatgcactgtggcaggtcttagcccgcgactgtttcgccaccgggagacattactgggaggttgacgtccaggaggcaggagctggatggtgggtcggtgccgcttacgcatctctgagacgccggggggcgtctgccgctgcacggcttgggtgcaatcggcagtcttggtgcctgaaacggtatgaccttgagtattgggccttccacgacggccaacgctcaagacttcggcctcgggacgacctggaccgtctgggcgtgtttctcgactacgaagccggagtcctggccttttatgatgtgacaggaggcatgtcacacctccacacatttcgcgccactttccaagagccactttacccagctctccgactgtgggagggcgccatttccatcccaagactgccatag

SEQ ID NO: 209579 - DNA, 1221 bp, synthetic construct
  misc_feature 1..1221: note = Description of Artificial Sequence: Synthetic coding sequence
  source 1..1221: mol_type = other DNA
atggccggcgccgccaccggcagccggacccccggccggagcgagctcgttgaaggctgtggttggcgctgccctgaacatggcgacagggtggcagagctcttctgccggagatgtagacgatgcgtgtgcgccctatgtccagttctgggcgcgcatcgcggtcatcccgtaggccttgctctcgaagccgccgtccatgttcagaaactctcacaagaatgcctgaaacagttggccataaagaaacaacagcatatcgataacatcacacaaattgaagacgctacagagaaactcaaggccaatgccgaatctagcaaaacttggctcaagggaaagtttaccgagttgaggcttctgctggatgaggaggaggccctggctaagaagttcatcgataagaacactcagctcaccttacaagtgtatagggagcaggctgacagctgcagagaacaactggacatcatgaatgacctgagcaatcgcgtttggagcataagtcaggagcccgacccagtgcaacggttacaagcttacactgcaacagaacaggagatgcagcagcagatgagtctgggcgagctgtgccatcccgttcccctttctttcgagcctgtgaagtccttctttaaagggcttgtagaggcagttgaaagtactctccagaccccgctcgatattcgcttaaaggagagcataaattgtcaactttccgacccctcgtcaacaaaacccggaacgctgcttaagacttcaccaagcccagaaagatcgctgctgctgaaatatgcgcgcacccccacactggatcccgacaccatgcacgcaaggcttcggctctctgcggatcggctaacagtaagatgtggactactgggctcactcgggccggtgcctgtgctcagatttgacgccctgtggcaggtgctcgcaagagattgcttcgccacaggacggcattattgggaagtcgacgttcaagaggctggagccgggtggtgggtcggcgcagcctacgctagcttaagaagaaggggggcatcagccgcggctcgactcggctgcaatcgccagtcctggtgcctgaagagatatgacctggaatactgggcttttcacgatggccaacgatcggcatgtggacccgctaccacaagcactggatccgcttcatcatggacaacaaggcccgcttcttcaccgtctacgacatag

SEQ ID NO: 209580 - DNA, 762 bp, synthetic construct
  misc_feature 1..762: note = Description of Artificial Sequence: Synthetic coding sequence
  source 1..762: mol_type = other DNA
atggccggcgccgccaccggcagccggacccccggccggagcgagctggtggagggctgcggatggaggtgtcccgaacacggtgatcgagtggcagagctgttttgccggcgttgccgcaggtgcgtgtgtgccttatgtccagtgttaggggcacacaggggacaccctgtcgggttggcgctggaagcggctgtgcacgtacagaagctgtcccaagaatgccttaagcagcttgctatcaaaaagcaacaacacatcgataacataacccagatagaggacgctactgaaaagttgaaggctaatgccgaatcatctaaaacttggttgaaaggaaagttcaccgagctcaggctgctgctggatgaagaggaggccctcgcaaagaagttcatcgataagaatacacaacttactctccaagtgtacagggagcaagctgatagttgcagggaacagcttgatatcatgaatgacttgtcaaacagggtctggagtatatctcaggagccagatcctgtgcaacgattacaggcgtacactgctactgagcaagaaatgcagcagcagatgtctctgggggaactgtgtcaccctgtccccttaagtttcgagcctgtgaagtcctttttcaaggggttagtggaagctgtggagtcaaccctgcagacccctcttgacatcaggctgtcaccaacaaaccacgcctattctgccctcaaggtttcatccccccgcctggtatccaataggccatag

SEQ ID NO: 209581 - DNA, 1329 bp, synthetic construct
  misc_feature 1..1329: note = Description of Artificial Sequence: Synthetic coding sequence
  source 1..1329: mol_type = other DNA
atggccggcgccgccaccggcagccggacccccggccggagcgagctcgtggagggctgcggctggagatgccctgaacatggcgatcgggtggcagaattgttctgccgtagatgccgccgatgcgtgtgtgccctttgccctgtgttgggcgcacacagagggcaccctgtgggcttggctctggaggctgccgtacatgtgcaaaaactgagccaggagtgcctcaagcagctagctattaagaaacagcagcacatcgacaatatcacccagatagaggacgccaccgaaaagctgaaggcaaacgccgaatcgtccaagacttggctgaagggtaagtttacggaactcagactgctgcttgatgaggaagaagccctcgccaaaaaattcatcgacaagaacacccaactgaccttgcaggtctatcgagaacaggctgacagctgccgcgaacagctcgacatcatgaatgacctgtccaaccgcgtgtggagcatttcacaagagccggaccctgtccagcgactgcaggcttataccgccaccgagcaggaaatgcagcagcagatgtctttaggggaactctgccatcccgttcccttgagctttgagccagttaagagcttctttaagggcttagtagaggcggtcgaatctacccttcagacacctctggacatcagactaaaggagtccattaattgtcagctatctgatccatcttccacaaagccaggtaccttgcttaagacaagtccaagccccgagcgcagtctcctgctgaaatacgcccgaacgcccacgctcgaccccgacaccatgcatgcaagattgcggctcagtgccgaccggttgacagtccgctgtgggctgctgggttccctgggtccggtacccgttctccgattcgacgctctgtggcaggtattggcgcgagactgcttcgctaccggccggcactactgggaggtcgacgtgcaggaggcaggtgcaggctggtgggtgggtgccgcctacgcttccctgcggaggcgcggggcgtccgcagctgcacgattgggttgcaatagacagtcctggtgcctcaaaagatacgatctagagtactgggctttccacgacggtcagcgctcacgcttacggcctcgggacgacctggaccgcctcggcgtgttcttggattatgaggccggcgtgctcgcattctacgacgttacgggaggaatgtcccatctccataccttccgagccacctttcaggaaccattgtatcccgcactaaggttgtgggaaggtgccatatctatcccccggctgccttag

SEQ ID NO: 209582 - DNA, 672 bp, synthetic construct
  misc_feature 1..672: note = Description of Artificial Sequence: Synthetic coding sequence
  source 1..672: mol_type = other DNA
atgagcgccggcagcgacggcggcggccggcacttctgcggcggcatcaactgccaattgtccgatccttcttccactaaaccagggaccttactcaaaacatcccccagtcccgagcgtagcttgctgcttaaatatgctaggacacctactcttgaccccgacactatgcacgcaagactgcgactctccgctgaccgcctaaccgtgcgttgcggcttactcgggagtttgggccccgtgcctgtgctccgcttcgatgcactctggcaggttctggctagggactgtttcgcgacaggtcgccattattgggaagtggatgtgcaggaggctggagcaggatggtgggtgggcgccgcttatgcctctctccggaggagaggggcaagcgcagctgcaagactgggctgcaaccgccagtcctggtgtctcaagcgttacgacctggagtactgggcatttcacgacggccagcgttccaggctgcgaccgcgagacgacctggaccgcctgggcgtgtttctggactatgaggctggcgtcctagccttctatgatgtgacagggggcatgagccacttacacaccttcagagcaacctttcaggagccactttacccagctctgcgtctgtgggagggagctatttcgatccctcgactcccatag

SEQ ID NO: 209583 - DNA, 2316 bp, synthetic construct
  misc_feature 1..2316: note = Description of Artificial Sequence: Synthetic coding sequence
  source 1..2316: mol_type = other DNA
atgcaccggagcggccggtacggcacccagcagcagcgggccggctctaaaactgctgggcccccttgccaatggagccggatggctagcgaaggtaccaatatcccttcccccgtcgtgagacaaatagataagcaattcctcatctgctcaatctgtctagaacggtacaaaaaccctaaagtcttaccatgcttacacaccttctgcgaacgctgtctccagaactacattcctgcccactctctgaccctgtcgtgtccagtctgcaggcagacgtccatactgccagagaaaggggttgctgcccttcagaacaactttttcatcacaaacctaatggacgtgttgcagcgaactcccgggtctaatgcggaagaatcctccatcctggagactgtcacagctgtcgctgctggcaaacctctcagttgccctaatcatgatggcaatgttatggagttttactgccaaagctgcgaaactgctatgtgcagagaatgcacagagggtgaacacgctgaacacccaacagtgcctctcaaagacgtggtcgagcaacacaaagcatcactgcaggtgcagctggacgcggttaacaagaggctgcccgagatcgactctgccctgcagttcattagtgagatcattcaccagttaaccaaccagaaagcctctattgtggatgatatccattccacctttgacgaactgcaaaaaaccctaaatgtgcgcaaatcagttctgctgatggagctggaggtaaactatggcctgaaacataaagttctgcagtcacagctggacaccctcctgcaggggcaggaatctatcaagagttgctccaactttacagctcaggcactaaatcacggcacggagactgaagttcttcttgttaagaagcagatgagcgaaaaactgaacgagctcgcggatcaggattttcccctacatccccgcgaaaatgaccagctggactttatcgtcgaaacggagggtctcaagaagtccatccacaatttggggactattctaaccactaatgccgtagcatctgagaccgttgcgactggcgaggggctccgacaaaccatcatcggacagcccatgtcggttactattaccaccaaagacaaagatggagagctgtgtaaaaccgggaatgcgtacctcacagcagagctaagcacgccagatggcagcgtggccgacggcgaaatcctggacaataagaacgggacctatgaatttctttacactgtccagaaagagggcgactttacactttccctgagactatacgaccagcacattcgtggaagtccttttaaactgaaggtaatccggagcgctgacgtctcgcccaccacagaaggagtgaaaagacgggtcaagtcccccgggtccgggcacgttaaacaaaaggctgttaaacggccagcgagcatgtactctaccggtaagaggaaagagaacccaatagaagatgaccttatcttccgggtgggtacgaagggaagaaacaaaggagaattcaccaacttgcagggggttgcagcaagcacaaatggaaagatcttgattgcagactcaaataaccaatgcgtgcagattttctccaatgatgggcagtttaaaagcaggtttggtatccgaggtagatccccaggccagttacagagacctacgggagtcgccgtgcacccctcaggagacatcataattgctgattatgataataaatgggtgtcaattttttcttcagacgggaagttcaagaccaaaatcggctccggaaaacttatgggaccaaaaggcgtgtctgtcgatcgcaatggtcacatcattgttgttgacaataaggcttgttgcgtgtttatattccaaccaaatgggaaaattgtgaccagattcggctcacggggcaatggcgataggcaatttgcaggaccacattttgctgcggtgaattctaacaacgagatcatcattaccgactttcataatcatagtgttaaagtttttaatcaggaaggggaattcatgctgaaattcgggtcaaatggggagggtaatggacagttcaacgccccaacaggggtggccgtcgactcaaatggaaacatcattgtcgctgattggggcaacagccgaatccaggtgttcgacggttctggcagtttcctgagctacatcaataccagcgcggatcccctctatgggccacaggggctggcccttacctcggacggccatgtagtggtggcagactctggcaaccattgttttaaggtgtatcgatatctgcagtag

SEQ ID NO: 209584 - DNA, 2235 bp, synthetic construct
  misc_feature 1..2235: note = Description of Artificial Sequence: Synthetic coding sequence
  source 1..2235: mol_type = other DNA
atggccagcgagggcaccaacatccccagccccgtggtgcggcagattgataaacaattcctgatttgttccatttgcctggaacggtataagaatcccaaggtcctgccctgtcttcacactttttgcgagcggtgcctccagaactacattcccgcccactctctgactctctcatgccccgtatgccggcaaactagtatattgcctgagaagggagtggccgctctgcaaaacaatttttttataaccaatttgatggatgtgttgcaaaggacacccggtagcaatgcggaggaatcttcgatcctggaaacagtgaccgctgttgctgcagggaaaccactgtcatgtccaaatcacgacggcaatgtaatggagttctactgtcagtcatgtgaaaccgcgatgtgtagagagtgtactgagggtgagcacgcagagcatccgactgtgcctcttaaagacgttgtggagcaacacaaagcaagcctgcaggtgcaactggacgccgtgaacaagaggctgccagagattgactctgcgctgcaattcatatcagagatcatacaccagctaaccaaccaaaaagcttctattgtggatgacatccactctaccttcgatgagctgcagaagacactgaatgtgcgcaaatccgttctgctaatggagctggaagtgaactacggcttgaagcataaggtcctccagtcccagctggacaccctgctgcaggggcaggaatccattaaatcctgctccaattttactgcccaggcgctgaaccacgggacagagacagaagtgctcctggtcaagaagcagatgtccgagaagctgaacgagctagccgaccaggactttccactgcatccccgagagaatgatcagttggattttattgtcgaaaccgaaggcttaaagaagtctatccataatcttggaaccatcttgacgactaatgcggtagctagtgaaacagtggcaaccggagaaggcctcagacagacaattatcggacagccaatgagtgtgactatcacaaccaaagacaaagatggagaactttgcaagaccggcaatgcatatctcacagccgagctgagcacacccgatggctcagtcgccgatggggagatcttggataataaaaatggcacatacgagtttctctataccgttcagaaagagggggattttaccctctccctacggctatacgatcagcatattagaggcagcccgtttaagctgaaggtcattcggtcagcagacgtgtccccaacgaccgaaggtgtgaaaagacgagtcaaatcgcctggctcaggccacgtcaaacagaaggcagtcaagcgcccggccagcatgtattctaccggtaagcgcaaagaaaacccaattgaggacgacctgatattccgggtggggacaaagggcagaaataagggtgaattcaccaatctgcagggggtggccgcttctactaacggcaagattttgattgcggactctaataatcagtgcgtacagattttttccaatgacggccagttcaagtcccgttttggcattcggggtcgatcccccgggcagcttcagaggcctacaggagtggcagtacacccatccggcgacattatcatcgcagattatgacaacaagtgggtgtccatcttctcttccgatggtaaatttaaaactaagattgggagcggaaaactgatgggacccaaaggtgtctcggtagatcgcaacggtcacatcattgtcgtagataataaagcatgctgcgtcttcatatttcagcccaacggcaagattgtgacacgctttggaagtcgtggcaacggggatcgacagttcgcgggaccacactttgcggcggtgaattccaataacgagatcatcatcaccgacttccacaatcactccgtaaaagttttcaatcaggagggggaattcatgttgaaatttgggtccaatggagagggcaatggacagttcaacgcccccactggagtggcagtggattctaatggcaatattattgtcgccgactggggaaattcacggatccaggtgtttgatgggagcggatcctttttgtcttacataaatacttctgccgacccactgtatgggccacaggggctggccctgacgtctgatgggcatgtggttgtcgctgacagcggaaatcactgtttcaaggtctacagatacctgcagtag

SEQ ID NO: 209585 - DNA, 1428 bp, synthetic construct
  misc_feature 1..1428: note = Description of Artificial Sequence: Synthetic coding sequence
  source 1..1428: mol_type = other DNA
atggccagcgccgcccggctgaccatgatgtgggaggaggtgacctgtcccatctgtctggatccatttgtagaacccgtctcgattgagtgcggacatagtttctgtcaggagtgcatttctcaggtgggcaagggcggcggctcggtgtgccccgtgtgcagacagcggtttctgttgaagaatttacgccccaataggcagctggccaatatggtcaacaacctgaaggagatatctcaggaggcaagagagggcacacaaggggagcgatgcgccgtccacggcgagagacttcacttattttgtgagaaggatggaaaagccttatgttgggtctgcgctcagtccaggaagcatagggaccacgcaatggtgcctctggaggaggccgctcaggaataccaggagaaactccaggtcgccttgggggagttgcgcaggaaacaggagctcgccgagaaattggaagtagaaattgccataaaaagagctgactggaaaaagaccgttgagacacagaagtccaggattcatgccgaatttgttcagcagaagaacttcttggtcgaagaggagcagcggcaactacaggagctggaaaaggacgagcgcgaacaactgagaattttgggcgagaaggaagcaaaactggcacagcagtcacaagctttgcaggaactcatctctgagctcgaccggcgttgccattccagtgctctcgagttgctacaggaggtaatcatcgtgctggagcggtcagaaagctggaacctcaaggatctcgatatcacaagccctgagttacgctccgtgtgccacgtgcctgggctcaagaagatgttgagaacatgtgctgtacacattaccttagacccagataccgcgaacccctggctcattctttccgaagaccggaggcaggtgcggctcggagacacccaacagtcgatcccagggaacgaggaacggtttgactcttaccctatggtactcggagcccagcatttccacagcggcaagcactactgggaagtcgacgttacggggaaggaagcttgggatcttggagtgtgtagagactcagtgaggcgcaaaggccatttcttgttgtcctcaaagtccggcttttggaccatctggctttggaacaagcagaagtatgaggccgggacttacccccagaccccactgcacctgcaagtaccgccctgccaagtgggcatcttccttgattacgaagcaggcatggtgtctttctacaacatcaccgatcatggctcgcttatatacagcttctctgagtgtgccttcactgggccgctcagaccgtttttcagccccggatttaacgacggaggaaagaatacagccccgctgacactttgtccgctgaacatcgggtcacagggtagtaccgattactag

SEQ ID NO: 209586 - DNA, 1428 bp, synthetic construct
  misc_feature 1..1428: note = Description of Artificial Sequence: Synthetic coding sequence
  source 1..1428: mol_type = other DNA
atggccagcgccgcccggctgaccatgatgtgggaggaggtgacctgtcccatctgcttagatcctttcgtagaacccgtctccattgagtgcggccatagtttttgccaagagtgtatcagtcaagtcggaaaggggggcggatccgtgtgccccgtgtgtcgacagcgctttttgctgaagaatctgcggcccaacaggcagctcgcgaacatggtgaacaaccttaaagagatttcccaagaagcccgcgagggcacccagggtgaacggtgcgccgtgcacggtgagaggctccacttattttgtgaaaaggatggcaaggcactgtgctgggtgtgcgcccagagccgtaaacatcgggaccacgccatggtccccctggaggaagcagctcaggaatatcaggagaaactacaggtggcactcggggagttacggcggaagcaagagctcgccgaaaagttagaggtcgagatagcaattaagagggctgactggaagaagacggtggaaacacaaaagtccaggatacacgccgagtttgtgcagcagaaaaatttcctagtggaggaagagcagcgccagcttcaggaattggaaaaggatgagcgagaacagttgcgaattctgggggagaaagaagctaagctggcccaacagtcccaggctctccaggagctgatctcagagctagacagaagatgtcacagcagcgccctggagctcttacaggaagttatcgtgctgggccctcggagtgaaagctggaatcttaaagatcttgacatcaccagccccgaactacgttccgtgtgtcatgtgcctggtttgaaaaagatgctgcgtacctgtgctgtgcacatcaccctggatcccgatacagcaaacccctggctgatccttagtgaggacagaaggcaagtgcggttaggagatacacagcagagtatacctggaaacgaagagagattcgattcataccctatggtgctcggagctcagcacttccatagcggaaaacattattgggaagtcgacgtaaccggaaaggaggcatgggatctgggggtttgtagggactctgtccgcagaaaaggacattttttgctgagttcaaaaagcggcttctggaccatatggctctggaataaacagaagtacgaagccggaacatatccacagactcctttacatctgcaagtgccaccctgccaggtgggtatattccttgattatgaagccgggatggtgtccttctacaacatcacggatcatgggagccttatctacagcttcagcgaatgtgctttcaccgggcccttgcggccgttcttcagtccagggtttaatgatggcggtaagaacacggcgccactgactttgtgtcctttgaatattggatcgcaaggcagcacagattactag

SEQ ID NO: 209587 - DNA, 1497 bp, synthetic construct
  misc_feature 1..1497: note = Description of Artificial Sequence: Synthetic coding sequence
  source 1..1497: mol_type = other DNA
atggacttcagcgtgaaggtggacatcgagaaggaggtgacctgccccatctgtctagaactgctcaccgagccgttatctctcgattgcggacatagcttctgccaagcctgcataacagccaaaatcaaagagagcgtgataatatccagaggagaaagtagctgcccagtgtgccaaacacgctttcagccaggtaatctgcgccctaataggcatttggccaatatcgtcgaacgggttaaagaggtcaagatgtcacctcaggagggacagaagagggacgtgtgcgaacatcatgggaaaaagcttcagatcttttgtaaagaggatggcaaagtaatctgctgggtgtgtgagttgagtcaagagcaccaggggcatcaaacattccgaatcaatgaggtagtgaaggagtgccaagaaaaactgcaggtcgcattacagcgtttgatcaaggaagatcaggaggctgagaaactggaggatgacattagacaggaaagaaccgcttggaagaattacatccagatcgagcggcaaaagatcctgaagggcttcaacgaaatgagagtgatccttgacaacgaagagcaaagagaactgcagaagcttgaggaaggggaggtgaacgtcctagacaacctggccgctgcaaccgatcaactggtgcaacagcgtcaggatgcctctacactgatttcggacctgcagaggcgcttgcgtgggagttcagtggagatgctccaggacgtaattgatgtaatgaagcgcagcgaatcctggaccctgaagaagcctaagtctgtgtccaaaaaactcaaatccgtgtttagggtacctgatctgtcaggtatgcttcaggtgctgaaggagctgaccgacgtgcaatattactgggtggatgtgatgctgaatccaggtagcgcgactagcaatgtggcaatttcagtagatcagcggcaagtaaagacggttcgtacctgcactttcaaaaacagcaacccatgcgatttttctgctttcggggtcttcggctgccaatatttttccagcggaaagtattactgggaagtagacgtttccgggaaaatagcctggatcctgggggtgcactccaagattagctctctgaacaaacgcaaatcctctggttttgccttcgatccatcagtcaactacagtaaagtgtactccaggtaccggccccagtatgggtactgggtgatcggacttcagaacacatgcgaatataatgcttttgaagattctagcagtagcgaccctaaagtgttgaccctgttcatggctgtacccccgtgtcggataggagtttttcttgactacgaagccggcatagtgtctttcttcaacgtgactaaccatggcgcgctgatctacaaatttagtggctgtcggtttagccggcctgcatatccttattttaatccttggaattgcctcgttccaatgacagtgtgcccccctagttcatag

SEQ ID NO: 209588 - DNA, 684 bp, synthetic construct
  misc_feature 1..684: note = Description of Artificial Sequence: Synthetic coding sequence
  source 1..684: mol_type = other DNA
atggacttcagcgtgaaggtggacatcgagaaggaggtgacctgcccgatatgcctggaactgctgacagagccattatctctggactgcgggcattccttctgccaggcttgcattacagccaaaattaaagagagcgtgattatttccagaggggaaagctcttgccctgtctgccagacacggttccagcctggcaatctgcgccctaaccgccaccttgcaaacattgtggagcgcgtcaaagaagtcaagatgtctccccaggaaggccagaagagagacgtgtgtgagcatcatggaaaaaagttacaaatattttgcaaagaggacggcaaagtgatttgttgggtgtgcgagctctcccaggagcaccagggccaccagacattccggatcaacgaggtggtgaaggagtgccaggagaagctgcaagtggccctgcaacggctgatcaaggaagatcaggaagcggagaagctcgaggacgatatccggcaagagaggacggcttggaaaaattatattcagatagagcgacaaaagatcctgaaaggcttcaatgaaatgagagtaatcctggacaatgaggagcaaagagagttgcagaaactggaggagggagaggtgaatgtgctggacaaccttgccgcagccacagaccagttggtgcagcagcggtag

SEQ ID NO: 209589 - DNA, 612 bp, synthetic construct
  misc_feature 1..612: note = Description of Artificial Sequence: Synthetic coding sequence
  source 1..612: mol_type = other DNA
atggacttcagcgtgaaggtggacatcgagaaggaggtgacctgccccatttgtttagagctattgactgagcccctttccttggactgcggccactcattctgccaggcctgcatcaccgcgaagatcaaagagtctgtaatcatctcccggggggagtcatcttgtccagtatgtcagacaagatttcagccaggaaacctgcggcctaaccggcacctggccaacatcgtggagagggtcaaggaggtgaaaatgagccctcaggagggacagaagcgggatgtctgcgaacatcatggaaagaagctccagattttttgtaaggaggatggaaaagtgatctgttgggtatgcgagctgagccaggaacatcaggggcatcagactttcaggattaacgaggtggtgaaggaatgccaggagaagctccaggtcgccctgcagcggttaattaaagaagaccaggaggccgaaaagctggaggacgacattcgccaggagcggaccgcgtggaaaaattacattcagatagagcgccagaagatactaaagggattcaacgagatgcgggttattctggacaatgaggagcagcgcgaactacaatag

SEQ ID NO: 209590 - DNA, 1263 bp, synthetic construct
  misc_feature 1..1263: note = Description of Artificial Sequence: Synthetic coding sequence
  source 1..1263: mol_type = other DNA
atggacttcagcgtgaaggtggacatcgagaaggaggtgacctgccctatatgcttggaattgctgaccgaacctctcagcttggactgcggccattcgttttgccaggcctgtatcacagcgaagataaaggaaagtgtcattatttcccgaggagaatcctcatgcccagtctgccaaacgcggttccagccagggaatttgcgacccaacagacatcttgccaatatagtcgaacgagtaaaggaagtcaagatgagtccccaggaaggacagaagcgggacgtttgtgagcatcacggaaagaaacttcagatattctgtaaggaagatggcaaagttattttggacaatgaggagcaaagagaactccagaagctggaggaaggagaggtcaatgtgttagataacctggcggccgccaccgaccaactggtgcagcagcggcaggacgccagcaccctgatcagcgacttgcagaggcggctgcgcggatcctccgtggaaatgctccaggatgtaatcgatgtaatgaaaaggtccgaaagctggacgctcaaaaaacctaaatccgtgtctaagaaactgaagtcagttttccgagtccccgacctgagcggcatgctgcaggtcttgaaagagcttaccgatgtccagtattactgggttgacgtgatgctgaatccgggtagtgccaccagcaatgtggccatttctgttgatcagagacaggtgaaaaccgtgcgcacctgtacattcaagaactccaacccgtgtgatttctccgcattcggcgtcttcggctgtcagtatttctcttcaggcaaatattattgggaagtagacgtgagcggtaaaatcgcctggattctgggggtccatagtaaaatctcttctctcaacaagagaaaaagctctggcttcgctttcgaccccagcgtgaactactcaaaggtgtactcacgttataggcctcagtatggctattgggttataggactccagaatacatgtgagtacaacgccttcgaagacagctctagtagtgatcccaaagtccttacgttgtttatggctgttccgccctgtaggattggagtgtttctggattatgaggcgggcatcgtgtccttcttcaacgtaaccaaccatggagcactcatttacaagttttccggatgtagatttagccggccagcttacccgtactttaacccctggaactgtctcgtccccatgacagtgtgccccccctcttcctag

SEQ ID NO: 209591 - DNA, 930 bp, synthetic construct
  misc_feature 1..930: note = Description of Artificial Sequence: Synthetic coding sequence
  source 1..930: mol_type = other DNA
atgcgggtgatcctggacaacgaggagcagcgggagctgcagaagctcgaggaaggtgaggttaacgttctcgacaatcttgctgccgccaccgaccagctcgtgcagcaacggcaggatgcttcaactctgattagcgacctgcagcggcggctaagaggcagctctgtagaaatgttacaggatgtcattgatgtcatgaaacgcagtgagtcatggaccctcaagaaaccgaaatctgtatctaagaagctgaagtccgtcttccgtgtgccagatctgtcaggtatgctgcaagtcttgaaggagctgacagacgtgcagtactactgggttgacgtgatgctgaatcccggttccgccacctccaatgtcgctatcagcgtggaccagaggcaggtgaaaacagtcaggacctgcacctttaagaactccaatccatgcgacttttcagcattcggtgtgttcggctgtcagtatttttcttcaggcaagtactattgggaggtcgatgttagcggaaaaattgcgtggatcctgggagtgcactctaagattagctcactaaacaagaggaagtctagcggcttcgcctttgaccctagcgtgaactacagcaaggtttatagccgctacaggcctcagtacggatactgggtcataggtttgcaaaacacctgtgagtacaacgcctttgaggacagttccagtagcgatccgaaagtcttaactctgtttatggccgttccaccttgccgaatcggtgtgtttcttgactacgaggccggaatcgtgtcattttttaacgtcacgaatcacggcgcgctgatatacaagttttccggctgtcgctttagtaggccagcttatccatacttcaatccttggaattgcctggtccccatgaccgtctgcccacccagcagttag

SEQ ID NO: 209592 - DNA, 1893 bp, synthetic construct
  misc_feature 1..1893: note = Description of Artificial Sequence: Synthetic coding sequence
  source 1..1893: mol_type = other DNA
atggccgagctgtgccccctggccgaggagctgagctgcagcatctgtttggaaccctttaaggagccagtgacgacaccttgtgggcataacttctgtggcagctgtttgaacgaaacctgggccgtgcaaggctcaccatacctctgcccgcagtgtcgggctgtctatcaggcacggccgcaacttcacaaaaataccgttctatgtaacgtcgtcgaacagttcctgcaggccgatttggctagggagcctcctgccgatgtgtggactcctccggcgagagccagtgcgccttcccctaatgcccaggtggcctgcgaccactgtctgaaagaggcggcagtgaaaacttgtcttgtatgcatggcctctttttgccaagaacacctgcagccccactttgactccccagcctttcaggatcatcccttacagccccccgtccgtgacttactgagaagaaagtgttcacagcacaatagactaagggagtttttctgcccagagcactcagaatgtatatgccacatttgcctagtcgaacacaaaacctgcagtcccgcctctctaagtcaggccagcgcagacttggaggcaaccctcagacataaattaacagtgatgtattcccagatcaacggagcatctagggcgctggacgacgtgagaaatagacagcaggacgttcgtatgacggctaatcgaaaggtggagcagcttcaacaggagtatacagagatgaaagccttacttgacgccagtgagacgacgagcactcgaaagattaaagaggaagaaaagcgtgtgaacagcaagtttgatacaatctaccagattctgctgaagaagaaatccgaaatccagaccctcaaggaagagatcgagcagtcacttactaaaagagatgaatttgaattcttggagaaggcgagtaagttaaggggaatctctaccaagcctgtgtatattccagaggtggagctgaaccacaaacttataaaaggtatccatcagagcacaatcgacctgaagaatgagttgaaacagtgcataggacgtctgcaagagcccactcctagctctggggatccaggcgaacatgatcccgctagtactcacaagagtacccggcctgtgaaaaaggtgtctaaagaagagaagaaatctaaaaagccccccccggtcccagcccttcctagtaaactgcctactttcggagctcctgaacagttggtggacctgaagcaggccggactggaggccgcagcgaaggctaccagctctcacccgaatagcactagcttaaaagctaaagtgctagaaaccttcctcgctaaatctcgacccgaacttctggaatactatattaaagttattctcgactacaacacagcccacaataaggtcgccctgtcagagtgttacaccgttgcatcagttgccgaaatgcctcagaactaccgaccacatccccagagatttacttattgttcccaagtgctcggtctgcattgttataaaaaagggattcactattgggaggtcgagctgcagaaaaacaatttctgtggtgttgggatctgctacggctctatgaataggcaggggcctgagagtaggctgggaagaaactcagccagttggtgcgtcgagtggttcaatacaaaaatctcagcatggcacaataacgtggagaaaaccctgccaagcaccaaggctacccgggtgggagtactcctcaactgtgatcacggatttgtgatcttcttcgcggtcgccgacaaggtgcacctcatgtataagtttcgcgtggactttacagaggctttatatcccgccttttgggtgttttctgccggggctactctgagcatttgcagtccgaagtag

SEQ ID NO: 209593 - DNA, 1893 bp, synthetic construct
  misc_feature 1..1893: note = Description of Artificial Sequence: Synthetic coding sequence
  source 1..1893: mol_type = other DNA
atggccgagctgtgccccctggccgaggagctgagctgcagcatctgcttggaaccttttaaggaacctgttactaccccctgcggccacaacttctgtggcagttgcttgaacgagacctgggctgtgcagggcagcccatatctctgtcctcaatgccgggctgtttaccaggccaggccacaattacacaagaatacagtgctgtgtaacgtagtggagcagttcctgcaggctgatctggctagggaaccccccgctgacgtgtggaccccgcccgcccgcgcatccgccccgagccctaacgctcaggtggcctgtgatcactgtctgaaggaagccgctgtaaagacgtgtctggtctgcatggctagcttctgccaggaacacttgcagcctcacttcgattcacccgcctttcaagatcaccccttgcaacccccggtgcgcgaccttcttaggcgcaagtgcagccagcacaatcggttacgcgaattcttctgccctgagcacagcgagtgtatctgccatatttgcctggtcgagcataagacctgttcacctgcgtctctcagtcaggcttccgcagacttggaagccacattgcggcataaactcaccgtgatgtacagtcaaattaatggcgcctcacgggcattggacgatgtgaggaatcgtcagcaggatgtgagaatgacagcaaatcgaaaagtggaacagttgcagcaggaatatactgaaatgaaagcgctcttggatgcgagcgagactacttccacaagaaaaataaaagaagaagagaagagggtcaactcaaagttcgataccatttaccagatcctcctcaagaaaaagtctgaaatccaaaccctgaaggaggaaattgagcaaagcctcacaaaacgcgacgagttcgagttcctggaaaaggctagcaagttaagggggatctctaccaagcccgtgtatattcccgaagtagagctcaaccataagctgattaaaggtatccaccagagcacaattgacctaaaaaatgagctcaaacaatgcataggcagactgcaggagccaacaccgtcttcgggcgaccccggtgagcatgatccagctagcacccacaaatctacacgtccagtaaagaaggtgagtaaagaggagaagaaaagtaagaagcctccccccgtgcctgctctacctagcaagttacctactttcggcgcacccgagcagcttgttgacttgaagcaggcaggtttagaggcagccgctaaggcaacctctagccatcctaattccacctctcttaaagctaaggtactggagacctttttggctaagtcaaggcctgaattactggaatactacatcaaggtcattctggattataacaccgcccataataaggttgctcttagcgagtgttacaccgtggcctcagtcgcagagatgccacagaactatagaccacacccacaacgctttacgtactgcagtcaggtgctgggcttacattgctataagaaaggaatccattactgggaagtggaactacagaaaaataatttttgcggagtcggaatctgttacggttcaatgaatcgacagggacccgaaagtagactcggcaggaacagtgcatcctggtgtgtggaatggtttaacacaaaaattagcgcatggcataataatgtggagaaaacattgccatctacgaaggcaacacgcgtcggagtcctgctgaattgtgaccatggatttgtaatattcttcgctgtggcggacaaggtacatctgatgtacaaatttagagtagattttacagaagccctctacccggctttttgggtattctccgcaggcgcgacactctcaatctgttcccctaagtag

SEQ ID NO: 209594 - DNA, 1077 bp, synthetic construct
  misc_feature 1..1077: note = Description of Artificial Sequence: Synthetic coding sequence
  source 1..1077: mol_type = other DNA
atggccagcggcagcgtggccgagtgcctgcagcaggagaccacctgccctgtatgtttacaatattttgcagagccaatgatgctggactgtgggcacaatatttgttgcgcctgtctggctcgttgttggggcacagccgagacaaatgttagttgcccacaatgccgtgagacctttccacagcggcacatgagacccaataggcacctcgctaacgtgacccaactggtcaagcaactccgcactgaacgcccatccggcccagggggcgagatgggcgtgtgcgaaaaacatagagagccactgaagctttactgtgaagaggatcagatgcccatttgcgtggtatgtgaccggagtagggagcatcgcggacactccgtgttgcctttggaggaggccgtggaggggtttaaagaacagatccagaaccaactagatcacttaaaaagggtcaaagatcttaaaaagagaagacgggctcaaggggagcaggccagagctgagctgttgtccctgacacagatggaacgcgaaaaaatcgtttgggagttcgagcaactttaccactccctgaaagaacacgagtatcggcttctcgcaagactagaggaactggacctggccatttataattccattaatggtgccattacccaattttcgtgtaacatatcacacctgagtagccttatagcacagctcgaagaaaaacagcagcagccaacacgcgagctactgcaagacatcggcgacacactcagccgggccgaacggatcagaatacccgaaccttggatcacgccgcccgacctgcaggaaaaaatacatatattcgcccagaagtgcctgttcctcaccgagtccttgaaacagttcaccgagaaaatgcagagcgatatggaaaagatccaggagctgcgcgaagcccagctgtacagcgttgatgttactcttgaccctgataccgcatatccgtctttgattctgtctgacaacctgcgacaagtacgctactcctacctacaacaagacttgcctgacaacccggagcgaagcccctcaacaacttag

SEQ ID NO: 209595 - DNA, 1542 bp, synthetic construct
  misc_feature 1..1542: note = Description of Artificial Sequence: Synthetic coding sequence
  source 1..1542: mol_type = other DNA
atggccagcggcagcgtggccgagtgcctgcagcaggagaccacctgccccgtgtgcttacaatatttcgctgaaccgatgatgctggactgcggacataatatatgctgcgcatgcttagcacgatgctgggggactgccgagaccaatgtttcctgccctcaatgtcgcgagacattcccgcaaaggcatatgagacctaaccgccatctggccaatgtcacccaactggtaaagcaactgcgcaccgagaggccgtcgggacctggcggcgaaatgggagtgtgtgaaaagcatcgggagcccctcaagctgtactgtgaggaagaccagatgccgatctgcgttgtgtgtgaccggagcagagaacaccgaggacatagcgtgctgcccctggaggaagccgttgagggctttaaggagcaaattcagaatcagctcgaccatttaaaacgtgttaaggacctgaagaagcgtagaagagcccagggggagcaggcacgtgccgagttactctccctcactcaaatggagagggagaaaatcgtgtgggagttcgagcagttgtaccattccctgaaagaacatgaatacagactgctggctagacttgaggaactagacttagcaatctataatagtatcaatggcgcaattactcagtttagctgtaacatcagtcatctgtcttctcttatcgcacagttggaagaaaagcagcagcaacccactagggaactcttgcaggatattggtgataccttgagtcgagccgagcgtatcagaatccctgaaccatggataactcctcccgatttgcaggagaagattcacattttcgcccaaaaatgcctgtttttgactgagtctttgaaacagttcacagaaaagatgcagtccgatatggagaagatccaggaactacgggaagcacagttatactcagttgacgtaaccctcgaccccgataccgcctacccatccctgattctgtctgataacttacgtcaggtaagatacagttatttgcaacaggaccttccagataatcctgagaggtttaacctgttcccttgtgtgcttggaagcccttgcttcattgccggacgacattactgggaggtcgaggttggagataaagcaaagtggactatcggagtttgtgaggatagcgtctgtaggaaggggggcgttaccagcgcacctcagaatggcttctgggcagtttctctctggtacggcaaagaatattgggcattaaccagccccatgaccgcgctgccattgaggacgccactccaacgcgtagggatttttcttgattatgacgctggcgaagttagcttttataacgtgactgagaggtgtcatactttcactttctcacacgccacattctgcggacccgtaagaccatatttcagcctttcgtactctggtggcaagtccgcagctccccttatcatttgcccaatgtctggcatcgacggtttcagcggccatgttgggaatcatggccactctatggagacatctccctag

SEQ ID NO: 209596 - DNA, 1542 bp, synthetic construct
  misc_feature 1..1542: note = Description of Artificial Sequence: Synthetic coding sequence
  source 1..1542: mol_type = other DNA
atggccagcggcagcgtggccgagtgcctgcagcaggagaccacctgccctgtctgccttcagtacttcgctgagccaatgatgctggattgcggtcataacatttgctgtgcctgtctggcccgctgctggggaaccgcagaaacaaacgtgtcttgcccgcaatgcagggagacgttcccgcagagacatatgaggcccaataggcacttggccaacgtgacccaactggtcaaacagctacggacggaacgaccctcaggtcctgggggcgaaatgggagtgtgcgaaaagcatcgtgagcccttaaagctgtactgcgaggaggatcaaatgccgatttgcgtggtttgtgaccgctcaagagagcatagaggacactccgtgctgcccctcgaggaggcggtggaggggtttaaggaacaaattcagaaccaactggaccacctgaagcgagtgaaagatttgaaaaaaagacggagagcccaaggagagcaagcgcgtgctgaactgttgtccctgacacagatggagcgagaaaaaattgtgtgggagtttgagcagctgtatcactcccttaaggagcacgagtacaggctgttagctaggctggaagagctggaccttgcgatctacaacagtatcaacggcgccatcacccagttttcctgcaacatctcacacctgtccagccttatcgcccaactggaggagaaacagcagcagccgactagggagctgctccaggacatcggtgatactctgtcaagagccgaaaggatcagaattcccgaaccatggattacccctcccgacctgcaagaaaagatccacatctttgcacagaaatgtctcttcctgacggaatccctgaaacaattcaccgaaaagatgcagagcgacatggagaagatacaagagctgcgcgaggctcagctgtactctgtcgatgtgacactggaccctgataccgcatatccatctttgattttgagcgacaacctgcgccaagttagatactcatatctgcagcaggatctgccagacaatccggaaagatttaacctcttcccatgcgtactgggctccccttgtttcattgctgggcgccattattgggaggtggaggtcggggacaaggcgaaatggactattggggtgtgtgaggacagcgtgtgtcgaaaagggggagtgacgtctgcaccacagaacggcttttgggctgtttctctgtggtatgggaaagaatactgggccttgacatccccgatgacagcccttccattacgcaccccgctgcagcgcgtgggaatcttcttagattacgacgcaggtgaggtctccttctacaacgtgacagagaggtgtcatacatttaccttttcccacgcgaccttttgcgggccggtgagaccctatttcagcctttcctattctgggggaaagagtgccgccccacttatcatttgccctatgagtggtattgatggtttctcaggacacgtgggtaatcatggccacagtatggagacgtctccttag

SEQ ID NO: 209597 - DNA, 1077 bp, synthetic construct
  misc_feature 1..1077: note = Description of Artificial Sequence: Synthetic coding sequence
  source 1..1077: mol_type = other DNA
atggccagcggcagcgtggccgagtgcctgcagcaggagaccacctgccccgtctgtctccaatactttgctgaacccatgatgctcgactgcggacataacatctgttgcgcatgtttggccaggtgttgggggacagcggaaaccaacgtgagctgccctcagtgccgggaaacgttcccccagaggcacatgcggccaaaccggcacctggccaatgtcacacagcttgtcaaacaactgaggactgagcgaccatctggacccggcggcgaaatgggcgtgtgcgagaaacatagggagcctctcaaactgtattgcgaggaggatcagatgcctatttgcgttgtttgtgataggagccgcgaacatcgcggccactccgtgttacctctggaggaagcagtcgaaggattcaaggagcagatccagaaccagttggatcacctgaaacgggtgaaggacctgaagaagcgaagaagggcccagggcgagcaggccagggcagagctgctctccttgacccagatggaacgcgaaaaaatagtttgggagttcgagcagttataccactcgctgaaggagcacgagtatcgtttgctggcccgcctcgaggagctcgatcttgccatttacaattctattaatggcgccattacccagttctcgtgcaacatcagccacctttccagtctgatcgcacagttggaagagaaacagcagcagccaacccgggagcttcttcaggatatcggcgatactctgagtagggccgagcgtatccgaattcctgagccatggattacacccccagatctccaagagaagatacacatattcgctcagaaatgcctcttcctgacagagagtctcaagcagtttaccgagaagatgcagagcgacatggaaaagattcaggaactgagagaagcgcagctttactccgttgatgtaacactggaccccgataccgcgtacccttcactaatcttgtctgacaatctgcgccaggtcaggtatagttacttgcaacaggacctgcccgacaacccagagagaagcccgagcactacctag

SEQ ID NO: 209598 - DNA, 747 bp, synthetic construct
  misc_feature 1..747: note = Description of Artificial Sequence: Synthetic coding sequence
  source 1..747: mol_type = other DNA
tgactgaagcagttcaccgagaagatgcagagcgacatggagaagatccaagagagcgctgactccttagagggagggatcttagacctgggaagcgtgctgtcacacatcctccccgtctccgaactgcgcgaggcacaattgtactcagttgatgtgactctagaccctgacaccgcctacccatcccttatcctgagtgacaatttacggcaggtgagatatagctatctgcaacaggatttacccgataatccggagaggtttaacctcttcccgtgtgtcctcggaagtccttgttttattgccgggaggcattactgggaagttgaggtgggagacaaagccaagtggacgattggtgtttgtgaggactccgtatgtcggaaggggggcgtgacgtccgctccacaaaacggtttttgggccgtctccctttggtatgggaaagaatactgggcactgacctctcctatgaccgccctgccactgcgaaccccactgcagcgcgtgggcattttcctcgactatgacgctggagaggtgtcattttacaatgtgacagagcggtgtcacaccttcacattttctcatgccactttctgtggaccagtgaggccttacttttccctctcatatagtgggggaaaatccgccgcacccctaattatttgtcctatgtcgggcatcgacggattttctggccatgtcggcaaccacggccattccatggagacttcaccctag

SEQ ID NO: 209599 - DNA, 1077 bp, synthetic construct
  misc_feature 1..1077: note = Description of Artificial Sequence: Synthetic coding sequence
  source 1..1077: mol_type = other DNA
atggccagcggcagcgtggccgagtgcctgcagcaggagaccacctgccccgtatgcctccagtacttcgctgagccaatgatgctggattgcgggcacaacatctgctgtgcctgcctcgctcgctgttggggcacggccgagacaaatgtgtcttgcccgcagtgcagagaaacctttccacagagacacatgcgcccaaatcggcacctggccaatgtaactcaactggtcaagcagttacggacagagcgtcccagtggacccggcggcgagatgggagtgtgcgagaagcatagggaacctttaaaattgtattgtgaagaggaccagatgccaatctgcgttgtgtgcgatcggagccgcgagcaccggggacattccgtgttgccgttggaagaggctgtcgagggtttcaaagagcagatccagaaccagttagatcacctgaagcgagtcaaagatctgaaaaaaagacggcgcgcgcagggcgagcaagcgagggctgagctgctgagcctgacccaaatggagagggagaaaattgtctgggaattcgagcagctgtaccatagcctcaaggagcacgaatataggctccttgctaggctcgaggagctggacttagcgatctataattctatcaacggtgccataacacagttctcctgtaacatatctcacttgtcctccctgattgcacagctggaagagaagcagcagcagccaacccgcgaacttctgcaggacatcggcgacacactcagccgcgcagagaggatccgcatcccagagccatggatcacgccacctgacttgcaagagaagatccatatttttgctcagaagtgtctcttcctcactgaaagcttgaaacaatttacagagaagatgcagagtgacatggaaaagattcaggagctgagagaagcccagctctactcagttgatgtgacacttgatcccgacacagcctatccatctctcatcttgagcgacaacttgcggcaggtacggtattcctacctgcagcaggatcttcccgacaatccggaacggtctcccagcactacctag

SEQ ID NO: 209600 - DNA, 747 bp, synthetic construct
  misc_feature 1..747: note = Description of Artificial Sequence: Synthetic coding sequence
  source 1..747: mol_type = other DNA
tgactgaagcagttcaccgagaagatgcagagcgacatggagaagattcaagagagcgccgactctttggaagggggcatattggatttggggagcgtgcttagccatattttacccgtatctgagttacgggaggcccagctgtattctgtagatgtcaccctggatcctgacacggcgtaccctagcctgatcttgagcgataacctgcgacaggtcaggtattcttacctccagcaggatctgccagacaaccccgagcggttcaacctctttccctgtgttctggggtccccctgcttcattgcaggtaggcactactgggaagttgaagtgggtgataaagcaaagtggaccattggagtgtgcgaagattccgtgtgtagaaaaggtggcgtgacttctgccccacaaaatggcttctgggctgttagcctctggtacgggaaggaatactgggccctcaccagcccaatgactgctttgccactcagaacccccctgcagagagttggaatctttctggactacgatgctggagaagtgagtttctataacgtgactgagaggtgccacacttttacctttagtcatgccaccttctgtgggcctgtccggccatattttagcctgtcttactccgggggaaagtctgcagccccactgattatttgcccgatgtctggaatcgatggttttagtggccacgtcggcaatcacgggcactctatggaaacttctccgtag

SEQ ID NO: 209601 - DNA, 1077 bp, synthetic construct
  misc_feature 1..1077: note = Description of Artificial Sequence: Synthetic coding sequence
  source 1..1077: mol_type = other DNA
atggccagcggcagcgtggccgagtgcctgcagcaggagaccacctgtcctgtttgtctgcagtactttgccgaacccatgatgctcgattgtggccataatatatgctgtgcatgtcttgcccgatgctggggcacagccgaaaccaacgtaagctgccctcagtgtagggagacgttcccccagcgccatatgaggcccaacagacacttagccaatgtcacacagttagtgaagcaactcagaaccgaacgaccatccggccccggcggggagatgggggtttgtgaaaagcaccgagagcccttgaagctctactgcgaggaagatcagatgccaatttgtgtggtttgtgaccggagccgcgaacaccgtggacacagtgtgttgcctctcgaagaggcagtagaggggttcaaagagcaaatccagaaccagctagaccatcttaagcgagtcaaggacctcaagaaaaggaggagggctcagggggagcaggcccgggccgaattgcttagccttactcaaatggagcgcgaaaaaattgtgtgggaattcgaacaactgtaccactctttaaaggagcacgagtacaggctcttggcaagactcgaagaacttgatctggccatatataactcaataaatggcgcaattactcagtttagctgcaatatctctcacctgagctcactaatcgcacaactcgaagaaaaacagcagcagcccactagggagcttttgcaggacattggtgacaccctctcacgtgcagaacggatcaggattcccgaaccttggattacacctcctgacctgcaggaaaagatccacatctttgctcagaagtgccttttcctgaccgagtctcttaagcagttcactgaaaaaatgcaatctgatatggagaaaattcaagagcttagagaggcccagctgtacagcgtcgacgttacacttgatcctgataccgcctaccccagtttaattttatctgacaatctccggcaggtgaggtactcatatcttcagcaggatctgccggataaccccgaaagatctcccagtacaacctag

SEQ ID NO: 209602 - DNA, 747 bp, synthetic construct
  misc_feature 1..747: note = Description of Artificial Sequence: Synthetic coding sequence
  source 1..747: mol_type = other DNA
tgactgaagcagttcaccgagaagatgcagagcgacatggagaagattcaggaaagcgcggacagtcttgagggtgggatcctcgacttaggttcagtactcagccacatactgcccgtgagcgagcttcgcgaagcacagttgtactcagtggatgtgacgcttgaccccgacaccgcatatccatcactgatcctctccgataatcttagacaggtgcgctactcttatttgcagcaggaccttccggataatccagagcggtttaacttgtttccctgtgttctcgggtctccttgttttatcgctggtagacattactgggaggtggaagtgggggataaagctaaatggacaatcggcgtctgtgaagacagcgtctgcagaaaggggggcgtgactagtgccccacagaacggattttgggctgtgagtctctggtatggaaaagaatactgggcccttactagtcctatgacggcactgcccctgcgaacacccctgcaacgcgtaggtatctttctcgactacgacgcaggagaagtgtcgttttataacgtcactgagcgctgccacaccttcacctttagccacgctactttttgcggtccggtacggccttactttagcctctcctacagtggcggtaaatcggctgcacccctaatcatttgtccaatgtctggcatcgatggtttctccggccatgtggggaaccacggccactctatggaaacaagcccatag

SEQ ID NO: 209603 - DNA, 750 bp, synthetic construct
  misc_feature 1..750: note = Description of Artificial Sequence: Synthetic coding sequence
  source 1..750: mol_type = other DNA
atggccagcggcagcgtggccgagtgcctgcagcaggagaccacctgcccggtctgcctccaatacttcgctgagccgatgatgctggactgcgggcacaacatctgctgtgcctgcctagctcgctgttggggaacagcagagacaaacgtcagctgcccccagtgtcgtgagacctttccgcaaagacatatgcggcctaacaggcacctggctaacgtgacccaactcgtgaagcaattgagaacggagagacccagcggaccaggaggagagatgggtgtctgtgagaagcaccgagaacctctcaagctctattgcgaggaggatcagatgccaatctgtgtggtatgcgatcgctcgcgcgaacataggggacattctgttttacctttggaggaagcggtcgagggctttaaggagcaaatccagaatcaactggaccacttaaagcgcgtcaaagacctcaagaagcgcaggcgcgctcagggtgagcaggccagagctgaactcctgtcactgacacagatggaaagagaaaaaatcgtgtgggaattcgagcagttgtaccactctctaaaagagcatgagtatcgactgctggctagactagaagagctagacctggccatatataattctatcaatggtgcaattacacagtttagctgtaacatctcccaccttagctctcttatcgcccagctcgaagaaaagcagcagcagccgactcgtgaactccttcagtag

SEQ ID NO: 209604 - DNA, 1542 bp, synthetic construct
  misc_feature 1..1542: note = Description of Artificial Sequence: Synthetic coding sequence
  source 1..1542: mol_type = other DNA
atggccagcggcagcgtggccgagtgcctgcagcaggagaccacctgccctgtctgtctccaatacttcgccgagccaatgatgctagattgcggccacaacatttgttgcgcatgcctagcccgttgttggggcaccgcagagaccaacgtcagctgtcctcagtgtcgcgaaacatttccgcagaggcatatgcgacctaatcgccatcttgccaacgttactcagttagtgaaacagctccgaactgaaagaccatccggccccgggggtgaaatgggcgtttgcgaaaagcaccgggagcccttgaaactgtactgtgaggaagaccagatgcctatctgtgttgtgtgtgatcgctcacgggagcacaggggccatagcgtgcttccactcgaagaagcagtggaagggtttaaggagcagatccaaaaccagctagatcatctaaagcgtgtcaaagatctgaagaaacggaggcgagcccaaggagaacaggctagagccgaactgctctctctgacccaaatggaacgcgagaagatcgtgtgggagttcgaacaactataccactctctgaaggagcacgaatacaggcttttggccaggttggaggagcttgacctggccatctacaactccatcaatggtgccattacccagttctcttgcaatatttctcaccttagctctctgatcgcccagttagaggaaaaacagcaacagcccacgcgagagctgctccaagatattggtgacacactcagtagggcggaaagaattcgcattcctgaaccttggataactcccccagatctgcaggaaaaaattcacatttttgctcagaagtgtctgtttctgactgagtctctgaaacaatttactgagaaaatgcaatcggacatggagaagattcaggagctcagagaagctcagttgtactctgtggatgtgactcttgaccccgatacggcctatccgtccctcattctgagtgacaaccttaggcaggtccgttattcttatctccaacaggaccttccggataatcctgagcgattcaacctgtttccatgcgtcctggggtcaccctgcttcatcgctggtcggcactactgggaggttgaggtgggtgataaggccaagtggacaatcggggtttgcgaggatagtgtgtgccgcaagggaggagtcaccagcgcccctcagaacgggttctgggctgtcagcctgtggtatggcaaagagtattgggcccttaccagtcccatgacagccctgcctctgcgcaccccactgcagcgagtgggcatcttccttgattacgacgcaggagaggtctcattctataacgttacagagagatgtcacacatttactttctcccacgccactttttgtggtcccgtcagaccctacttctctctgtcctattccggcgggaaatccgccgcgccactgatcatctgcccaatgtcaggaatcgatggttttagcgggcacgtcggcaaccacggccattctatggagacatccccgtag

SEQ ID NO: 209605 - DNA, 1542 bp, synthetic construct
  misc_feature 1..1542: note = Description of Artificial Sequence: Synthetic coding sequence
  source 1..1542: mol_type = other DNA
atggccagcggcagcgtggccgagtgcctgcagcaggagaccacctgtcctgtgtgccttcagtatttcgctgagcccatgatgctggactgcggacacaacatatgttgcgcttgcttagcgcgctgttggggaaccgccgagacaaatgtctcctgtccgcagtgtcgcgagactttccctcagcgccatatgaggccaaatcggcatctggccaacgtgacccagttggtgaaacagctgcgcactgagaggccgtcaggccccggaggggagatgggggtatgtgagaagcatcgagagccactgaagctctattgcgaagaagatcagatgcctatatgtgtggtctgtgacaggtcacgggagcatagagggcatagcgtgttgcctctagaagaagctgtcgagggctttaaagagcagatccaaaaccagttggatcacttaaagagggtcaaggatcttaagaaaagacgtcgtgcccagggcgagcaagccagagccgagctcctaagcctgacccagatggagagagagaaaatcgtgtgggagtttgagcagctataccacagtttaaaagaacatgagtaccgactgttggctaggttggaagagctggatctcgccatctacaacagtatcaatggagctattactcagtttagttgtaacattagtcacctaagcagtctcatcgcccagctcgaggagaagcagcagcagcctacaagagagcttctgcaggatatcggcgacaccctgtccagggctgaacggatccgtatcccagaaccttggattacaccacccgatttgcaagagaaaatacacatctttgcccagaaatgtcttttcctgaccgagtcgctgaaacagttcacagaaaagatgcagagcgacatggaaaagattcaggaactgagagaagctcagctatatagcgtggacgttacgcttgatcccgatacagcctacccctccctgatactctccgataacttacgccaggtccgctactcctatcttcagcaggacctgcccgataatccagaaagattcaatctgtttccgtgcgtcctcggatccccgtgcttcattgccggacggcactactgggaagtcgaggttggagacaaggccaagtggaccattggcgtctgcgaggacagtgtctgtcgaaaagggggagtgacttctgcaccacagaacggcttttgggcagtgtcattgtggtatgggaaggagtattgggccctgacgagccccatgactgcactgcctctccgtactcccctacagagagtggggatctttttggactacgacgccggggaggtatccttttacaatgtgactgaaagatgtcatacattcacattttctcatgctactttttgcggaccagtacgcccttacttttccttatcttactcaggaggaaaatccgccgcccctttaattatttgcccgatgtccggaatcgatggattttctggtcatgtagggaaccatggtcactccatggagacatccccctag

SEQ ID NO: 209606 - DNA, 750 bp, synthetic construct
  misc_feature 1..750: note = Description of Artificial Sequence: Synthetic coding sequence
  source 1..750: mol_type = other DNA
atggccagcggcagcgtggccgagtgcctgcagcaggagaccacctgtcctgtgtgtctccagtattttgcagagcccatgatgctagattgcgggcataacatctgctgtgcctgcctcgccagatgctggggaacggcagagacaaatgtttcctgcccccagtgccgtgagactttcccgcagcgtcacatgagacctaatagacacttagccaatgtgactcagctagtgaagcaacttagaaccgaacggccaagcggacccggtggagaaatgggcgtgtgtgaaaagcatcgggagccgctgaagctgtactgtgaggaagaccagatgcctatctgtgtcgtctgcgacagatcaagggaacaccgaggtcacagcgtgcttcctctagaggaggccgttgaggggtttaaagagcaaatccagaaccagcttgaccatctaaagcgagtgaaggacctgaaaaaacggagacgggcacagggggaacaggcaagggcggaattactcagcttaactcagatggagagggaaaaaatagtatgggagtttgaacagctctaccactcattgaaagagcacgaatatagactgctggcgaggctcgaggagcttgatctagccatctacaattccattaacggggctattacacagttttcctgcaacatttcacacctctcaagcttaattgcacagctggaggaaaaacagcagcagcctacccgagagctcctccaatag

SEQ ID NO: 209607 - DNA, 1542 bp, synthetic construct
  misc_feature 1..1542: note = Description of Artificial Sequence: Synthetic coding sequence
  source 1..1542: mol_type = other DNA
atggccagcggcagcgtggccgagtgcctgcagcaggagaccacctgtcctgtatgcttgcagtattttgcagagcccatgatgttggattgcggacacaacatctgctgcgcctgtctggcccggtgctggggtaccgcagagacgaatgtttcatgcccgcagtgtcgtgagaccttcccacagagacatatgcgcccaaatcgtcacctcgctaacgttacccagctggtgaagcagctgcggaccgagaggccttctggccccggcggcgaaatgggcgtgtgcgaaaaacatagagaaccgctgaaactgtattgtgaagaagaccagatgcccatttgtgtggtctgtgatcgatcccgagaacacagagggcattccgtcctgccactagaggaagccgttgaaggattcaaggaacagatccagaatcagctcgatcacctgaagagggtcaaggacctcaagaaacggcgaagagcgcagggggagcaggctcgcgccgaattacttagtctgacgcaaatggagagagaaaaaatcgtatgggaattcgagcagctgtaccattcactgaaagaacatgaatacagattactagctagacttgaagaacttgacctggccatctacaactcaattaatggagcaatcacgcaattcagctgtaatataagtcatctgagctcgctcattgcccagctggaagagaagcagcagcagcccacgcgcgagctcctgcaggacattggcgacactttgagtagagccgagagaattaggataccagaaccctggattacaccccctgacctgcaggagaagatccatatttttgcccagaaatgcctgttcctcaccgagagtctgaagcagttcacggaaaagatgcagtctgacatggagaagatacaggaactacgcgaagctcagctctacagcgttgacgtcacgctcgatccagataccgcctacccttctcttatcctttccgacaatcttcggcaggtacgatatagttacctgcagcaagatctgcccgataatcccgaaaggtttaacctcttcccctgcgtgttaggttcaccttgcttcattgcgggtcgccattattgggaagtggaggtgggtgacaaagctaagtggacgattggggtgtgcgaggacagtgtgtgccgtaaggggggagtcacctctgctccgcagaacggtttttgggctgtcagtctgtggtatggaaaagaatactgggcacttacatccccaatgacagcccttccactgagaactcccctgcaaagagtcggaatattcctggactatgacgcaggcgaggtcagtttctacaacgtgacagaacggtgccataccttcacattcagccacgctactttttgcggcccagtcagaccgtacttttccctttcatattccggtggaaagtcagccgcccctctgattatttgccccatgagtggtattgacggcttttccgggcatgtagggaaccatggccactcgatggagaccagcccctag

SEQ ID NO: 209608 - DNA, 744 bp, synthetic construct
  misc_feature 1..744: note = Description of Artificial Sequence: Synthetic coding sequence
  source 1..744: mol_type = other DNA
ctgaagcagttcaccgagaagatgcagagcgacatggagaagatccaggaaagtgcagacagtttggaaggcggcatcttggatctgggctctgtgctgtcacatattttgcccgtttcggagctgagggaggctcagctctattcagtcgacgtgaccttggacccggacacggcctatccatcattgattctaagcgacaatctgaggcaggtgcgatattcctatcttcagcaagacttaccagacaaccccgagcgcttcaatctcttcccgtgcgtactcggctccccctgttttatcgccggccgacactactgggaagtcgaggtgggagacaaggcgaagtggactattggggtctgtgaggactccgtatgccgtaagggcggcgtcactagcgcaccgcagaatggcttctgggccgtgtctctgtggtatggaaaagaatactgggctttaacctcaccaatgacagccctgccgttaaggaccccattgcagagagttgggatttttctggactatgacgcgggggaagtgtcgttctataatgtgactgagagatgtcacacattcactttttcacatgcgaccttctgcggacccgttagaccatatttcagcctgagttattctggcgggaagtcagccgccccccttattatctgtcccatgagcggcatcgacggattttccggtcatgtaggtaaccatgggcattctatggaaacatccccctag

SEQ ID NO: 209609 - DNA, 750 bp, synthetic construct
  misc_feature 1..750: note = Description of Artificial Sequence: Synthetic coding sequence
  source 1..750: mol_type = other DNA
atggccagcggcagcgtggccgagtgcctgcagcaggagaccacctgtcctgtgtgcctccagtacttcgcggaacctatgatgctcgactgcggacacaacatttgttgcgcctgtttggctcgctgttggggtactgcagagacaaacgtcagctgcccccaatgtagagaaacctttccacagaggcatatgaggcccaaccgccacctcgccaatgtgacccaactcgtgaagcagctccggaccgagaggccaagcggccccggcggggagatgggggtatgcgagaaacatagggaacccttaaagctgtactgtgaagaggaccagatgcccatttgcgtcgtgtgtgatcgctcccgggagcataggggccactctgtgctgcctctggaggaagccgtggaaggatttaaagaacagatccagaatcagctggaccacctgaaacgggtgaaggacctcaagaaaaggaggcgcgcacaaggtgagcaggctagggcagaactgcttagtctgacacagatggagagggagaagattgtctgggaattcgaacagctgtatcactcccttaaagaacatgaatatcgtctgctcgctcgcctggaagagctggacctggctatttataactccattaatggcgctataacacaattttcttgcaacatatcccacctaagttccctgatcgctcagctggaagaaaagcagcaacagcctacccgcgaactcctgcagtag

SEQ ID NO: 209610 - DNA, 159 bp, synthetic construct
  misc_feature 1..159: note = Description of Artificial Sequence: Synthetic coding sequence
  source 1..159: mol_type = other DNA
tgactgcgggaggcccagctgtacagcgtggacgtgaccctggaccctgacaccgcatatccgagcctgatcctaagcgataacctgcggcaggtacgatacagctatctgcagcaggatctccctgataacccagaacgcagcccctctaccacttag

SEQ ID NO: 209611 - DNA, 696 bp, synthetic construct
  misc_feature 1..696: note = Description of Artificial Sequence: Synthetic coding sequence
  source 1..696: mol_type = other DNA
tgaagcgccgacagcctggagggcggcatcctggacctgggcagcgtcctctctcatatcctccccgttagcgagcttcgagaagcccaactttattcggtggatgtgacactggatcccgacaccgcttatcctagcctgattcttagcgataatttgaggcaggtgcgctacagttatctgcagcaagatctgcccgacaatccggaacgcttcaatctcttcccttgcgttctaggaagcccttgtttcatagcaggtcgtcattattgggaagttgaggtgggtgataaagcaaagtggacaattggtgtttgcgaggacagcgtctgtcgtaagggaggagtgacttccgcgccacagaatggcttttgggcggtgtcactctggtacggtaaagaatactgggccctgacatcccctatgacagcattgcctctgcgcacaccactgcagagggtaggcatctttctcgattacgatgccggagaagtgagtttttacaatgtcaccgagcgctgccatacatttaccttcagccacgcaacattttgcggtcccgtgcggccatactttagcttgagttactccggcggtaagtcggctgcacctctgatcatttgccctatgagtggcatcgatggcttctccggccacgtggggaatcatgggcattcaatggaaacgagcccctag

SEQ ID NO: 209612 - DNA, 624 bp, synthetic construct
  misc_feature 1..624: note = Description of Artificial Sequence: Synthetic coding sequence
  source 1..624: mol_type = other DNA
tgactgcgggaggcccagctgtacagcgtggacgtgaccctggaccctgacaccgcctatccaagtctgatcctttccgataacctgaggcaagtgagatattcctatcttcaacaagaccttcctgacaatcctgagaggttcaatttgtttccatgcgttctcgggtctccctgtttcatcgccggacggcattactgggaagtcgaagtgggcgacaaggcaaagtggactattggcgtgtgcgaggactctgtgtgcagaaaaggcggtgtgacctctgcaccccagaacgggttctgggctgtgagtctgtggtatggcaaggaatactgggccctgacttctccaatgacggccctccccttgagaactccactgcaaagggtggggatatttctggactatgacgccggggaggtcagtttctataacgtgactgaacggtgccacacatttacgttttctcacgcaaccttctgcgggcccgttaggccatacttttctttgtcctactccgggggcaagtctgctgccccacttataatctgccccatgtccggaatcgacggcttctctgggcacgtcggtaaccatggacattccatggagaccagcccctag

SEQ ID NO: 209613 - DNA, 1077 bp, synthetic construct
  misc_feature 1..1077: note = Description of Artificial Sequence: Synthetic coding sequence
  source 1..1077: mol_type = other DNA
atggccagcggcagcgtggccgagtgcctgcagcaggagaccacctgcccggtttgcctgcagtacttcgcagagccaatgatgctcgactgcggccataatatctgttgtgcctgtttggcaaggtgctggggcactgctgaaacaaatgtgtcttgtccccagtgcagagagacctttccacagagacacatgaggcccaacagacacctcgccaacgtgacccagcttgttaaacaactccgaacagaaagaccttctggacccggtggcgagatgggcgtttgcgaaaagcaccgagagcctctgaaactttattgtgaagaagatcagatgcccatctgcgtagtgtgcgataggtcgcgagaacaccgaggccactcggttttgcccttagaggaggctgtggaggggtttaaggaacaaatccagaatcaactggaccatctgaaacgcgttaaagatctgaagaagcgccgcagagcccagggtgagcaagcgcgcgctgagctcctctctttaacccagatggaacgcgagaaaattgtgtgggagttcgagcagctgtaccactctttgaaggaacatgagtaccgtcttctcgctcggctcgaagaactggatctcgctatttacaatagtattaacggggccatcacccaattttcttgcaatatttcccacctgtcctcactaatcgcacagttagaggaaaagcaacagcagcctacaagagagctgttacaggacatcggcgacactctgtcgagggccgaacggattaggattcctgagccctggatcaccccaccagacttacaggagaagatacatatattcgcgcagaaatgtttattcctcacggaaagccttaagcagtttacggaaaaaatgcagtctgatatggaaaaaatacaggagctgcgtgaggcccagttatacagcgtggatgtcacacttgacccagacacggcttacccttcactgattttgtccgataacctgaggcaggtgcgttattcataccttcagcaggacttgcccgacaatcctgagagaagcccatcgacgacgtag

SEQ ID NO: 209614 - DNA, 747 bp, synthetic construct
  misc_feature 1..747: note = Description of Artificial Sequence: Synthetic coding sequence
  source 1..747: mol_type = other DNA
tgactgaagcagttcaccgagaagatgcagagcgacatggagaagatccaagagagcgcagatagtctagagggcggcattctggaccttggatcagtgcttagccacattctgcctgtgagtgagctgcgggaggctcagctttactctgtcgatgtgaccctggacccggacactgcatatcctagtctcattctgtctgataatctaagacaggtccgatattcctatctgcagcaagatttacctgataatcccgaacgtttcaatctgttcccttgcgttctgggctctccatgctttatcgccggaaggcactattgggaggtcgaagtcggcgataaggccaaatggacaattggagtatgcgaggacagtgtgtgtcggaaaggtggggtgacttcagccccacagaatggcttctgggccgtgagtctgtggtatggcaaagagtattgggcacttaccagccccatgacggcccttcctctccggactcccctgcagcgggttggtatttttctagactatgacgctggggaggtcagcttctacaatgttactgagcgttgccatacctttacattctcccacgccaccttctgcggcccagtacgtccctacttcagcctgtcctattccggcggcaagtccgcagcccctcttatcatctgccctatgtctggcatagacggattttcaggccatgtaggaaatcacgggcactctatggaaaccagtccctag

SEQ ID NO: 209615 - DNA, 750 bp, synthetic construct
  misc_feature 1..750: note = Description of Artificial Sequence: Synthetic coding sequence
  source 1..750: mol_type = other DNA
atggccagcggcagcgtggccgagtgcctgcagcaggagaccacctgtcccgtttgcctgcagtactttgccgagccaatgatgctggattgcggacacaatatctgttgcgcatgcctcgctaggtgctggggtactgcagagacaaacgtctcatgtccgcagtgcagagagactttccctcagagacatatgcgccccaaccggcacctggccaacgtgacgcagctggtgaagcagctcaggaccgagaggccctccgggccaggaggagagatgggtgtatgcgaaaaacacagggagcctttgaaactctactgtgaagaagatcaaatgcccatctgcgtggtttgtgatcggtcaagagagcatcgcggtcattctgtgctccctctggaagaggccgtcgagggcttcaaggaacagattcaaaatcagctggaccacctaaaaagagtgaaagaccttaaaaaaaggcgccgagcccagggtgaacaggccagggcggagctgctgagccttactcagatggagagggaaaagattgtgtgggaatttgaacagctgtaccacagcctcaaggagcacgaataccgcctgttggctcggctggaagaactcgacttggccatctacaattccattaacggtgccattacccagttctcatgtaatatcagccaccttagttctctgatcgctcagctcgaggaaaagcaacaacagcctactcgggagctgctgcagtag

SEQ ID NO: 209616 - DNA, 2202 bp, synthetic construct
  misc_feature 1..2202: note = Description of Artificial Sequence: Synthetic coding sequence
  source 1..2202: mol_type = other DNA
atggccaagcgggaggacagccccggccccgaggtgcagcccatggacaaacagtttctggtgtgcagcatctgcctcgatcgctatcagtgcccaaaggttctcccttgcctgcatacattttgcgaaaggtgcctgcagaactacatccctgcccagtcccttactctttcctgtcctgtatgtcgccagacttccattctacctgagcagggtgtcagcgctcttcagaataattttttcattagctccctcatggaagctatgcagcaggcgccggatggggcccacgatcccgaagacccacatccgctgagtgtggtggccggacgtcctctgagctgcccaaaccatgagggtaagaccatggaattttactgtgaagcttgcgagacagccatgtgtggcgaatgtagagccggcgaacatcgggagcagcataaagcagccttgcagcggcaactggaagccgtgcgaggtcgtttacctcagttaagcgctgccattgccctcgtcggggggatctcacagcaactgcaggagcgcaaagctgaagctttagctcagatctccgctgcatttgaagacctggagcaggcactgcagcagagaaagcaggctcttgttagcgacctggaaacgatctgtggcgcaaagcaaaaagttcttcaaagtcagcttgatactctgaggcaaggacaagagcacattgggtcctcttgctcgttcgccgagcaggctctgcgccttgggagtgcacctgaggtactcctggtgcggaagcacatgagagagcgattggcagccttagctgcccaggcgttcccagagagacctcacgaaaacgcccaactggaattggtcctggaagtggacggtctccggaggtcagtcctgaacctgggcgccctcttgactacttctgctacagcccatgagactgtcgccactggcgagggtctgagacaggccctcgtgggccaaccggccagcctgaccgtgacaacgaaggacaaggacggccgcttagttaggacgggatctgctgaactccgggctgagattaccggcccagatggcacccggctgcctgttcccgtggtagaccataagaatggtacatacgagctggtttacaccgccaggacggaaggagaattgttgctgtcagtactgctttacgggcaaccagttcgtggatcccctttcagggtgcgagcacttagacccggcgacctgcctccatcccccgatgatgttaaacgacgcgtgaagagccccggggggcccggatcacatgtgcggcagaaagctgttcggcggccttcctccatgtacagtaccggcggtaagagaaaagataatccgatcgaggacgagctcgttttcagggtcggaagccgcggacgggaaaagggcgaatttaccaatctgcaaggcgtctcagcggccagttccgggcggattgtggttgcggacagcaataaccagtgtatccaggtcttcagcaacgaagggcagttcaagttccgctttggcgtgcgtggacgatcacccgggcagctccagaggcccacaggagtggcagtcgacacaaatggagatattatcgtggctgattacgataacagatgggtaagtatttttagtcccgaaggcaaatttaaaactaagatcggggccggtagactgatgggcccaaagggagtcgctgttgaccgcaacggacatatcatcgtggttgataacaaatcttgctgtgtgttcaccttccaacctaatggcaaattagtgggtcgcttcggcggacgaggtgccaccgatcggcatttcgccggaccccatttcgttgccgtcaacaataagaatgaaattgtggtgaccgacttccacaatcattccgttaaggtgtatagcgccgatggggaatttttgtttaagttcggctcacacggggaagggaatggacagttcaacgctcctaccggagttgcggttgattccaatggtaatattatcgtggccgactggggaaacagcaggatccaggtgtttgatagtagtggctctttcctgtcctacatcaataccagtgccgaacccttgtacggcccccagggcttagccctgacctccgatgggcacgttgtggtcgcagatgccggcaaccactgttttaaagcctaccgctatctgcagtag

SEQ ID NO: 209617 - DNA, 2235 bp, synthetic construct
  misc_feature 1..2235: note = Description of Artificial Sequence: Synthetic coding sequence
  source 1..2235: mol_type = other DNA
atggccaagcgggaggacagccccggccccgaggtgcagcccatggataagcaattccttgtatgctcaatttgtttggatcgttaccagtgcccgaaggtgctgccatgccttcacaccttctgtgagagatgccttcagaactatattccggcgcagagtcttacattatcatgcccggtgtgcagacagacctccatacttcctgagcagggagtctccgctctccagaacaatttttttattagcagcttgatggaagccatgcaacaggcccccgatggggctcacgacccagaagatccccatcctttatccgtcgtcgcaggacggcccttgtcatgtcctaaccacgaaggaaagacaatggaattttattgtgaagcctgtgaaacagccatgtgtggagagtgcagagcgggcgaacaccgagaacacgggacagtgctgctccgagacgtggtcgagcagcacaaggccgcactgcagcgccagttagaggcagttcgtggacggctgcctcaactcagtgccgccatagctctggtgggcggtataagtcagcagctgcaggagagaaaggccgaagcacttgcacagatctccgcggccttcgaagatctcgaacaggctctacagcagcgaaagcaggccctagtgtcagatttagaaactatctgcggtgccaaacaaaaggtgctccagagccagctggataccctcagacagggccaagagcatattgggagttcttgcagcttcgccgagcaggccctgaggctgggctctgccccggaggtactgctcgttcgtaagcacatgcgagagcgcttggcagccttggccgcacaggccttcccagagcggccacatgaaaacgctcagctggaactcgttctcgaggtcgacggactgcgccgctccgtactaaatctcggcgccctactcacaacatcagctacggctcatgagacagtggccaccggagagggcctgcggcaggccctggtggggcagcccgctagcctgactgtgactacaaaagataaggatgggcggctcgtgcgtacggggtccgctgagctgcgcgcagagatcaccggacctgatggaacacgtctccctgtgccggtggtggaccacaagaatggcacctacgagcttgtctacacggcccggaccgaaggggaactgctgttgtcagttctgctctatggtcagccggtgcggggctctccctttcgggtccgcgccctgagaccaggcgacctgcctccaagcccggacgacgttaaaagaagggtgaagagccctggggggccaggaagtcatgtgcgacaaaaggcagtcagaaggccctctagcatgtatagcactggaggcaaacggaaagacaacccgattgaggacgagctggtattcagagtcgggagtcgaggccgagaaaagggcgaattcaccaatttgcagggagtgtctgctgctagctccggcagaattgtcgtcgctgactccaataaccagtgcatccaggtcttctccaacgagggccagttcaagtttcgcttcggcgtacgagggaggtcgcccggacagctgcaacgacctacgggagtcgccgtggatactaatggggatattattgtggcagattatgacaatcgctgggttagcatcttctccccagaaggtaaattcaagactaagatcggcgccgggagactcatgggcccgaagggagtggcggtggatcgcaacgggcacatcatcgtcgtggataataagagttgctgtgtgttcacttttcagccaaatggaaaattggtgggaagattcggcggtaggggggccacggatcggcattttgcaggcccccatttcgtggctgtgaataacaaaaatgaaatcgtggtgacagactttcataatcatagtgtgaaagtgtatagtgcagacggcgaatttttgtttaaattcggctctcacggcgagggcaatggtcagttcaacgcccccactggcgttgccgtcgacagtaatggcaacatcattgtcgccgactggggcaactctcgtattcaagttttcgattcgagcggaagttttttaagttatataaataccagtgctgaacccctgtatggaccgcagggtctggcgttaacctccgacgggcatgtcgttgtggctgacgccggcaaccactgtttcaaggcttaccgatatctgcaatag

SEQ ID NO: 209618 - DNA, 2235 bp, synthetic construct
  misc_feature 1..2235: note = Description of Artificial Sequence: Synthetic coding sequence
  source 1..2235: mol_type = other DNA
atggccaagcgggaggacagccccggccccgaggtgcagcccatggacaagcaattccttgtgtgtagtatctgcctggacaggtaccagtgcccgaaggttctcccgtgcctacataccttctgcgagagatgtctgcaaaattacataccagctcagtctctcaccctctcctgtcctgtatgcaggcaaacgagcatcttgcccgagcagggcgtgagcgcactgcagaataacttttttataagttcccttatggaggccatgcaacaagccccggatggcgctcatgatcctgaagacccacacccacttagcgtggtggccggtcgtcccctgtcctgtccgaatcatgagggaaaaacgatggagttttactgcgaagcctgcgaaaccgccatgtgcggagaatgcagagccggcgaacatagggagcacggtaccgttctgttgcgggatgtagtggaacagcacaaagcagcactccagcggcagcttgaggccgtaagagggagactcccacaactgtcggctgccatcgcacttgtgggggggatctctcagcagctacaagagcgtaaggccgaagcattagcccaaatcagcgcagccttcgaggacctagagcaggcgttgcagcagcgtaagcaggctctcgtctctgatctcgagaccatctgtggcgcaaagcagaaagtcctgcagtcccagctcgacaccctgcgccagggccaagagcacatcggaagctcctgtagtttcgccgaacaggcacttcggcttggcagcgctcccgaggtactactcgttcggaaacacatgcgggaacgactggccgccttagcagcgcaggcttttcctgaacggccgcacgagaacgctcagctggagttagtattggaggtcgatggactgcgtcggagcgtgctgaacctcggcgctttgctgacaacgagcgccacagcacacgaaactgtggccacaggggaagggttacggcaggcattggtgggacaacccgctagccttacggtgaccaccaaggataaagatggtcgcctggtgcggactggttctgcggaactcagggcggagattacaggacctgatggtacaaggctgccagttcccgtggtcgaccacaagaacggaacatacgaactggtgtatactgcccgcacagagggagaactgctcctgtccgtgctgctgtatggacagcccgtgcgtggtagtccatttcgggttagagcgctgcgaccgggggatctacccccaagccctgacgatgtgaagagacgcgttaaatctcccggcggaccgggaagccacgtgcgccaaaaagctgtcagacggccctcttccatgtattccaccggggggaaacgcaaagataacccgatagaggacgagcttgtgttccgagtaggctctcgcggccgggagaaaggggaatttacgaatttgcagggagtgtccgccgcatcttctggtcgtatcgtggtagcagactcaaataatcaatgcattcaagtgttttcgaacgaagggcagttcaaatttaggtttggcgtgagaggtcgaagcccgggacagctgcagcgcccgacaggcgtggcagtggacactaacggcgatatcattgtggccgattacgataatcgatgggtgtctatcttttcacctgaagggaaattcaagacaaaaatcggtgccgggcgacttatgggccccaagggagtggccgttgaccggaacgggcatatcatagttgtggataacaagtcttgctgcgtgttcacattccaacccaacggcaagctagttggccgctttggcgggagaggtgccaccgaccgccatttcgctggccctcacttcgtcgccgtgaacaataaaaacgagatagtagtgaccgatttccataatcactccgttaaggtctactccgccgatggggagttcctctttaaatttggtagtcatggggagggaaacggtcagtttaacgcgcccacaggggtagctgtagactcaaatggcaacataatcgtcgctgactggggaaacagcagaatccaggtgttcgatagctctgggagcttcctctcgtatattaacacctcagcggagcctctgtatggcccgcaaggtttggccctgaccagcgacgggcacgtggttgttgctgacgcaggcaaccactgtttcaaagcatacaggtacctgcagtag

SEQ ID NO: 209619 - DNA, 2235 bp, synthetic construct
  misc_feature 1..2235: note = Description of Artificial Sequence: Synthetic coding sequence
  source 1..2235: mol_type = other DNA
atggccaagcgggaggacagccccggccccgaggtgcagcccatggataaacagttccttgtctgcagtatttgcctcgatcgctatcagtgccccaaagttcttccgtgcctgcataccttctgcgaaaggtgcctgcagaattatattcctgcacagtctctcacactctcatgtcccgtgtgccggcagacttctattctccctgagcaaggtgtaagcgcactccagaataacttcttcatttcatcactgatggaggcgatgcagcaggcaccagacggcgctcacgatccagaggacccacaccccctgtctgttgtagccgggaggcccctttcctgcccaaatcatgagggcaagactatggaattttactgcgaggcttgcgagactgcaatgtgcggcgagtgcagggcaggtgaacatcgcgaacatgggactgttttgctgcgggatgtggtagagcagcataaggcagccctacagcggcaattagaggctgtgcggggtcgactgccacagttgagtgctgcaatcgcattggtgggcgggatcagtcagcagctccaggaacgtaaagcggaagccctggcccagatttccgctgcctttgaggacctggagcaggctttgcagcagaggaaacaagcactggtttctgacttggaaacaatatgcggcgccaagcaaaaggtacttcagtcacagctggacactctgcgccagggccaggagcatattggctcctcgtgttcattcgccgagcaggcactgcgactggggtcagcacccgaggtactcctcgtccggaagcacatgcgggagcgactggccgccctggcagcccaagcctttccggagagaccccatgaaaacgcccagctggaacttgtcctcgaagtggatgggctccgacggtctgtgctgaatcttggcgcactcttgaccacatcggcaacagcacatgagaccgtcgccacgggcgagggtctgcgtcaagctctggtcggacagcctgcctctctcacagtgactaccaaggacaaagacggccgcctcgtgaggacaggctcagccgaattacgagcagagatcaccggacctgacggcaccaggctgcccgtgccagtggttgatcacaagaatgggacatacgagctggtctacaccgccaggaccgagggcgagcttctcctgtccgtcttgctctacggtcagcctgtccggggcagtccattccgtgtgcgagcattgcgcccaggtgatttgcccccctccccggatgatgttaagagaagagtcaaatccccaggagggcctggctcgcacgtgagacaaaaggcagtgagacgccctagctctatgtatagtactgggggcaagagaaaggataatcctatcgaggacgaactggtgttccgtgtagggtctcgcggcagagaaaagggcgaatttaccaacctccagggagtgagcgcagccagttcagggaggatagtagttgcagatagcaataatcagtgtattcaggtttttagtaacgaggggcaattcaagttccggttcggtgttcgcggaagaagccccgggcagcttcagcgccctacgggtgtggccgtggacaccaacggcgatattatcgttgccgattacgacaatagatgggtgtcaattttctcccctgaggggaaattcaagacaaagatcggggccggacgcctcatgggccctaagggagtcgcggttgatagaaatgggcacatcattgtcgtggacaataaaagttgttgcgtgttcacctttcagccaaacggaaagctggtaggccgttttggaggcaggggcgcaaccgacaggcattttgcgggtccccacttcgtagccgtcaacaacaaaaacgagatcgtcgtcaccgactttcacaaccacagcgtgaaggtgtacagcgcagacggagagtttttattcaagtttggctcacatggagagggtaacggtcaattcaacgctcccacaggtgtggcggtagatagcaatggcaacattatagtggcagactggggcaattctagaattcaagtctttgactcgtccggtagtttccttagttacattaacaccagcgcagagcctctttacggaccacaaggcctggctctgactagcgatggccacgtggtcgtcgccgatgctggcaaccactgttttaaggcctaccgatatttgcaatag

SEQ ID NO: 209620 - DNA, 2229 bp, synthetic construct
  misc_feature 1..2229: note = Description of Artificial Sequence: Synthetic coding sequence
  source 1..2229: mol_type = other DNA
atggccaagcgggaggacagccccggccccgaggtgcagcccatggacaagcaatttctggtgtgttctatatgcctagacagatatcaatgtccgaaggtgctgccatgcctgcacactttctgtgaacgatgcttgcagaattacattccagcacagagcctcaccctgtcttgccccgtatgccgccaaacttcaattctgcccgaacagggcgtcagcgcacttcagaataatttcttcatttcttccttgatggaggcgatgcaacaagcaccagatggcgcccatgatcccgaggacccacatcccctgagcgtggtggcagggagaccactcagctgtccgaatcacgagggaaaaactatggaattctactgcgaagcttgtgaaacagctatgtgtggggagtgtcgagccggagagcaccgagagcatgggactgtgttgctcagggatgtcgtggagcagcataaggccgccctccaacgccagctggaagccgtgagggggcgccttccacagctgtcagcagctatagccctggtgggtgggattagtcagcaactgcaagagaggaaagcagaagccttagctcaaatctcagccgctttcgaggacttagagcaagccctgcaacagagaaagcaagcattggtttccgatctcgagactatctgcggcgctaagcaaaaggttttgcagtcccagctcgataccctgaggcagggtcaggagcatattggcagttcttgctcctttgccgaacaggccttaagactggggagtgcgcccgaagtgctgctggtgcggaaacatatgagagagagactggctgccctggctgcgcaggcttttcccgaacgtccccacgaaaacgcgcagctagaattggtactggaggtcgacggactgaggcggagtgtgcttaacctgggtgcactgctgacaacctctgctacagcgcacgaaacggtggcaactggggaggggctcaggcaggcactggtgggacagcccgcatcattgacggtgaccactaaagacaaagacggcaggctggtgagaacaggcagcgccgagctcagagctgagatcaccggtcccgatggcactcgcctgcccgtgcccgttgtggaccacaagaatgggacgtacgagctcgtctacacggccaggaccgagggggagcttcttctatcagtacttttgtatggacaacccgtgcgcggatcgccctttcgggtgagagccctccggcccggcgacttacccccttcaccagacgatgtgaaacgtcgcgtgaaatctcctggcgggcccggatcacacgtgagacagaaagcggtgaggaggccatcatcaatgtacagcaccggaggaaagcggaaagacaatccaattgaagatgaactagtcttccgggtgggttcgcgtggccgggaaaagggcgaatttactaatctccagggcgtctccgcagccagttcagggaggatcgtggttgctgattccaataaccagtgtattcaagtgttcagcaatgaaggtcaatttaaattccgctttggggtgcgggggcgtagccctggacagttgcaacgccccactggagtcgctgtcgatacgaacggagacattattgtagctgattatgacaacaggtgggtgtccattttcagcccagagggcaaattcaaaacaaagatcggcgccggcagactgatggggcctaaaggtgttgctgtcgatcgtaacggtcacatcatcgtagtggacaataagagctgctgcgtctttaccttccaaccaaacggcaaactcgttggacgatttggtggccgaggagccaccgaccgccactttgccggcccccactttgtcgctgttaataataaaaatgagatcgtggttacagactttcacaaccattccgtgaaggtgtattccgcagatggtgagtttctgttcaagtttgggtcacatggggagggtaatggacaatttaacgctcccactggcgtcgctgtcgacagcaacggcaacattattgatgtttgcagggcttcgccatacccctcttataccccaccacacccctgtcaaagtgccccccatcctcctgcctggggacagaactctctgccacaggacagaagcccctcgtcctgcttaccaaccacattgtatacattgactgaaactgctataccacatcccccctactag

SEQ ID NO: 209621 - DNA, 1878 bp, synthetic construct
  misc_feature 1..1878: note = Description of Artificial Sequence: Synthetic coding sequence
  source 1..1878: mol_type = other DNA
atgaagaccatggagttctactgcgaggcctgcgagaccgccatgtgcggcgagtgccgagcaggagagcatagagagcacggaaccgtccttctgagggacgtcgtggagcagcataaagcagccttgcaacggcaactggaagcggtacgtggtcgactcccgcagctgagcgccgctatcgctctggtgggggggatctcccagcagctgcaagagcggaaggccgaggccctagctcaaatctctgccgcatttgaagacctcgaacaggctctgcagcagcgcaagcaggccctcgttagcgatctggagacaatctgcggtgccaagcagaaggtgctgcagtcccaactagataccttgcgacagggtcaggagcatattggaagtagctgttcctttgctgagcaagctctgagactgggaagtgcacctgaagtgctattagtgcgcaagcatatgagggaaagactcgctgcattggctgcccaggcctttccagaaaggccccacgagaatgcccagttggagctcgttctggaggtggacgggctccggaggtccgtgttaaatcttggcgcactcctaacaacgagcgccacggctcacgaaaccgtagccaccggtgaaggtctcaggcaggccctggtaggccagccagcttcacttacagtgacgacaaaggacaaagacggtaggctcgtacgtacgggctcagccgagcttcgagctgaaatcaccggcccggatgggaccagactgccagtacctgttgtcgaccataaaaacgggacctacgagctggtttacactgctcgaactgagggagagttgctacttagcgtgcttctctacggtcagccagtgcggggcagccccttccgcgtcagggccttacggcccggcgacctgcctccttcccctgatgacgtcaaaagacgagtcaagagtccagggggacccggatcccatgttcgacagaaggccgtacggcggccctcctctatgtattccaccggcggaaaacgcaaggacaacccgatagaagacgaattggtgtttcgggttgggtcgcgcggacgcgaaaaaggtgagttcactaatttgcagggtgtgagcgccgccagttccggacggatagtggttgcggattccaacaaccagtgtattcaggtgtttagcaatgaaggtcaattcaaattccgattcggtgttcgcggaaggagtcccgggcagcttcagaggccgactggagtggccgttgacaccaatggcgacattattgtcgccgattatgacaaccgctgggttagcattttcagtcccgaaggcaagtttaaaacaaaaattggcgcagggcggctgatgggacctaagggagtcgccgtcgatcgcaacggccatattattgtggtggataataaatcctgctgcgtgttcactttccagcctaatgggaagctagtgggtcgttttggcggtagaggtgcgacagataggcacttcgctgggccgcacttcgtggccgttaataataagaatgagattgtggtgacggacttccacaaccactccgtcaaggtgtactccgctgacggcgagtttctattcaaatttggatcgcacggcgaaggaaacggtcagttcaatgcccctacaggcgtggccgtggacagcaatggaaacataatcgtcgccgattggggtaacagccgaattcaagtcttcgactccagcgggtcattcctgagttatataaacacatcagccgagccactttacggaccacaaggattagcactgacatcggacggtcacgtggtggtggcagatgccgggaaccattgctttaaggcctaccgttacctgcagtag

SEQ ID NO: 209622 - DNA, 2001 bp, synthetic construct
  misc_feature 1..2001: note = Description of Artificial Sequence: Synthetic coding sequence
  source 1..2001: mol_type = other DNA
atggccaagcgggaggacagccccggccccgaggtgcagcccatggacaagcagtttctggtctgtagcatctgccttgacagataccaatgtcccaaggttctcccatgcctgcacacattttgtgagcggtgcctgcagaattatattccagcacaatctctcacactttcttgcccagtttgccgacaaaccagtatcctgcctgaacaaggcgtgtccgcgttgcaaaataattttttcatttcgagcctgatggaggccatgcagcaagcacctgatggagcccacgatcctgaggatccacatcctctctctgtggtcgccggacgacctctgtcttgtcccaatcatgagggcaagacaatggagttctattgcgaggcttgtgaaaccgccatgtgtggcgagtgtcgcgcgggggaacacagagaacacggaaccgtgctgctccgtgatgttgttgagcagcacaaggctgcgctccagcggcagttagaagccgtgcgtgggcggttgcctcagctgtccgcggcaatagctctggtgggcgggatatctcagcaactacaagagaggaaagctgaggctttggcccagatttcagccgcctttgaggatctagaacaagctctgcagcaacggaaacaagctttggtcagtgacctggttgacggcttacgtagatctgtgctgaacctgggcgcacttctcacaacatccgctacagcccatgaaacagtggccaccggagagggcctcagacaggcactcgtggggcagcccgcgagcctcaccgtcacaaccaaagataaggatggccggctggtcaggactggcagcgccgagctaagggcagaaatcaccgggcccgacggcaccagattacccgtgcctgtcgtcgaccacaagaacgggacgtacgaattggtgtataccgcaaggaccgaaggcgaacttctgctctcagtacttctgtatggtcagcctgttagaggaagcccctttcgcgttagggcactgagacctggggatctccccccctcgcctgacgatgtgaagagaagggtgaaaagcccaggaggacctggcagtcacgtccgccagaaggccgtaagaagaccatcctctatgtactctactggaggcaaacgtaaggataaccccatcgaggatgagctagtgttccgggtagggagtcgtggaagggaaaaaggcgagttcacgaatctgcagggcgtgagtgccgcctcctcagggaggattgtggtggccgattcaaacaaccagtgcatccaggtattttccaacgaagggcaattcaagttccggttcggtgttaggggtcgatctccgggccaactgcagcgccccaccggcgtcgctgttgataccaatggagacattatcgtggcggattatgataaccggtgggttagcatattttccccagaagggaagttcaagactaaaattggcgcagggcgcctcatgggtcccaaaggggttgcggttgaccgcaacggccacattatcgtcgtagacaataaatcatgctgcgtatttactttccagcctaacggtaagctagttggtcgatttggagggcgcggcgccacggaccgacatttcgctggcccacatttcgtagccgtcaacaataaaaatgaaatagtggttaccgatttccacaaccactcagtgaaagtatattcggccgatggggagttcctcttcaagtttggatcccacggcgaaggaaacggccagtttaacgccccaactggcgtagcggtggattccaatgggaacatcatcgtggccgattggggaaattcccgcatccaggtctttgatagttccgggtcatttctcagctatatcaatacctctgcagagccgctgtacggaccacagggtcttgccctgactagcgatgggcatgtcgttgtagcagacgcaggaaaccactgctttaaagcatatcgctacctgcagtag

SEQ ID NO: 209623 - DNA, 2226 bp, synthetic construct
  misc_feature 1..2226: note = Description of Artificial Sequence: Synthetic coding sequence
  source 1..2226: mol_type = other DNA
atggccaagcgggaggacagccccggccccgaggtgcagcccatggataagcaattcctggtgtgtagtatttgcttggaccgctaccagtgccctaaggtccttccatgcctgcataccttctgcgaaaggtgtctacagaattatatcccagctcagtctctgacgctgtcctgccctgtgtgtaggcagaccagcatactgcccgagcagggagtttctgctctacagaacaacttttttatcagcagcctcatggaggcaatgcagcaggccccggatggggcccatgacccggaagacccccatcctttatctgtggtggcaggcaggccccttagttgccccaaccatgaggggaagactatggagttttattgtgaagcgtgtgagaccgctatgtgtggggaatgtcgggccggcgagcatagggagcacggtaccgtcttattgcgggatgtcgttgaacagcacaaagctgctttgcaaagacagcttgaagctgtgagagggagactgccgcagctttcagccgcgatcgctctggtgggaggcatttcgcagcagctacaagagagaaaggctgaagctcttgcccagattagcgccgctttcgaagatctcgaacaggcgttgcaacagcggaagcaggctttggtttccgacctggagacgatttgcggagcgaaacagaaggtcctgcaatcccaattagacacactcaggcagggccaagagcatataggaagctcttgtagcttcgctgagcaggccctccggctgggtagcgctcctgaggtcctgctcgttcgcaagcacatgagagaacgcctggccgctcttgctgcacaggctttcccagaacgaccacacgaaaatgcccagcttgaacttgtcctggaagtggacggacttcggaggagtgtgctcaatttaggcgctttgttgactacctcggccactgcccacgagactgtcgctacgggggaagggttacgtcaagccctcgtgggccaacccgcttcgcttacagtgaccaccaaggacaaggacggtaggttggtgcgtactggttcagccgaattgagagctgagatcaccggcccagatggaacccgactgccggtccccgtggtcgaccacaaaaatggtacttacgagcttgtatatactgccaggacagagggagagcttctcctcagtgtcctactgtatggccagcccgtccgggggagcccatttagggtgagggccttgagacctggtgacttacccccttcacctgacgacgtgaagagaagagtgaagtcaccagggggacctggtagccacgtcagacagaaagccgttcggcgcccttcgtctatgtattccaccggcggcaaacggaaagataacccgatagaagacgagttagtgttcagagtgggcagtcgagggagagagaaaggggagttcacaaacctccagggggtgagtgctgcttcatcgggccgcatcgtggtggccgattcgaacaatcagtgcatccaggtgttcagtaatgagggtcagttcaaatttcgcttcggtgtgaggggcagatctccaggccaactgcaacgaccgaccggagtggctgtggacactaatggggacattatcgtggccgactatgataataggtgggttagtatcttttcgccggagggcaagttcaagacaaaaatcggcgctggaagactaatgggtccgaagggcgtcgctgtcgatcggaacggccacattattgtcgtggataacaaatcatgttgcgtatttacctttcagccaaacggcaaactggtgggtcggttcgggggccgtggagcaactgacagacactttgcgggtcctcactttgtcgcagtaaacaacaagaatgagattgtggtcactgatttccataaccacagcgtgaaagtttattccgcagacggggaatttctgtttaagttcggctctcacggtgaagggaatggacaattcaatgcacctaccggagttgccgtggatagcaacggaaatatcatcgtctgccgggccagcccatacccctcttacacgccacctcacccctgtcagtctgcgcctcacccccccgcatggggccaaaatagtctgccgcaggatcggagtccctcaagctgcttgccaaccaccctgtatacactcaccgaaaccgcaattccccacccgccttactag

SEQ ID NO: 209624 - DNA, 1278 bp, synthetic construct
  misc_feature 1..1278: note = Description of Artificial Sequence: Synthetic coding sequence
  source 1..1278: mol_type = other DNA
atggccagcggccagttcgtgaacaagctgcaggaggaggtgatctgccccatctgcctagacatcctgcagaaaccagtgacgatcgattgtggacacaatttttgtctgaagtgcattacacagattggcgagacgagctgtggcttcttcaaatgtccactgtgcaagacctctgtacgcaaaaacgcaatacggttcaatagtctcctcaggaacctggtggaaaagatccaagctctccaggccagtgaagtgcagtctaaaaggaaggaggccacatgccccaggcatcaggagatgttccactatttctgcgaggacgacggaaaatttctgtgttttgtgtgctgcgagagcaaggatcacaaatctcacaatgtgagtctgatcgaagaggctgcccagaactaccagggtcagattcaagagcagatccaggttctccagcagaaagaaaaagaaacggtgcaggtaaaggctcagggagtacacagggtggatgtattcaccgatcaggtggagcacgagaagcaaaggattttaactgaattcgagctcttgcaccaggtgctcgaggaggaaaagaacttcctgctcagcaggatttactggttgggtcatgaaggtacggaagcggggaagcactacgtggcgtccaccgagccccagctgaatgacttgaaaaaactcgtggatagtctcaagacaaagcagaatatgcctccaagacagctccttgaagacatcaaagtcgtcctgtgccgcagcgaggaatttcagttcttaaaccccaccccagtgcccctcgagcttgagaagaaactctctgaggccaaatcgaggcacgactcgattacaggctccctgaaaaagttcaaggaccaattgcaggcggacagaaaaaaggatgaaaaccggtttttcaagtcaatgaacaagaatgacatgaagtcctggggactactccaaaagaataaccacaaaatgaacaagacaagcgaacctgggagctctagtgccggagggcgaacgacgtcggggcctcccaaccatcacagtagtgctccaagccatagcttatttagggcctcatctgctggcaaggtcacttttccagtctgtctgcttgccagttatgacgaaatttcaggacagggtgcttcttcacaggataccaagaccttcgatgtggcgcttagcgaggagttgcatgcagcgctcagcgagtggctgactgcgatccgagcttggttttgcgaggttcccagctcctag

SEQ ID NO: 209625 - DNA, 1278 bp, synthetic construct
  misc_feature 1..1278: note = Description of Artificial Sequence: Synthetic coding sequence
  source 1..1278: mol_type = other DNA
atggccagcggccagttcgtgaacaagctgcaggaggaggtgatctgtcctatatgcctggatatccttcagaagccagtcacaatcgactgcggacataacttttgcctcaagtgcattacccagattggcgaaactagttgcgggttcttcaaatgtcctctctgcaagacaagcgtgaggaaaaatgccatccgttttaattccttgctgaggaacctggtggagaaaatccaggctctccaggccagtgaagtgcaatcaaaaaggaaggaggccacgtgcccacgacatcaagaaatgtttcattacttctgtgaagacgatggtaagttcctttgctttgtctgcagggaatctaaggaccataaatcccataacgtgtccttaatcgaagaggccgcacagaactaccagggccagatccaggagcagatacaagttttgcagcaaaaggaaaaggaaacggtacaggtgaaggcccagggggtgcaccgtgtggacgtcttcaccgatcaggtggagcatgagaaacagaggattttgacagagttcgagctgctccatcaggtcctcgaagaagaaaaaaactttcttctgtctaggatttactggttaggccatgaaggtactgaagcagggaaacattacgttgcttctaccgagccacagctcaatgatctgaagaagctggtggattcccttaagactaagcagaacatgccgccccggcagttactcgagcccgcccaaccgcacctgccacggtcagaggagttccagtttctcaatccaactcccgtgccattggagctggagaaaaagttatcagaagccaaaagcagacacgatagtatcaccggcagcctgaaaaagttcaaggaccaactccaggctgacaggaaaaaagacgagaacagatttttcaaaagcatgaataaaaacgacatgaaaagctggggccttctacagaagaataaccacaagatgaacaagacaagcgaacccggctctagcagcgccggcggccggaccacatcaggcccccctaaccatcactcctcagccccttctcacagcctgtttcgggcttcttccgctggcaaagtgactttccccgtctgtctactcgcttcctacgacgaaatttctggccagggtgcgtcaagtcaggacaccaaaaccttcgatgttgcgctcagcgaggaactacatgccgctctcagcgaatggctaaccgccatccgtgcctggttctgcgaggttccctctagttag

SEQ ID NO: 209626 - DNA, 1278 bp, synthetic construct
  misc_feature 1..1278: note = Description of Artificial Sequence: Synthetic coding sequence
  source 1..1278: mol_type = other DNA
atggccagcggccagttcgtgaacaagctgcaggaggaggtgatctgcccaatatgtttggatatccttcagaagccagtgacaattgactgtgggcacaatttttgtttaaaatgcatcactcaaataggggaaaccagctgcgggttttttaaatgtccactatgcaaaacaagtgttcgcaaaaacgccattaggtttaattctctcctacgcaatctcgttgagaaaatacaggctttgcaggcctctgaggtgcaatccaaaaggaaagaagccacatgcccgcggcaccaggagatgttccactacttctgtgaagacgacgggaagtttctgtgtttcgtatgccgcgaatcgaaggaccacaagtctcacaacgtgtctctaatagaggaggcagcccagaattaccagggccaaattcaggagcaaatccaagttctgcagcagaaggagaaagaaacggtccaggttaaggcgcagggtgtccatagggtggacgtgttcaccgaccaagtggagcacgaaaagcaaaggatcttgaccgagttcgagctgttgcaccaggtgctggaggaagaaaaaaactttctactgtccagaatatattggctgggccacgagggaaccgaggcaggaaagcactacgtggccagtactgaaccacagctgaatgacctgaagaaattggtggattcactaaaaactaaacaaaacatgcccccccgtcagctactagaagacatcaaagtagtgctgtgccgttctgaggagttccagtttcttaacccaacaccagtccctctggagctggagaaaaaacttagcgaagcaaaatctcgacacgattccatcaccgggtctctgaagaaatttaaggaccaactgcaggcagaccgcaagaaggacgaaaatcgattcttcaagtccatgaacaagaacgatatgaaatcttgggggctgctgcagaagaacaatcataagatgaataagaccagcgagcccggctcttcctctgctggcggccgaactacgagcggaccacccaaccaccacagctccgccccttctcattctctgttccgcgcaagctccgctggtaaggttacattcccagtctgcctactcgccagctatgacgagatctccggtcagggagctagcagtcaggacacaaagacgtttgacgtggcactctctgaagaactgcacgcggccctatcagagtggctgaccgccatacgtgcatggttttgcgaggttccttcaagctag

SEQ ID NO: 209627 - DNA, 747 bp, synthetic construct
  misc_feature 1..747: note = Description of Artificial Sequence: Synthetic coding sequence
  source 1..747: mol_type = other DNA
atggccagcggccagttcgtgaacaagctgcaggaggaggtgatctgtcccatttgtctggatatcctccagaaaccggtgaccattgactgcggccataacttttgtctgaagtgcatcacccagatcggcgagacctcttgtggcttcttcaaatgtccactgtgtaagacttcagtgaggaagaacgccatcagattcaacagcctcttaagaaacttggttgagaagatccaagctctgcaagccagtgaggtccagtcaaagcgaaaagaggccacttgcccacggcaccaggagatgtttcactacttttgcgaggatgatgggaaattcttgtgtttcgtatgcagggaaagtaaagatcacaaatctcacaacgtgagcctgatcgaagaggccgcccagaactaccagggccagatccaggagcagatccaggtgctgcaacagaaagaaaaggaaacggtgcaggtgaaggcccagggggtacaccgggtggatgtcttcacggatcaggtggaacacgagaaacaaagaatcctgacagagttcgagctgctgcatcaagtcctcgaggaggagaagaacttcctcctctcccgtatatattggctcggccacgaagggacagaggccggaaaacactatgttgcatctactgagccacaactcaatgacctcaagaagctcgtcgacagcctgaaaaccaagcagaatatgcctcccaggcaacttctcgaatag

SEQ ID NO: 209628 - DNA, 1278 bp, synthetic construct
  misc_feature 1..1278: note = Description of Artificial Sequence: Synthetic coding sequence
  source 1..1278: mol_type = other DNA
atggccagcggccagttcgtgaacaagctgcaggaggaggtgatctgtcccatttgtttggatatccttcaaaagcctgttaccattgactgtgggcataatttctgtctcaaatgtattacacagattggtgagacaagctgtggctttttcaaatgccctttatgcaagacgtcagtgaggaagaatgcaatccgtttcaactctctgttgagaaatctggtcgagaagatccaggctctccaggctagtgaggtgcagagcaaacgcaaagaggccacctgcccaagacaccaagaaatgttccactatttttgcgaggatgacggtaaattcttgtgtttcgtgtgcagggaatcaaaagatcacaaaagccacaacgtgtctctcatcgaggaagccgctcaaaattatcaaggtcaaatccaggaacaaatccaagtgctccagcagaaagagaaagagaccgtacaagtaaaagctcagggggtgcatcgcgtcgatgtgtttactgaccaggtcgaacacgagaaacagcgtatcctgaccgagtttgaattgctgcatcaagtgctggaagaagaaaaaaactttctgctgagccggatttattggctcggacatgaggggaccgaggctggcaagcattacgtcgcaagcactgagccacagttaaatgatttgaagaagttagtcgactctctgaaaactaagcaaaacatgccacctagacagttactggaagacatcaaggttgtgttgtgtcggtcagaggagtttcagtttttgaaccctactccggtgccgctcgaattggagaagaaactttctgaagccaagagcaggcatgattccattactggttctcttaaaaaattcaaggatcaactccaggctgatcggaaaaaagatgaaaatcgattctttaaatcgatgaacaagaatgatatgaaatcgtggggtctccttcaaaagaacaaccacaaaatgaacaaaacatctgaaccagggtcttcctcagccggaggtcgaacaacaagtgggcctccaaatcaccacagcagcgcgccatctcattccctgttccgggcgtctagtgcaggcaaggtcactttcccggtctgtctcttggcatcttacgatgaaatctcggggcagggggcttctagccaggatacaaagacgttcgacgtcgctcttagcgaagaactgcatgccgcactttctgaatggctgaccgccatccgtgcgtggttctgcaaggttcctagttcctag

SEQ ID NO: 209629 - DNA, 1278 bp, synthetic construct
  misc_feature 1..1278: note = Description of Artificial Sequence: Synthetic coding sequence
  source 1..1278: mol_type = other DNA
atggccagcggccagttcgtgaacaagctgcaggaggaggtgatctgtcctatctgcttggatattcttcagaagcccgtgacaatagattgcgggcataatttctgcctgaaatgcatcacccaaatcggcgaaacaagctgcggctttttcaagtgccctctgtgcaaaacttccgtgcgcaaaaatgccatccggtttaactccctgctgaggaatttagtcgagaaaatccaggcgctgcaggctagcgaggtgcagtccaaaagaaaggaagccacttgtccacggcaccaggagatgttccactacttctgcgaggatgatgggaaatttctctgcttcgtttgtcgcgaatcaaaggaccacaaatcacacaacgtatcactcatcgaagaggcggctcaaaactaccaagggcagatccaggaacaaatccaggtcctccaacagaaggagaaagaaacggtacaagtgaaggcccagggggtgcatcgcgtggacgtcttcactgaccaggtggaacatgaaaaacagaggattttaacggaattcgagctcctgcatcaggtcttggaagaggagaagaatttccttctgagcagaatctattggctgggtcacgagggcacggaggccggaaagcactatgtggcatcaaccgaaccacaacttaacgatttgaagaagctggtggacagcttaaaaacaaaacagaacatgcctcccaggcagctgctcgaggatatcaaagtggttttatgtagatctgaggaattccagtttctaaatcctactcccgtgcctctggaacttgaaaagaagttgagcgaagcgaagtcacggcatgattcgattaccgggtccctcaagaaattcaaagaccagctccaggcggacagaaaaaaagacgagaatcgctttttcaagtccatgaacaagaacgatatgaagagttgggggctgttgcagaagaataaccataagatgaataaaacttcagaacctgggtcatcatctgccggaggccgcaccacttctggcccacctaaccatcactcatctgctccttctcacagtctcttccgggcaagctctgcaggaaaggtgactttcccggtgtgtctgttggcttcctacgacgaaattagtgggcaaggagccagctcacaggataccaaaacctttgatgtcgccctgagcgaagagctacatgctgccctgagcgagtggctgaccgctatcagggcgtggttctgcgaagtaccaagctcctag

SEQ ID NO: 209630 - DNA, 1278 bp, synthetic construct
  misc_feature 1..1278: note = Description of Artificial Sequence: Synthetic coding sequence
  source 1..1278: mol_type = other DNA
atggccagcggccagttcgtgaacaagctgcaggaggaggtgatctgtcccatttgcctagatatcctccaaaaaccagtgacgattgattgtggacataatttctgcctcaaatgtatcacccagattggagaaacatcgtgcggcttcttcaagtgccccctgtgcaagaccagcgtcagaaaaaatgccatccggtttaattcgctgttgagaaacctcgtcgagaagatccaggctctccaggccagcgaggtgcagagtaaacgcaaggaagctacctgccctcggcaccaggagatgtttcattacttctgtgaggatgatgggaagttcctgtgtttcgtgtgccgtgaatccaaagatcacaagagccataatgtgagcttgatagaggaagctgcgcagaattaccaaggccagatccaggagcaaatccaagtgctgcagcaaaaggagaaggagacggtgcaggtcaaggcacaaggagttcacagagttgatgtgtttacggaccaggtcgaacatgagaaacagcgaattcttaccgaattcgaacttctgcaccaggtgctcgaggaagagaagaatttccttctgtcgagaatttactggctaggacatgaaggtacagaagccggcaaacactacgttgccagcacggagcctcagctgaatgaccttaaaaagctggttgactctcttaagactaagcagaacatgccacctaggcagctcctggaagacataaaggtcgttctgtgtaggtctgaggaattccaattcctgaaccctaccccggttccgttggagctggagaagaagctgagtgaagcaaaaagtcgccatgactccattaccggcagccttaaaaagtttaaggatcagttgcaagctgataggaaaaaagacgagaacagattctttaaaagcatgaacaagaacgatatgaaatcctggggactactccagaagaataaccataagatgaataagacctctgagcccggatctagttctgcaggcggccggacaacttctggcccaccgaatcaccattcttctgccccaagtcacagtttattccgggcatcctcggctggcaaagttacctttccggtatgcttgttagcttcgtatgacgagataagcggacaaggggcttcgtcacaggatactaagacattcgacgttgccctcagtgaagagctgcacgctgctctcagcgagtggctgacggcaatccgagcttggttctgtgaagtgcccagttcctag

SEQ ID NO: 209631 - DNA, 1278 bp, synthetic construct
  misc_feature 1..1278: note = Description of Artificial Sequence: Synthetic coding sequence
  source 1..1278: mol_type = other DNA
atggccagcggccagttcgtgaacaagctgcaggaggaggtgatctgccccatctgtctggatattttacagaaaccagtcaccatcgattgtggccacaacttctgcctcaaatgcatcacacagatcggggaaacaagctgtggattcttcaagtgcccattgtgcaagacttccgtgagaaaaaatgctatacgatttaattcccttctgagaaaccttgttgagaaaattcaagcgctgcaggctagcgaagttcaaagtaaacgtaaagaggcaacttgtcctcgacaccaggagatgttccactatttttgcgaagacgacggaaagttcctttgctttgtttgtcgggaatccaaggatcataagtcacataatgtgagcttaatcgaggaggcagcccaaaattatcagggccagatccaagaacagatacaggtgctccaacagaaggaaaaggaaacagtccaggtaaaggcccaaggtgttcacagggtggacgtctttaccgatcaggtagagcatgaaaagcagcggatccttactgagtttgagctgttacatcaggtgctggaggaggaaaagaattttctgctgtctaggatctactggctggggcacgaaggaactgaagctgggaagcattatgttgcctccactgaaccccagctcaatgacttgaaaaaactcgtggattcactgaagactaagcaaaacatgcccccacgtcagctgctcgaggacataaaggtggtactgtgtcgatccgaggaatttcagtttctcaatccgactccagtcccactagaactggagaagaaactatcggaggccaaaagtaggcacgattcaatcacaggttcccttaaaaagtttaaggaccagcttcaagcggaccgaaagaaggacgagaaccgcttttttaaatccatgaataagaatgacatgaaaagctggggcctgctgcagaaaaataaccacaagatgaacaagacaagcgagccaggcagctcaagtgcgggcggaagaaccaccagtggaccacctaatcaccacagtagcgccccgtcccactctctgttcagggcctcctcagccggcaaggtgacctttccagtgtgcctcctggcctcttatgatgagatttcaggacagggcgccagctctcaggacaccaaaacctttgacgtggccctgagcgaagaactgcacgccgccctaagcgaatggctgactgccattcgggcatggttctgcgaggtccctagttcgtag

SEQ ID NO: 209632 - DNA, 1278 bp, synthetic construct
  misc_feature 1..1278: note = Description of Artificial Sequence: Synthetic coding sequence
  source 1..1278: mol_type = other DNA
atggccagcggccagttcgtgaacaagctgcaggaggaggtgatctgtccaatttgcctggacatcctgcagaagcccgtgacaatagactgcggccataatttctgtctgaagtgtataacccagattggggagaccagctgtggcttcttcaagtgtcctttatgtaagacatctgttaggaaaaacgccatcaggttcaattcactgttgcgaaatctcgtggagaaaatacaagccttacaggcctcagaggtgcagtctaagcgtaaagaggcaacctgtcctcgtcaccaggagatgttccattacttctgcgaagacgacggaaaatttttgtgctttgtatgtcgtgagtcgaaagatcacaagtctcacaacgtgtctctgatcgaagaagcagctcaaaactaccaaggtcaaattcaggagcagattcaggtcctacagcagaaggaaaaagagactgtgcaggttaaagcacaaggcgtccacagagtcgatgtgttcacagaccaggtggagcatgaaaagcagagaatcttgacggagttcgagctgctgcatcaggtcttggaagaagaaaagaatttcttgctctcaaggatctactggctggggcatgagggcacagaggctggcaagcactacgtggcctccacagaaccccagctgaatgacctgaaaaaactgattgactccttaaagaccaaacagaatatgccacccaggcagttactcgaggatatcaaggtggtactctgccgcagcgaagaattccagttcctcaatcccacccctgtacccctggagttggaaaagaaactttcagaggcaaaatctcggcacgattccatcactgggtcattaaagaagtttaaagaccagcttcaggctgatcgcaaaaaagacgaaaaccgcttttttaaatcaatgaacaagaacgacatgaaatcttggggcctgttacaaaaaaataaccacaaaatgaataagacttcggagcctggaagtagcagcgcagggggccgcactacctccggtccgccgaaccaccattcctccgccccctcccactctttgttcagagccagctcagcggggaaggttacgttcccagtatgcctgctcgcatcttacgacgagatttccggtcagggcgcgagttctcaggacactaagacatttgatgtggccctgagtgaggaactccatgccgccctatccgagtggcttactgcaattcgcgcatggttctgtaaggtgccatccagttag

SEQ ID NO: 209633 - DNA, 1278 bp, synthetic construct
  misc_feature 1..1278: note = Description of Artificial Sequence: Synthetic coding sequence
  source 1..1278: mol_type = other DNA
atggccagcggccagttcgtgaacaagctgcaggaggaggtgatctgcccaatttgtctggacatcctccagaagccagtgactatcgactgcgggcacaatttctgtctgaagtgcataacccaaattggagaaactagttgtgggttcttcaagtgtcccctctgcaagacttccgttcgaaagaacgccattcgatttaattccctgctacggaatctcgtggaaaaaatccaggctcttcaagcaagtgaagtgcagagtaagaggaaggaagccacatgtcctcgacatcaggaaatgttccactatttttgcgaagatgacggaaagtttctgtgttttgtgtgccgggaaagcaaggaccataagagtcacaacgtcagcttaattgaagaagccgcacagaattatcaaggccaaatacaggagcagatccaggttttgcagcagaaagaaaaggaaacggtgcaagtaaaagcccagggtgtccatcgggtcgatgtctttaccgaccaggtggagcacgagaagcagcgcatcctgaccgaattcgaactcttgcaccaggtcttggaagaagaaaagaactttctgctatcgagaatatactggctcggtcatgagggcacagaggctggcaaacattacgtggcttctaccgagccccagctgaatgacctaaagaagctcgttgattctctgaagactaagcagaacatgccaccccgtcagctcctggaagatataaaggttgtgctttgcaggagcgaggagttccagtttttgaatcctacccccgtcccgcttgaactggaaaagaaactgagtgaggccaagtcacgacacgattcgataaccggcagcctaaagaaattcaaagatcagttgcaggctgatcggaaaaaggatgagaataggttctttaagtccatgaacaaaaatgacatgaaaagctggggcctgctgcaaaagaacaatcacaagatgaacaagacaagcgaacctggttctagctctgccgggggccgcacaacgtcaggacccccaaaccaccactcctcggccccgtcccacagtctgttccgagcctcctccgctggtaaagtcacttttcccgtgtgtctcttggcctcttacgatgaaatctccgggcagggcgcaagcagccaggacacgaagacgttcgatgtggccctttcggaagagctacacgccgctctatctgagtggctgacagcaatacgggcctggttctgcgaagtgcccagctcctag

SEQ ID NO: 209634 - DNA, 1278 bp, synthetic construct
  misc_feature 1..1278: note = Description of Artificial Sequence: Synthetic coding sequence
  source 1..1278: mol_type = other DNA
atggccagcggccagttcgtgaacaagctgcaggaggaggtgatctgcccaatttgcctcgacattctgcagaagcccgttactatcgactgcggacacaatttctgcctcaagtgcatcacgcaaatcggcgagaccagctgtggctttttcaaatgtcccctctgtaagactagcgtgcggaagaatgccatacggtttaatagcctgctccgtaatctggtagagaagattcaggcccttcaagcctccgaggtgcaaagtaaaagaaaggaggccacgtgccccagacaccaggagatgttccattatttctgtgaggacgacggaaagttcctttgctttgtgtgccgtgagtctaaagatcataagtctcataacgtttcgctgattgaggaggccgcacagaattatcagggacaaattcaggaacaaattcaggttctccagcagaaagagaaggagaccgtgcaggtgaaagcacagggcgtgcaccgggtggacgtgtttaccgaccaggtcgaacatgagaaacagcgcatcctgactgagtttgagctcctgcaccaggtacttgaggaagagaagaactttctcctgtcacgaatctattggttgggacacgagggcaccgaggcaggcaaacattatgtagcttcgactgaaccccagctcaacgatttgaaaaagttggttgacagtcttaaaactaagcagaatatgcctcctagacagctacttgagccagcacagccacatctgcccagatccgaagagtttcagttcctcaaccccacaccagtgcccctcgaactcgaaaaaaagttatccgaagcgaagagccgtcacgactcgataaccggctctcttaaaaagttcaaagaccagttgcaggccgaccgaaaaaaggacgaaaaccgattctttaaatcgatgaacaaaaacgatatgaagtcctggggcttgctccagaagaataaccataaaatgaacaaaactagcgaacctgggtctagtagcgccggcgggaggacaacaagcggacccccaaatcatcactcttccgcccctagtcattctcttttccgggcctcatctgccggcaaggtgacatttcctgtttgtctcctggcttcttatgacgagatttctggtcaaggggcttcaagccaggacactaagacctttgacgtggccttgagtgaagaactacatgccgccctgagcgagtggctcactgctatacgggcctggttctgcgaagtgccttcttcgtag

SEQ ID NO: 209635 - DNA, 1278 bp, synthetic construct
  misc_feature 1..1278: note = Description of Artificial Sequence: Synthetic coding sequence
  source 1..1278: mol_type = other DNA
atggccagcggccagttcgtgaacaagctgcaggaggaggtgatctgcccgatttgccttgacatactccagaaacccgtaactatcgattgtggacataatttctgcctgaagtgtattacccaaatcggggagacatcatgcgggttctttaaatgccctctgtgtaaaacgtctgtgcgcaagaacgctattcggtttaattcgctgttgcggaacctcgtggagaaaattcaggccctgcaggccagcgaagtgcagtccaaacggaaggaagctacttgccctaggcatcaagaaatgttccactacttttgcgaggatgacggaaagtttctgtgctttgtgtgtcgtgaatccaaggatcacaagtcacacaatgtgagtctcattgaggaagcagcccaaaattaccagggacagattcaggagcagatccaagtcttgcaacagaaggaaaaggaaactgtgcaggtgaaggcacagggggtgcatagagtggacgttttcactgatcaggtggaacatgagaaacagaggatcctgactgagttcgaacttctgcatcaggtgctggaggaagagaaaaattttttgctctccaggatctattggttgggacatgagggcacagaggctggaaagcactacgtcgccagcactgagccccagctgaatgacctaaagaaactcgtggacagcctcaagaccaagcagaatatgccaccacgccagctgttggaggacatcaaggttgttctctgcagatcagaggaattccagttcttgaaccccacacccgtgcccctggagctggagaagaagctctcagaggcaaagagccgacatgacagtatcaccggcagcctcaaaaaattcaaggaccaactgcaggctgaccgaaagaaggacgagaatcggttctttaagtctatgaacaagaacgatatgaagagctggggcttactacaaaaaaataatcacaagatgaataagacatcagagccgggaagctctagcgccggcggccgcacaaccagcggccctcctaaccatcactcttcagctccgtctcactctcttttcagagcttcgtcagccgggaaggtgacgtttcctgtatgcctgctggcgtcctacgacgagatttcggggcagggtgcttcttctcaggacacaaagaccttcgacgttgcactctctgaggagcttcatgctgccctaagtgaatggctcacagccattcgagcttggttttgcaaggtcccttcatcctag

SEQ ID NO: 209636 - DNA, 1278 bp, synthetic construct
  misc_feature 1..1278: note = Description of Artificial Sequence: Synthetic coding sequence
  source 1..1278: mol_type = other DNA
atggccagcggccagttcgtgaacaagctgcaggaggaggtgatctgtccaatctgcttagatatcttgcagaagccagtgacaatcgactgtgggcataatttttgcctcaagtgtatcactcagataggcgaaacctcctgcggtttcttcaagtgcccactctgtaagacaagcgtgcggaagaatgctattcgatttaacagcctgctgcgcaacctggtagagaaaattcaggcactgcaggcctccgaggtgcagtcaaaacgcaaagaggcaacctgcccaagacaccaggagatgtttcactacttttgcgaagacgatggcaagtttctctgcttcgtgtgcagggagtccaaagaccacaaatctcataatgtgtctttgatagaagaggcagcccaaaattaccagggtcaaatccaggaacaaatccaagttctgcagcagaaagagaaagaaacagtacaggtcaaagcacagggggtgcacagagtggacgtctttactgaccaggtggagcacgagaaacagagaatcttgaccgagttcgaactgcttcaccaggtgctcgaagaagagaagaactttctgctgagtcgcatttattggcttggccatgaaggcacagaggctggaaagcattatgtagcctccacggagccccagctgaatgacttgaagaaactggtcgactccctgaagaccaaacagaatatgccacctcgtcagctcctcgagcccgcccagccccacctgccccggtctgaggagttccagttccttaatccgacacccgtccccttggagctggaaaaaaagttgtccgaggccaagagcaggcacgactccataactggaagcctgaagaaatttaaagaccagctacaagccgacaggaagaaggacgagaaccggttcttcaagtctatgaacaagaacgacatgaaaagttgggggctgttgcagaaaaataaccataaaatgaacaaaacttccgagcctggtagttcttcagcaggggggaggactacaagtggaccccccaaccatcactcctcagcgccgagccattcgctgtttagagccagctctgcggggaaagttaccttcccggtgtgtctgctagccagctatgatgagatttctggccagggcgccagcagccaagataccaaaacgtttgatgtggcactctcagaagagctgcacgcagccctgagcgagtggcttactgccatacgcgcttggttctgcgaggtaccaagcagctag

SEQ ID NO: 209637 - DNA, 1278 bp, synthetic construct
  misc_feature 1..1278: note = Description of Artificial Sequence: Synthetic coding sequence
  source 1..1278: mol_type = other DNA
atggccagcggccagttcgtgaacaagctgcaggaggaggtgatctgccctatctgcctcgacattctacagaaacccgttacaatagactgtggtcacaatttctgtctgaaatgtatcacccagatcggggaaacctcgtgcgggtttttcaaatgccccctatgcaaaacatcagtgaggaagaatgccattcggttcaactcattactccggaacctggttgagaagattcaagccctgcaggcttcagaggtgcagagcaagcgcaaagaagccacctgcccccgtcaccaggagatgtttcactacttctgcgaagatgatgggaagttcctgtgctttgtgtgtcgtgaatctaaagatcacaaaagccacaacgtctcgttgattgaggaagccgctcagaattatcagggacaaatccaggagcagatccaggttctacagcagaaagagaaagagacagtgcaggtgaaggcccagggagtgcaccgggttgacgtgtttaccgaccaggtcgaacatgagaagcagaggatcttaaccgaattcgagctgctgcaccaagtcctagaggaggagaaaaatttcttactgagtcggatttactggctcggtcacgaaggcaccgaggcaggcaagcactacgtcgcttcaaccgagccccagctgaacgatctcaagaagctgattgactcactgaaaaccaagcagaatatgcctccacgccaactgctggaaccagcacagcctcacctgcccagatctgaagaatttcagttcttgaaccccactcccgtgccgctcgaactcgagaagaagctgtccgaggcaaagagtcggcacgacagcattacaggctcccttaagaaattcaaagatcagctgcaagccgacaggaaaaaagacgagaaccggttctttaaaagcatgaacaagaacgacatgaagagttggggccttctgcaaaagaataaccacaagatgaacaaaacttctgaaccagggtcttcatcagctggagggcgtaccacctcagggccccccaatcatcattctagcgcaccctcacattcccttttccgtgctagctctgccggcaaagtcacgtttcctgtttgcctgttggctagctacgacgagatcagtgggcaaggcgctagctcgcaagatacaaagaccttcgatgttgccctgtctgaagaacttcacgccgccctgagtgagtggctgaccgctatacgagcatggttttgtaaagtgccctcttcatag

SEQ ID NO: 209638 - DNA, 1278 bp, synthetic construct
  misc_feature 1..1278: note = Description of Artificial Sequence: Synthetic coding sequence
  source 1..1278: mol_type = other DNA
atggccagcggccagttcgtgaacaagctgcaggaggaggtgatctgccccatttgtctggatattcttcaaaagcccgtaacaattgactgcggacataacttctgtttaaagtgcattacacagatcggcgaaacctcttgtggattcttcaaatgccctctttgtaagacttcagtgcggaaaaacgctattagattcaactcactgctgcgaaacctggttgagaagattcaggccctccaggccagcgaggtccagtcaaaacgcaaggaagctacgtgcccacggcaccaagaaatgttccactatttttgtgaagacgacggcaagttcctctgtttcgtatgctgcgagtccaaagatcacaaaagtcataatgtatccctcatagaagaagctgcccagaactaccaaggccagattcaggagcagatccaggtgctgcagcagaaagagaaagagaccgtccaggtgaaggcccaaggagtgcatcgagtagacgtgttcacggatcaggtcgaacatgagaagcagcgtatactcacagaattcgaactgttacatcaggtcctggaggaagagaaaaacttcctcctttcacggatttactggcttggacacgagggtaccgaggctggcaagcattatgtggcatctactgagccacaattgaacgatctgaagaagcttgtggacagcctcaagaccaaacagaacatgcctccacgacagctactagagcccgcacagcctcatctgccgaggagcgaagaattccagttcctgaatcctacaccggttcccctcgagctagaaaagaaactcagcgaagcaaagagccgccatgacagcattactgggtctcttaaaaaattcaaggatcagctccaagccgaccggaagaaagacgagaacagattcttcaagagcatgaacaaaaatgacatgaaaagttggggactgctgcagaagaacaaccataagatgaacaagacctccgaacccggtagttcctcggctggagggagaactacatcaggccccccaaaccaccactcaagcgctccttcacattcacttttcagagcctcgtccgcaggcaaagtcacttttcctgtgtgccttctggcctcttacgatgagattagcggccaaggagcttcttctcaagacacgaagactttcgacgtcgccttatcagaggagcttcatgccgctctctcagagtggctgacggcaatccgtgcctggttctgcgaagtgccatcgtcctag

SEQ ID NO: 209639 - DNA, 1278 bp, synthetic construct
  misc_feature 1..1278: note = Description of Artificial Sequence: Synthetic coding sequence
  source 1..1278: mol_type = other DNA
atggccagcggccagttcgtgaacaagctgcaggaggaggtgatctgcccaatttgcctggacattcttcaaaagccagtgactattgattgcggacacaatttctgcctgaagtgtataacacagataggagagacaagctgcgggttctttaagtgtcccctttgcaaaacctcagttagaaagaacgccatccggttcaactccctgttgcgcaatttggtcgaaaagatacaggctcttcaagcctcggaggtccagtccaaacgcaaagaagcaacctgtccaagacatcaggagatgtttcactacttctgtgaagacgacggaaagtttttatgctttgtgtgtagggaatccaaagatcacaaatctcataatgtgagtctgattgaggaagcggctcagaactaccagggtcagattcaggaacagatccaggtgctacagcagaaggaaaaagaaacagtgcaggtcaaggcacagggagttcatcgcgtggacgtctttacagaccaagtggagcatgaaaaacagcgaatcctgaccgagttcgagctgctccatcaagtcctggaggaggaaaaaaacttcctgctgagccgtatatactggctggggcacgagggaacagaagccggcaaacactacgtggcatcaactgaacctcagctgaatgatcttaagaaactggttgattccctcaaaaccaaacagaatatgccacccaggcagctcctggaagacatcaaagtggtactttgtaggtctgaggaattccagttcctcaaccccacccccgtgcccttggagcttgagaagaagctgtcagaggcgaaatcacggcacgactccataaccgggtcattgaaaaaattcaaggatcagttgcaggcagaccgcaagaaagatgagaatagatttttcaagtctatgaataagaacgatatgaagtcatggggcctgctgcagaaaaataatcacaaaatgaacaaaacatccgaacccggctcttcctccgcagggggtaggaccactagcggaccacccaaccatcactcctcagccccttcgcactcactgtttcgtgctagcagcgctggcaaagtaacattccctgtgtgcctcctggccagctacgatgagattagtggacaaggcgctagctcccaggataccaagacctttgatgtcgccctgtctgaagagctacacgcggccctgagtgaatggctgacggcgatcagagcctggttctgtgaagtccctagcagctag

SEQ ID NO: 209640 - DNA, 1278 bp, synthetic construct
  misc_feature 1..1278: note = Description of Artificial Sequence: Synthetic coding sequence
  source 1..1278: mol_type = other DNA
atggccagcggccagttcgtgaacaagctgcaggaggaggtgatctgtcccatttgtctggacatcctgcaaaaaccagtcacgatcgattgcgggcacaatttctgtctgaagtgtattacacaaatcggggagacgagctgtggcttcttcaaatgcccactgtgcaagactagcgttcggaaaaatgccatccgcttcaacagtctccttcgaaatctggtggagaagatccaagcccttcaagcatctgaagtgcagtcgaaacgcaaggaggccacctgtccacgtcaccaggaaatgtttcattatttctgtgaggacgacggcaaattcctgtgcttcgtgtgtcgagagtccaaggaccataaatcccacaatgtcagccttatcgaagaggccgcgcagaactatcaggggcagattcaagagcagatccaggtcctgcagcagaaggaaaaggagactgtacaggtaaaagctcagggggtacacagagtggacgtttttaccgaccaggtcgaacacgagaagcagcgcatcttaaccgagttcgagcttctgcatcaggtcctcgaggaggaaaagaacttcctgcttagccgcatatattggctgggccacgaagggaccgaggctgggaagcattacgttgcttcaacggaaccgcaacttaacgatcttaagaagttagttgattcgcttaagaccaaacaaaatatgcctcctcgccagcttttagaacctgctcagcctcacctccctcggagcgaggaattccagttcctgaaccctacaccggtccccctcgaattagagaagaaactcagcgaagccaaatctcggcatgacagcatcactggttcccttaagaaattcaaggaccaattacaggcggataggaagaaagatgaaaataggttttttaaaagtatgaataagaatgacatgaagtcctggggactgttacagaagaacaatcacaaaatgaacaaaactagtgaacctggtagctctagcgccggaggccggactaccagcggcccaccgaaccaccatagctcagccccgtcccactcactgttccgcgcctcttctgccggaaaggtgacctttcctgtatgcctcttagcttcctacgacgaaatatccggacaaggtgcctcatcgcaggacactaagacatttgacgtggcccttagcgaggaactgcacgcagctttgagcgagtggctcaccgcgatccgtgcctggttctgcgaggtcccgagtagttag

SEQ ID NO: 209641 - DNA, 1278 bp, synthetic construct
  misc_feature 1..1278: note = Description of Artificial Sequence: Synthetic coding sequence
  source 1..1278: mol_type = other DNA
atggccagcggccagttcgtgaacaagctgcaggaggaggtgatctgtcctatctgcctcgacattttgcagaagcccgtgacaatcgattgcggccacaacttttgtttaaagtgtatcacccagatcggcgagactagttgcgggtttttcaaatgtcccttatgcaaaacaagcgtgcggaaaaacgccatccgctttaatagtctgctaaggaacttggtggaaaaaattcaggctctgcaagccagcgaggtgcaatcaaaaaggaaggaggccacgtgtcctagacaccaggaaatgttccattacttctgtgaagatgacggtaaattcttatgcttcgtttgttgcgagtccaaagaccacaagtcccataacgtctccctgatcgaggaggcagcacagaactatcagggccaaatccaggagcagatccaggtgctccagcagaaggagaaggagaccgtgcaagtcaaggctcaaggcgtgcaccgggtcgatgtgttcacagatcaggtagaacacgaaaagcaacgcattttgaccgagtttgaactgttgcaccaggtgctcgaagaggagaagaattttctactgagtaggatatactggttagggcacgaaggaacagaagctggtaagcattatgtggcctcaacagaacctcagttgaatgacctcaagaagctcgtagactccctaaaaacgaagcagaacatgcctccaaggcagctgttagaggatattaaagttgtgttgtgcaggagtgaggaatttcagttcttaaatccgacccctgtgcctttggagctggagaagaagttgtctgaagcaaagtcacgccatgactcaatcacaggaagcttgaaaaagtttaaagaccagctgcaggccgatcgcaagaaagatgagaatagattcttcaaaagcatgaataaaaatgacatgaagtcctggggtctcctgcaaaagaacaatcacaaaatgaacaaaacctcagagcctggctcaagctctgccggcggtcgaaccactagcggtccgcccaaccaccacagtagcgcgccctctcactccttatttcgcgcatcaagcgccggaaaagtcacatttccagtctgtcttctcgcgagttacgacgagatctcaggccaaggcgccagtagtcaagacactaagacctttgacgtagctctgagtgaggagctgcatgcagccctgtccgagtggctgaccgcgatccgtgcatggttttgcgaagtgccatcttcatag

SEQ ID NO: 209642 - DNA, 1278 bp, synthetic construct
  misc_feature 1..1278: note = Description of Artificial Sequence: Synthetic coding sequence
  source 1..1278: mol_type = other DNA
atggccagcggccagttcgtgaacaagctgcaggaggaggtgatctgccccatttgtctggacatattacagaagcccgtcacaatcgactgcggccataatttctgccttaagtgcatcacacagattggagagacgagttgcggatttttcaagtgccctctgtgtaagacttctgttcgaaaaaacgctattcggtttaacagcctcctgagaaacctggtcgaaaagattcaggccttgcaggcctctgaagtccagtctaagaggaaggaggcgacatgtcctcgtcatcaggaaatgttccattacttctgcgaagacgatggaaaatttctgtgctttgtgtgccgggagtccaaggaccacaagagccataatgtaagcctcattgaggaggctgcccagaattatcagggccaaattcaggagcaaatccaggttctacaacagaaagaaaaggaaacagtgcaagtcaaggcacagggagtgcatcgggtcgacgtattcactgatcaggtggagcacgaaaaacagcgcatcctcacagaatttgagctgctgcaccaggtcctggaggaggagaaaaattttctgctttcccggatatactggctgggacatgaggggactgaggccggcaagcattacgtggcctccacagagccccagctgaatgacctgaagaaacttatcgactcactgaagaccaagcagaatatgccaccccggcaactgctcgaggatattaaagtcgtgctgtgtagatctgaagagtttcagtttctcaatccaacaccggtgccgctggaactcgaaaaaaagttgtctgaggctaagtcaagacatgatagcattacagggtctctcaagaagttcaaggaccagttgcaggcagatcggaaaaaggacgagaatcgcttttttaagtcaatgaacaaaaatgacatgaaaagttggggactgcttcagaagaataaccacaagatgaacaagacttccgagccaggcagctcttccgcgggcggacggactacaagcggcccccctaatcatcactcgagcgcaccatctcacagcctattccgggcaagctcagccggtaaagtgacattcccagtgtgcctgcttgcgtcttacgatgaaatcagcgggcagggcgctagtagtcaggacacaaagaccttcgacgtggcgctgagcgaagaactgcatgcggccctctctgagtggttaacggccatccgagcgtggttttgtaaagtgcccagcagctag

SEQ ID NO: 209643 - DNA, 1278 bp, synthetic construct
  misc_feature 1..1278: note = Description of Artificial Sequence: Synthetic coding sequence
  source 1..1278: mol_type = other DNA
atggccagcggccagttcgtgaacaagctgcaggaggaggtgatctgtccaatctgtctcgatatactccagaagccagtgaccattgattgtggacacaatttctgtcttaaatgcataacccaaatcggcgagacttcatgcggattctttaaatgccctttgtgcaagacaagtgtaagaaagaatgccattcgctttaatagcctcctgcgcaatctggtggagaaaatccaggcgttgcaagcatccgaggtgcaatccaagagaaaggaagctacctgccctagacaccaagagatgttccattatttctgtgaggatgacggcaagttcctttgcttcgtttgcagggagtctaaggatcacaagtcacataacgtctcattgattgaggaggcagcacagaattaccagggccagatccaggaacagatccaggtgctgcagcagaaggagaaggagaccgtacaggtgaaagctcagggggtccatagggtagatgtgttcactgaccaagtcgaacacgagaagcaaagaatccttacggagttcgagctcctgcaccaggtgctggaagaagaaaagaactttctgttgagccggatttattggttgggccatgagggaaccgaggcggggaagcactatgtcgcgtctaccgaacctcagctcaacgatcttaaaaagttggtggattccctgaagactaaacagaatatgccaccacgccagctgctggagcccgcacagccccacttgcctcgaagtgaggaatttcaattcttaaatccaacaccagttccgctggagctggaaaagaaactgtcagaggctaaatcccgacatgatagcataacgggctctctaaagaagttcaaggaccaactgcaggcggataggaaaaaggatgaaaatcggttctttaaatcaatgaataagaacgacatgaaaagttgggggctcttacaaaaaaataaccacaagatgaacaagacgagtgaacccggctctagctccgccggaggacgaacaacaagtggtccaccaaatcatcactccagcgctccctcacactcgctcttcagagcctcctctgcggggaaagtcacattcccagtatgcctgctcgccagctacgacgaaatttctggccagggcgcttctagtcaggacacaaaaacatttgatgtggctctgtcagaagagctacatgccgcacttagcgaatggttgacagccatccgggcctggttctgcaaggtgccctcttcctag

SEQ ID NO: 209644 - DNA, 1278 bp, synthetic construct
  misc_feature 1..1278: note = Description of Artificial Sequence: Synthetic coding sequence
  source 1..1278: mol_type = other DNA
atggccagcggccagttcgtgaacaagctgcaggaggaggtgatctgccccatctgcttggacatcttacaaaaacctgtgaccatagactgcggacacaatttttgtctaaagtgtataactcagataggagagaccagttgcggctttttcaagtgcccgctttgtaaaacatccgtacggaaaaacgccattagatttaactcactgctgcgtaatctcgtggagaagatccaggcacttcaggcatctgaggttcaatcaaaaaggaaagaagctacctgtccaaggcatcaagagatgtttcactacttctgtgaagatgacgggaaattcctctgcttcgtgtgtcgtgagagtaaagaccataagtcccataacgtgtcccttatagaggaagcagctcagaattatcaaggacagatccaggagcaaattcaagttctccaacagaaagaaaaggaaaccgtgcaggtcaaggctcagggagtgcatcgggtggacgtcttcacagatcaggtcgagcacgagaaacagagaattcttactgagttcgagctgttgcaccaggtgttggaggaggagaaaaattttctcctgagtaggatttactggcttggccacgagggaacagaagccggaaagcactatgtcgcaagcaccgaaccgcagttaaatgatcttaagaaattggtggatagtctgaaaacaaagcagaacatgcccccgcggcaactgctggaagacattaaggtcgtcttgtgcaggtctgaagaattccaatttctcaatcccacgcctgtcccattagaattggagaaaaagctgtccgaggccaaaagccgacacgactctatcactggaagtctcaagaagtttaaggaccagctgcaggcagaccgcaaaaaagatgagaacagattttttaaaagcatgaacaaaaatgatatgaaatcatggggattgttacaaaaaaataaccacaagatgaacaaaacttctgagcctggatcaagctctgccggaggccgtacgacgtcagggcccccgaaccaccacagtagtgcgccctcgcattccttattccgagccagtagcgcaggcaaggtcacattccctgtttgtctccttgcatcatacgacgagatcagcggacagggcgcgtcaagccaggataccaagacgttcgacgttgcgctcagtgaggagctccatgccgctcttagtgagtggttaaccgctattcgggcatggttttgcgaggttccatcttcgtag

SEQ ID NO: 209645 - DNA, 1278 bp, synthetic construct
  misc_feature 1..1278: note = Description of Artificial Sequence: Synthetic coding sequence
  source 1..1278: mol_type = other DNA
atggccagcggccagttcgtgaacaagctgcaggaggaggtgatctgtccaatctgccttgacatactgcagaagcctgtcaccattgattgtggacataacttctgtttgaaatgcatcacccagatcggggaaacatcatgtggcttttttaaatgcccactctgtaagacctccgtgcgaaagaacgcaatccgattcaatagccttttgcgaaacttggtcgagaagattcaggccctccaggcgtccgaagtgcagtccaagcgaaaagaggccacctgtcctcgtcatcaggagatgtttcattacttttgcgaagatgatggaaagttcttatgctttgtgtgtcgggaaagcaaagatcacaaatctcataacgtaagtctgatcgaggaagcagcacagaattaccagggtcaaatacaagaacagatccaggtgctccaacaaaaggaaaaggaaaccgtgcaggtcaaggcgcaaggtgtccaccgggtcgacgtctttaccgaccaagtggaacacgaaaaacagagaattctgaccgaatttgaactactccaccaggtccttgaggaagaaaaaaattttctgttgtcccgcatctactggcttggccacgaagggaccgaagcagggaagcactacgtggcaagtacagaacctcaactgaatgacctgaaaaagttggtggatagtctaaagacaaagcaaaatatgcctccgcggcagttactggaggatatcaaagtggtgctgtgccgctcggaagagtttcagtttctgaatcctaccccggtgcccctggagctggagaaaaaactgtcagaggcaaagtctagacacgactccatcactggcagtttaaagaaattcaaggaccaattacaggcagacaggaagaaggacgaaaacaggttctttaaatcaatgaataagaatgatatgaaaagctggggccttctccagaagaacaatcacaaaatgaacaagacttctgagccgggctcttccagcgccggaggcagaacaacctccgggcctcccaatcaccactcaagtgcccctagccactctctgttccgagcttcttctgcaggaaaggttacatttcctgtgtgtctgttggcctcctacgacgagatcagtggccagggcgcctcctcgcaagacacgaaaacctttgatgttgcgttaagcgaggaactgcacgccgctctaagtgaatggctgactgcaatcagggcctggttctgcgaagttccaagcagctag

SEQ ID NO: 209646 - DNA, 1962 bp, synthetic construct
  misc_feature 1..1962: note = Description of Artificial Sequence: Synthetic coding sequence
  source 1..1962: mol_type = other DNA
atggccgccgccgccgccagccacctgaacctggacgccctgcgggaggtactggaatgtccaatttgtatggaatcctttaccgaagagcagctgaggccaaagctgctgcactgcggccacacgatttgtcgacagtgcttggagaagctgcttgccagcagtatcaacggggtgaggtgccccttttgtagtaaaattacccgcatcacatccctaacccagctcacagataacctcactgtgttgaagatcatcgatacagcgggcttgagtgaagccgtggggctgctgatgtgccgatcttgtggaagaagactgcctcgacagttttgtcgcagctgcggactggtactctgtgaaccgtgtagagaagcagaccatcagccgcctgggcactgcacactgcccgtgaaggaagctgcagaggaaagacgaagagattttggggagaaattgacgagactgagggaactaatgggcgagctgcagcgtcggaaggccgctctggagggggtgtcaaaggaccttcaagcgagatacaaggcagttctgcaagagtatggtcatgaagagcgacgggtccaggacgagctagctcggagtagaaagttttttacggggagcctggcggaagtcgagaaatccaattcacaagttgtggaggagcagagctatctattaaatatagctgaggtgcaggctgtttcaagatgtgattacttcttagcaaagatcaaacaggccgacgtggctctcttggaagagactgcggatgaggaagaacccgaattgaccgcttcactgcctagggaattaacattgcaggacgttgaattgctcaaggtgggacacgttggccctttgcagatagggcaggctgttaagaagcctagaaccgtcaacgtggaggactcttgggctatggaagccacagcctccgcggctagcactagcgtgacctttagagagatggatatgagtcctgaggaagtcgtggcttccccgcgggcatccccagcaaagcagaggggccctgaggctgcgtctaatatacagcaatgcctcttcctaaagaaaatgggggcaaagggttctacgccaggtatgtttaatttgccggtgagcctgtacgtgacttctcagggcgaggtcctggtcgccgaccgaggaaattacagaatacaagtgttcacacgaaagggcttcctgaaggagattaggcggtctccgtctgggatcgattctttcgtgcttagttttctcggagccgacctgcccaatctgactcccctttccgtcgctatgaactgccagggcctgattggggtgacagacagttacgataatagccttaaagtgtatacactcgatggacactgcgtggcctgtcatcggagccaactcagcaaaccatggggtataacggccctacctagtggccagttcgtagtgaccgacgtcgaaggtggcaaactgtggtgctttaccgtcgaccgagggtccggggtggtgaaatactcgtgtctttgcagtgccgttcgtcctaagtttgtcacctgcgacgctgaggggacagtgtacttcactcagggactagggctgaatttggaaaatcgccagaacgagcatcatcttgaggggggtttcagtatcggttctgtgggaccagatgggcagctggggagacagatttcacacttcttttcggagaacgaagatttcagatgcattgcaggcatgtgtgtggacgcccggggcgacttgatcgtggccgacagttcaagaaaggagatcctgcactttcccaagggaggcggatactctgttctgatccgcgagggcctgacctgtcctgtaggaattgcattgacaccaaagggtcaacttcttgttttggactgttgggatcactgcataaagatctattcctaccacctccggcggtacagcacaccttag

SEQ ID NO: 209647 - DNA, 522 bp, synthetic construct
  misc_feature 1..522: note = Description of Artificial Sequence: Synthetic coding sequence
  source 1..522: mol_type = other DNA
atggccgccgccgccgccagccacctgaacctggacgccctgcgggaggtgctcgagtgtccaatttgtatggagtccttcaccgaagagcaactacgtcctaagctgctccactgcggccacaccatctgccgccaatgtctggagaagctcctggcctcatctattaatggggtgcgatgtcctttttgctcaaagatcacccgcattacatcattgacgcagctgactgacaatctcactgtcttgaaaataattgacactgccggattatccgaagcagtgggtctgctgatgtgcagatcgtgtgggcgtagactgcctagacagttttgccggtcttgtgggctagtcctatgtgagccatgtagggaagcggatcaccagccccccgggcactgtacattacctgtcaaagaagccgctgaagagaggcgaagagacttcggcgagaagttaacaagactgagggaactaatgggcgaacttcaacgaagaaaggccgcactggaaggggtgtag

SEQ ID NO: 209648 - DNA, 1962 bp, synthetic construct
  misc_feature 1..1962: note = Description of Artificial Sequence: Synthetic coding sequence
  source 1..1962: mol_type = other DNA
atggccgccgccgccgccagccacctgaacctggacgccctgcgggaggttctggagtgccccatttgtatggaatcttttaccgaagagcagttaagacccaagttactgcactgtggccataccatttgccggcagtgcttggaaaaattgctggcgagctcaatcaatggcgtcagatgtccattctgcagcaaaataacaaggatcacatcccttactcagcttacagacaacttaacggtgctcaagatcatcgacaccgcggggctaagcgaggctgttgggctgctgatgtgtcgcagttgtggccggagactgccacggcaattctgccggagctgcgggcttgttctctgtgagccctgtagagaagccgatcatcagccacctgggcactgcacacttcccgtaaaggaggccgcagaggaaaggcgccgcgacttcggcgagaagctgacaaggctgcgagaattaatgggggagctacagagacgcaaggctgcactcgagggcgtgagcaaggatcttcaggctcgctacaaggcagtgttacaggagtatggccatgaggaacgtcgggtacaagacgaattggctcgaagtcgcaagttttttacaggctccttagccgaagtcgagaagtctaattcacaagtggtggaagagcagtcttatcttctgaacatcgcggaggtacaggctgtgagccggtgcgactacttcttagccaagatcaagcaggcagatgttgcactcctggaagaaactgctgatgaggaggaacctgagctgacagctagtttgccacgagagctcacactgcaggacgtcgaattgctgaaggtaggtcacgtcggcccattacaaattggtcaggctgttaagaagccccggaccgtgaacgtagaagattcatgggccatggaagcaaccgccagcgctgccagcaccagcgtcacttttagggagatggatatgtctccagaggaagtagtcgcaagccctcgtgcatccccggccaagcagaggggacccgaggctgcctccaatatccagcagtgcctgtttctcaagaaaatgggagccaagggaagtacaccaggcatgttcaacctgcccgtaagtctctatgtgacttcgcagggcgaagtgctcgtggctgatcgaggcaactatcgaattcaggtcttcactcgcaagggatttcttaaggagatccgtagaagccccagtgggattgactcatttgttctttcatttcttggcgccgatttacccaaccttacccctttgtccgttgccatgaactgccagggccttatcggcgtgaccgattcgtatgacaattcactcaaagtttacaccttggatggccactgcgttgcctgtcacagatctcagttgagtaagccttggggaataacagctcttccatccggccagtttgtggtgacagatgtggaaggcggcaaactctggtgtttcacggtggatcgcgggtctggcgtggtgaagtactcctgcctgtgttctgcggtgaggccaaagtttgtgacctgcgacgcagaaggcactgtttactttacacagggactggggttgaatttggaaaaccgccagaatgaacaccatttagaggggggtttcagcattggttctgtcggcccggatgggcaactcggacggcagattagccacttttttagcgaaaacgaggactttaggtgtattgcaggtatgtgcgtggatgccagaggcgaccttattgttgctgacagctcaagaaaggagatcctgcacttccccaagggggggggctattcagtgcttatcagagagggcctgacctgtcctgtgggtatcgccttgacccctaagggtcagctcctggtgctggattgttgggatcactgcattaagatctacagctatcatctacgtcgctattcaactccatag

SEQ ID NO: 209649 - DNA, 3384 bp, synthetic construct
  misc_feature 1..3384: note = Description of Artificial Sequence: Synthetic coding sequence
  source 1..3384: mol_type = other DNA
atggccgagaacaagggcggcggcgaggccgagagcggcggcggcggctccggatcagctcctgtgacagccggcgctgcaggtcctgcagctcaggaggccgaacctcctcttactgctgtattggtagaagaagaagaggaggaaggaggacgcgctggggccgagggcggcgccgcaggcccagacgatggcggggtggccgccgccagttccgggtctgcccaggctgcctcctctcccgcagccagtgtggggacaggtgtagccgggggtgccgtgtccacccctgcaccagctcccgcctccgctcctgctccaggtccaagtgccggcccaccgcccggaccacccgcctcactgctggatacctgcgccgtttgccagcagtcgctgcaatctcgacgcgaagccgagcctaagttgcttccttgcctccactcgttctgcctcagatgtcttcccgaaccagagaggcagttgtccgtccctatcccaggtggctctaatggagacattcagcaagttggcgtgattagatgtcccgtttgcagacaggagtgccgccagatcgacctggtggacaactacttcgtgaaagatacgtcagaggctccctcatccagcgacgagaagagcgaacaggtttgcacttcatgtgaggacaacgcctcagcagtggggttctgcgtggagtgtggggaatggctgtgtaaaacatgcatcgaggcccatcagcgtgtcaagtttacgaaagaccatctcatccgaaagaaagaggatgtcagcgaatctgtgggagctagtggccagcggcccgtgttctgtccagtgcacaagcaggagcagctgaaactgttttgcgagacatgcgaccgcctgacttgtcgtgattgtcagcttctggagcataaagagcataggtaccagttccttgaggaagcctttcagaaccagaaaggagctatcgaaaacctgcttgccaaactgctggaaaagaagaattacgtgcactttgccgctactcaggtgcagaataggataaaggaagttaacgagaccaacaaacgcgtcgaacaggaaatcaaggtcgctatcttcactttgatcaatgagattaacaaaaagggaaagtcccttctccagcagcttgaaaacgtcacaaaagaacggcagatgaaactcttgcagcagcagaatgatatcaccggcctgtccaggcaagtgaagcatgtgatgaactttacgaactgggccattgcctcaggctcaagtacagcattgctgtacagtaaaaggctgatcacattccaactccgccatattctcaaggctaggtgcgatcctgtccccgcagcaaacggggcaattcgctttcactgcgatcctactttctgggccaagaacgtcgtgaacctggggaatcttgttatcgaatcaaagccagctccaggctacacgccgaacgtggtggtcggccaggtgcctccagggaccaaccatatctccaagacgcctggtcagattaacctggcacagctccgattacagcacatgcagcagcaggtgtacgcccagaagcatcaacagctgcagcagatgcgtatgcagcagcccccagcaccagttcctaccaccacgactaccacacagcaacatccccggcaggcagccccccagatgttacagcagcagccacctcgcctgatctccgtccagacaatgcagcgcggtaacatgaattgtggcgcctttcaagctcaccaaatgagactggcacagaatgccgctcgtatcccaggaatcccacgccattctggtcctcaatactccatgatgcaacctcacctgcagaggcagcacagcaaccccgggcacgccggtcccttccccgtagtgagtgttcacaacacaaccataaacccaactagcccgactaccgccacaatggccaatgctaacagaggaccaacctccccctccgtcacggccatcgagctgataccctccgtaacgaacccggaaaacctccctagtctccctgatatcccccctatacagctggaggatgcaggcagcagtagcttggacaacctcctcagtcggtatatatctggctctcacctcccccctcagcccacctccacaatgaacccgtccccaggcccctccgccctttccccgggctcctcaggactttccaattctcacaccccagtgcggcctcctagcacatcgagcaccggatcacgcggctcttgtggcagcagtggtcgaactgccgagaagacatcgttaagcttcaagtccgaccaggtaaaggtgaaacaagaacccggaacagaggacgaaatctgttcctttagcggtggcgttaagcaggaaaagacggaagatggtcgaaggtccgcatgcatgctgagctcacccgaaagctcccttactccacctctcagcacgaacctgcaccttgagagtgaactggatgctctggcatcgcttgaaaaccatgtcaagatcgagccagctgacatgaacgaatcctgcaagcagagcggcctgtcatccctggtaaacggtaaatctccaatacgatcattgatgcaccgttctgcacggatcggaggtgacggcaacaataaagatgacgaccccaatgaggactggtgcgctgtctgtcaaaatggcggagacttactttgttgtgaaaaatgcccaaaggttttccacctgacatgtcacgtacccacactcctctcgttcccatcaggtgactggatctgcaccttctgtcgggatattggcaaaccggaggtagaatacgactgtgacaacctgcagcattctaagaaagggaaaaccgctcaggggctgtcacccgttgaccagcggaaatgcgagaggctcctgctctacctgtactgccacgagctgagtattgagttccaggagccagttcctgcctccatccccaactactataagattattaagaagcccatggacctttcaactgtaaagaaaaagctccagaaaaagcatagccagcactatcagattccagacgattttgtggcggatgtccgactcatctttaagaattgtgaaaggttcaacgaaatgatgaaggttgtgcaggtatatgctgacacccaggagattaatctgaaggcggattccgaggtggcccaagcgggcaaagcagtggctctctactttgaggacaaactcaccgagatttactctgaccggacattcgcacctcttccagagttcgagcaggaggaagatgacggagaggtgacggaggattccgacgaagattttatccaacctcgcagaaagagattaaagtccgacgaacgccccgttcatataaagtag

SEQ ID NO: 209650 - DNA, 3333 bp, synthetic construct
  misc_feature 1..3333: note = Description of Artificial Sequence: Synthetic coding sequence
  source 1..3333: mol_type = other DNA
atggccgagaacaagggcggcggcgaggccgagagcggcggcggcggcagcggttccgcgcctgtcaccgcgggcgctgcaggccctgcggcccaagaggccgaacccccacttacggctgttttggtggaggaggaggaagaggaaggagggagagccggggccgagggcggagcagccgggcctgacgatggaggcgtcgctgcagccagttctggatccgcacaggcagcctccagcccagcagcctcagtcggcacgggggtcgccggtggtgccgttagtacccccgcacccgctcccgctagcgcgcccgcccccgggcctagtgccggccctccccctgggcccccagcctcactgctcgatacatgtgccgtttgtcaacagtctctccagtcaagaagggaggcggaacccaagttattgccctgcctccattcattttgccttcggtgcttgcctgagcctgagagacagctgtcagtccctattcctggcggaagtaatggcgatatccaacaagtgggagtgatacgatgtcccgtttgtcgccaggagtgtaggcagatagacctcgtcgataactattttgtcaaggatacatctgaagctccatcgtcctccgatgaaaaaagcgaacaggtatgtacatcttgcgaggataatgcgtccgcagtagggttttgtgtggagtgtggggagtggctttgcaagacatgtatcgaggcccatcagagggtaaagtttaccaaagaccacctgatcaggaagaaggaggatgtgtccgaaagcgtcggagcctcggggcaacgcccggttttttgcccggttcacaaacaggaacagctcaagcttttctgtgaaacatgtgataggctgacttgccgcgattgtcaactgcttgaacataaagaacaccggtaccagtttctggaggaggcctttcaaaaccagaaaggcgctattgaaaacctgctagctaagctgctggaaaagaagaattatgtccatttcgccgctacccaggtccagaacagaattaaagaggtgaacgagactaacaaacgcgttgagcaggagattaaggtggccatttttacccttattaacgagatcaataaaaaaggcaagagcctgctccaacagctggagaacgtgacaaaggagcgccagatgaaacttctacagcagcaaaacgatatcacaggactgtcaagacaagtgaagcatgtcatgaattttacaaactgggcaatcgcatccgggtcttccacagccttgctgtattctaaacgcctgattacatttcagctgcgccatattttgaaagccaggtgcgaccccgtgccggccgccaatggggccatccgctttcactgtgaccctaccttctgggctaagaacgttgtgaacctgggcaacctcgtcatagaatctaagccggcaccagggtacactccgaacgttgtggtaggtcaagtgcccccagggactaaccatatctccaaaactccagggcagatcaatcttgctcaactgcgactgcagcatatgcagcagcaggtctacgctcaaaagcatcagcaactccaacaaatgcggatgcagcagccaccggcccccgttcctacgacaaccacgactacccagcagcatcctcggcaggctgccccccaaatgttgcaacagcagccccccagacttatatccgtgcaaaccatgcaacgagggaatatgaattgcggagcttttcaagcccatcagatgagactggcccagaacgccgctagaatacctgggatcccgaggcactccggaccccaatactcgatgatgcagccccacttgcaacgccaacactcaaacccaggacacgctggtcccttcccagttgtttctgtgcacaacaccaccatcaaccctacttcccctactacggcaaccatggcaaatgcaaaccggggccctacatctccatcagtgaccgccatcgagctgattcctagtgtgacaaatcccgagaatctgccaagcctcccagacatacccccaatacaactggaagacgcaggctcgtcctctctcgataatctgctttcccgttatatttcaggctctcatctcccgccacaacctaccagcactatgaatccctctcctggaccctccgccctgagtccaggctcctcagggttgtctaattctcatacgcctgtccgacctccttctacatcatcaacaggttcaaggggatcttgtggctcttccggtaggactgctgagaagacatccctgtctttcaaatccgaccaagtgaaggtgaagcaggaacctggtaccgaagatgagatttgctctttctccggtggtgtcaagcaggagaaaacagaagacggtaggcggagcgcctgcatgctgagctctccagaatcaagcttgacccctcctctcagtaccaacctccacctggagtcagagctcgacgctctggctagcctcgagaatcacgtgaaaatcgaacccgccgacatgaacgaaagctgcaagcagtccggcctgtcatcattagttaacgggaagtcacccatccggtccctcatgcatcgcagcgcgcggatcgggggggatggaaacaacaaagatgatgaccctaacgaggactggtgtgcagtttgtcagaacgggggcgacctgttgtgttgcgagaaatgtccgaaggtgtttcatctcacctgccacgtgcccaccttactgagcttcccatccggcgactggatatgtacattttgtagagatatcggaaaacctgaggtggagtacgactgcgacaatctccaacacagtaaaaaggggaaaactgctcagggcctgagcccggtcgaccagagaaagtgtgaacggctcttgctctacctgtactgtcatgaacttagcatagagttccaggaaccggtccccgcctccattcccaattactacaagattatcaagaaacctatggatctgtctaccgtgaaaaagaaactgcaaaagaagcactcccagcattatcagatccccgatgatttcgtagctgacgttaggctcatcttcaagaactgcgaaagatttaatgaagcagattctgaggtagcccaggctgggaaagccgtggccttgtattttgaggacaagctgaccgagatttatagtgaccggacgtttgcccccttgcccgagttcgagcaggaggaggacgacggagaggtgacagaggatagcgacgaagactttattcaaccccgaaggaagcggctcaagtctgacgaacgaccagttcacattaaatag

SEQ ID NO: 209651 - DNA, 2667 bp, synthetic construct
  misc_feature 1..2667: note = Description of Artificial Sequence: Synthetic coding sequence
  source 1..2667: mol_type = other DNA
tgaagcgtgggcgccagcggccagcggcccgtgttctgccccgtgcataagcaggagcagctgaagctcttctgcgagacctgtgatcgtttgacatgcagagactgccagttgctagagcacaaggaacacagatatcagtttctggaggaagctttccagaatcagaagggagctattgaaaacctcctggctaaactgcttgagaagaaaaactacgtccactttgcggccacacaggtacaaaatcgaattaaagaagtcaacgaaaccaataagcgtgtagagcaggagatcaaagtggccatcttcactctcatcaatgagattaacaaaaaaggcaagagcttgctgcaacagctggagaacgtgacaaaggagaggcagatgaagctcctgcagcagcagaacgacattaccggactgtcacgtcaggttaagcacgtgatgaacttcaccaattgggctattgcctccggctcaagcactgctctcctgtattcaaaaaggttaattacctttcaactgcgtcatattttgaaagcccggtgcgatcctgtccccgctgctaatggggccatcagatttcactgcgacccaactttttgggccaaaaacgtcgtgaacctggggaacttggttatcgagtccaagcccgcccccggttacactccaaatgttgtggttggccaggtcccaccagggaccaaccacatcagcaagacgccaggccagataaacttagctcagctgcgcttgcagcatatgcagcagcaggtttatgcccaaaaacatcagcagctacagcagatgaggatgcaacaaccacccgcaccggtgccaacaacaactactacaactcagcagcaccctcgacaggctgcacctcagatgctgcagcaacaacccccgcgtctgataagtgtccaaacaatgcagcgcgggaatatgaactgtggagcgtttcaggcacaccagatgcgacttgcccagaacgcggccagaatacctggaatcccgcgccattcggggcctcagtactcaatgatgcagccacatttacagcggcaacacagtaaccctgggcacgcaggcccatttccagtggtaagcgtgcacaacacaaccatcaaccccacctcccccacaaccgctactatggcaaatgcaaaccggggccccacatcaccatcagtcaccgccattgaattgattccctccgtcacaaaccctgagaacctgcctagtctcccagacatacctcccattcaggctaacgtggtgcctatgatgcactcctggtatgagtttggtgctcgcgagaaaactcaggatcagaatgtgctagaagacgcaggtagttccagtctggacaaccttctcagcagatatatctcaggttcccacctcccccctcaaccaacttctacaatgaatccatcacctggaccatcagcactgtctcccggcagctcagggttatccaactcccataccccggtgcggccacccagcactagctccacaggatcacgaggatcatgcggctcatccggacgaacggcagaaaagactagcctgtcgtttaagtccgaccaggttaaagtgaaacaggagccaggcacagaggatgagatctgtagttttagtggcggcgtcaaacaggagaagacggaggatggacgtcggagcgcctgcatgttgtcaagtcccgaatctagcttaactcccccactctctacaaatctacacctggaatcagagttagacgctctggcttccttggagaatcatgtgaagatcgaacctgcggatatgaacgagtcatgcaaacaaagtggtttaagttcgctagtgaatgggaaaagtcctatccgcagcttgatgcaccgcagcgcacgcattggaggtgatggcaacaataaagacgacgacccaaatgaagactggtgcgcggtgtgccagaatggtggcgatttgctgtgctgcgagaagtgtccgaaggtgttccatctgacgtgccacgtaccaacactcttatccttcccctcaggtgactggatctgcaccttctgccgagatatcgggaaaccagaggtcgagtatgattgtgataacctgcagcatagtaagaaaggtaagaccgcccagggtctgtctcccgtcgaccagcgcaagtgtgaaagacttctactgtacctgtattgtcatgaactgtctattgaatttcaggaaccggttccagcctccatacctaattactacaaaatcattaaaaaacccatggatttaagcacggtgaagaagaaactgcagaaaaaacatagtcaacattaccagatacccgatgactttgttgcggacgtgagactgatcttcaaaaattgcgagaggtttaatgagatgatgaaggtcgttcaggtctacgcggatactcaagagattaatctgaaggcagattccgaggtggcgcaggctgggaaggctgtggctctgtacttcgaggacaagttgaccgagatctactcagatcgaacatttgctcccttgcccgaatttgagcaggaagaggacgacggagaggttacggaagactccgacgaagactttatccaacctcgccggaaaagactgaagtccgacgaaaggcccgtacacatcaaatag

SEQ ID NO: 209652 - DNA, 2280 bp, synthetic construct
  misc_feature 1..2280: note = Description of Artificial Sequence: Synthetic coding sequence
  source 1..2280: mol_type = other DNA
atgaagctgctgcagcagcagaacgacatcaccggcctgagccggcaggtgaagcatgtcatgaattttaccaattgggctattgcctccggatcatctacggcactgctgtactccaagaggctgatcacatttcagcttcgacacattttaaaagcgcgctgcgaccccgtccccgccgctaatggagctatccgattccattgtgatcccacattctgggcgaaaaatgtagtcaatctgggcaatctggtgattgagagtaagccggcccctggttacacaccgaatgtggtcgtcgggcaggtgccccctggcaccaatcacataagcaagacgcccggccagatcaacctcgcacagcttcggttacagcatatgcagcaacaggtgtacgctcagaaacaccagcagctgcagcagatgaggatgcagcagccacccgcacctgtccccacgaccaccacaactacacagcaacacccccggcaggcggctccacaaatgctgcagcagcagccaccacggctgatctctgtccagacgatgcagcggggaaatatgaactgcggcgcgtttcaggcccatcagatgcggctcgcacagaacgctgctcggattcctggaatcccgcgtcattcaggaccacagtactcaatgatgcagcctcacctgcagcggcagcactcaaaccctggacatgccggcccatttccagttgttagcgtgcacaacacaacaatcaatccaacatcacccacaacagccaccatggcaaacgccaatcggggccctacaagtcctagcgtgaccgcaatcgaactcatcccctctgtaactaatcctgaaaacctcccgagcctgcctgatattcctccaattcaagccaatgtggtgccgatgatgcattcttggtacgagtttggcgcacgggagaagactcaggatcagaacgtgctggaggatgccggttccagctctctggataatctattgagtagatacatctcagggagccaccttcctcctcagcccacctctacaatgaatccgagtccaggtccctctgctctctccccaggttctagcggacttagcaactcccacactcccgtgagaccaccttcaacctcttcaacgggctcaaggggtagttgcgggtccagcggtcgcacagctgagaagacctccctcagcttcaagtccgaccaggtcaaggtcaaacaagagcctggcactgaagacgaaatttgttcatttagcggtggcgtgaagcaggagaagactgaggacggtaggcgatcagcttgtatgctctcgtcccctgagagttctctcaccccacctctttccacaaatctgcatctcgagtctgaacttgatgcattggcctcccttgaaaatcatgttaagattgaaccggccgacatgaatgaaagttgtaaacaatctgggctctcttctcttgttaacggcaagagccctatccgttccctgatgcatagaagtgccagaatcggaggcgatggcaataataaggatgacgacccaaacgaagactggtgtgctgtgtgtcagaacggaggggacctcctgtgttgcgagaagtgtccaaaagtatttcacctcacctgtcatgtgccaaccctgttgagttttccaagtggagattggatttgcaccttctgcagggacattgggaagcccgaagtggagtatgattgtgataacctgcagcatagcaaaaaaggtaagacagcccaaggattatcaccagtcgaccagaggaagtgcgaacggctgctactctatctgtattgccacgagctatcaatagaattccaagaacctgttcctgcatctatccctaactactataaaataatcaagaaaccaatggacctgtcaaccgttaaaaagaagctccagaagaaacacagccagcactaccaaatacctgatgacttcgttgcagatgtcaggctcatttttaagaattgcgagcgtttcaatgagatgatgaaagtcgtgcaagtgtatgccgacacacaggaaatcaatctcaaggccgatagcgaggtcgctcaggctggcaaggccgtcgcactgtatttcgaagataagctgactgagatatattcagacagaaccttcgccccgctacctgaattcgagcaagaagaggacgacggagaagttaccgaagacagcgacgaggactttattcaacctcggagaaagcgactcaagagcgacgaaaggcccgtgcatatcaagtag

SEQ ID NO: 209653 - DNA, 2529 bp, synthetic construct
  misc_feature 1..2529: note = Description of Artificial Sequence: Synthetic coding sequence
  source 1..2529: mol_type = other DNA
atgtgcggcagcgagcggatcctgcaggccggcaacatcctggagattagggttggacaagccggagctagaagggtagcgacaatgacctctcccgtgctggtggatattagagaggaagtcacttgtccaatctgtctagaactccttacggaaccgcttagtatagattgcggccattcattctgtcaggcgtgtattactcccaacggccgcgaaagtgtaatcggtcaggaaggggaaaggtcttgtccagtgtgccagacgagttatcagcctggcaatttacgtccgaaccggcacctggctaatattgtacggcgcctgcgggaggttgtgctcggtcccggcaaacagctcaaggccgtgctctgtgccgatcatggagagaagctgcagcttttttgccaggaggacggcaaggttatatgctggctgtgtgagagatcgcaggagcatcggggacatcacaccttcctcgtggaagaggttgcccaggaataccaggaaaagtttcaggaaagtttgaagaaactcaaaaacgaagaacaggaagctgagaagctaaccgcgtttatccgggaaaaaaaaaccagctggaagaaccagatggagcccgaacgttgccgcatccagacggaattcaatcaactgcgaaatattctggacagggtagagcaacgtgaactgaagaaattggaacaggaagagaaaaagggcctgcgcatcatcgaggaggctgaaaatgacctagtccaccaaacccaatctctgagagagctcattagtgatctggagagaaggtgtcaggggtctacgatggagctccttcaagacgtgtccgatgtgaccgagcgaagcgagttctggactctcaggaagcctgaggctctgcccaccaagcttagatccatgttcagggcccccgaccttaagcgcatgttacgagtgtgtagggagctcaccgacgtgcaaagttactgggcaatccaggggtcactgacacgtagggaaaggcgcgcttcaggagtccgtacacgcagatctcagggtagtagtgctatggcctccaagatactcctgaacgtccaggaggaagtcacatgtcccatctgcctggaactgctgacggagcctctgagtctcgactgtggccactctctctgtcgcgcctgcattactgtgtcgaataaggaagcagtgacatccatgggcggcaaaagctcctgtcccgtatgcggaatatcctattcatttgagcacttacaagctaatcaacacctggccaacattgttgaaaggctcaaggaggtaaagctgtctccagataacggaaagaaaagggacctgtgcgaccatcatggagaaaagttattgctgttttgtaaggaggataggaaagtaatttgttggctctgtgaaaggtcacaggagcaccgggggcatcacacagtgctaacagaagaagtgttcaaggagtgtcaggagaagctacaggccgtgttgaagcggcttaagaaggaggaggaagaggccgagaaactggaagcagatatccgagaggaaaagaccagctggaaataccaggtgcagacagagcgacagaggatccagacggaattcgaccagctgcgatctatcctgaataacgaagagcagcgagaactgcagcgtcttgaggaggaagaaaagaaaaccctcgataaattcgcagaagctgaggacgagctcgtgcagcagaagcaactggtcagggagctgattagcgacgtcgaatgccgctcccagtggtcaacaatggagctgctgcaggacatgagcggaatcatgaagtggtccgaaatatggcgcttgaagaagcccaagatggttagtaaaaagcttaaaactgtgtttcacgcacctgatctgtcccggatgcttcagatgttcagggaattaacagccgtacgctgttattgggttgatgtgacactgaacagtgttaacctgaatcttaaccttgtactgagtgaggatcagcgccaagtgatctccgtgccgatctggccgtttcagtgttataattatggagtgttaggttcacaatattttagctccggcaagcactactgggaagtagatgtttctaaaaaaaccgcgtggatcctaggggtttactgtagaacctatagccgccacatgaaatacgtcgtgagacggtgcgccaacagacagaacctgtacactaagtataggcccctcttcggctactgggttatcgggttgcagaataagtgcaagtatggagtctttgaagaaagcctgtccagcgacccagaagtgctgaccctgtctatggccgtgccaccttgtcgggtgggcgttttcctggactacgaggccgggatcgtctccttcttcaacgtcaccagccatggcagcctgatctacaagttctcgaagtgctgtttttcacagcctgtgtacccttatttcaatccatggaactgtcctgctcctatgaccttatgccccccttcttcctag

SEQ ID NO: 209654 - DNA, 1467 bp, synthetic construct
  misc_feature 1..1467: note = Description of Artificial Sequence: Synthetic coding sequence
  source 1..1467: mol_type = other DNA
atggccagcaagatcctgctgaacgtgcaggaggaggtgacctgcccgatttgtctggagcttctgacagaaccactgagcctggattgcgggcactccctctgcagagcatgtatcacagtgtccaacaaggaagcggtaaccagcatggggggcaagtctagttgtcctgtgtgcggaatatcatactccttcgaacacctgcaagctaaccagcacctcgccaatatcgttgagcggttgaaagaagtcaaactgtcacccgataacgggaagaagcgtgacctgtgtgatcatcacggtgagaaattgcttctcttctgtaaggaggaccggaaggtgatttgttggctctgtgaacgttcacaggaacacaggggacaccatactgtacttaccgaggaggtattcaaggaatgccaggagaagcttcaggcagtgctaaagagactgaagaaagaggaggaggaggctgagaaattggaggctgacatcagggaggagaagacttcatggaagtatcaggtgcagactgagagacagcggattcagacggaatttgaccagttgcggtcaattctcaataacgaggagcagagggagctgcaacgcctggaagaggaagagaaaaaaacactggataagtttgctgaagcggaagatgaactggtacagcagaaacagctcgtgagggagcttatatctgatgtggagtgcagaagtcaatggagcacaatggaacttctgcaagacatgtctggtatcatgaaatggagtgagatctggagactgaaaaaacctaagatggtctccaaaaagcttaagacggtcttccacgccccagatctgagccgaatgctgcagatgtttcgagagctcacggccgtgcgctgttactgggtagatgtcaccctcaactccgtgaatctcaaccttaacctggtcctgagtgaggatcagcgccaggtgataagcgtgcccatttggcctttccagtgctacaattacggggtacttggctctcaatatttctcctccgggaaacattactgggaggtcgacgtgtccaagaagactgcatggatcctgggggtctattgccgcacttatagtagacatatgaaatacgtggtgagaaggtgtgctaatcggcagaacttatacactaaatatcgcccgctctttgggtactgggtgattggactgcaaaacaaatgtaagtacggagttttcgaagaatcgctgtcaagcgatccagaggtcttgacactgagcatggcggtgcccccgtgcagagtgggggtttttctggactacgaagccggaatcgttagcttcttcaatgtaacctctcatggttcgctgatttacaaattttcaaagtgctgtttctctcagcctgtctacccttattttaatccctggaactgcccagccccaatgactctttgccctccctcttcctag

SEQ ID NO: 209655 - DNA, 1467 bp, synthetic construct
  misc_feature 1..1467: note = Description of Artificial Sequence: Synthetic coding sequence
  source 1..1467: mol_type = other DNA
atggccagcaagatcctgctgaacgtgcaggaggaggtgacctgccctatttgccttgagctcttgacagagcctttgagtcttgactgcggccatagcctatgcagagcttgcatcacggtcagcaacaaagaggcagtgacctccatggggggcaagagctcctgtcctgtttgcggaatttcttacagttttgagcacctccaagccaaccagcatctcgcaaatatagttgagcgtctgaaagaagtgaaactgtcgcctgataatggaaagaagagagacctgtgtgatcaccatggcgagaaactgttgttattttgtaaagaggacaggaaggtgatctgttggctgtgtgaacgatcccaggagcacagaggtcaccacacggtgttaaccgaggaggtgtttaaggagtgtcaggagaagctccaggccgtgcttaagagactgaaaaaagaggaggaagaggcagaaaagctagaagccgacattagagaggagaaaaccagctggaagtaccaggttcagacagagcgccagagaattcagaccgagttcgatcaactgcgctccattctgaacaacgaagagcagcgggaacttcagcgtctggaggaggaggaaaagaagactcttgataaattcgcagaagcagaagacgaactcgtccagcagaagcaactggtgcgggaactgatctccgacgtggaatgccgatctcagtggtcaaccatggaactcctacaggacatgagtggtatcatgaagtggtctgagatttggagattgaagaaacccaagatggttagcaaaaagctgaaaacagtattccatgcacccgacctcagccgcatgttgcagatgttccgtgaactcacagctgtgcgatgttactgggtcgacgtgacactgaactccgtgaacctaaacctaaatttggtgttgagcgaggatcagagacaggtcatcagcgtccctatctggccattccagtgttataattatggagtgttaggctctcagtattttagctcaggcaagcactactgggaggtggacgtgtctaagaaaaccgcctggatcctgggggtgtattgccgaacctactcgaggcacatgaaatatgtggtgagacgatgcgcaaatagacagaacttgtacaccaagtataggcctctcttcggctactgggtaatcggtctgcagaataaatgcaaatatggtgtattcgaagaatccctaagctctgaccccgaagtgctaaccttgtctatggccgttcctccctgcagggtgggcgtttttctggattacgaagcaggaatcgtgtccttttttaatgttaccagtcacgggtccctgatttataagttcagtaaatgctgtttctcacagcctgtgtacccgtattttaacccctggaattgtccagcaccaatgacattgtgtcccccttcttcctag

SEQ ID NO: 209656 - DNA, 1467 bp, synthetic construct
  misc_feature 1..1467: note = Description of Artificial Sequence: Synthetic coding sequence
  source 1..1467: mol_type = other DNA
atggccagcaagatcctgctgaacgtgcaggaggaggtgacctgccccatctgtttggagttactgaccgagccgctctcgttagattgcggccactctctgtgccgcgcatgtatcaccgtgagtaacaaggaagccgtaacctcaatgggtgggaaaagttcttgtcctgtgtgtggaatctcatactctttcgagcacctccaggcaaaccagcaccttgccaatatcgtcgaacggttaaaggaggttaaactctcccctgacaatggtaagaaacgtgacctttgcgaccaccacggagaaaagctcctgctcttctgcaaggaagaccggaaggtgatttgttggctctgcgaacgaagtcaggagcaccggggccatcacacagtgctaacggaggaagtctttaaagaatgccaggagaaactccaggcggtgttaaaacgtcttaagaaggaggaagaggaggcggaaaaacttgaggccgacataagggaggaaaagacgagttggaagtaccaggtgcagaccgagcgtcaaaggatccagacagaattcgatcagctgcggagtatccttaataacgaagagcagcgcgagctacagaggctcgaagaagaagagaagaaaactttggataagtttgccgaggccgaggacgaactagtgcaacagaagcagctagtacgtgaactcatatcagacgtggaatgtcggtctcagtggagtacgatggagctgctccaggacatgtccggtatcatgaagtggtcagagatctggcggttaaagaagcctaagatggtcagtaaaaaattgaagacggtgtttcacgcccccgatctgtcgcggatgcttcaaatgtttcgggagctcacagcagtgcgttgctactgggttgacgtgactttgaactctgtgaacttaaatctcaatttggtgttgagcgaagatcagcggcaagttatatcagttcccatctggccattccagtgttataactacggggtccttggcagccaatacttctcttcaggcaaacactactgggaggtcgatgttagtaagaagactgcctggatcctaggggtctactgtcggacatattcgaggcatatgaagtacgtcgtccgccggtgtgcaaatagacagaacctttatacaaagtatcgtccactcttcgggtactgggtcattgggctccagaataaatgtaagtacggcgtcttcgaggaatccttatcgtctgatccagaggtgctaacgctgtcaatggctgttccaccatgtagggtgggagtgttccttgattacgaggccggtattgtgtccttctttaatgtgacctcccacgggagcctgatatacaaattcagcaagtgttgttttagtcagccagtttacccgtactttaatccctggaattgccccgccccaatgactctgtgtcctccctcctcctag

SEQ ID NO: 209657 - DNA, 2187 bp, synthetic construct
  misc_feature 1..2187: note = Description of Artificial Sequence: Synthetic coding sequence
  source 1..2187: mol_type = other DNA
atgagcgagagcggcgagatgagcgagttcggctacatcatggagctgatagctaaaggtaaagttacgatcaagaatatcgaaagagagctcatatgtcccgcgtgtaaggaactttttactcaccccctgatacttccttgtcagcactctatatgtcacaagtgcgttaaggagctgctgttgacgctggatgatagtttcaatgacgtgggttccgacaactctaatcaaagttccccccgactgcggctgccttctcccagcatggataagatagacagaattaacaggccaggctggaagcgaaacagcctgactccccggaccaccgtgtttccttgccctgggtgcgagcacgacgtggacctaggcgagaggggtataaatggactcttccgtaatttcacattggaaacgattgtcgaacgctataggcaggccgcgagagcagctactgcaatcatgtgcgatttgtgcaaaccaccaccccaggaaagtaccaagtcctgcatggactgcagcgccagttactgcaacgaatgttttaagatacaccacccatggggcactataaaagctcagcatgagtacgtcggccccactacaaacttccgccccaagattctaatgtgccctgagcatgagactgagagaatcaatatgtattgtgagctgtgtcgaaggcccgtatgtcacctttgtaaactcggggggaatcacgctaaccatcgcgttaccacgatgagctcagcatacaagactctaaaggagaaactttccaaggatatagattacctcattggcaaggaatcccaagtcaaaagccagatatcggaactgaaccttctcatgaaggagacagagtgtaatggtgaacgcgcaaaggaggaggcgatcacccatttcgagaagctgtttgaagtactggaggagaggaaaagctcggtgctgaaggctatagattctagtaaaaagctcaggttggataagtttcaaacgcagatggaagagtatcaaggactgctcgagaataatggattggtgggctatgcccaggaagtgctgaaggaaaccgatcaatcgtgctttgtccagacagccaagcagttgcacttgagaattcagaaggccacggaatccctgaagtctttccgacccgctgctcagacaagcttcgaagactacgtcgttaatactagtaaacagacagagctgctgggcgaactgtcctttttttccagtggaattgatgtccccgagatcaatgaggaacaatcaaaggtgtacaacaacgcactgatcaactggcatcaccccgagaaggataaggcagatagctatgtactggagtatcgcaagattaaccgtgacgatgagatgagctggaacgaaattgaggtttgtggaacctctaaaataattcaagaccttgagaactcatcaacttacgcatttagggtgagggcttataaaggatccatttgcagtccatgttccagagagttaatcctgcacactcctcctgcacccgtcttttccttcctgttcgacgaaaaatgcggatataacaatgagcaccttcttctcaatcttaaacgcgaccgggtcgaaagccgggctggctttaatctcctgcttgccgcagagcggatccaggtggggtattatacatccttagattatatcattggtgataccggcattacaaaggggaaacacttctgggcattccgtgtggaaccatatagttatctggtgaaggtcggggtggcatcaagtgataagctccaggaatggctgagaagtcctcgcgacgcagtttcacctcggtacgagcaggattctggccacgactctggctctgaggacgcatgctttgatagctctcaacccttcaccctggtgactataggtatgcagaagtttttcattccaaaatctcctactagctctaacgagcctgagaacagagtgttgcctatgccaaccagtatcggcatcttcctggactgtgacaagggaaaggtggatttctacgacatggaccagatgaagtgtttatacgagagacaggttgattgctcccatacattgtaccccgcattcgctctgatgggctccggcgggatccagcttgaagagccaatcacagcgaagtacctggagtatcaggaagatatgtag

SEQ ID NO: 209658 - DNA, 186 bp, synthetic construct
  misc_feature 1..186: note = Description of Artificial Sequence: Synthetic coding sequence
  source 1..186: mol_type = other DNA
atgagcgagagcggcgagatgagcgagttcggctacatcatggagctgatcgctaagggcaaagcttctgcaatgggactacagcagacccacgagcactctcggctcacctccaagggaggggaagcccgctgcccttttgaaatctcggaggtgggaaaacagagccttcctcggcgcacatag

SEQ ID NO: 209659 - DNA, 183 bp, synthetic construct
  misc_feature 1..183: note = Description of Artificial Sequence: Synthetic coding sequence
  source 1..183: mol_type = other DNA
atgagcgagagcggcgagatgagcgagttcggctacatcatggagttgatcgccaaagggaagatgcccgattggcgcagaggatatagatgtcggcagggctgcggaaaaactaccgaacttgccactgcaacagactttagccagacaggcaataagagcgggaagcatttcaagacgtag

SEQ ID NO: 209660 - DNA, 2895 bp, synthetic construct
  misc_feature 1..2895: note = Description of Artificial Sequence: Synthetic coding sequence
  source 1..2895: mol_type = other DNA
atggacgagcagagcgtggagagcatcgccgaggtgttccggtgctttatatgcatggaaaaattgcgggacgcccggttgtgccctcattgctctaagctctgctgtttttcctgtattaggaggtggcttaccgaacagagagcacagtgcccccattgtcgggctcctctgcagctccgtgagttggtcaactgtcgctgggcagaggaggtcacccagcaactggacaccctgcagctgtgtagcctcacaaaacacgaggagaacgaaaaggataaatgtgagaaccatcatgagaagctgtccgtgttctgctggacatgtaaaaaatgcatttgccatcagtgtgctctgtggggagggatgcacggcgggcacacatttaaaccactggcagagatttatgaacagcacgtaaccaaggtgaacgaagaggtcgcgaaactgcgacggagactgatggaacttattagtctggtgcaggaggtggagcggaatgtggaggctgtgcggaacgccaaagacgaacgagtccgcgaaatccgaaatgctgttgaaatgatgatcgcccgcctcgacacccaacttaagaacaagttaattaccctgatgggtcagaaaaccagcctcactcaggaaaccgagctgctggagtctctcctgcaggaggttgagcatcagctgcggtcctgcagcaaaagtgaactgatctctaagagttctgagattctgatgatgttccagcaggtgcatcgcaagccgatggctagcttcgtcactacaccggtcccgcctgattttaccagtgaacttgtaccaagctacgactctgccacttttgtgctcgagaatttttctaccctgcggcagagagcagatccggtgtattctccaccgttgcaggtctcagggttgtgctggcgcctaaaggtgtacccagatgggaacggggtggtgaggggctattacctctcagtgtttcttgagctgtcagcaggtctgcccgagaccagcaaatacgagtaccgagtagagatggtccatcaatcttgcaatgaccccacaaaaaacataatccgagaattcgcgtctgactttgaggttggcgagtgttggggctacaatcgcttttttcgcttagacctgctagccaatgaaggatacctgaatccccaaaacgataccgtaatacttcggtttcaggttcgatctccaacattctttcagaagtcgcgcgaccagcattggtatattactcagctcgaagcagcccaaacatcttacatccagcagatcaataaccttaaggagcgactgacgattgagctgtcaagaactcaaaagagtagggacctttcccctcctgacaaccatctctctcctcagaatgacgatgccctcgagaccagagctaagaagagtgcgtgttctgacatgctcttagaaggcgggcctactaccgcttcagttagagaagccaaagaagacgaagaggacgaggagaaaatacagaatgaggactatcaccacgagcttagtgacggagacctggacctggaccttgtttacgaagacgaggtaaatcagttggacggcagctcaagtagtgcctcttcaacggcaaccagcaatactgaagaaaatgatatagacgaggagactatgagcggcgaaaatgatgtggagtacaacaacatggagctggaggaaggagaattaatggaggacgcggcagcagcagggcctgccggaagcagccatggttacgtggggagctcaagccggatcagccgtagaactcatctgtgctctgccgctacctcgagcctgctggacatcgaccctttgatcctcatacatctgctggatttaaaggataggtcatctatcgaaaatttatgggggctacagcctcgaccaccggcatcgctgttgcagcccactgcaagctactctcggaaagacaaggaccagaggaagcagcaggctatgtggcgggtaccttcagatctgaagatgctgaagaggctaaaaacacagatggcggaggttcgctgcatgaagaccgacgtcaagaatactttaagcgagattaagagcagcagtgcagcctcgggtgacatgcaaaccagcctgttttcagctgatcaggccgcgctggctgcctgtggaaccgaaaattcagggcggctgcaagatctggggatggagcttctcgccaagtccagcgtggcgaattgttatatccgaaattccaccaacaagaagtctaattcaccaaagccagcccgatctagcgtagcaggatccctgagcctcaggagggccgtggatcccggggaaaacagccgatcaaaaggcgactgtcagacattatcagaaggaagcccagggtcatctcagagcggatctagacattcatcaccccgcgcgttgatacacgggagtatcggtgacatcctgcccaaaaccgaggacaggcaatgtaaggcattagacagcgacgccgtcgtggttgcagtcttttccggcttaccagccgtggaaaagcggaggaagatggtgacacttggcgccaacgctaaggggggccatctggaaggactgcaaatgacggatttggagaataatagcgagacgggagagttgcaacccgtgctgcccgaaggcgccagtgccgctcctgaagagggcatgagtagcgatagcgacatcgaatgcgatacagagaatgaggagcaggaggagcatacaagcgttggaggtttccacgatagcttcatggtcatgactcaaccacccgatgaggatacgcatagcagtttccccgacggggagcagattggcccggaggacttgtccttcaataccgatgaaaatagcggcagatag

SEQ ID NO: 209661 - DNA, 2412 bp, synthetic construct
  misc_feature 1..2412: note = Description of Artificial Sequence: Synthetic coding sequence
  source 1..2412: mol_type = other DNA
atgcacggcggccacaccttcaagcccctggccgagatctacgagcagcatgtcacgaaggttaatgaggaagtcgccaagctgcgtcgtaggcttatggagctgatcagcctggtgcaagaggtagaaaggaacgttgaggctgtgaggaacgctaaagatgagagagttcgggagattagaaacgccgtcgagatgatgatcgccaggctcgatacacaattgaaaaataaactcataactctgatgggacaaaagacctcacttactcaggagaccgagctgctcgaaagtctgctgcaagaggtggaacaccaattacggagctgtagcaaatcggaattgatcagcaagtcttcagagatcctaatgatgttccagcaggttcatcggaagcccatggccagcttcgttaccactcctgtcccgccggacttcacaagcgagctggtaccctcttatgacagcgccacatttgtgctggaaaacttttccacccttcggcagcgtgcggaccctgtgtattccccacccctccaggtgtcaggactttgctggcgtctcaaagtctaccccgacggcaatggggttgtgaggggatactatctgagtgttttcctcgaactgagtgcggggttgccagaaacatctaagtatgagtaccgggtggaaatggtgcatcaatcctgtaacgacccgactaaaaatattatcagggaattcgcctcagacttcgaggtgggggaatgttgggggtacaaccgcttcttcagactggatctcctggcaaacgaggggtatctgaacccacagaacgatacggtgatcttgagattccaggttagatctcctacattctttcagaagtcaagggatcagcactggtatatcacacagctcgaagctgctcagacatcttacattcagcaaattaacaatctgaaggaacggttaactatcgagctgtcaagaactcagaaatcccgggatctctcacctcctgataaccacctaagtcctcagaacgacgacgccctggagacaagagccaagaagagcgcctgttcagacatgttattggaaggtggtccaaccacggcaagcgtgcgcgaagcaaaagaggacgaggaagacgaagaaaaaatacagaatgaagactaccaccatgaactcagtgacggggatctagatttggacctggtgtacgaggatgaggttaaccagttagatggctcttcctcctctgcctcttccactgccaccagcaacacagaggaaaatgacattgacgaggagacaatgagcggggaaaatgacgtagagtataataacatggaactcgaggagggcgagctcatggaagatgctgccgccgccgggcccgccggttcttctcacggctacgtcggttccagcagtcggatctcaaggagaacccacctctgtagcgcagccaccagctccctgctggatattgaccctctgatcctgattcacttgctcgacttaaaagaccgtagttccattgagaacttgtggggtctgcagccccggccacccgcctccctgctgcaaccaacagccagctactcaaggaaggacaaggatcagcgcaaacagcaggcgatgtggagggttccgtccgatctgaaaatgttgaaaaggctcaagacacagatggccgaagttcggtgcatgaagactgatgtcaaaaatactctatcggagattaagtcctcgagtgcagcgtctggcgatatgcagacatcactgttttctgctgaccaggccgccctcgccgcttgtgggacagaaaacagcggccgcctgcaggacttagggatggagttgcttgccaagtcatccgtggctaattgctacatcagaaattccacaaataaaaagtcgaatagtcccaagcccgcccgatccagtgtggctggcagtctcagtctcaggagagctgtggaccctggagagaatagcaggagcaagggagattgtcaaaccttatccgaggggagtcctggctcttcccagtccggatccagacattcgagtccaagagccctcatccacgggtcgataggagacatcctccctaaaacagaggatcggcagtgcaaagcactggacagcgacgccgttgtagttgcagttttctcagggctgccagcagtggagaagcggcgaaagatggtgaccctgggcgcgaatgcgaagggtggacaccttgaaggtctgcagatgacggacctggagaacaactcggagaccggcgagttgcaacccgtccttccagagggagcaagcgccgctcctgaggaggacacccacagctcctttccggacggtgaacaaatcggtccagaggatctgagcttcaacactgacgagaactccggtcgttag

SEQ ID NO: 209662 - DNA, 2793 bp, synthetic construct
  misc_feature 1..2793: note = Description of Artificial Sequence: Synthetic coding sequence
  source 1..2793: mol_type = other DNA
atggacgagcagagcgtggagcggtggctgaccgagcagcgggcccagtgcccccactgtcgtgccccactccagctcagggagctggtgaattgtaggtgggcggaggaggtgacccagcagcttgatacactgcagctgtgctctctgacaaagcatgaggaaaatgagaaggacaagtgcgaaaatcatcacgaaaaactctccgtgttttgctggacctgcaagaaatgcatctgtcaccaatgtgccctgtggggtggtatgcacggaggacatacattcaagcctttggctgagatttacgagcaacacgtgacaaaggtcaacgaggaagtagccaagctgcgacggagactcatggaactgatctcactcgttcaggaagtggagcgaaacgtcgaggcagtccgaaacgccaaggatgagcgggtcagggagatccggaatgccgtcgagatgatgattgccaggttggatactcagctgaaaaacaaactgatcaccctcatgggtcagaaaacaagcctcacgcaggaaaccgagctgctagagagtttgcttcaggaggtggaacaccagctccgatcatgtagcaagagtgaactgatcagcaaatcctcggagatactgatgatgttccagcaggtgcatcgtaagccaatggcgtccttcgtgactacaccagtgccccctgactttacaagcgagctggtgccaagctatgactcagccacatttgtgctcgagaattttagcaccctgaggcagcgtgctgatcctgtctatagccccccgctacaggtgtccggactgtgttggagactcaaggtgtaccccgacgggaacggagtggtgagaggttattacctttctgtgttcctggaattatctgccggacttcctgaaacctctaagtacgagtacagggtggaaatggtccaccagagctgcaatgatcccacgaaaaatatcataagagagttcgcgagtgactttgaagtaggcgagtgctgggggtataaccggttctttaggctcgatctgctcgcaaacgaaggatacctgaatccacagaacgatacagtgattctcaggttccaagtcaggtcccctaccttctttcagaagtccagggaccagcactggtatataacgcagttagaagcagctcaaacctcctatattcaacaaatcaataacctcaaggaacggctaacaattgaactctctcgtacccaaaagagcagggacctctccccccccgacaaccacctgtctcctcagaacgatgacgctcttgaaacaagggccaagaagagtgcctgctccgacatgctgctggagggaggacccacgaccgcgtcagtacgggaggctaaggaagacgaagaagatgaagaaaagatccagaacgaggactatcatcatgaactgtcggatggcgatctcgatcttgatctggtctacgaagacgaagttaatcaacttgacggctccagcagcagtgccagttccaccgccacctccaatacggaggaaaacgacatcgacgaggagaccatgtctggggaaaatgacgttgaatataataacatggagctcgaagaaggagaactgatggaggatgcggcagcagcagggccagctggcagcagccacgggtacgtgggaagttcctccagaatttctcggaggacccacctgtgcagtgccgcaacttcctccttacttgatattgatccacttatcctgatccatttactggatctgaaagacagaagcagcatcgagaacctctggggactgcagcctaggcctccagcgtcccttctccaacccaccgcctcatactcacgaaaggacaaggatcagagaaagcagcaggctatgtggcgcgtgcccagtgacctgaaaatgctgaaacgtttaaaaacccaaatggctgaggtgcgctgcatgaagactgacgtgaagaacacgctgtccgagattaagagcagcagcgccgctagcggcgatatgcagactagcctattcagcgccgaccaggctgctctcgccgcttgcgggacagagaatagcggccgtttgcaggatcttggaatggaactcctggctaagtcttcggtggcaaactgttacattaggaacagcaccaataagaaaagcaacagccccaaacctgcgcgcagctcagtcgctgggagtctgtccttacgtcgggcagtggaccccggtgagaatagtagatccaagggggattgtcaaacgctgtccgaaggctctccaggcagttctcagagcggcagtaggcattcttcaccccgtgccctgatccacggatctattggagacattctgcctaaaacagaagatagacagtgtaaagccttggattctgacgccgtcgtggtggccgttttctcaggccttcctgcggtcgaaaagaggcgcaagatggtgacattgggcgccaatgcgaagggcggccacttagagggactgcagatgaccgatctggaaaacaatagtgaaaccggcgagctacagccagtgctgcccgagggagcgtccgccgctccggaggaaggcatgtcatccgattccgacatcgaatgtgatacggagaatgaggagcaagaggagcataccagtgttggcggatttcacgattcttttatggtgatgacgcagccgcccgatgaggacacccactcctcgttcccggatggcgaacagatcggtccggaagatcttagttttaatactgatgaaaattctggtcggtag

SEQ ID NO: 209663 - DNA, 2895 bp, synthetic construct
  misc_feature 1..2895: note = Description of Artificial Sequence: Synthetic coding sequence
  source 1..2895: mol_type = other DNA
atggacgagcagagcgtggagagcatcgccgaggtgttccggtgcttcatctgtatggaaaagctacgcgacgccagactatgtccgcattgctccaagttatgttgctttagctgcatccggcggtggctgaccgaacaacgggcacagtgcccccactgcagggctccgctgcaactgagagagctagtgaattgccgatgggccgaagaggtgacccagcagcttgacaccttacaactctgttctttaacaaaacatgaggaaaatgaaaaggacaaatgtgaaaaccatcacgaaaaattgagtgtcttctgttggacctgcaaaaagtgtatttgccaccaatgcgcactgtggggaggcatgcacggtggacacacattcaaaccgcttgcagagatctacgaacaacatgtgacaaaggtcaatgaggaagtcgcaaaactacgacggaggctgatggagctaattagcttggtgcaagaagtggagcggaatgttgaggccgtaagaaatgctaaagacgagcgagtgcgggagattcgcaacgctgtggaaatgatgattgccaggctcgacacacagctgaagaataaactgattactctgatgggccagaagactagtctgacacaggagacagagttgctcgagtccttattgcaggaggtcgagcatcagctgcgctcatgcagtaaaagtgagctcatatccaaaagctcggagatcctcatgatgtttcagcaggtgcatcgaaagcccatggcgtcatttgtgaccacgcctgtcccacctgacttcacctccgagctggtcccgagctatgactccgctaccttcgtgcttgaaaactttagcacactgagacaaagggcagaccccgtatacagccctccgctgcaagtatcaggcctttgctggcggctgaaagtgtacccagatgggaatggagtggtcagaggctactacctaagtgttttcctagagctgtccgctggactcccagagacctccaaatatgagtatagggtcgagatggtgcatcagtcgtgcaacgaccctactaaaaatatcatcagagaatttgcatccgactttgaggtaggggagtgttgggggtacaacagattctttaggttggacctgctcgccaatgaaggctacttaaacccccagaatgataccgtcattctacgctttcaggtacgatctccaacctttttccagaagagcagggatcagcattggtacattacccaactcgaggcggcccagacatcttacatccagcagattaacaacctgaaagagcgcctgacgattgagctcagtcgaactcaaaaatcaagagacctgagccctccagataaccatctcagtccacagaacgatgacgctctggaaactagggcgaaaaaatcggcctgcagtgatatgctgctggagggcgggccgactaccgcttctgtccgggaggccaaagaagatgaagaagatgaggagaaaatccagaacgaagactaccaccatgaactctccgacggggacctggacctcgacttggtgtatgaggatgaagtcaatcaactggatggaagttcaagttccgcaagctccacggctacttcaaacaccgaagaaaacgatatagacgaggagacgatgtcgggagaaaatgatgtcgaatacaataacatggagctcgaagagggggaactgatggaagacgcagccgctgccggcccagctggcagttcgcatggctacgtcggctctagttccagaatcagtcggaggactcacctttgctccgccgctacatcttctctgctggatattgatccccttatcctcattcacctacttgatctgaaggaccgaagctccattgaaaatctgtggggtttacagccgaggcctcccgcctcgctgctgcagcctacagcgagttatagcaggaaagacaaggatcagaggaaacagcaggcgatgtggagggtaccttctgatttgaagatgctgaaacgcctgaagactcagatggccgaagtgcggtgtatgaaaaccgacgtcaaaaatacattatcagagattaaatctagcagcgcagcctccggggacatgcagacatccctcttctctgccgaccaggccgcccttgcagcctgtggcacagaaaatagcgggaggttacaggatttagggatggaactgctggcaaagagttcagtagctaattgttatatccgcaactccacaaataagaagtcaaactcccccaagccggcacgatcctctgttgcaggttcactctcactgcgtagagcggtggatcctggagagaacagccgatccaagggcgactgtcagactctcagcgagggaagtcccggtagcagccagtctggctcacgccactcttccccccgtgctctgattcacggatctattggcgacatactgccaaagacagaggaccgccaatgcaaagccttggattctgatgctgttgtcgtggccgtgttttccggcctaccggccgtggagaagcgccgcaaaatggtgacattgggagccaatgcgaagggtgggcatctcgaggggttacagatgactgatttggaaaacaacagtgaaacaggagagctccagccggtgctgcctgaaggagcatccgcagctccagaagaggggatgtcgtcagacagcgatattgagtgcgataccgaaaacgaggagcaggaagagcatacatccgtggggggttttcatgattcctttatggtgatgacgcagcctcccgacgaagacacacacagctcattccctgatggagaacagattggcccagaggacctaagcttcaacacggatgagaacagtggccggtag

SEQ ID NO: 209664 - DNA, 1557 bp, synthetic construct
  misc_feature 1..1557: note = Description of Artificial Sequence: Synthetic coding sequence
  source 1..1557: mol_type = other DNA
atggccgagaccagcctgctggaggccggcgccagcgccgccagcaccgccgccgcactggaaaacctccaggtggaggccagttgtagtgtgtgccttgagtatcttaaggaaccagtgattattgagtgcggtcataacttctgcaaagcctgtatcactagatggtgggaagatctggagcgggacttcccttgtcccgtgtgtcgtaagaccagcagataccgttctcttaggcccaaccgccagctgggcagcatggtcgaaatcgcaaagcaacttcaggcggtgaagaggaagataagagacgaatccctgtgtcctcagcatcatgaagccctgtctctgttttgctacgaggaccaagaggctgtgtgtttaatttgcgctatttcccatacacaccgtgcgcatacagttgtccccctggacgacgctacccaggaatacaaagaaaagctccagaagtgtctggagccactggaacaaaaactgcaggaaattacaagatgcaagtcttctgaagaaaagaagcccggggaactgaagcgactggtagagtctcgtaggcagcaaatcctgagagagttcgaggaacttcacagacgcttagatgaggaacaacaagtcctgctgtcccgtctggaagaagaggagcaagatatccttcagaggctgagagagaacgcagcccacctgggggacaagcggagggacttagctcatctggccgctgaagttgagggtaaatgcctccagtcaggctttgagatgctgaaggacgttaaatcaaccctggaaaagaatatcccccgcaaatttgggggcagtctgagcactatatgtccaagagatcacaaggcccttctcgggcttgtaaaggagatcaatagatgcgaaaaagtgaagactatggaagtaacatccgtgtctatagaactagagaaaaacttctctaacttcccccggcagtactttgccctgagaaagattctcaagcagctgatcgcagacgtcacgctcgatcccgagaccgcgcatcccaatctggtactaagtgaagaccggaaatccgttaagttcgtcgagactagactacgcgacttgcccgacactccaaggcgcttcacattctacccctgcgtcttagcaacggaagggtttacgtctggccggcactattgggaggtggaagtaggcgacaagacacactgggccgtaggggtgtgtcgggattccgttagcaggaaaggggagctcacaccgctccccgaaactggttactggcgagtgcgcctgtggaatggcgacaaatatgctgcaaccacgacaccattcaccccactgcatattaaagtgaaaccaaaacgcgtgggaatctttctcgattatgaggcgggcaccctctctttctacaatgttaccgacagaagccacatatacacttttactgacacgttcacagaaaaactgtggcctctcttctacccagggatccgggcggggcgtaagaatgcagcaccactcaccattagacctcccactgattgggaatag

SEQ ID NO: 209665 - DNA, 1467 bp, synthetic construct
  misc_feature 1..1467: note = Description of Artificial Sequence: Synthetic coding sequence
  source 1..1467: mol_type = other DNA
atggccgagaccagcctgctggaggccggcgccagcgccgccagcacagcagccgctctcgaaaatctccaggtggaggccagttgctcagtctgtttggagtatttgaaagaaccagtgattattgaatgtggccacaacttctgtaaggcttgtatcacaagatggtgggaggaccttgagagggactttccttgccctgtctgtcgcaaaacgagcaggtatagatcactcaggccaaacagacagcttgggtcaatggtcgagatcgctaagcagctgcaagcagtgaaacgaaagattcgagacgagtcactgtgcccccagcatcacgaggccctgtcacttttctgttatgaagatcaggaagcggtgtgcctgatttgcgccatctcgcacacccatcgggctcacacagtagtgcctctggacgatgccacacaagaatataaagagaaactccagaagtgcctggaaccgctcgaacaaaagcttcaggagattacccgttgtaagtccagcgaggaaaaaaaaccgggagagctgaaaaggctggttgaaagtaggaggcagcagattctgagagaattcgaagagctgcacagacgcctagacgaagaacagcaggtgctgttgagccggctggaagaagaagagcaggacatcctgcagcgtctccgagagaacgcggcccatcttggagacaagcggcgagatctggctcacttggcagccgaagttgagggcaaatgtcttcagtccgggtttgagatgctgaaggatgtgaagagtactctggaaaaatgtgaaaaggtcaagacgatggaggtgacatccgtgtcaatagaattggagaagaacttttccaatttccccaggcagtactttgccttgcgcaagattctgaaacagcttatcgccgatgttacacttgacccagagacagcgcaccctaatctggttttatcggaagatcggaagtctgtgaaatttgtcgaaactagactgcgtgatctgccagacactccccgccggtttacattttacccctgcgttttagcaaccgagggcttcacgtccggacggcattactgggaggtggaagtcggcgataagacacactgggccgtgggagtttgtcgagacagcgtgtcccgcaagggcgagctcactcccttacctgaaaccggatactggcgggtacgtctgtggaatggcgacaagtatgctgcgactactacaccgtttaccccgctgcacatcaaggtgaaaccaaagcgggtcgggatatttctggattacgaggcaggcacgctgtcattttataacgtcacagaccggagccacatatacactttcaccgatactttcaccgagaagctttggcccctattctaccccggaatccgagcagggcggaaaaacgccgcgcccctgacaattcggcctccgacagactgggaatag

SEQ ID NO: 209666 - DNA, 1467 bp, synthetic construct
  misc_feature 1..1467: note = Description of Artificial Sequence: Synthetic coding sequence
  source 1..1467: mol_type = other DNA
atggccgagaccagcctgctggaggccggcgccagcgccgccagcacggctgcagccttggaaaatctccaggtagaggctagttgctctgtctgcttggagtacctcaaggaacctgtgattatagagtgtggacacaatttttgtaaagcatgcataacacggtggtgggaagatttggagagggattttccctgtccagtgtgtcgaaagacatccagatatcgtagtctccgcccgaaccgccaattgggcagcatggtcgaaatcgcgaagcagctgcaggcggtgaagcgaaaaatccgtgacgagagtctgtgcccccaacatcacgaggcactaagtctattttgctacgaagaccaggaggccgtttgcctcatatgcgctatttcgcacacccaccgagcccatactgtggtacccttggatgacgcaacacaggagtataaggagaaattgcagaagtgcctcgaacccctggagcagaagctgcaggagattactagatgtaagtcttctgaagagaaaaaacccggcgaattgaagagactcgttgaatcccgccggcagcagatcttgcgagaatttgaggagttacaccgccgactggacgaggaacagcaggtgctgctgtcaagactcgaagaggaggagcaggacatcctccaaaggctgagggagaacgctgctcacctgggtgataagaggcgggacttggcccatctcgccgccgaggtcgaaggcaaatgtcttcagagtggattcgaaatgctcaaggatgttaagtctaccctggagaaatgcgagaaagtcaaaacaatggaggtcaccagcgtatcaattgagttggagaagaatttttctaactttcctaggcagtactttgcgctccggaaaatactcaagcagttgattgctgacgttaccttggatcctgaaactgctcatcctaacctggttttgagtgaggaccggaagtctgtcaagtttgttgagacaaggctgagagatctccctgacacaccaaggcggttcacgttctacccctgcgtactggctaccgagggttttacgtctggtcggcattactgggaggtggaggtgggagataagacacattgggctgttggcgtctgccgggactctgtgagccggaaaggagagctgaccccactcccggagaccggctactggcgcgtgcgattgtggaatggcgacaaatatgcagctacaacgacccccttcactcctcttcacattaaggtgaagcctaagcgggtggggatttttctggattatgaggctggcacattgtctttttacaacgtcaccgatcggagccatatttacacattcacagacacatttacagagaagctgtggcctcttttctaccctggaatccgggcgggccggaaaaatgccgcgccactcaccatcaggccccccacagactgggagtag

SEQ ID NO: 209667 - DNA, 1557 bp, synthetic construct
  misc_feature 1..1557: note = Description of Artificial Sequence: Synthetic coding sequence
  source 1..1557: mol_type = other DNA
atggccgagaccagcctgctggaggccggcgccagcgccgccagcactgccgccgccctcgagaacctacaggtggaggcctcgtgcagtgtgtgtctggagtatctgaaagaaccagtgattattgagtgcggccataatttttgcaaggcatgtattactcgttggtgggaggatttagagcgggacttcccctgtccagtgtgccgcaagacatctcgttatcgcagtctccgccctaaccgtcaactgggctccatggttgagatcgcaaaacaacttcaagcagtaaaaagaaagatccgcgatgaatctttatgtccgcagcatcacgaggctttgtcattgttctgctacgaggatcaggaggccgtgtgcctgatctgcgccatatctcacactcaccgcgcccacacggtagttccactggacgatgcgacccaggaatacaaggaaaagcttcaaaagtgcttggagcctctcgagcagaagctccaggaaattacccgctgcaaatcctccgaggagaaaaagccaggagagcttaagaggctcgtggagtcaagacggcagcagatcctgcgcgagttcgaggagctgcacagaagactggatgaagaacaacaggtcttgctctctcgtttagaggaggaggagcaagatatcctgcagaggttaagagaaaacgcggcgcacctaggtgataagcgaagagatttggcacatctggcagctgaggttgaagggaagtgtcttcagtctggctttgaaatgctcaaagatgtgaaaagcacattggagaaaaacatccctcgaaaatttggaggttccctgagcacaatttgcccaagggaccacaaggcattgcttggcctcgtgaaggaaatcaatcggtgtgaaaaggtcaaaacgatggaagtaacttccgtgtcaatcgaactggaaaagaacttcagtaacttccctcggcagtactttgctcttcgcaagattttgaaacagctgattgccgacgtaacactagatcccgaaaccgctcacccgaatctggttttgtccgaggatcggaagagtgttaagtttgtggaaacccgcctgcgggacctccctgatacccctagacgtttcaccttctacccgtgtgtgctcgccaccgaaggcttcacaagcggacgccattattgggaggtggaggttggagataagacccattgggccgtaggcgtttgcagggactcagtctcacgaaagggggagctcactcccctcccagagactgggtattggagggtgcggttatggaacggagataagtacgccgccactaccactccattcacgcctttacatattaaggtcaagccaaagagggtggggatcttcctggactatgaggcagggacacttagtttttataacgtgaccgaccggtcgcatatctacacttttacagacactttcacagaaaaactctggcctctcttttatcctggcattagagctggccggaagaatgccgccccgctcaccatccggccacctaccgattgggagtag

SEQ ID NO: 209668 - DNA, 1467 bp, synthetic construct
  misc_feature 1..1467: note = Description of Artificial Sequence: Synthetic coding sequence
  source 1..1467: mol_type = other DNA
atggccgagaccagcctgctggaggccggcgccagcgccgccagcactgctgctgccctggagaacctgcaggttgaagcctcctgttcggtctgtttggagtacctgaaagaacccgtcataatcgaatgcgggcacaatttctgcaaggcttgcataactcgctggtgggaagatttggaacgcgactttccctgccctgtatgtcgcaagacgagccgataccggagcctgaggcccaatcgacagctcgggagcatggtagagatcgcaaaacaactgcaggcagtgaaaagaaagatccgcgacgagtccctgtgccctcaacaccacgaggccttgtccctgttctgctacgaggatcaagaggccgtttgcctgatctgcgcaatttcacacacccatcgcgcgcataccgtcgtgccattagacgacgcgacacaggagtataaagaaaaattacagaagtgtctggagcccctggaacaaaaattgcaggagatcacaaggtgcaagtcttcggaagagaaaaaacctggcgagctcaagcgactcgtggaatccaggcgccaacaaatactgagggagtttgaggaactccacagaagactggacgaggaacagcaggtgctgctgtccagactggaggaggaggaacaggatattctccagcggctcagggaaaacgccgcccacctgggcgacaagcgcagggacctggcccatctggccgctgaagtagaaggtaaatgtttacagtccgggtttgagatgctcaaggatgtcaagtcaaccctggagaagtgcgagaaggtgaagactatggaggtaactagcgtttccatcgagttggaaaagaattttagtaacttcccacgccagtacttcgcacttcgcaaaattctcaagcagttaattgcagatgttacacttgacccagaaacagctcatcctaacttggtgctgtctgaggacaggaagtccgtgaagtttgtggagactagactgcgcgatctgcccgacaccccgcggcggtttaccttttacccctgcgtgctggctactgaaggatttaccagcgggaggcactactgggaggtcgaagtcggagataagactcactgggccgtgggagtttgccgagactctgtgtccaggaaaggcgagctgacacctctcccagagaccggctactggagagtgcgcctttggaatggcgacaaatacgctgccaccactacgccattcacccccctgcatatcaaggtcaagcccaagagggtgggcatcttcctcgactatgaggcgggtacattatcattctataatgtcaccgataggagtcatatatacacatttactgacacgttcacagagaagctttggcctttattttacccgggcattcgggcaggccggaagaatgctgccccattaacgatccggcctccaactgactgggaatag

SEQ ID NO: 209669 - DNA, 1557 bp, synthetic construct
  misc_feature 1..1557: note = Description of Artificial Sequence: Synthetic coding sequence
  source 1..1557: mol_type = other DNA
atggccgagaccagcctgctggaggccggcgccagcgccgccagcacggccgccgcccttgaaaacctccaagttgaggcttcttgttccgtgtgccttgagtacctgaaggaaccagtgataattgagtgtgggcataacttctgcaaggcctgcataacaaggtggtgggaagacctcgagcgtgattttccttgcccagtttgtcggaaaacttcaaggtatcgctctctgagacctaatcgtcagctaggctcaatggtcgaaattgcgaagcagctgcaggcagtaaagcggaagatccgagatgagtcactgtgcccacagcaccatgaagctcttagtttattctgctatgaggaccaggaggccgtttgtttgatctgtgccatctcccacacccaccgtgcgcacacggttgtcccattagacgatgcgacacaggagtacaaggaaaagctacaaaaatgccttgagcctttggagcaaaagttgcaggaaattacccgatgtaaatctagtgaggagaagaagcccggggagttaaaaagacttgtcgaaagcaggagacagcaaattctgcgggagttcgaggagctgcaccgtcgccttgacgaagagcagcaagtcctgctgtccagactggaagaagaggaacaagatatcctgcaaagactgagggaaaacgctgctcatctgggagataaacgccgagatttagctcacctcgcggcggaagtcgaagggaagtgtctgcagagcggcttcgagatgctcaaagacgtgaaaagcaccttggaaaagaatatccctcggaagttcggaggatcattaagtacaatctgtccgcgggaccataaggcactgctgggtctcgtgaaagagattaataggtgtgagaaggtgaagacaatggaggtgacctccgtatctatagagctggagaaaaacttttctaattttccacgtcaatacttcgctttaaggaaaatcttgaaacagcttatagcagatgtgaccctggaccctgaaacggctcacccaaacctagttctctccgaagatcgaaagtccgtgaagttcgtggaaacccgcctcagggacctacccgacaccccccggcggtttaccttttatccttgcgtcctcgcaacggaggggttcacaagcggcaggcactattgggaagtcgaggtgggagacaaaacgcactgggcagtcggcgtgtgtcgagactccgttagtaggaagggggagctaaccccactgcctgagactggttattggcgggtccgcctctggaacggggataagtacgctgctactaccactcccttcacccctttgcacattaaagtcaagccaaagagggttggcatcttccttgactacgaggctggcacactgtccttttacaacgtgaccgatcgtagccatatctataccttcactgacaccttcactgagaaactgtggccactgttctaccccggcatcagagccggccgtaagaatgcagccccacttacaattaggccacccaccgactgggagtag

SEQ ID NO: 209670 - DNA, 1467 bp, synthetic construct
  misc_feature 1..1467: note = Description of Artificial Sequence: Synthetic coding sequence
  source 1..1467: mol_type = other DNA
atggccgagaccagcctgctggaggccggcgccagcgccgccagcacggctgccgcacttgaaaatctgcaggtggaggcttcctgctctgtatgtttggaatacttaaaagagcctgtcatcatcgaatgcggccacaacttctgtaaggcctgtattacaaggtggtgggaagacctcgaaagagactttccttgtcctgtatgccgcaagacatcgcgatatcgcagtttacggcctaacagacaactaggaagtatggtagaaatagctaaacagctccaggccgtaaagcgtaagattcgggacgagagcctctgtccacaacatcatgaggctctgagccttttctgttacgaggatcaggaggccgtgtgtctcatctgtgctatcagccatactcatagagcgcacactgtcgtgcctctagacgacgctacacaggagtacaaggagaaattgcaaaagtgcctcgaacctttagagcagaagctgcaggagatcacacgatgtaagtcttcggaggaaaagaagccgggggagttaaagagactcgttgagtccaggagacagcaaatattacgcgaattcgaggaactgcacagaaggctggacgaggagcagcaggtgctactttctaggctggaggaggaggagcaggatatccttcagagactccgtgagaacgccgcccacttaggcgataagagaagggacctggcacacttggctgccgaagtggaaggtaaatgcctccagtcgggcttcgaaatgctaaaggatgtcaaaagcacgctggagaaatgtgaaaaggttaaaactatggaagtgactagcgtgtcgattgagcttgagaagaatttctccaattttccccgccagtactttgctcttagaaaaatattaaaacagctgattgcagatgtcacattggacccagagacagcccaccccaacctggtcctttccgaggaccgcaagtctgttaagtttgtggagacccgcttacgagatttaccagatacccccagacggttcacgttttatccttgcgtgctcgcaaccgagggatttacatctggccggcactattgggaggtagaggtgggcgacaaaacacactgggccgtgggggtgtgccgggactcggtgagcaggaagggagagctaaccccactgcccgaaaccgggtattggcgcgtgcggctgtggaacggcgacaagtatgctgccacaaccaccccttttacaccccttcacatcaaagttaaacccaagagggtggggatcttcctggactacgaggctggcacattatctttctataacgtcactgatagatcccatatttacacgtttacagacacgttcaccgagaagctatggcccctgttctatcctggaatcagggccggcaggaagaatgccgctcctctgacaatccggccacctacagactgggaatag

SEQ ID NO: 209671 - DNA, 1467 bp, synthetic construct
  misc_feature 1..1467: note = Description of Artificial Sequence: Synthetic coding sequence
  source 1..1467: mol_type = other DNA
atggccgagaccagcctgctggaggccggcgccagcgccgccagcaccgccgctgctttggagaatctgcaggttgaggcttcttgtagcgtctgcttggaatatcttaaggaacctgttatcatcgagtgcggtcacaatttctgtaaggcatgcattactcgctggtgggaggatttggaacgagacttcccttgtccagtgtgcaggaagacctcgagatatcgtagtctacgcccaaaccgccagctagggtctatggttgaaattgccaagcagctacaggcagtcaagaggaagatcagagacgaaagtttgtgtcctcaacaccacgaagccctgtcccttttttgctatgaggatcaggaggcagtctgtctcatctgtgccatatcccatacacaccgagcacatacagtggtacctttggacgatgccacccaggagtataaggaaaagctgcagaaatgtctagagccactggaacagaaactgcaagagattacacgctgtaaatcttccgaagagaaaaagcctggcgaattgaaaagattggtggagtcccgtaggcagcagatattaagggagtttgaagagctccatcgccggctggatgaggagcagcaggtgctgctcagcaggctggaagaagaggagcaggatattcttcagcgtctgagggagaatgcagcccacctcggagataaacgacgggacctcgcccatttagccgcagaagtggagggaaaatgtttacagagcggtttcgagatgttgaaagacgttaaatctacactcgagaaatgcgagaaagtgaagacaatggaggtgacctcagtgtctatcgaattggagaagaacttcagcaattttcctcgacagtacttcgctctgcgcaagatccttaaacagttaatcgcagacgtgaccttggaccccgaaaccgctcatccaaatctggtgctatccgaagatcgcaaatctgtgaagttcgtcgagactagactgagggatctccccgataccccgaggagattcaccttttatccgtgcgtacttgccaccgaaggctttacctcgggcaggcactattgggaggtggaagtcggagacaagactcattgggcagtcggggtgtgtcgcgattctgtgtctcggaagggggagttaactccattacccgagacaggttactggagggtgcgtctgtggaatggagacaaatatgctgccacgaccacaccattcactcccttacatatcaaagtgaagccgaagagggtcgggatcttcttggactacgaggccgggaccctctccttctataacgtgacggacaggtcccatatatacacttttactgacaccttcacggagaaactctggccattgttctatccagggattcgtgcgggccggaagaacgctgctcccctcaccattcgccctcccacggattgggagtag

SEQ ID NO: 209672 - DNA, 1467 bp, synthetic construct
  misc_feature 1..1467: note = Description of Artificial Sequence: Synthetic coding sequence
  source 1..1467: mol_type = other DNA
atggccgagaccagcctgctggaggccggcgccagcgccgccagcacggctgccgcgttggagaatctccaggtagaggcctcctgttctgtgtgccttgaatacctgaaagaacccgtcatcattgaatgtggccataatttctgcaaggcgtgcatcacgcgatggtgggaggacctcgagagggatttcccctgtcctgtgtgcaggaagacgagtaggtaccggagtctcagaccaaatcggcagctaggtagcatggtggagatagccaagcagctccaggcggtgaagcgtaaaatccgcgacgagtcactatgccctcagcaccatgaagcgctatccttgttctgctatgaggatcaggaagccgtgtgcctgatctgtgctatcagtcatactcacagagcccatacggtcgtgccgctggatgacgccacacaggaatacaaagaaaaactgcagaagtgcctggaaccactggagcagaagctgcaggaaatcactaggtgcaagagctccgaggagaagaaacctggtgaactgaagaggttggttgagtctagacgacagcagattttgagagagtttgaagagctccatcgtagattagatgaagagcaacaggtcttactgagccgacttgaggaggaggaacaggacatcctccagaggctgcgggaaaatgcggcccatctgggagacaaacgcagagacttagcgcatttggcggccgaagtggaaggaaagtgtcttcagtctggatttgaaatgctcaaggatgtcaaaagcacgctggagaaatgcgagaaggttaagactatggaagttacctctgtctccattgaactggagaaaaatttttccaattttccgaggcaatactttgcacttcgcaagatccttaaacagcttatagctgacgtgacactggaccctgagactgcccatcctaacctcgtactgtcagaggatcggaagtccgtcaagttcgtggagacaaggctacgcgacttgccagacacccctaggcgctttactttctacccctgtgtccttgctaccgagggcttcacttcagggagacactactgggaggtcgaggtgggagataaaacccactgggcggtaggggtctgtcgcgatagcgtgagccgtaagggtgagctgaccccgttaccggaaaccggctattggcgggtgcggctctggaatggagacaagtatgcggccactacaaccccttttacccccctgcatattaaggtaaaacctaaaagagttggcatcttcctcgactacgaagcaggtacgttgagcttctataatgtgacagacagaagccatatctatacttttaccgacaccttcacggagaaactgtggcccctgttctaccccggtatccgcgctggacgaaagaatgcagcccccttgactatcaggcctccaacggactgggagtag

SEQ ID NO: 209673 - DNA, 435 bp, synthetic construct
  misc_feature 1..435: note = Description of Artificial Sequence: Synthetic coding sequence
  source 1..435: mol_type = other DNA
atggccgagaccagcctgctggaggccggcgccagcgccgccagcaccgccgcagctctggaaaatctccaggtcgaggcatcctgctctgtttgtctggagtatctcaaggaacctgtgattattgagtgtggacataacttttgtaaggcatgcattacgcgatggtgggaagacctggagagagatttcccttgcccagtgtgccggaagacttccagatacaggagtcttagaccaaatagacagttggggtctatggtcgagattgccaagcagctgcaagcagttaagcggaagattcgagatgaatctctgtgtccacagcaccacgaagctctttccctgttctgctatgaggatcaggaggctgtgtgtctgatttgcgcgatctcccacacacatcgagcacacacagtcgtcccactcgactag

SEQ ID NO: 209674 - DNA, 684 bp, synthetic construct
  misc_feature 1..684: note = Description of Artificial Sequence: Synthetic coding sequence
  source 1..684: mol_type = other DNA
tgaaccagccggtaccggagcctgcggcccaaccggcagctgggctcgatggtggaaattgccaagcagttgcaggccgttaagaggaagattcgggatgaatctctctgcccccagcatcatgaagcactgtcccttttctgttatgaagatcaggaggccgtctgcctcatttgcgcaatctctcatacacatcgggcccacacggtggtgcccctggatgacgctactcaggaatacaaggagaaactgcagaaatgtctggagcccctcgagcagaaacttcaggagattactaggtgtaagtcctcagaagagaagaagccaggtgaacttaaacgactggtggaatcacggaggcaacagatcctacgcgagttcgaagaacttcaccgcaggttggatgaggaacaacaggttttactgtcacgtctggaggaggaggagcaggatatcctacaacgcctgagagagaatgctgcccacctgggcgacaagagaagagacctagcacaccttgcggcagaggtggagggaaaatgtctgcagtcaggttttgagatgctgaaggatgtaaaatccacgctggaaaaatgcgaaaaagtgaagaccatggaggtgactagcacgacaccctgcaccagtctacacagcgagatcaacgacaacgtgcgcggtcggtag

SEQ ID NO: 209675 - DNA, 225 bp, synthetic construct
  misc_feature 1..225: note = Description of Artificial Sequence: Synthetic coding sequence
  source 1..225: mol_type = other DNA
atggccgagaccagcctgctggaggccggcgccagcgccgccagcaccgctgctgccctggaaaaccttcaggtcgaagcctcttgtagtgtgtgcctagaatatctgaaggaacccgtgatcattgagtgtggtcataatttctgcaaggcgtgtattactagatggtgggaagatctagagcgcgacttcccatgccccgtgtgccgcaaaacttcgcgatag

SEQ ID NO: 209676 - DNA, 1254 bp, synthetic construct
  misc_feature 1..1254: note = Description of Artificial Sequence: Synthetic coding sequence
  source 1..1254: mol_type = other DNA
atggtggagatcgccaagcagctgcaggccgtgaagcggaagatccgcgacgagtctctatgtccacaacaccatgaggctcttagcctgttctgttacgaagaccaggaagcagtgtgcctaatatgcgccatcagtcacacccacagggcacacactgttgtgcccctcgacgacgctactcaggaatacaaggaaaagctgcagaaatgcctggagcccctagagcaaaaactgcaagagatcacccggtgcaagtcaagtgaagagaagaaacctggggagctcaagaggctggtggagagcaggagacaacagattcttagagaattcgaagaactgcatagaagacttgacgaggagcagcaggtgctgcttagccggctggaagaagaggaacaggatatcctgcaaagactgagagaaaacgccgcccacctcggagataagcgaagggacctggctcatctggcagctgaagttgaaggaaagtgtctccagtctggttttgaaatgctgaagcccgttctgagtgctcgggaagagtgcgagaaagtgaagacgatggaagtgacgtcagtgtccatcgagttggaaaagaatttctcaaacttcccccgacagtatttcgctctgaggaagatcctaaaacagctgatagcagacgtgacccttgaccctgagactgcacatcccaacctagtgctgtccgaagaccgaaagtccgtcaaattcgtcgaaacaaggttacgggatttaccggacaccccacgacgatttaccttctacccctgtgtcctggccacggagggcttcacttctggccgccattactgggaggtggaggccgcccactgcgtgctggctcaagaccctgaaaatcaggccctggctaggttctattgctataccgaacgtacgattgctaaacgcttggtgctccgcagggatccttcagtcaagcgcaccctgtgtcgaggttgcagctccctcctggtgcctggactcacatgtacacagaggcaacgcaggtgccgggggcagcgctggaccgtgcagacatgcctgacctgccaacgctctcagcgattccttaacgacccgggccacttgctgtggggggatcgtccagaagcacaactgggtagtcaggcagactccaaacctttacagcctctgccaaacacagcccactctatttcggaccgcctccccgaggagaaaatgcagacgcagggctcttccaaccaatag

SEQ ID NO: 209677 - DNA, 1557 bp, synthetic construct
  misc_feature 1..1557: note = Description of Artificial Sequence: Synthetic coding sequence
  source 1..1557: mol_type = other DNA
atggccgagaccagcctgctggaggccggcgccagcgccgccagcactgccgctgcactagaaaacctacaggtggaagcttcctgttcagtctgcttagaatacctcaaggagccagtgattatcgaatgcggccacaatttctgtaaggcctgtatcactcgttggtgggaggatttggagagggattttccctgcccggtctgtcggaagaccagtagatatagatcactgcgaccaaatcgccagctcggcagcatggtcgagatcgcaaaacaactgcaggccgtcaagcgcaaaatccgagacgagagcctgtgccctcagcatcacgaagctctgtcattattctgttatgaggatcaagaggcagtgtgtctgatctgcgctatctctcatactcatagagcccatacggtagtccccctggacgacgccacacaggagtataaggaaaaactccagaaatgtctggagccccttgagcaaaagcttcaggagattacacggtgcaagtcatccgaggaaaagaagccgggggaactcaagcgcctggtcgagtcacgtcgtcagcagatactgagggagtttgaggaattacacagaagactcgatgaggagcagcaggtgcttttgtcaaggctggaagaggaggaacaggacatcctccaaaggttacgagagaatgccgcacacctcggcgacaaaagacgcgacctcgctcaccttgctgcggaagtcgagggaaagtgtctgcagagcggatttgagatgctgaaggatgtaaagtctacattggagaaaaacatcccccggaaatttggcgggagtcttagtacgatctgcccccgcgatcacaaagcactgctggggctggtgaaggaaataaatagatgtgagaaagtcaagaccatggaagtgaccagtgtgtctatcgagctggagaagaacttcagcaatttccccaggcagtacttcgccctgagaaagatccttaagcagcttatcgccgacgttacactcgacccagagaccgcacacccgaacctggtgctgtcagaagataggaagtccgtgaaattcgtggagacacgcctcagggaccttcccgacactcccaggcgattcacattttatccctgtgttctcgcaacagaggggttcactagcggcaggcactattgggaggtggaggtgggagataagacgcattgggcagttggtgtttgcagggacagcgtgtcacgtaagggcgaactgacaccgctaccggagactgggtactggagggtcaggctttggaatggagataagtacgccgccacaaccactcccttcacacctttacacatcaaggttaagcctaagagagttggcatttttcttgactatgaagctggaactctctccttctacaacgtaactgatagatcccacatttacacgttcaccgacactttcaccgaaaagctttggccgctgttctaccccgggataagggccgggagaaagaacgccgccccattaacaatcaggccaccaactgactgggagtag

SEQ ID NO: 209678 - DNA, 1467 bp, synthetic construct
  misc_feature 1..1467: note = Description of Artificial Sequence: Synthetic coding sequence
  source 1..1467: mol_type = other DNA
atggccgagaccagcctgctggaggccggcgccagcgccgccagcactgcagccgctttagagaaccttcaggttgaagctagctgttctgtctgtctagaatacttgaaggaaccggtgattattgaatgtggccataacttttgcaaggcctgtattacgaggtggtgggaggacctcgagagggatttcccctgcccagtatgtcggaagacctcgagatacaggagcttaagacccaaccggcagcttggcagtatggtggagatcgctaagcagttgcaggctgtgaagagaaaaatccgtgatgagtctttgtgcccacaacatcacgaagcactgagtctattctgttatgaagaccaagaggccgtctgtctgatctgcgctattagtcatacacatagggctcacacagtggtgcctctggatgacgcgacccaggagtacaaggagaaattgcagaagtgcctggaacctctggagcagaaactgcaagagattaccaggtgtaagtccagcgaggaaaaaaagcctggtgagcttaagcggcttgtcgaatccaggaggcagcagatacttagggagtttgaggagctacacaggaggctggatgaagagcagcaggttttattgtctagacttgaggaggaggagcaggatattctgcaacgcttgagagaaaatgcggcccacctgggcgataaacgccgggatctagcccatctggctgcagaggttgagggtaagtgcctccagtccgggtttgagatgttaaaggacgtcaagtctaccctggagaaatgtgagaaggttaaaacgatggaggtgacctccgttagcatcgagttagaaaagaacttttctaatttccccagacagtattttgccctccggaaaattctcaaacagttaattgccgatgtgacactggatcctgagacagcccaccctaacctggtgctctcagaagataggaaatctgtgaaatttgtcgagacacggctgagggatcttcctgacacgcccaggagatttactttttatccctgcgtcctcgcaacagaaggttttactagcgggagacattactgggaagttgaggttggcgacaagactcactgggccgtgggcgtgtgtagagactcagtgagtcgtaagggggaattgacacctttaccagaaactggctactggcgtgttcgcttatggaacggggacaagtatgctgcaacaaccacgccttttacgccactgcacattaaggtaaagcccaaacgcgtgggaatctttctcgactatgaggccgggaccctatccttctataacgtgaccgacaggagtcatatctacaccttcaccgacacctttaccgaaaagctgtggccattgttctatcccggtattagagccggtcggaaaaacgccgcaccactcaccattcgcccccccactgactgggaatag

SEQ ID NO: 209679 - DNA, 435 bp, synthetic construct
  misc_feature 1..435: note = Description of Artificial Sequence: Synthetic coding sequence
  source 1..435: mol_type = other DNA
atggccgagaccagcctgctggaggccggcgccagcgccgccagcacagcagctgctttggagaatctgcaagtggaggcgagctgttcagtctgcctcgaataccttaaagagccagtcatcatagagtgtggacataatttttgtaaagcgtgtattacccggtggtgggaggatttagagcgcgattttccttgcccagtttgtcggaagacgtccagatacaggtcacttaggcctaaccgtcaactgggttccatggtagagatagcaaaacagctgcaggctgtgaagagaaagataagagacgagagcctctgcccccaacatcatgaggccctctccctcttttgctacgaggaccaggaagccgtgtgcctcatctgtgcgattagccacacgcaccgcgcgcatactgtggtgcccctagactag

SEQ ID NO: 209680 - DNA, 225 bp, synthetic construct
  misc_feature 1..225: note = Description of Artificial Sequence: Synthetic coding sequence
  source 1..225: mol_type = other DNA
atggccgagaccagcctgctggaggccggcgccagcgccgccagcaccgctgctgccctagagaaccttcaggtggaggcctcatgcagtgtgtgtttggagtatctcaaggagccggtcattattgaatgtggccacaacttttgcaaggcttgtatcactcggtggtgggaggacttggagagagatttcccctgtcccgtgtgtcggaagacaagcagatag

SEQ ID NO: 209681 - DNA, 147 bp, synthetic construct
  misc_feature 1..147: note = Description of Artificial Sequence: Synthetic coding sequence
  source 1..147: mol_type = other DNA
atggccgagaccagcctgctggaggccggcgccagcgccgccagcactgctgccgcgctggaaaatctgcaggttgaggcctcttgttccgtgtgtctggagtatctaaaggaaccggtcatcattgagtgcgggcacaacttttag

SEQ ID NO: 209682 - DNA, 1467 bp, synthetic construct
  misc_feature 1..1467: note = Description of Artificial Sequence: Synthetic coding sequence
  source 1..1467: mol_type = other DNA
atggccgagaccagcctgctggaggccggcgccagcgccgccagcaccgccgccgcactggaaaacttgcaggtggaggccagttgcagcgtgtgcctggaatacctgaaggaaccagtaattattgagtgcgggcataacttctgcaaggcttgcatcaccaggtggtgggaagacctcgaacgtgattttccctgcccagtctgtcgcaaaacatctcggtatcgtagcttgagacctaatcgacagctcggcagcatggtggaaatagctaagcagcttcaggcagttaaaaggaaaattagagatgagtcattgtgtccacaacaccacgaggccttgtcgctgttttgttatgaggatcaagaagcggtatgcctcatttgcgccatttctcatacccatcgggcccatactgttgttcccctggacgacgctacgcaagagtacaaagaaaagctgcagaaatgtctcgagcctctcgagcaaaagcttcaggagataactaggtgtaagtccagcgaagagaagaagcccggggaactgaagagactggtggaatccaggcggcagcaaatacttcgagagttcgaagagctgcacagacgcctagatgaggagcagcaagtactattgtcacgccttgaggaagaggagcaagacattctgcagaggctgcgggagaatgctgcccacctgggcgacaagaggagagaccttgcccacctggcagctgaggtggaagggaagtgtttacagtctggctttgagatgcttaaggatgtcaagtctactctggaaaagtgtgaaaaggtcaagactatggaagtgacttccgtgtcaattgagctggagaagaattttagtaattttccccgccagtactttgccctcaggaaaatcctgaagcagttgattgccgatgttactttagaccccgagaccgcacatcccaatctagttcttagtgaagatcgcaaatctgtgaaatttgtggagacaagactccgggaccttcctgatacaccccgccggttcactttctatccatgcgtgctggccacagagggttttacttccgggaggcactactgggaagtcgaagtaggggataagacccattgggccgtgggggtgtgtagggacagcgtttctcgcaagggagagctaacgccactgcccgagactgggtattggcgggtgcggctgtggaacggtgacaaatatgccgccacgactacccccttcaccccgctccacataaaagtcaagccaaagcgggttggaatcttcttggattatgaagcagggacactgtctttctacaacgtgactgatcggagtcatatctacactttcacagatactttcactgagaagttgtggccactcttctacccagggattcgcgccgggaggaagaacgctgcaccacttaccataagacctcctaccgattgggagtag

SEQ ID NO: 209683 - DNA, 684 bp, synthetic construct
  misc_feature 1..684: note = Description of Artificial Sequence: Synthetic coding sequence
  source 1..684: mol_type = other DNA
tgaaccagccggtaccggagcctgcggcccaaccggcagctgggctcaatggttgagatcgccaaacagctgcaggcagtgaaaaggaagatcagagacgagtcactttgtccccagcaccatgaggctctctcactgttttgctacgaggaccaagaagctgtttgcctgatttgtgcaatcagccacactcaccgggcccataccgtggttccattggatgacgcaacacaggaatataaggagaagcttcagaagtgtctcgaacccctggagcaaaagctgcaggagatcactcggtgtaagtcctccgaagagaagaagcctggggagctaaagcggctcgttgagtctaggaggcagcaaattctaagggagtttgaggagctacaccgacggctggatgaggaacagcaagttctactctctcggctggaggaggaggagcaagacatcttgcagagattgagagagaacgccgcacacctgggggacaaacgacgggaccttgcccatctggcagccgaagtggagggcaagtgcttgcagtcaggttttgagatgcttaaagatgtgaagtccacactggaaaagtgtgaaaaggttaagactatggaggtgacgtccaccacgccatgcacctcattacatagcgagatcaacgataatgtgaggggccgatag

SEQ ID NO: 209684 - DNA, 147 bp, synthetic construct
  misc_feature 1..147: note = Description of Artificial Sequence: Synthetic coding sequence
  source 1..147: mol_type = other DNA
atggccgagaccagcctgctggaggccggcgccagcgccgccagcacagccgcggcactggaaaatctccaggtcgaggccagctgtagcgtgtgtctggagtacctgaaggagcctgtgattattgaatgcgggcacaacttttag

SEQ ID NO: 209685 - DNA, 147 bp, synthetic construct
  misc_feature 1..147: note = Description of Artificial Sequence: Synthetic coding sequence
  source 1..147: mol_type = other DNA
atggccgagaccagcctgctggaggccggcgccagcgccgccagcacagccgccgcattggagaatttacaagtcgaagccagctgctccgtgtgtctggagtatctcaaggaacctgtgattatcgagtgtgggcataatttctag

SEQ ID NO: 209686 - DNA, 180 bp, synthetic construct
  misc_feature 1..180: note = Description of Artificial Sequence: Synthetic coding sequence
  source 1..180: mol_type = other DNA
atggccgagaccagcctgctggaggccggcgccagcgccgccagcacagctgctgcgctggaaaacctgcaggtggaggcctcatgttccgtctgccttgaatatctcaaggaacccgttataatcgagtgcggccataacttctgtaaggcatgcatcactaggtggtgggaggattag

SEQ ID NO: 209687 - DNA, 180 bp, synthetic construct
  misc_feature 1..180: note = Description of Artificial Sequence: Synthetic coding sequence
  source 1..180: mol_type = other DNA
atggccgagaccagcctgctggaggccggcgccagcgccgccagcacagccgcggcattagaaaacctgcaggttgaagcgagttgttctgtgtgcctggagtacttaaaagaacctgtcatcatcgagtgtggtcataacttttgtaaggcttgtattactcggtggtgggaggactag

SEQ ID NO: 209688 - DNA, 435 bp, synthetic construct
  misc_feature 1..435: note = Description of Artificial Sequence: Synthetic coding sequence
  source 1..435: mol_type = other DNA
atggccgagaccagcctgctggaggccggcgccagcgccgccagcaccgccgccgcccttgaaaacctgcaggtggaggcgtcttgttcggtttgtttggaatatttaaaggagcctgtcattatcgaatgtggacacaatttttgtaaagcttgtattacgaggtggtgggaggacttggaacgcgatttcccctgtccagtctgccggaaaacttctcgatatagaagcctcagacctaataggcagttaggatctatggtggaaatagctaagcagttgcaggccgtgaaaaggaagatcagagatgagtcgctgtgtccacagcaccacgaggctctctctctcttttgttatgaagatcaggaagccgtttgtctgatctgcgcaatcagccacacacacagggctcacaccgtggtccctcttgactag

SEQ ID NO: 209689 - DNA, 1557 bp, synthetic construct
  misc_feature 1..1557: note = Description of Artificial Sequence: Synthetic coding sequence
  source 1..1557: mol_type = other DNA
atggccgagaccagcctgctggaggccggcgccagcgccgccagcactgcggcagctttggagaatttgcaggtggaggcctcctgctccgtgtgtctggagtacctaaaggagcctgtgattattgaatgtgggcataacttttgtaaggcatgtataacgaggtggtgggaggacctggaacgtgatttcccatgtcccgtatgtcggaagacttcccgttaccggtccttaagacctaaccggcagctcggtagcatggtggagattgctaagcagttgcaggctgtcaaacgaaaaatcagagatgagtctttatgcccacagcaccacgaagcactgtcactattctgttacgaggaccaggaagcagtgtgcttaatttgtgctatttcgcacacacacagggctcataccgttgtgcctctcgatgatgctacccaggaatacaaagagaagcttcaaaagtgcctggaacctctggaacagaaactccaagagattactcgatgtaagtcaagtgaggagaagaagcccggtgagctcaaacgtctggtggaaagtcggcgccagcagatcctaagggaattcgaggagttgcacagacgcttagacgaggagcagcaggtgctcttaagcagactcgaggaggaggaacaggacattcttcagagactgcgcgagaatgctgcccatttgggtgataaacgccgggacctcgctcatctcgccgctgaggtggagggcaaatgtttacagtccgggttcgaaatgctgaaggatgtgaagtccaccttggagaaaaacataccgcggaaatttggaggcagtctgagtacgatttgccccagagaccataaggcacttttgggactggtgaaggagattaaccgttgtgaaaaagttaaaacgatggaggtcacttcggtatccattgaactggagaagaactttagtaattttcctcgccaatacttcgccttgcgaaagattctaaagcagcttatagctgacgtgactttagatccagaaaccgcccatccaaatctggtgctctccgaggatagaaagagcgtgaaattcgtagagacaagactgagagatctgcctgatactccacgccgattcactttttatccttgcgtgttagccactgaagggttcaccagcgggcgccattattgggaagtcgaggtgggcgataagactcattgggctgtgggggtgtgtagagattcggtgagtcggaagggagagttaacccctttgcccgagactgggtattggcgcgttaggctctggaacggagacaagtacgcggccaccaccacacctttcacccccctgcacatcaaagtgaagcccaagcgcgtagggatctttctggactacgaagctggcaccttgagtttctataacgtcacagacaggtcacacatttacacattcaccgatacgttcactgaaaaactgtggcctcttttctaccctggcatacgggccggacgcaaaaacgcagctccccttaccatccggcctccgaccgactgggagtag

SEQ ID NO: 209690 - DNA, 684 bp, synthetic construct
  misc_feature 1..684: note = Description of Artificial Sequence: Synthetic coding sequence
  source 1..684: mol_type = other DNA
tgaaccagccggtaccggagcctgcggcccaaccggcagctgggctccatggtagaaatcgcaaaacaactgcaggcggtcaagcggaaaataagggacgagtctttgtgcccccagcaccacgaggcattaagtctgttttgctatgaggatcaggaggccgtctgcctgatttgcgccatcagccacacccaccgcgctcacacagtggtgcccctggacgacgccacccaggaatacaaggagaagctccaaaaatgtttggagcctttagagcagaaactgcaggagataacaagatgtaagtccagtgaagagaagaaaccaggcgagttaaagaggctcgtggaaagcaggagacagcaaattctacgggaattcgaagaacttcacagacgactggacgaagagcagcaagtgctgctgagccgtttagaggaagaagagcaggatatcctgcagcgtcttagagaaaatgcggcacatctgggtgataagcgccgtgatttagcccatctggccgccgaagtcgagggaaagtgtctgcagtccggattcgaaatgctgaaggatgtgaaaagtaccctggagaaatgcgaaaaagtgaagactatggaagtcacgtccactacaccatgtacctcactgcactcagagatcaatgacaacgtacggggaagatag

SEQ ID NO: 209691 - DNA, 684 bp, synthetic construct
  misc_feature 1..684: note = Description of Artificial Sequence: Synthetic coding sequence
  source 1..684: mol_type = other DNA
tgaaccagccggtaccggagcctgcggcccaaccggcagctgggctctatggtggaaatagcgaagcaactacaagctgtcaagagaaaaatcagagatgagagcctatgccctcagcaccacgaagccctgagccttttctgctatgaagaccaggaagctgtctgcctgatatgcgccatatcccatacacacagagctcacaccgttgtcccgctggatgacgccactcaagaatacaaagagaagctgcaaaagtgtttggagccccttgagcagaagcttcaggagattacacgatgcaaaagctctgaggagaaaaagcccggagaactcaaacgcctggtggaaagccgaagacagcagatactgagggagttcgaggagctgcaccggcgactggatgaggagcagcaagtgcttctaagccggttggaggaagaagaacaggatattctacagagactcagggagaatgccgctcacttgggggacaagagacgcgatctggctcatcttgccgcggaggtcgagggaaaatgtctgcagtctggcttcgaaatgctgaaagatgtcaaaagtaccctcgagaaatgtgagaaggtaaaaacaatggaggtcacaagcaccactccctgcacgtcattgcatagcgagattaacgacaacgtgcgcggtcggtag

SEQ ID NO: 209692 - DNA, 147 bp, synthetic construct
  misc_feature 1..147: note = Description of Artificial Sequence: Synthetic coding sequence
  source 1..147: mol_type = other DNA
atggccgagaccagcctgctggaggccggcgccagcgccgccagcactgccgccgccctcgagaatttacaggtggaggctagttgctccgtctgtctcgaatatctgaaagagcctgtcatcatcgagtgtggccataacttctag

SEQ ID NO: 209693 - DNA, 1557 bp, synthetic construct
  misc_feature 1..1557: note = Description of Artificial Sequence: Synthetic coding sequence
  source 1..1557: mol_type = other DNA
atggccgagaccagcctgctggaggccggcgccagcgccgccagcactgcagcagcattagagaatttgcaggtggaggcttcatgcagcgtttgcctggagtacctgaaggaacccgttattattgagtgcggccacaatttttgcaaggcctgcatcacgcgctggtgggaagatctcgagcgggactttccttgccccgtgtgcaggaagacttccaggtatagaagcctcaggccaaacagacagttgggctcaatggtggagatcgctaaacaactgcaggccgtaaaaaggaagatccgcgacgagtccctctgcccccaacaccacgaggccctctctctgttttgctacgaggaccaggaggccgtgtgcctaatctgcgccatcagtcacacccatagagcccataccgtcgtcccccttgatgatgctactcaagaatacaaggagaagctccaaaagtgtctggaacctctggagcagaagttgcaggagattacgcggtgcaagtctagtgaggagaagaagccgggagaactgaagaggcttgtagagagtagaaggcaacagatcctgagggaattcgaagagctgcaccgaaggctcgacgaggaacagcaggtgctcttaagccgtctcgaggaggaggagcaagacatactacaacgtctcagagagaacgcagcgcacctgggtgataagaggagagacctcgcccaccttgctgccgaagtggaaggcaaatgtctgcaaagcggattcgaaatgctgaaagacgttaaatccactcttgagaaaaacattcctcggaagttcggtgggagcctcagcacgatctgtccacgggaccacaaggccctcttgggactagtcaaagagattaatcgttgtgagaaggtgaagaccatggaggttacaagtgtgagcatcgagcttgagaaaaatttcagcaattttccacggcaatatttcgcactccgcaaaatcttgaagcagctaatcgcagatgtcacccttgatcccgagacggcccacccaaatcttgtcttgtcggaggatcgtaaaagtgtaaaatttgttgagacaaggctgcgggatcttccagacacccccaggcggttcactttttacccgtgcgttcttgcgacagagggattcactagcggacgacattattgggaagtcgaggtgggagacaagacccattgggcagtaggggtgtgccgcgattcagtatcacggaagggcgagctcaccccattgcctgagacaggctactggcgggtacgactttggaacggagacaaatatgccgcgaccaccaccccttttactcccctgcatatcaaagtgaagcccaagcgtgtgggaatttttcttgattacgaagcaggcaccctgagcttttataacgtaactgaccggtctcatatttacactttcacggatacttttactgagaaattgtggccactgttctaccccggaattcgagccggacggaagaacgctgcccccctcactatacgaccccccactgactgggaatag

SEQ ID NO: 209694 - DNA, 225 bp, synthetic construct
  misc_feature 1..225: note = Description of Artificial Sequence: Synthetic coding sequence
  source 1..225: mol_type = other DNA
atggccgagaccagcctgctggaggccggcgccagcgccgccagcaccgccgccgccctcgaaaacctacaggtggaggcctcatgttcggtctgtctggagtaccttaaagaaccagtgattatcgaatgtggacataacttttgtaaggcctgtattaccagatggtgggaagacttggagagggatttcccctgcccggtctgccgcaagaccagccggtag

SEQ ID NO: 209695 - DNA, 180 bp, synthetic construct
  misc_feature 1..180: note = Description of Artificial Sequence: Synthetic coding sequence
  source 1..180: mol_type = other DNA
atggccgagaccagcctgctggaggccggcgccagcgccgccagcacagccgctgcattagagaatctccaggtggaggccagctgttcagtttgcctggagtacctaaaagagcccgtcattatcgagtgcggccacaacttctgtaaagcgtgtattacccgctggtgggaggattag

SEQ ID NO: 209696 - DNA, 147 bp, synthetic construct
  misc_feature 1..147: note = Description of Artificial Sequence: Synthetic coding sequence
  source 1..147: mol_type = other DNA
atggccgagaccagcctgctggaggccggcgccagcgccgccagcaccgctgctgcacttgaaaacctgcaggtggaggcttcgtgttccgtgtgccttgagtacttgaaggagccagtcatcatagagtgcggccataacttctag

SEQ ID NO: 209697 - DNA, 786 bp, synthetic construct
  misc_feature 1..786: note = Description of Artificial Sequence: Synthetic coding sequence
  source 1..786: mol_type = other DNA
atggccgagaccagcctgctggaggccggcgccagcgccgccagcacagcggcagccctggaaaatctgcaagtggaggccagttgcagcgtatgcctggagtatcttaaagagccggtaattatcgaatgcggacataatttttgtaaggcatgcattacacgctggtgggaggatctagagcgagatttcccatgtcccgtatgccgtaagactagcaggtatcggtctttacggcccaatcggcaactcggctccatggtggagatcgccaaacagctacaagcagtgaaacgcaaaatccgggacgaatccctgtgcccccaacaccatgaggccctcagtctgttctgttacgaagaccaggaagcggtctgccttatctgtgcaatctctcacacacatagagcgcatacagttgtgcccctggacgacgccacccaagaatacaaggaaaaactgcaaaagtgcctggagccgctggagcagaagcttcaggagattacccgatgcaagagctcagaagagaagaaacctggagagctgaaaaggcttgtggaatctagaaggcaacagatacttcgggagtttgaggagttgcaccgcaggctggacgaggagcagcaggttctgctcagtaggttagaagaggaggaacaggatattcttcagcgcctgcgggaaaacgccgctcatctgggtgataagagaagggatctcgctcacttggctgctgaagtcgaaggtaagtgtctgcagagcggcttcgaaatgctcaaagtttag

SEQ ID NO: 209698 - DNA, 180 bp, synthetic construct
  misc_feature 1..180: note = Description of Artificial Sequence: Synthetic coding sequence
  source 1..180: mol_type = other DNA
atggccgagaccagcctgctggaggccggcgccagcgccgccagcaccgctgctgccctggaaaatctgcaggtggaggccagttgctccgtctgtctagaatatcttaaagagcccgtcatcattgagtgtggtcataatttctgcaaggcgtgcattacacgatggtgggaggactag

SEQ ID NO: 209699 - DNA, 435 bp, synthetic construct
  misc_feature 1..435: note = Description of Artificial Sequence: Synthetic coding sequence
  source 1..435: mol_type = other DNA
atggccgagaccagcctgctggaggccggcgccagcgccgccagcaccgccgctgcgctagagaatctacaagtcgaggccagttgcagtgtctgtcttgaatacctcaaggagcctgtcattatcgaatgcggccataacttttgtaaagcatgcattaccagatggtgggaagatctggaacgcgattttccctgtcccgtgtgcaggaagacctctcggtatcggtcactgcgcccaaataggcagcttgggagcatggtggaaatcgccaagcagctgcaagcagtgaagagaaagatcagagatgagtctctgtgcccccagcaccacgaggctttgagtcttttctgctacgaggaccaggaggcagtgtgcctgatctgtgcaatctctcacacacacagggctcacaccgtggtcccactcgattag

SEQ ID NO: 209700 - DNA, 1467 bp, synthetic construct
  misc_feature 1..1467: note = Description of Artificial Sequence: Synthetic coding sequence
  source 1..1467: mol_type = other DNA
atggccgagaccagcctgctggaggccggcgccagcgccgccagcacagcggccgcattagagaatctccaggttgaggcctcttgtagcgtgtgtctcgaatacctgaaagaacccgttattatcgaatgtggacacaatttctgcaaggcttgcatcactcggtggtgggaggatctggagagagatttcccatgtccggtctgccgcaagacttccaggtacagaagtctcagaccaaacagacaattgggttcgatggtggagatagccaagcagttgcaggcagtgaagcgcaagattcgcgatgaaagcctgtgccctcagcaccatgaggcactgagtctcttctgttatgaggaccaggaggcggtatgtctgatatgtgccatttctcatacccaccgcgcccatactgtagtgccgctggatgatgccacgcaagagtacaaggaaaagctacagaagtgcctggaaccgctggagcagaagcttcaagaaataactcggtgcaaatcttctgaggaaaagaagcctggggaattgaagagattagtcgaaagccgaagacagcaaattctgcgggagtttgaggaactacatcggagattggatgaggagcagcaagttttgctctcccgtctcgaggaagaggaacaggatatcctccagaggctgcgggaaaatgcagcacacttgggcgataagaggagagatctcgcacacttggctgctgaggtcgaggggaaatgtctgcaatcaggttttgagatgctgaaggacgtgaagtctaccctggaaaaatgcgagaaagttaagaccatggaggtgaccagcgtttctattgaactggagaaaaatttctcgaattttccgagacaatattttgcactgcgcaagatcctcaagcagctgattgcagacgtcactctggatccggaaacagctcatcccaacctcgtgctcagcgaagatcgaaagtccgtcaagtttgtggagacgcgactgcgagacctaccagatactcctcgcaggtttactttttacccatgtgttcttgctactgaaggcttcactagcggtagacactattgggaagtggaggtgggcgacaaaacccactgggcagtgggagtctgcagggacagtgtgtcccgcaagggggaactgactcccctccccgagacagggtattggcgagtgagattgtggaacggcgacaaatacgccgccactaccacacccttcacccccttgcacataaaggttaaaccgaagcgggttgggatatttttggattacgaagctggtacacttagcttctataatgtgaccgaccgcagtcacatctacacgtttacggacaccttcaccgaaaaactctggcccctgttttaccctggtattcgggccgggaggaaaaatgctgcccctctgactattagaccccccaccgattgggagtag

SEQ ID NO: 209701 - DNA, 1467 bp, synthetic construct
  misc_feature 1..1467: note = Description of Artificial Sequence: Synthetic coding sequence
  source 1..1467: mol_type = other DNA
atggccgagaccagcctgctggaggccggcgccagcgccgccagcacagccgccgccctggagaacttacaagtcgaggcttcatgttcagtgtgtctggaatacctgaaagaacctgttattattgaatgtggtcacaatttttgcaaggcatgcatcacaagatggtgggaagacctggaaagagacttcccatgtccggtctgcaggaagactagcaggtacaggtccctgcgtcctaaccgccagctgggcagcatggtggaaattgccaaacagctgcaagctgtcaaaagaaagatccgcgacgagtctctctgcccacagcaccacgaagcattgtccctcttctgctatgaggatcaggaagccgtgtgcctcatatgcgccattagccacactcatagagcccacaccgttgtgccactcgatgatgctactcaagagtacaaggagaagcttcaaaagtgcctggaaccactggagcagaagctccaggaaattactcggtgcaagtcgtccgaggagaaaaagcctggggaactcaagcgactcgtggaatcacgccgccagcagattctgagggagttcgaggagctgcatcgccgattggatgaagagcagcaggttctgctctctaggctggaggaagaagagcaggacatcttgcagcgcctgagggagaacgccgctcacctgggcgacaagcgtcgggacctcgcccacctggcagcagaggtggaagggaagtgcttgcagtccggattcgaaatgctcaaggatgtgaaaagtacacttgaaaaatgtgagaaggtaaagactatggaggtcacctccgtatccattgagttggagaaaaacttctcaaattttcctcgccagtactttgcactgaggaaaatcctgaaacaacttattgccgatgtgacgttggatccagagacagcccacccaaatcttgtcctgtcagaagacagaaagagtgttaagttcgtcgagaccagactgcgggatttgcctgacactccacggaggttcacattttatccatgcgtacttgccacagaggggtttactagcggtcgtcactattgggaagtagaagtgggggataagacgcactgggcagtcggtgtgtgcagggattctgtctcccggaaaggtgagttgacacctttaccagagacaggttattggagggtccggctgtggaatggtgacaaatacgcggctacaaccactccttttacaccgctccatattaaggtgaagccaaaaagggtcggcatctttttagactatgaggcaggtacgctttctttctacaacgtgacggaccgatcccacatttatacattcactgacacattcacagagaaactgtggccactgttctatccaggaatccgggctggaaggaagaatgctgctccacttactattaggcctcctacagactgggagtag

SEQ ID NO: 209702 - DNA, 786 bp, synthetic construct
  misc_feature 1..786: note = Description of Artificial Sequence: Synthetic coding sequence
  source 1..786: mol_type = other DNA
atggccgagaccagcctgctggaggccggcgccagcgccgccagcacagccgcagctctcgagaacctgcaggtagaggcctcttgtagcgtgtgcctcgaatacctgaaagaacctgtaataatcgagtgtgggcataatttctgcaaagcctgcatcaccaggtggtgggaagatctggaaagagatttcccctgtcctgtgtgtcggaagacttcaagataccgctccctacggccaaacaggcagctgggaagtatggtggaaatcgccaaacagttacaggccgtgaagaggaaaatcagggatgaaagtctctgcccgcaacaccacgaagctctatctctgttctgctatgaagaccaggaggccgtatgtctgatctgcgcaatctcccatactcacagggcccacacggtcgttcccctagacgatgcgacccaagagtacaaagagaagctgcagaagtgcctggagccattggaacaaaagttgcaagaaattactcgttgtaagtcctcagaggagaagaaacccggcgaactgaaaaggctggtcgagtctagaaggcagcagattctcagggagtttgaggagctgcaccggaggttggacgaagagcagcaggttttgctgagccgcttagaggaggaggagcaggatattctacagcgacttcgggagaacgcagctcatttgggcgataagagaagagatctagcgcacttagccgcggaagtcgaaggcaagtgtctgcagagcggctttgaaatgttgaaggtttag

SEQ ID NO: 209703 - DNA, 1467 bp, synthetic construct
  misc_feature 1..1467: note = Description of Artificial Sequence: Synthetic coding sequence
  source 1..1467: mol_type = other DNA
atggccgagaccagcctgctggaggccggcgccagcgccgccagcacagcagcagcactcgaaaacttgcaggttgaagccagctgctcagtgtgtttggagtacctgaaggagccagtcataattgagtgtggacataatttttgcaaggcgtgtattactcggtggtgggaagacttagaacgggatttcccttgtccagtgtgtcggaaaacttctcgctatcgctcattaaggcccaacagacagttggggtcaatggttgaaatcgccaagcagctgcaggcagtcaagcgcaaaattagagacgaatccctctgtccccagcatcatgaggctttaagcctcttctgctatgaggatcaagaagctgtttgccttatttgcgcaattagccatacccaccgagcccacactgtcgttccactagacgacgccacacaggagtataaagaaaagcttcagaaatgcctggagccactggagcagaagttacaggagatcacacgatgcaagtcgagcgaagagaaaaagccgggagagcttaagcggctcgtggagtcaagacgccagcagattctgcgggagtttgaggaactacaccggaggctcgacgaggaacagcaggttctactttctcgccttgaggaggaggaacaggacattttacagcgcttacgggagaacgcagctcaccttggcgacaaacgcagagatctggcccacctggctgctgaggtcgagggtaaatgtttacagtccgggtttgagatgcttaaggacgtgaaatctacacttgagaagtgtgagaaggtcaagactatggaggtgacctctgtctcaatcgagctggaaaagaacttctcgaactttccccgacagtactttgcacttagaaagatcctgaaacagctcattgcagacgtcaccctcgacccagagaccgcccatcctaacctggtgctcagcgaggaccgcaagtccgtgaaatttgtggaaacacgattgcgcgacctgcctgatacaccaagaagatttacgttctatccgtgcgtgctcgcgactgagggtttcacttcaggccgacattactgggaggtcgaggtcggagacaagacacactgggctgtaggcgtttgcagggactccgtcagtcgaaaaggcgaactcactcccctgcccgaaacaggttactggcgggtacggctgtggaacggtgacaaatatgctgctactactactccgtttactccactccacattaaagttaagccaaagcgggtcgggatcttcctcgactatgaggccggaacgctttccttttacaacgttactgacagatcccatatctacacatttacagatactttcactgaaaagctgtggcctctgttctatccagggattagagctggaaggaaaaatgcggccccactcaccatccggccccctaccgactgggagtag

SEQ ID NO: 209704 - DNA, 180 bp, synthetic construct
  misc_feature 1..180: note = Description of Artificial Sequence: Synthetic coding sequence
  source 1..180: mol_type = other DNA
atggccgagaccagcctgctggaggccggcgccagcgccgccagcacagccgccgcactggaaaatctgcaggtggaggcttcatgttccgtctgcctggaatatcttaaggagcccgtgatcatagagtgtgggcacaacttctgcaaagcctgtattacaagatggtgggaggactag

SEQ ID NO: 209705 - DNA, 180 bp, synthetic construct
  misc_feature 1..180: note = Description of Artificial Sequence: Synthetic coding sequence
  source 1..180: mol_type = other DNA
atggccgagaccagcctgctggaggccggcgccagcgccgccagcactgcagctgccctggagaatttacaagtggaggctagctgctccgtgtgcctggagtacctgaaagagcccgtaatcattgagtgtgggcacaatttttgtaaagcctgtatcacacgttggtgggaggattag

SEQ ID NO: 209706 - DNA, 684 bp, synthetic construct
  misc_feature 1..684: note = Description of Artificial Sequence: Synthetic coding sequence
  source 1..684: mol_type = other DNA
tgaaccagccggtaccggagcctgcggcccaaccggcagctgggctctatggtggagatagccaagcagctccaagccgttaaacgcaagattagggacgagagcttgtgtccgcaacaccacgaggccctttcactgttttgctacgaggaccaggaagccgtgtgcttaatctgtgccatcagccatacgcacagagctcacacagttgtgcccctcgatgacgctacccaggagtataaagagaaattgcaaaaatgtctggagcccttggagcagaaactgcaggagattacccgatgtaaaagtagcgaagagaagaaacccggcgagctgaaacgactagtcgaatctcgcagacaacagatattgcgtgagttcgaggagctgcacaggcggcttgacgaggaacagcaggtgctgctgtcccgtctggaagaggaagagcaagacattctgcagcgccttagggagaacgcagctcatctcggagacaagcgcagggatctggcccatctcgccgctgaggtggaggggaaatgcctgcagtcggggtttgagatgctcaaggatgtgaagagcaccctcgagaagtgcgagaaggtcaaaaccatggaggtcacttcaacaaccccgtgtacaagcctccatagcgagattaatgacaatgttcggggcagatag

SEQ ID NO: 209707 - DNA, 1467 bp, synthetic construct
  misc_feature 1..1467: note = Description of Artificial Sequence: Synthetic coding sequence
  source 1..1467: mol_type = other DNA
atggccgagaccagcctgctggaggccggcgccagcgccgccagcacagccgcagccctcgaaaacctacaggtagaggcaagctgttccgtgtgcctcgagtacctgaaggaacccgtgatcattgaatgtggtcataacttctgtaaagcgtgtataacccgttggtgggaggatcttgagagagacttcccgtgccctgtctgtcgaaaaactagtaggtacaggtcactcagacctaatcgccagctgggaagtatggtggaaattgctaagcaacttcaggccgtgaagcgcaagattagagatgagtctctgtgtcctcagcaccacgaagccctcagtctgttctgctacgaggatcaggaagccgtgtgccttatctgcgccatctcccatacccacagggcacataccgtggtacccttggacgacgcgacgcaagaatacaaggagaagctgcagaaatgcctcgaaccactcgaacagaagctccaggaaattaccagatgtaagagcagcgaggaaaagaaacctggagaactgaaacggctcgtggagagcagacggcaacagatcctgcgggaatttgaggaacttcacaggcggttggatgaggagcaacaggttctgttatcccggctcgaggaggaggaacaggacatactgcagcgcctacgcgagaatgctgcacacctcggggacaagagacgggatctcgctcacctggccgccgaagtggagggaaaatgcctacagagtggatttgaaatgttgaaggatgtaaaatccacccttgaaaagtgtgagaaggttaaaactatggaggttacaagcgtgtcgatcgagctagaaaaaaatttcagtaatttcccccggcaatattttgccttaagaaagatcctgaaacagcttatagcagacgtgactctcgatcccgagacagcccacccgaatcttgtgttaagtgaggaccgcaaatccgttaaattcgtggagactcgcctcagggatctgccggacaccccccgcaggttcacattctacccttgcgtgttggcaacagagggcttcacgtctggccgccattactgggaggtcgaggtgggggacaagactcattgggctgtcggtgtgtgtcgcgacagcgttagccgtaagggcgagttgacacccttgcccgagacggggtactggcgggtccgcttatggaacggtgataaatatgccgctactacgactcccttcactccactgcacatcaaagtgaaaccaaaaagggtggggatcttcttggactatgaagccggcacattatccttctataatgttaccgacagatcccatatttatacgttcactgacactttcaccgagaagctgtggcctttgttctaccctggaatccgggctggcagaaagaacgccgccccactgacaatacggccccccacggattgggagtag

SEQ ID NO: 209708 - DNA, 225 bp, synthetic construct
  misc_feature 1..225: note = Description of Artificial Sequence: Synthetic coding sequence
  source 1..225: mol_type = other DNA
atggccgagaccagcctgctggaggccggcgccagcgccgccagcactgctgctgcattggaaaacttacaggttgaggctagctgctcagtatgcttggagtatctgaaggagccggtgatcatagagtgcggtcataacttctgtaaagcctgtattacacgatggtgggaagacctagaaagggatttcccgtgccccgtgtgtaggaagacatcccgctag

SEQ ID NO: 209709 - DNA, 684 bp, synthetic construct
  misc_feature 1..684: note = Description of Artificial Sequence: Synthetic coding sequence
  source 1..684: mol_type = other DNA
tgaaccagccggtaccggagcctgcggcccaaccggcagctgggcagtatggtggagattgctaagcagctacaggctgtaaagaggaagatcagggacgagagcttgtgtccgcaacaccacgaggcactttcgctgttttgttacgaagatcaggaagctgtgtgtcttatatgtgctatttcccatacccacagagcccacactgttgtgccgttggacgacgccacacaagagtacaaagagaaattacagaagtgcctggaaccccttgaacagaagctgcaggagatcaccaggtgcaaaagcagcgaggaaaaaaagccaggagagctgaagcggctcgtggagagcagacgccagcagattctcagggagttcgaggagctccacaggaggctggatgaggaacagcaggtgctccttagccggttggaggaggaagagcaagatatcctgcagagattgagagagaatgccgctcatttgggagacaaacgtagggatctcgcacatttggcagctgaagtagagggcaagtgcttgcagagcggtttcgagatgctcaaagatgtgaagagcaccctcgagaagtgcgaaaaagtcaagactatggaagtgacatccactaccccctgcacttcgctccacagtgagattaatgacaatgtccgcggtagatag

SEQ ID NO: 209710 - DNA, 1467 bp, synthetic construct
  misc_feature 1..1467: note = Description of Artificial Sequence: Synthetic coding sequence
  source 1..1467: mol_type = other DNA
atggccgagaccagcctgctggaggccggcgccagcgccgccagcacggcggctgccctggaaaacctgcaggtagaggctagctgttctgtgtgtttggaatacctcaaagagccagtcattattgagtgtggacataatttctgcaaggcatgtatcactaggtggtgggaggacctggaacgcgacttcccttgtccagtgtgcagaaaaacctctagatatagaagtcttagaccaaaccggcagctgggcagcatggtagagatcgccaagcagctccaggctgtgaagagaaagatcagggatgagagtttatgtccccaacatcatgaagcattgtccctgttctgctacgaagatcaggaggctgtgtgccttatttgcgctatctctcacacccacagagcgcatactgtggtgcccctggatgacgcaacccaggagtacaaagaaaaactccagaaatgtctggaaccactcgaacaaaaactccaggagataacaagatgtaaaagttccgaagagaagaagcccggcgaattaaagcgtttggtggaaagcaggcgtcagcagatcttacgtgagtttgaggaattacacagaaggttggacgaagaacaacaggttttgctctctcgcctggaggaagaagagcaagatatcctccagaggctccgagagaacgcggcccacctgggggataagaggagggacctggcccacctggcagctgaagtcgagggcaagtgcttacagtctgggtttgaaatgctgaaggacgtcaagagcactctcgaaaagtgcgaaaaggtcaaaacaatggaagttacctctgtgtccattgaactcgaaaaaaatttctcgaattttcctaggcagtattttgcacttagaaaaatcttgaagcaactgatagccgacgtcaccctggatcctgaaaccgctcatccaaaccttgtgctttctgaggatcggaaaagcgtgaaatttgttgagacccggctgcgggaccttccagacacccccaggcgcttcactttttatccatgcgtgctggcaactgagggcttcacaagcggacggcattactgggaggtagaagtcggcgataagacccattgggctgtcggcgtgtgtagggattcagtgtcccggaagggggaactgactccacttcctgagaccggttattggagagtccggctctggaatggcgacaagtacgctgccactaccaccccattcaccccattgcacattaaggtgaagcctaagcgggttggcatctttctcgattatgaggcaggaaccctctccttctacaacgtcaccgacagaagtcatatctacacgttcacagatactttcacggaaaagctctggcccctgttctacccgggcatcagggctgggagaaaaaacgcagctccactcactatccggcctcccaccgattgggagtag

SEQ ID NO: 209711 - DNA, 1467 bp, synthetic construct
  misc_feature 1..1467: note = Description of Artificial Sequence: Synthetic coding sequence
  source 1..1467: mol_type = other DNA
atggccgagaccagcctgctggaggccggcgccagcgccgccagcacagccgccgccttggagaacttgcaagtggaggcgtcgtgcagcgtgtgtctcgaatatctgaaagagccggtgatcatcgagtgcggtcacaatttctgtaaggcgtgcatcactcggtggtgggaggatctggagcgggatttcccctgtcccgtgtgtcgtaaaacctccagatacaggtcacttaggcctaaccgccagctgggctcgatggtggagatcgcaaagcagcttcaggctgtcaagagaaaaattagagacgagtccctgtgtcctcagcatcacgaagccctgtccctcttctgttacgaggaccaggaggccgtttgtctgatttgtgccatatcccacacccatagagctcacaccgtggtgcctttagatgacgccacacaggagtataaggaaaaactgcagaaatgtctggagcccctggaacagaagctgcaggaaatcacaagatgtaaatcgtcagaggaaaagaagcccggcgagctgaagcggctcgtcgagtcaaggcgacagcagattctgcgggagtttgaggaactccaccgaagactggacgaggaacaacaggttctgctgtccagactcgaagaggaggagcaggacatacttcagagattacgcgagaatgctgcccaccttggggacaagcgcagggacctcgcccacctggccgccgaggttgagggcaagtgtctgcagagcggctttgaaatgcttaaggatgtcaagtctacactggaaaagtgtgaaaaggtgaagacaatggaagttacttcagttagcattgaactcgagaagaactttagcaatttccctcgtcaatacttcgcacttagaaaaattttaaaacagttaatcgccgacgttacattggaccctgagactgcccatcctaatctcgtgctctccgaggatcgaaaatcagttaaattcgtcgagacacggctgagagacctcccggatactcctcgaagattcactttctacccatgcgttcttgccacagaaggcttcacatcaggaagacactattgggaggtcgaggtaggggataaaacccactgggctgtgggggtatgcagggattctgtatcacgcaagggcgagctcacccccttgcccgagacaggatattggcgggtgcggttgtggaacggtgataagtatgccgcgactaccacaccgtttactcctctacacataaaagtgaagccgaagagggtcggaattttcttagattacgaggcgggaacactctctttttataatgtgactgatcgaagtcatatatacacatttacagatacttttactgagaaactgtggccccttttctatccaggaattcgggccggacgaaagaacgctgcaccacttacaatcagaccccctacagattgggaatag

SEQ ID NO: 209712 - DNA, 786 bp, synthetic construct
  misc_feature 1..786: note = Description of Artificial Sequence: Synthetic coding sequence
  source 1..786: mol_type = other DNA
atggccgagaccagcctgctggaggccggcgccagcgccgccagcacggcagctgccctggaaaaccttcaggttgaggcctcctgcagcgtctgcctggagtatctcaaggaaccagtaataatcgaatgcggccataacttttgtaaagcatgcattactcgttggtgggaggatcttgagcgggactttccttgcccagtttgcaggaagaccagccgatatcggtctctccggcctaatcgccaattaggatcgatggttgagatcgccaagcagctgcaggcagtcaagagaaaaatccgtgatgagtctctgtgtccacagcatcacgaggccctctcgctcttttgttatgaagaccaggaggccgtgtgtctgatctgtgctatttcacacacgcaccgagcacatactgttgtcccactcgacgatgcaacccaggagtacaaagaaaagttgcagaagtgtttggagccgcttgaacaaaaactgcaggagataacccgctgtaagtcctcagaggagaagaaaccgggggagctgaagagactcgtggagtcgcgccgtcagcaaattcttcgagaatttgaggagctgcataggcgacttgacgaagagcagcaagtgctgttgtctcgactggaggaagaggaacaggacattttacagcgcctccgcgagaacgccgctcacttaggcgacaagaggagggacctggcccatctggccgcagaggtcgaaggcaaatgcctgcagtccggtttcgagatgctgaaggtgtag

SEQ ID NO: 209713 - DNA, 225 bp, synthetic construct
  misc_feature 1..225: note = Description of Artificial Sequence: Synthetic coding sequence
  source 1..225: mol_type = other DNA
atggccgagaccagcctgctggaggccggcgccagcgccgccagcactgcagctgccctagagaatctgcaggttgaggcttcctgcagcgtatgtctcgaatatctcaaggaacctgtaatcattgagtgtggccataacttttgtaaggcctgtattaccaggtggtgggaggatctagaaagggatttcccgtgccccgtgtgcagaaagacctctcgatag

SEQ ID NO: 209714 - DNA, 180 bp, synthetic construct
  misc_feature 1..180: note = Description of Artificial Sequence: Synthetic coding sequence
  source 1..180: mol_type = other DNA
atggccgagaccagcctgctggaggccggcgccagcgccgccagcactgccgctgcactcgagaacctacaagtggaggcaagctgctccgtctgtctcgagtacctgaaggagccagtcattatcgagtgtggtcataacttttgcaaggcctgtattacccgatggtgggaggactag

SEQ ID NO: 209715 - DNA, 786 bp, synthetic construct
  misc_feature 1..786: note = Description of Artificial Sequence: Synthetic coding sequence
  source 1..786: mol_type = other DNA
atggccgagaccagcctgctggaggccggcgccagcgccgccagcactgccgccgcccttgagaacctgcaggtggaagcctcttgctcagtttgccttgagtacctgaaggagccagtcattatcgagtgcggtcataatttctgcaaggcttgcattacacgctggtgggaagatctggaaagggacttcccatgtcctgtgtgcagaaaaacctcccggtacagatcccttcgcccgaatcgccagctgggaagtatggtggaaatcgcaaagcagttacaggctgtcaaaagaaagatccgagatgagtctctgtgtccacaacaccatgaagccctgagtctgttctgctacgaggatcaagaggctgtttgtctgatttgcgccatctcccacacacatagggcacacacagtggtgccactcgacgacgcaacccaggaatacaaagagaaacttcagaagtgtctggaacctctggagcaaaagctccaggagattacccggtgtaaaagctccgaagagaaaaagccaggagaactgaagagactggtggaatctcgccggcagcagatcctgcgcgagttcgaagaactacataggcgtttggacgaagaacagcaggtgctcctttcaagacttgaggaagaagaacaggacatcctccagaggctgcgggagaatgcagctcacctgggtgacaagcggcgggatctggcccacctggctgcggaagtggaggggaagtgtctgcagagtggcttcgagatgttgaaagtctag

SEQ ID NO: 209716 - DNA, 1467 bp, synthetic construct
  misc_feature 1..1467: note = Description of Artificial Sequence: Synthetic coding sequence
  source 1..1467: mol_type = other DNA
atggccgagaccagcctgctggaggccggcgccagcgccgccagcaccgccgctgctttggagaacctgcaggtcgaggccagttgttcagtgtgcctggagtacctgaaagaacccgtgatcattgagtgcggacataacttttgtaaggcctgcattacccgctggtgggaagatctggagagagatttcccttgccctgtatgtcggaagactagccggtacagaagcctgcggccaaatagacagctggggtcgatggttgagattgcaaaacagttgcaggctgtcaaaagaaagatcagagacgaatcactgtgcccacagcatcatgaagctctgagcttgttttgctacgaagatcaagaagccgtttgtctgatctgcgccatcagtcacacccacagggctcatacagtggtacccctggacgatgccactcaagaatacaaggagaaactacagaagtgcctcgaacctctcgagcagaagctacaagaaatcacccgatgcaagtctagcgaggagaaaaaaccaggggagctgaagcggctggttgagtcacggaggcagcagattctgagagaattcgaggaactccaccgacgcttagacgaagagcagcaggtcctcctgtctagactcgaggaggaagaacaggacattctccagaggcttcgcgagaacgctgcccatttgggcgataagcgccgcgacctagcccatctggccgccgaagttgagggcaaatgccttcaatctggtttcgaaatgctcaaggatgtcaagagcactttggagaaatgtgagaaggttaagactatggaagttacctctgtcagcatcgagctggagaagaattttagcaatttcccgaggcaatacttcgccctgcgcaaaatattgaaacagctcattgccgacgtgactttagaccccgagaccgcccaccctaacctcgtactatcagaagacagaaagtccgtgaagtttgtggaaactcggctcagagatttgcccgatacaccaaggagattcacattttacccttgtgtgctggcaacagaaggctttacctcgggcaggcactattgggaagtggaagtcggggataagacacattgggccgtgggcgtctgccgcgattccgtgagtcgcaagggagaattgacaccattgcctgagaccggatactggagagtgcgtctgtggaacggcgacaaatacgccgcaactaccacaccatttacgccccttcacatcaaagtgaaacctaaacgggttggtattttcctggactacgaagccggaacactctccttttataacgtgacagacaggagccacatttacacctttactgatacatttacagagaagttgtggcctctcttctaccctgggatcagggcggggcgcaaaaatgctgcaccactgaccattcggccccccaccgactgggagtag

SEQ ID NO: 209717 - DNA, 1557 bp, synthetic construct
  misc_feature 1..1557: note = Description of Artificial Sequence: Synthetic coding sequence
  source 1..1557: mol_type = other DNA
atggccgagaccagcctgctggaggccggcgccagcgccgccagcaccgccgccgcgctcgaaaacctgcaggtggaagccagctgttccgtgtgtctggagtatttaaaagagcctgttattattgagtgtggacataatttttgcaaggcctgcatcactcgatggtgggaggacctcgaaagggacttcccttgtccagtctgccgaaagaccagccgatatcgcagcctccgcccaaataggcagttaggatccatggtggagatcgcaaaacagctccaggccgttaaacgcaaaatacgggacgaaagtctctgccctcaacaccacgaggcactgagcctgttttgctatgaagaccaggaagcagtgtgtctcatctgtgccattagccatacacaccgcgcccataccgtggtgcccctggatgacgccactcaagagtacaaggagaaacttcaaaagtgtttagagcctctggagcaaaagctgcaggagataacgaggtgtaagagcagtgaggagaagaagccaggagagctcaagcggctggttgaatcgcggcgccagcagatcttgcgagaattcgaggagctgcatcgcaggcttgacgaggagcaacaggtcttactttcccggcttgaagaagaggaacaggacattctgcaacgcctgagagaaaatgctgcccatctgggcgataagaggagagatcttgcccatcttgccgccgaggtagagggcaagtgcttgcagtcagggtttgagatgctcaaagatgttaagtccactttagaaaaaaacattcctagaaagtttggagggagcttatcgaccatttgccctcgcgatcacaaggcgttgctggggttagttaaggagatcaacaggtgtgagaaggtgaagactatggaggtaacaagcgtctctattgaactggaaaagaatttctctaattttccccgccagtattttgcccttaggaagatactaaagcagttgatcgcagatgtaaccttagaccctgagaccgcccatcctaatttggtgctgagcgaagatcgcaaatctgtgaagtttgtggagactaggctgcgggacctgccagacacccctcggcgcttcactttttacccctgtgtgcttgccacagaaggtttcacttctgggagacactactgggaggtcgaggttggcgataaaactcactgggccgtcggggtttgtagagatagcgtcagcaggaaaggagagctcaccccgctacccgagaccgggtactggcgcgtcagactctggaacggtgataaatacgccgcaacaacgaccccctttacaccgctccacatcaaggtgaagccaaagcgcgtggggattttcctcgattacgaagccggaaccctcagtttttataatgtaactgacaggagtcatatatacacgttcacggacaccttcacagagaagctgtggcccctgttttaccctggaattcgcgcagggaggaagaatgccgcgcctttgaccatccgcccccctaccgattgggaatag

SEQ ID NO: 209718 - DNA, 1467 bp, synthetic construct
  misc_feature 1..1467: note = Description of Artificial Sequence: Synthetic coding sequence
  source 1..1467: mol_type = other DNA
atggccgagaccagcctgctggaggccggcgccagcgccgccagcaccgccgctgcactggagaatctgcaggtggaggcctcatgttcagtgtgcctggagtacctgaaagagcctgtgattatagagtgtggacataacttctgcaaagcgtgtataacacgatggtgggaagatcttgagcgtgacttcccatgcccagtctgcaggaagacatcccgttataggtccctgcggcccaacagacagctcggctcaatggtcgaaatcgcgaaacagcttcaggccgtgaaaaggaaaatcagagacgaatctttatgtcctcagcatcacgaagcactgagcttattttgctacgaagatcaggaggctgtctgccttatctgtgccataagtcacacccacagggcacatacagtggtgccattggacgatgcaactcaggaatacaaggagaagctacagaaatgtttggaacctctggagcagaaacttcaagagataacaagatgcaaaagttccgaggagaagaaaccaggagagttaaaaaggctagtggagtctagaaggcaacagatcttgcgggagttcgaagaactccaccggagactggatgaagagcaacaggttctgctgtcccggctcgaagaagaggagcaagacatcctgcagcgcctccgcgaaaacgctgcccacctgggagataaacgccgggacctggctcatctggctgcagaggttgagggtaagtgcctgcaaagtgggttcgaaatgctcaaagatgtgaagtctactctagagaaatgcgagaaggtgaaaaccatggaggtgacctcagtgagcattgagctagagaagaacttctctaacttcccaagacagtatttcgcactgaggaagatattgaaacaactcattgccgacgtgaccctagaccctgagacagcacatcccaatcttgttctttccgaagaccgcaaatctgtaaaattcgtcgagactcgcttgcgggacttgccggataccccacggcggtttacattctacccctgcgttcttgccaccgaaggtttcacttccggacggcattattgggaggtggaggtcggcgacaaaacgcattgggccgtgggtgtctgcagggatagcgtgagccgcaagggtgaactcacgcccttacccgagacaggatattggcgggtgagattatggaatggagataagtacgccgccaccacaactccatttaccccccttcacattaaagttaagcccaaacgggtggggatttttctggattacgaggcaggcactcttagcttctataatgtaactgaccgttctcacatttatacattcacggacactttcacggaaaagctgtggccactattttatcctggaataagggccggacggaagaacgcagctccactgactattagacccccaactgactgggaatag

SEQ ID NO: 209719 - DNA, 786 bp, synthetic construct
  misc_feature 1..786: note = Description of Artificial Sequence: Synthetic coding sequence
  source 1..786: mol_type = other DNA
atggccgagaccagcctgctggaggccggcgccagcgccgccagcacggcggcagccctagagaacctgcaagtggaggcatcatgttctgtatgtttagagtacctaaaagagccagtcatcatcgagtgtggccacaacttctgtaaagcatgtattaccagatggtgggaagacctggagcgcgattttccttgtcccgtgtgccgaaaaaccagcagatatagaagcctgcgtcctaacagacagcttggatcaatggtggaaattgcaaaacaactccaggccgtgaaacgcaaaattagagacgagtctctatgtcctcagcaccatgaggctctgagtttgttctgctatgaggatcaggaggccgtttgcttgatttgtgccataagccatacgcacagagcccacactgtcgtcccactggatgatgctacccaagaatacaaggaaaaactccagaaatgtttggagcctttagagcagaaattgcaggaaattacacggtgcaaaagcagtgaagagaaaaaaccaggcgagctgaagagacttgttgagtcaagacgtcaacagattttacgcgaattcgaggagctacataggcgccttgatgaagaacagcaagtcctgttaagcaggctggaggaggaggaacaagacatccttcagagactacgtgaaaatgcagctcacctaggggataagagacgtgatcttgcacatctggccgcagaggtggagggcaagtgcctgcagtcaggctttgagatgctgaaggtgtag

SEQ ID NO: 209720 - DNA, 225 bp, synthetic construct
  misc_feature 1..225: note = Description of Artificial Sequence: Synthetic coding sequence
  source 1..225: mol_type = other DNA
atggccgagaccagcctgctggaggccggcgccagcgccgccagcaccgccgcggccctggaaaatttacaagtggaggcgtcttgcagtgtgtgtctggagtacttgaaggaaccagtgataatcgagtgtggacataatttttgtaaggcttgcattacaaggtggtgggaggacctcgagagagactttccatgtcccgtgtgccggaagactagtcgctag

SEQ ID NO: 209721 - DNA, 1236 bp, synthetic construct
  misc_feature 1..1236: note = Description of Artificial Sequence: Synthetic coding sequence
  source 1..1236: mol_type = other DNA
atggccgagaccagcctgctggaggccggcgccagcgccgccagcactgccgccgccctggagaacctgcaggtagaggcctcttgtagtgtgtgccttgaatatctgaaagaaccagttataatagaatgcgggcataatttctgcaaagcctgcataacacgctggtgggaggatctggaacgagatttcccttgcccagtatgcaggaaaacttctcggtatagatctctgagaccaaaccgccaactagggtcaatggttgaaatagccaagcagctccaagccgttaaaagaaaaataagagacgaatcgctatgcccgcagcatcatgaagcactgtccctattctgttacgaagatcaggaggcagtgtgtttaatctgtgctatcagccacacacaccgtgcccacacagtagtaccactggacgatgccacccaggaatataaggaaaagctgcagaaatgtttggaacctctggaacaaaagctgcaggagatcaccagatgcaagtcttctgaagaaaagaagccaggggaactcaaaaggctggtggaaagcaggaggcagcagattctcagagaatttgaggaactccataggcgtttagacgaggaacagcaagttcttcttagtaggctagaagaggaggaacaagatattttacagaggctgagagagaacgctgcgcacctgggtgataagagacgggatctggctcaccttgcagccgaagtcgaaggaaagtgtttacagtctggctttgaaatgctcaagcccgtcctatctgcacgcgaggaatgcgagaaagtgaagactatggaggtgacttctgtatccatcgaactcgagaagaattttagcaactttccgaggcagtacttcgccctccgaaaaatcctcaaacaactcatagcggatgtgacgctagatccagagaccgctcacccaaatttggttctttcggaggaccggaaatctgtgaagtttgtcgagacccgtctacgcgacttgccagacacgcctcggagattcactttctacccctgtgtcctggcaacagagggcttcacttcaggccggcactactgggaggttgaagtcggggacaagactcactgggctgtgggcgtgtgtcgggactccgtgagcaggaaggggggctgtggatatggcatgggcacaaatatgcagcctccccctcacttattgccgctgtgtacatctcggtag

SEQ ID NO: 209722 - DNA, 1467 bp, synthetic construct
  misc_feature 1..1467: note = Description of Artificial Sequence: Synthetic coding sequence
  source 1..1467: mol_type = other DNA
atggccgagaccagcctgctggaggccggcgccagcgccgccagcacagcagcagcgctcgaaaatctacaagtagaggcatcctgcagcgtgtgcttagaatatcttaaagagccggtgatcatcgaatgcgggcataacttttgcaaagcttgtatcactcgatggtgggaggatttggaaagagacttcccttgccccgtgtgccgtaaaacgtcacgatacaggtccctcagaccaaacaggcaactgggctcaatggtcgaaatcgccaagcaattacaggctgtgaagaggaaaatccgcgacgagagcttgtgtcctcaacatcacgaggctctgtcactgttctgttacgaggatcaggaagccgtatgtctaatatgcgccatctcacatacacatagggcccacaccgtggtgcctctggatgatgcaacacaagaatacaaggagaagctgcaaaaatgcctggaacctctggagcagaaactgcaagaaattacccgatgcaagagctctgaggaaaaaaagcccggggagctgaaacgcctggtggagtcacgtaggcagcagatcctgagagagttcgaagaacttcaccgccggctagacgaagagcaacaggtactgctgagccgactggaggaggaggagcaggacattctccagagactacgagagaatgccgctcatctcggagataaacgacgagacctggctcacctagccgcagaagtggagggaaagtgtctacagtcaggcttcgagatgttaaaagacgttaagtctactctggagaaatgcgaaaaagtgaaaactatggaggtcacctccgtgagtatcgagctagaaaaaaacttctctaacttcccacggcagtacttcgccctccggaagatactgaaacaactgattgctgacgtgacactcgaccctgagactgcgcatccaaacctggtgttgagcgaggacaggaaatctgtcaaatttgtagagacacgcttacgcgacctcccagatacaccgaggagatttaccttctatccctgcgtcttggctacggagggctttacttccggccgccattattgggaggtggaggttggggataagacacattgggcagtgggcgtttgtagagattccgtgtctaggaagggtgaattaacacctctccctgagactgggtactggcgcgtcaggctttggaatggcgacaagtacgccgccaccaccaccccatttacccccctgcacatcaaagtcaagcccaagcgggtgggcatctttctggattacgaagccggcacattatcattttacaatgtgaccgaccggagccacatttatacatttactgacaccttcacagagaagctgtggcctctgttctatcctgggattcgcgccggtagaaaaaatgcggccccccttacaatcagaccccctactgattgggagtag

SEQ ID NO: 209723 - DNA, 786 bp, synthetic construct
  misc_feature 1..786: note = Description of Artificial Sequence: Synthetic coding sequence
  source 1..786: mol_type = other DNA
atggccgagaccagcctgctggaggccggcgccagcgccgccagcacggcagccgctctggagaatttgcaggtggaggcatcttgttctgtgtgcttggagtacctaaaggagccggttatcatagaatgtgggcacaacttctgtaaggcatgtataactcgttggtgggaagacctagagcgcgacttcccatgcccggtctgtaggaagaccagtcggtatcgctctctccgccctaatcggcaattaggcagcatggtggaaatcgctaagcagcttcaggctgtgaaaagaaagattcgggatgagagcctctgtccacaacatcacgaggctctttcactattttgctatgaggaccaagaggcagtatgcctgatctgtgccatcagccatacgcaccgcgcccatacggtcgttccactcgatgacgccacgcaggaatacaaggagaagctacagaagtgtctggagcctcttgaacagaaactgcaggaaattacgagatgcaaatcttctgaagaaaaaaagcctggggaattgaaaagactagttgagagccggaggcagcaaattctgagagagtttgaagagctgcaccggcgtttggatgaggaacaacaagtgctgctaagcaggctcgaggaagaggaacaggatattctgcagcggctacgggagaatgctgcgcatctcggcgacaagcggagagaccttgcccatctagcggcagaagtagagggaaaatgcctacagagcggttttgaaatgcttaaggtgtag

SEQ ID NO: 209724 - DNA, 147 bp, synthetic construct
  misc_feature 1..147: note = Description of Artificial Sequence: Synthetic coding sequence
  source 1..147: mol_type = other DNA
atggccgagaccagcctgctggaggccggcgccagcgccgccagcacggccgctgcactggaaaacctgcaggtggaggcttcatgcagcgtgtgcctggaatatctgaaagagccagttatcatagaatgtggacataacttttag

SEQ ID NO: 209725 - DNA, 786 bp, synthetic construct
  misc_feature 1..786: note = Description of Artificial Sequence: Synthetic coding sequence
  source 1..786: mol_type = other DNA
atggccgagaccagcctgctggaggccggcgccagcgccgccagcacagccgcagcactggagaacttgcaggttgaagcatcttgctctgtttgcctggagtacttgaaagagcccgtgatcattgagtgcggccataatttttgcaaggcctgtatcacccggtggtgggaagacctggagagggacttcccatgtcccgtgtgtagaaagacctcgagatatcggtcactcaggccaaatcgccaactggggtctatggtggaaatcgcgaaacagctgcaggctgttaagcgcaagatcagagacgaatcactctgcccccagcaccacgaggccttgagcctgttctgttacgaggatcaggaggctgtgtgtttaatctgcgcaatctctcatacgcatagggcccacactgttgtgccactggacgatgccacacaggaatataaagagaaactccaaaagtgtttggagccgctcgagcagaagctgcaggagatcacccgatgtaagtcaagcgaagagaaaaagcccggcgagctgaagcgcttggtagagagtcggcggcagcaaatactccgggaatttgaagaattgcatagaaggctagacgaggaacaacaggtgctgctgagcaggcttgaggaggaggagcaggatatccttcagaggttgagagagaacgccgcccatctcggcgacaaacgaagagatctggcccaccttgctgccgaggtcgagggaaaatgcctgcagtcagggtttgaaatgttgaaggtatag

SEQ ID NO: 209726 - DNA, 1467 bp, synthetic construct
  misc_feature 1..1467: note = Description of Artificial Sequence: Synthetic coding sequence
  source 1..1467: mol_type = other DNA
atggccgagaccagcctgctggaggccggcgccagcgccgccagcactgctgccgccctggagaacctgcaggtggaggccagttgttccgtatgtttggaatacttgaaagagcccgtcataattgagtgtggtcataatttctgcaaggcatgcatcacccgctggtgggaggatctggaacgcgattttccctgccccgtttgccggaagacaagccgctatcggtcgcttagacctaacaggcaactgggaagcatggtggaaatcgctaagcagttacaagccgtaaagagaaagattcgagatgagagcctgtgtcctcagcatcatgaggcccttagcctgttttgctatgaggatcaggaggccgtgtgcctcatctgtgcaatatctcacacacaccgcgcccataccgttgtccctctcgatgatgccacacaggaatataaggagaaactccagaaatgcctggaaccactggaacaaaagctgcaggaaataactaggtgcaaatcctccgaagagaagaaacctggggagctgaagcgtttggttgagtcacggcgtcagcaaatcctgcgcgaatttgaagagctccacaggcggctcgatgaggagcagcaagtgctgctctcacgactggaagaggaggagcaggatattctgcaacgcctgagggaaaatgcagcccatctgggtgataagcgtcgagatttggcacacctggccgctgaggttgagggcaagtgcctgcagtctggattcgaaatgctcaaggatgtaaaaagtactttggaaaaatgtgagaaggtgaagaccatggaggtgacaagtgtgagtatcgagttggagaagaacttcagcaacttcccacgccagtactttgcgctgagaaagatcctgaagcaactcatagccgatgtgacgttggaccccgaaaccgcccatccaaatctagtgctttcagaagatagaaagtccgtgaagttcgtggaaactcggctgagggatctgccagacaccccacgcagattcacgttctatccatgcgtgctcgcgactgagggtttcacgtccgggcgacactactgggaagttgaagtcggcgacaaaacacattgggctgtgggtgtgtgcagggactccgtttctcgcaagggtgaactgacccctctgccagagaccgggtattggagggtacggctgtggaatggtgacaaatatgccgctaccaccactccgttcacacctctacacattaaggttaagccaaagcgtgtgggtattttcctagattacgaggctgggactctgtctttttataatgtgaccgatagatcacatatttacacgttcactgacacatttaccgagaagctatggcctctgttttaccctggaatcagggccgggcgcaagaatgctgccccactgacaatcagacctccaaccgactgggaatag

SEQ ID NO: 209727 - DNA, 225 bp, synthetic construct
  misc_feature 1..225: note = Description of Artificial Sequence: Synthetic coding sequence
  source 1..225: mol_type = other DNA
atggccgagaccagcctgctggaggccggcgccagcgccgccagcaccgctgcagcactcgagaatctccaggttgaggccagctgcagtgtttgcctcgaatacctcaaagagcccgtaatcatagagtgcggacacaacttctgtaaggcttgcatcactcgctggtgggaagacctagaacgagatttcccttgtccagtctgcagaaagacaagcaggtag

SEQ ID NO: 209728 - DNA, 1467 bp, synthetic construct
  misc_feature 1..1467: note = Description of Artificial Sequence: Synthetic coding sequence
  source 1..1467: mol_type = other DNA
atggccgagaccagcctgctggaggccggcgccagcgccgccagcacagcggcggcacttgagaaccttcaagtagaggcaagctgttccgtttgcttagagtacctcaaggaacccgtgattatcgagtgtggacacaacttctgtaaagcttgtattacgagatggtgggaagacttggaaagagactttccttgcccagtctgcaggaagacctctcgctaccgcagtttgcgccccaataggcagctgggcagtatggtcgagattgcgaaacaactgcaggcagtgaagagaaagattcgcgacgagtcattatgcccacagcatcatgaagccttgtcccttttttgctatgaggatcaggaagcggtatgtctgatttgcgccatttctcatactcacagggctcataccgtggtccctcttgacgacgccacccaagagtataaggagaagctccagaagtgtctggaaccactggagcagaaacttcaggagataacacggtgtaagagtagtgaagagaagaagcccggtgaactgaaacgtctggtagagtctcgcagacagcagatcctgagggaattcgaggagcttcatcgccggctggacgaggagcagcaagtactccttagccgcctggaggaggaagaacaggatatcttacagcgcctgcgagaaaatgcagctcacctcggcgataaacgccgcgatttggcacacctcgcggcagaagtagagggcaagtgtttgcagagtggcttcgaaatgctcaaagatgtgaagtccactctcgagaagtgcgagaaagtgaagacaatggaagtgacatcagtcagcattgagttggaaaagaacttttcaaatttccctaggcagtactttgcccttcggaagattctgaaacaacttattgccgacgttactttagacccagaaaccgcccaccccaacctcgtcctgtctgaagatagaaagagcgtaaagtttgtggagactagactccgagacctgcctgataccccccgccgcttcaccttttacccctgtgtacttgccaccgagggttttacaagcggccgacattactgggaggtggaggtcggcgataaaacgcattgggctgtgggggtgtgccgggattctgtctctcgaaagggagagctaactcccctgcccgagacaggttactggagggtgaggctttggaatggagacaagtatgccgcaaccaccaccccgtttactcccctgcatataaaggtgaaacctaaaagggttgggatctttcttgactatgaggccggcacactgtctttctacaacgtcacagaccggtcccatatctataccttcactgacactttcacagagaagctttggcctttgttctatcctggcatccgggccggaaggaaaaacgccgcccccctgacaatccggcctccaactgactgggaatag

SEQ ID NO: 209729 - DNA, 1557 bp, synthetic construct
  misc_feature 1..1557: note = Description of Artificial Sequence: Synthetic coding sequence
  source 1..1557: mol_type = other DNA
atggccgagaccagcctgctggaggccggcgccagcgccgccagcaccgctgccgccctcgagaacctgcaggtggaggccagctgctcagtgtgcctggagtacctgaaagagcccgtgatcattgagtgcggacataatttttgtaaggcatgtattaccagatggtgggaagacctggagagagattttccttgtccggtgtgtcgcaagacaagcagatatcgaagcttgagacctaataggcagctcgggagcatggtggagatcgctaaacagcttcaagccgtgaaacgcaaaattagggatgagagtctctgcccgcagcatcacgaagctctgagcctcttttgctacgaggaccaggaggcggtgtgtttaatctgcgctatctcacatacacaccgggctcacacagtcgtgccactagatgacgccacgcaggaatacaaggagaaattacagaagtgtttggagccactcgagcagaagctgcaagaaatcactagatgtaagtccagcgaggagaagaaaccaggtgagttgaaaaggttagtggaaagccggagacaacagatcctcagagagttcgaggagctgcacagacgccttgacgaggaacagcaagtccttttgagtcgcttggaggaggaggaacaggacatcctgcagagactgagagagaacgccgcccatcttggcgataaacgccgtgatctcgcacacctagctgcggaagttgagggcaagtgcctgcagtctgggtttgagatgctgaaggatgtcaagtccactctcgagaaaaacattccacgaaaattcggcggctcgctttctaccatctgcccaagggaccataaagccctgcttggtctggtcaaagagatcaaccgctgcgagaaagtaaaaacaatggaagttacaagcgtcagtatagagttagagaagaatttctcaaacttccctaggcagtacttcgctttaagaaagatcctgaaacagttgatcgccgatgtaactctggatccggaaactgcccaccctaacctcgtcctgtcagaggatcggaaatcggtcaagtttgtcgagacccgcctcagggacctgcctgacacacctaggaggttcaccttttacccgtgtgtgctggcgacagagggatttacaagtggccgtcactattgggaggtagaagtcggagataagacacactgggctgtgggtgtttgccgggattccgtgtctcggaagggcgagcttacaccactgcccgagacagggtattggagggtgcgcctgtggaatggggacaagtacgccgcgactaccacccccttcacacctctgcacattaaagtgaagcccaagagagtgggcatcttcttggactatgaggcaggaacgctaagcttctacaatgtgaccgaccggtctcacatttacacgtttactgatacattcactgaaaagctctggcctctgttctacccagggatccgggcgggtaggaagaatgcagccccactcacaatccggccgcctacagactgggagtag

SEQ ID NO: 209730 - DNA, 1467 bp, synthetic construct
  misc_feature 1..1467: note = Description of Artificial Sequence: Synthetic coding sequence
  source 1..1467: mol_type = other DNA
atggccgagaccagcctgctggaggccggcgccagcgccgccagcacagccgcagcccttgagaaccttcaggtcgaggcaagctgctcagtgtgcctcgagtaccttaaagaaccagtgattatcgaatgtggccataatttttgtaaggcctgtattacaagatggtgggaagacctagagagagacttcccgtgccctgtgtgcaggaaaacctctagataccgctcacttaggccaaatcgccagttaggttctatggtggagatagcaaagcagctgcaggctgtgaagcgtaaaatcagggacgagtccctctgtccccagcaccacgaggctttgtccctcttctgctacgaggaccaggaagcagtttgtctgatctgcgccatctcccacacacatcgggcccatactgtagtgccactcgatgacgccactcaggagtacaaggagaaactgcagaagtgccttgagccgttagaacagaaattgcaggaaatcacacgctgtaagagttctgaggagaagaagccgggtgagctcaaaaggttagtcgagtcccgacgccaacagatcctgagagagttcgaggagttacaccggagactagatgaggagcaacaggtgctgctgtcccgtctcgaggaggaagagcaggacatcttgcaaaggttgagggagaacgccgcgcacctgggggacaaaagacgtgatcttgcgcacttggctgccgaggtggagggcaagtgcttgcagtcgggcttcgaaatgcttaaggacgtgaagtctactttggagaaatgcgagaaggttaaaactatggaagtgacgagcgtaagcattgaattagagaagaacttttcaaacttcccccgccaatattttgcactgcgcaagattctcaaacagcttatcgctgacgtcactctggacccggaaacagctcatccgaacttggtgctgagcgaagaccgcaaatccgtcaagttcgtggaaaccagactgcgggaccttcccgacacaccgaggagattcaccttttatccctgtgttctggctaccgaaggatttacttctggacggcactattgggaggtcgaagttggagataaaactcattgggctgtaggggtgtgcagagatagtgtcagccggaagggtgagctgaccccactcccagagactggatactggagagtgcggctgtggaatggcgacaaatatgcggcaacaaccaccccattcacacccctgcacattaaggtgaaacccaaacgcgtgggcattttcctggattatgaagccggcacactctccttttacaatgtcaccgacagaagtcacatttacaccttcacggacacttttacggagaaattatggccactcttctaccctggcattcgcgctggcagaaaaaacgctgctcccttgacaatcagaccacctaccgactgggagtag

SEQ ID NO: 209731 - DNA, 435 bp, synthetic construct
  misc_feature 1..435: note = Description of Artificial Sequence: Synthetic coding sequence
  source 1..435: mol_type = other DNA
atggccgagaccagcctgctggaggccggcgccagcgccgccagcacagcggcagcgctggaaaacctacaggtcgaggcctcctgttccgtgtgcctggaataccttaaagaacccgtaatcattgagtgcgggcacaatttctgtaaggcgtgcatcactcggtggtgggaggacttggaacgggacttcccgtgccctgtgtgtagaaagacttcgcggtaccggagcctgagaccaaatagacagcttggctctatggtagaaatcgcgaagcaacttcaagccgtgaaacgcaagatacgcgacgaaagtttatgccctcagcatcacgaagccctgtcgctgttttgctacgaagatcaggaggccgtgtgtctcatttgtgcaatctctcatacacaccgtgcacacaccgtggtgcctctcgattag

SEQ ID NO: 209732 - DNA, 435 bp, synthetic construct
  misc_feature 1..435: note = Description of Artificial Sequence: Synthetic coding sequence
  source 1..435: mol_type = other DNA
atggccgagaccagcctgctggaggccggcgccagcgccgccagcactgccgcagccctcgaaaacctgcaggttgaggccagctgcagcgtgtgcctggagtacctaaaagagccagtaatcatcgaatgcggccataatttttgcaaagcctgcattacgcggtggtgggaggatctagagcgggacttcccctgccccgtgtgtaggaagacgtcacggtataggagtctaagacctaacagacaactggggtctatggtggaaatcgccaaacagctgcaagccgtgaaaagaaaaattcgcgacgagagcctctgccctcaacaccacgaggccctgagccttttctgctatgaagatcaggaagctgtatgtctgatttgtgcaatcagtcatacccaccgggctcacacggtcgtcccactggactag

SEQ ID NO: 209733 - DNA, 684 bp, synthetic construct
  misc_feature 1..684: note = Description of Artificial Sequence: Synthetic coding sequence
  source 1..684: mol_type = other DNA
tgaaccagccggtaccggagcctgcggcccaaccggcagctgggcagcatggtggaaatagctaaacagcttcaggccgtgaagcgcaagatcagggatgagtcactgtgcccacagcatcacgaagctctgagcctgttttgttacgaggatcaggaagcagtttgcctgatttgcgctatttcacatacacacagggctcatactgtggtgccacttgatgatgctacacaagaatacaaagagaagctacagaagtgcctagagcccctggagcagaagctccaggaaataacacgctgcaaatctagcgaagagaagaagccaggggagctcaagagactagtcgagagccgccgccagcaaattcttcgcgagtttgaagaactgcatagacgcctggatgaggagcagcaggtcctgttatcgcggctcgaagaggaagaacaggacattctgcagagacttcgcgagaatgcagctcacttgggggacaaacgtcgggatctggctcacctcgcagcagaagtggagggtaaatgtctccagtcagggttcgagatgctcaaagacgtgaagtccacactcgagaagtgcgagaaagtcaagaccatggaagtgacatctactaccccttgcacatctctgcattctgaaattaatgataatgtccgtggacggtag

SEQ ID NO: 209734 - DNA, 147 bp, synthetic construct
  misc_feature 1..147: note = Description of Artificial Sequence: Synthetic coding sequence
  source 1..147: mol_type = other DNA
atggccgagaccagcctgctggaggccggcgccagcgccgccagcacggcggctgcactcgagaatctgcaggttgaagcctcttgttccgtgtgcttggaatatttgaaagagcctgtgattatcgagtgcggccacaacttctag

SEQ ID NO: 209735 - DNA, 435 bp, synthetic construct
  misc_feature 1..435: note = Description of Artificial Sequence: Synthetic coding sequence
  source 1..435: mol_type = other DNA
atggccgagaccagcctgctggaggccggcgccagcgccgccagcacagccgccgcactggaaaacttacaggtcgaagcttcttgttctgtttgtctcgaatacctgaaagagcccgtgattatcgagtgtggacacaacttttgtaaagcatgcatcacaagatggtgggaagaccttgagcgggacttcccctgccctgtttgtcggaaaacctccagataccgatcactgaggcccaacagacagctgggatccatggtcgagatcgccaagcagttacaggcagtcaagaggaaaatccgggacgagagcctctgcccgcagcatcacgaggctcttagcttgttctgttatgaagatcaggaggccgtctgcttgatctgcgccattagccacactcaccgtgcacatactgttgtgccactcgactag

SEQ ID NO: 209736 - DNA, 1467 bp, synthetic construct
  misc_feature 1..1467: note = Description of Artificial Sequence: Synthetic coding sequence
  source 1..1467: mol_type = other DNA
atggccgagaccagcctgctggaggccggcgccagcgccgccagcactgctgctgctctggaaaacctgcaggttgaagcttcgtgttctgtctgcctcgagtacctgaaagaacctgtgatcatcgagtgcggccataatttctgtaaagcttgtattacaaggtggtgggaggacctcgaacgcgattttccgtgccctgtgtgtaggaagacctccagatataggtccctccggccaaatagacagcttggctcgatggtcgaaattgccaagcaactccaggctgtcaaacgcaaaataagagatgagtctctgtgtccacaacaccacgaggcactgagtctcttctgttatgaagatcaggaggccgtctgcctgatctgcgctatttcacatactcatcgggcacacacagtagtccccctagacgacgccacccaggagtacaaggagaaattgcagaaatgcctcgagcctcttgaacaaaagcttcaggaaataacacggtgcaaatcatccgaagaaaagaagccaggtgagttaaagcgtctggtcgaatcgcgtcgacagcagatactccgagagtttgaagaactgcatagaagactggacgaagagcaacaggtgctgctgagtagactggaagaagaagagcaggacattctgcagcgcctgagagaaaatgctgctcacttaggcgataagcgccgcgacctagcgcacttggcagccgaggtggaggggaagtgcctgcaatctggctttgagatgctgaaggatgtgaaatccacccttgaaaagtgcgaaaaggtgaagactatggaagttacatcagtgagtattgaacttgagaaaaacttttccaacttcccccgacagtactttgctctgagaaaaattctcaagcagttaattgcagacgttacacttgatccggaaactgcccaccctaacctcgtgctgagtgaggatcgaaagtccgtcaagttcgtggagacccgactgcgggacctgcccgacacaccaaggaggttcacattttatccctgtgttctagccacggaaggtttcactagcgggcgccattattgggaggtcgaggtgggggacaaaacacattgggcggttggcgtgtgccgtgattccgtcagccgcaaaggcgagttaactccattgccagagaccgggtactggcgtgttagattatggaacggtgacaagtatgccgcaactactaccccttttacaccactgcacatcaaagtgaagcccaagagggtagggatcttcctcgattatgaagcagggacactgagcttctacaatgtgaccgacagaagtcacatatacacatttactgacaccttcaccgagaagttgtggcccctgttttacccgggtatccgggctgggcgaaagaacgcagctcctctgaccatccgccccccaacagactgggagtag

SEQ ID NO: 209737 - DNA, 1467 bp, synthetic construct
  misc_feature 1..1467: note = Description of Artificial Sequence: Synthetic coding sequence
  source 1..1467: mol_type = other DNA
atggccgagaccagcctgctggaggccggcgccagcgccgccagcaccgccgctgctttagaaaatcttcaagttgaggcctcatgctccgtgtgtctggagtatctgaaggaaccggtgatcattgagtgtggccataatttttgtaaggcatgtatcacccgctggtgggaggacctcgaaagggacttcccttgccctgtgtgcaggaagacatctaggtatcggtccttgcgaccaaaccgacagctcggatctatggtggaaatagccaagcagctgcaagcagtgaagaggaagataagggacgagtcgctgtgtccccagcatcacgaggcactgtcactcttctgctacgaggatcaagaggcggtgtgcctgatatgtgctatctcccacacccatcgtgctcatactgtggtgcctctggatgacgctacgcaggagtataaagagaagcttcaaaagtgcttggaacctctggaacagaaactgcaagaaatcaccagatgtaaatcaagcgaagaaaaaaaacctggggagctgaagagactggtggagtctaggagacagcagatcctgcgggagttcgaagaacttcataggcgcctggacgaagagcagcaggttcttctgagccggctcgaggaggaagagcaagacattcttcagcgtttgcgggaaaatgctgcccacctgggagataagcggcgggatctggcacacttggccgccgaggtcgagggaaaatgtcttcaaagtgggtttgaaatgttgaagccagtgttgtctgcacgcgaggagtgtgagaaggtcaaaactatggaagtgacctcagtctctattgagctcgagaagaacttcagcaactttccgagacagtacttcgctctgcgcaagatcttaaagcagctgatcgctgacgtgaccctcgatccagaaacagcccatcctaatttagtattgtctgaggaccgcaaatcagtcaaatttgtggagactagacttcgggacttaccagatacccctcggaggttcacgttttacccctgtgtgttagccacagaggggtttacatctgggagacactactgggaagtggaggtgggcgacaaaactcactgggccgtaggcgtttgccgggacagtgtgtccagaaaaggagagctcacacccctgcctgaaacaggatactggagagttagattgtggaacggcgataagtatgccgccactacaactcctttcacccccctgcacataaaggttaagcccaaacgggtcggaatatttttggattacgaagccggaacactcagtttctataacgtgacggaccgttctcacatctatacttttacagatacctttactgagaagctttggcctttattctaccctgggatccgtgctggccgtaagaacgccgctccactaaccatcaggcccccaacagattgggagtag

SEQ ID NO: 209738 - DNA, 1557 bp, synthetic construct
  misc_feature 1..1557: note = Description of Artificial Sequence: Synthetic coding sequence
  source 1..1557: mol_type = other DNA
atggccgagaccagcctgctggaggccggcgccagcgccgccagcacggcggccgctctggaaaacctgcaggtggaagcttcctgcagtgtttgcctggagtatttgaaggagccagtgatcatcgagtgcggccataacttttgcaaggcctgcattactcgttggtgggaagatttggaacgcgactttccttgccctgtgtgtagaaaaactagccgctacagaagtcttaggccgaatcgccagctgggatctatggtagagatagccaaacaactgcaggctgtgaaaaggaagattagggacgagtccctgtgcccccagcatcatgaagccctgtcgctgttctgctatgaggaccaagaagcagtgtgcctgatatgtgctattagccacacacaccgcgctcacacagtggtaccattagacgatgccacacaggagtacaaggagaagttgcagaagtgcttagagcctctcgagcaaaagctgcaggaaatcaccagatgtaagtctagcgaagaaaagaaaccgggcgagcttaaacgattggtcgaaagccggcggcagcaaattcttcgggaatttgaagagctccatcggaggctggatgaagagcaacaggtccttttaagccgcctcgaagaggaggagcaagacatcctccagcgactcagagagaacgctgcacacctgggcgacaaacggcgagatttggcccatttggctgctgaagtggagggtaagtgcttacagtccgggtttgagatgctgaaacccgtgctcagcgcacgagagaagaatatcccccgcaagttcggcggaagcctgtctacaatttgcccccgcgaccacaaggcactgttgggtctggtaaaggaaatcaatcggtgcgagaaggtaaaaacaatggaagtgacttcagtgtccattgagctcgaaaaaaacttttcgaattttccgaggcagtacttcgccctgcggaagatactcaagcaactgatagctgacgttaccttagatccggagaccgcccacccaaatttggttttgagcgaagatcggaagtctgtgaagtttgttgaaacccgactgcgcgacttgcctgatacaccccgacgatttaccttctacccatgcgtactggccactgaaggcttcactagcgggaggcactactgggaggtggaagtgggtgacaagactcattgggccgtgggggtctgccgcgattccgtatcccgcaagggagaactgactccattgcccgagacagggtactggcgagtccggctttggaacggtgacaagtatgctgcaactaccacgccctttacccccctgcacatcaaagtgaaacccaagcgcgttggtatcttcctcgactacgaagcagggaccctctccttttataatgtgaccgataggtcacacatttacaccttcaccgacaccttcacagagaaactctggccgctgttctacccaggaatcagagccgggaggaaaaatgcggcccccctcaccattcgaccaccgacagactgggaatag

SEQ ID NO: 209739 - DNA, 1236 bp, synthetic construct
  misc_feature 1..1236: note = Description of Artificial Sequence: Synthetic coding sequence
  source 1..1236: mol_type = other DNA
atggccgagaccagcctgctggaggccggcgccagcgccgccagcacagcagccgccttagagaacctgcaggtagaggccagttgctccgtatgcctggagtacttgaaagagccagtgataatcgagtgtggtcataacttttgcaaagcttgtattacccggtggtgggaggatcttgagcgcgattttccgtgccccgtctgccggaagacatcaaggtatcgttcactacgtcctaatcgacagctgggatccatggtggaaatcgccaagcagttgcaggcagtgaagagaaaaatccgagatgagagcctgtgtccccagcaccatgaagctctgtctctgttctgttatgaggaccaggaagcagtttgtctgatttgcgccatcagccatacacatagagcccacactgtcgtccccctggacgacgctacccaggagtataaagaaaagctgcagaagtgcttggagcctttggagcagaagcttcaggaaatcacaagatgcaagagctcagaagagaaaaaacctggggagctaaaacgcctcgttgagtctcgcaggcagcaaatcttaagagagttcgaggaactgcataggagattagatgaagaacaacaggttctactgtcccgccttgaagaagaggagcaggacattctgcagcggcttcgggagaacgcagcgcacctgggagataagaggcgggatcttgcacacctcgctgccgaagtggagggaaagtgcctacagagcggatttgagatgctgaaaccagtcctctctgcccgggaggagtgcgaaaaggtcaagaccatggaagtgacatccgtatccattgaactggaaaaaaatttctctaacttccctcgtcagtattttgctctcaggaaaatcctaaaacagctcattgctgacgtgacactcgatccggagacggctcatccgaacctggtactttcagaggatcgaaagagcgtgaaatttgtcgagacaaggttacgcgatctccctgacaccccaaggcgattcaccttctatccttgtgtgctggccacagagggatttacgagtggaagacactattgggaagttgaggttggggataaaactcactgggccgtaggtgtgtgcagggactcggtctcacggaaggggggttgcggctacggtatgggaacgaacatgcagcccccccctcatttattgccactgtgcacctcaaggtag

SEQ ID NO: 209740 - DNA, 1557 bp, synthetic construct
  misc_feature 1..1557: note = Description of Artificial Sequence: Synthetic coding sequence
  source 1..1557: mol_type = other DNA
atggccgagaccagcctgctggaggccggcgccagcgccgccagcactgccgccgctctggaaaacctccaagttgaagcatcttgctcagtatgcctcgagtacttaaaagaacccgtgattatcgaatgcggacacaatttctgtaaggcctgtattacccgctggtgggaagatttggagcgagacttcccatgccctgtgtgccgaaagacttccaggtaccgttctctaaggcccaacagacagctcggctccatggtcgagattgccaaacagctgcaagccgtaaagaggaagatccgagatgagtcactgtgcccccaacaccatgaggcattgtcactcttttgttacgaggaccaggaggcagtttgcttgatttgcgctattagccatactcatcgagcccacacagtggtgcccctcgatgatgctacccaggaatataaagagaaactccaaaaatgtctggagcctttggagcaaaaactccaggagattacacgctgcaaatccagtgaggagaagaagcccggcgaactgaaaagactggtggagagtaggcgtcagcagatcctccgtgagttcgaagagttacaccgaaggctggatgaggagcagcaagtgctgctgagccgactcgaggaagaagaacaggacattctccagcgactgcgggagaacgctgcgcacctaggtgataaacgcagagatctggcccacctagccgccgaagttgagggcaaatgtctgcagtccggatttgagatgttgaagccagtgctctcagccagagagaaaaatatcccacgaaaattcggaggttccctgtccactatttgtccgagagatcataaagctctgctcgggctggtcaaagaaataaatcggtgtgagaaagttaagactatggaggtaacctccgtcagcattgaactggagaagaacttcagcaacttccccagacagtattttgctctcaggaaaattctcaaacagttgattgctgacgttaccctcgacccagagaccgctcatcctaatctggtcttaagcgaggatcgaaagtctgtaaagttcgttgagacccgcctcagggatttgcctgatactcccagacggttcactttttacccctgcgtactggccacagaggggttcacgagtggtagacactattgggaggtagaggtgggcgacaagactcactgggcggtcggagtgtgtcgcgactccgtcagtaggaagggcgagctgacgcctctacctgaaacaggctattggagagtgagactgtggaacggcgataaatatgcggccactacaacaccattcacacccttacatataaaggtgaagccaaagagagtcggcatctttctcgactacgaggcaggcacgttgtcattctacaatgttaccgatcgctcacatatttacactttcactgatacattcaccgaaaaactttggcctcttttctacccagggattcgggcggggcgcaagaatgccgctcctttaaccataaggcctcccactgactgggagtag

SEQ ID NO: 209741 - DNA, 1467 bp, synthetic construct
  misc_feature 1..1467: note = Description of Artificial Sequence: Synthetic coding sequence
  source 1..1467: mol_type = other DNA
atggccgagaccagcctgctggaggccggcgccagcgccgccagcaccgcggccgcccttgagaatctacaggtggaagcctcgtgcagtgtttgcctcgaataccttaaggaacctgtcattatcgaatgtggacacaacttctgtaaggcttgcattacccgatggtgggaggacctggagcgggatttcccttgccccgtgtgtcggaagaccagcagatacaggtcccttaggccgaataggcagctaggttctatggttgaaattgcaaagcagctccaagcggttaaaaggaagattcgagacgaatctttgtgtcctcagcaccacgaggcgctgagtctgttttgctacgaagaccaggaggctgtgtgtctgatttgcgctatcagccatactcatagggcgcacaccgtagtgccactggacgacgcaactcaggaatacaaagagaaactgcagaagtgtctggagcctttggagcaaaagttacaggagatcactcgctgtaaaagtagcgaagaaaaaaagcctggcgagctaaagagactggtggagagcaggagacagcagatcctgagggaattcgaagagctccaccggaggctggatgaagagcagcaggtgctgttatccagactcgaggaggaggagcaagacattctgcagcggcttagggagaacgcagcacacctcggagacaagcgaagagatctggcccacctcgcggccgaggtagaaggaaagtgcctgcagtcaggattcgaaatgctgaagcccgtgttaagcgcccgagaagagtgtgaaaaagtcaagacaatggaggtcactagtgtctccatcgagttagagaaaaatttctccaattttccccggcagtattttgctctgcgcaagatcctgaagcagctgatagcggacgttacactcgacccagaaacggcgcaccccaaccttgtcctcagtgaggatcgcaagagcgtgaaatttgtggaaactaggcttcgagacttgcctgacacccctcggcggtttacattctatccgtgcgtactggcaacagagggctttacgtccggaagacactattgggaggtggaggtcggtgacaaaacacactgggctgtcggggtctgccgggatagcgtgtcacgcaaaggagagcttaccccgctccccgaaacggggtactggcgcgtcaggctgtggaacggggataagtacgcggctactacaactccatttactcctctgcatataaaggtcaagcccaagagagtcggcattttcctagattatgaggccggcacactaagtttttacaacgtgaccgacaggagtcatatctacacatttaccgataccttcactgaaaagctttggcccctgttttatcctggcattagagccgggaggaaaaacgccgcaccactgaccattcgcccacccacagactgggaatag

SEQ ID NO: 209742 - DNA, 1557 bp, synthetic construct
  misc_feature 1..1557: note = Description of Artificial Sequence: Synthetic coding sequence
  source 1..1557: mol_type = other DNA
atggccgagaccagcctgctggaggccggcgccagcgccgccagcacagcagctgctctggagaatctccaagtcgaagctagttgtagcgtctgcctggaataccttaaagaacctgtgatcattgagtgcggtcacaatttttgtaaggcatgcatcacgcgatggtgggaggatcttgaaagggacttcccctgtcctgtgtgcaggaaaacctcccgatacagatcacttagacccaatcgtcaactcgggtccatggttgaaatcgccaaacagctgcaggcagtaaagcgtaaaatccgggatgagagcctgtgcccacagcaccacgaggcactgtcactcttttgttatgaggaccaggaagctgtatgtctgatctgcgctatcagccacacacaccgagcgcacaccgtggtgccactggacgatgctacccaggaatataaagaaaaacttcagaagtgcctggaaccacttgagcagaagttacaggaaattacgaggtgcaagtctagcgaggagaagaaaccaggggagctcaagcggctcgtggagtcaagaagacaacagattctccgtgagtttgaggagctccataggagactggacgaggaacagcaggtgcttctctcacggcttgaggaagaagagcaggacatcttacaacggcttcgggaaaacgccgcccacctgggggataaacgtcgggatctcgcccacttggccgccgaagtcgaagggaaatgccttcagagtggattcgagatgctgaaagacgtgaagagtaccctggaaaagaatatacctcgcaaattcggcgggagcctctcaactatctgtcctcgcgatcacaaggccttgctgggcctggtgaaagagatcaatcgatgcgaaaaggtcaagacgatggaagtgacttccgtctctattgagttagagaaaaacttttcgaactttcccagacagtatttcgcattgaggaagattctgaaacagctgatcgcagatgttaccctcgacccggagactgcccaccccaatctcgtgctgagcgaagaccggaaatccgtgaaattcgtggagactcgcctgagagatttacccgatacaccccgtcgctttacattctacccctgcgtgctggccaccgagggttttacctctggaagacattattgggaggtcgaggtaggggacaaaacccactgggccgtcggagtctgtcgtgatagcgtcagcaggaagggggagctgacacctctgcccgagacagggtactggcgtgtcagactttggaacggagataagtatgccgctactaccacacctttcaccccgctccacatcaaagtaaaacctaagagagtgggcattttcctggactacgaagctgggacacttagcttctataacgtgaccgaccggtctcatatctatacgtttacagacacatttaccgagaagctctggccccttttctacccaggaatccgagccggaagaaagaacgcggcgcccttgactatccgaccaccaaccgactgggagtag

SEQ ID NO: 209743 - DNA, 1467 bp, synthetic construct
  misc_feature 1..1467: note = Description of Artificial Sequence: Synthetic coding sequence
  source 1..1467: mol_type = other DNA
atggccgagaccagcctgctggaggccggcgccagcgccgccagcactgctgcggcactggaaaaccttcaagtcgaagctagttgctcagtgtgtttagaataccttaaggagcccgtcataattgaatgtggacataatttttgcaaagcatgcatcacaagatggtgggaggacctcgaaagggactttccgtgcccggtctgtcgtaagacctctcgctaccgatcacttaggcctaataggcagctgggctctatggtggagatcgcaaagcagctgcaggccgtgaaaaggaaaattcgtgacgagtctctgtgtccacagcatcacgaggctctctcgctcttttgctatgaggatcaggaagcagtatgcctcatatgcgcgatctcacacactcaccgcgcgcataccgtggttcctcttgatgacgccacacaggaatataaagagaagctccaaaagtgtttagagcctcttgagcagaagctccaggagataaccagatgcaaatccagcgaggaaaaaaagccaggagaactaaagagactggtggagagtcgaaggcagcaaatactcagagagtttgaggaacttcaccgcaggctcgacgaggagcagcaggtactcctctcacggcttgaagaagaagagcaagatatcctgcaaagactgagggaaaatgccgcacacctgggcgacaagcgtagagacttagcacacctggctgctgaggtggaaggaaaatgcctgcagagcggatttgaaatgttaaagccagtcctgtcggcccgcgaggaatgtgaaaaggtgaaaactatggaggtgactagtgtcagcattgaactcgaaaagaacttttcaaacttcccccgtcagtattttgctttgcggaaaatccttaaacaattgattgcggacgtgactctcgatcctgagacagctcacccaaatctggtactctccgaggaccgaaagtcagtcaaattcgttgagacccggttgcgggatctgccggatacacccagacgttttactttctatccatgcgtactcgcgacagaggggtttaccagtggacgtcactactgggaggtcgaggtcggggataaaactcattgggcagtgggggtctgtcgagattctgtgagccgaaagggagagttaaccccgctgcctgagacaggatactggcgggtccgcctttggaatggcgacaaatacgccgccactacgactccttttaccccactgcacatcaaggtgaagcctaagcgggttggaatcttcttggactacgaggcaggcacgctctcattctacaatgtgactgaccggtcccacatctacaccttcacagatactttcactgaaaagctctggcccctcttctatcccggaattcgtgccgggaggaagaatgcagcccctctgactatcagacctcctaccgattgggaatag

SEQ ID NO: 209744 - DNA, 1467 bp, synthetic construct
  misc_feature 1..1467: note = Description of Artificial Sequence: Synthetic coding sequence
  source 1..1467: mol_type = other DNA
atggccgagaccagcctgctggaggccggcgccagcgccgccagcaccgcagccgcactggagaacctccaggtcgaggccagttgttcagtgtgcttggaatatctgaaggagccagtcatcattgagtgtggccacaacttttgcaaggcctgcataacacggtggtgggaggatctggaacgtgacttcccctgccctgtgtgccggaaaacatcgcgctatcggagtttgcgcccaaacaggcagctggggtcaatggtcgaaatcgcaaagcagctgcaggcagtgaagaggaaaattcgagatgagagcttgtgcccccaacaccacgaagctctgagcctgttctgttatgaggaccaggaagccgtgtgcctaatttgtgccatcagccacacacaccgggcacacacagtggtacccctggatgacgccacacaggagtacaaggagaagctccagaaatgcctggaacctcttgaacagaaactgcaggagatcacccggtgtaaaagctcagaggagaagaagccgggggaactgaaacggctcgtggaatctaggcgccaacaaattttacgtgaatttgaggaactgcaccgcagactggatgaagaacaacaggttcttctctctaggctggaagaagaggagcaggatattctgcagagattgcgcgaaaacgcggcacatctgggcgataagaggcgagacctggctcacctcgctgccgaggtcgaaggcaaatgtctgcagagcgggttcgagatgctcaaacctgtgctgtccgctcgagaagagtgtgaaaaagtgaagaccatggaggtgacatccgtgtccattgaactcgagaaaaacttctccaacttccctcgacagtatttcgctctccgtaagattctgaagcagcttattgcagacgtgactttggacccagaaaccgcccaccccaacctcgttttgtcagaggatagaaaaagtgtcaagttcgtggagacccggttgagggatctgcctgacacaccacgccggtttaccttttatccttgcgtgctcgcgactgaaggctttacaagcgggcgccactattgggaggttgaagtcggagataagacacactgggctgtcggtgtttgtagggacagtgtgagcagaaaaggcgagttaacaccccttccagagacggggtattggagggtcaggctctggaacggagacaaatacgctgccaccaccacacctttcacccccctgcacattaaggtgaagcctaagagggtcggtattttccttgactatgaggctggaacactgagcttctataacgtgaccgaccgcagccacatctatacttttacagacacgttcacggaaaagctgtggccactattctatcctggcatccgggcgggccgaaaaaacgctgcccccctcaccattcgcccacctactgattgggagtag

SEQ ID NO: 209745 - DNA, 1467 bp, synthetic construct
  misc_feature 1..1467: note = Description of Artificial Sequence: Synthetic coding sequence
  source 1..1467: mol_type = other DNA
atggccgagaccagcctgctggaggccggcgccagcgccgccagcactgctgccgcgttagaaaatttgcaggtcgaagcatcttgttcagtgtgtttagagtatctcaaagaacccgtgatcatcgagtgcgggcataatttctgcaaagcatgcattaccagatggtgggaggatctcgagagagattttccttgtcctgtctgccgaaagaccagtagataccgcagcttgcgacctaaccggcaacttggctctatggtggagatcgccaagcagcttcaggccgttaagaggaaaatcagggacgaatccttgtgcccccaacaccacgaagccctgtccctgttttgttatgaggatcaggaggctgtctgcctgatctgtgcgatatcacatactcatagagcgcacaccgttgttcccctagacgatgctacacaggagtacaaggagaagctgcagaagtgccttgagcccctggaacagaaattacaggagattacgagatgcaagtcttctgaagagaaaaaaccaggcgaactcaagcgactggtggagtcccggcgccagcaaatactgcgggagtttgaggagttgcataggaggcttgatgaggagcagcaggtcctgctgtctcgccttgaagaagaggagcaagacattctgcagcgattgcgagagaatgccgcgcacctcggagataaacgcagagacttagcgcacttggcggcagaagtcgaggggaagtgcttgcagtctggttttgaaatgcttaaaccagtgttgtcagctcgggaagagtgcgaaaaagttaaaacaatggaggtcacgtctgtgagcatcgaactggaaaagaacttttctaatttccctaggcagtacttcgcgctcaggaaaatcctgaagcaactcattgccgatgtcaccctggatcccgagacggcccatcctaatcttgtgctgtcagaagacagaaaatccgtgaagttcgtggagactcggctgagagacttgcctgatacaccacgccggttcaccttctacccctgtgtcctggccacagaaggctttacttcaggcagacattactgggaggtcgaggtcggtgataagactcattgggcagtgggggtgtgtcgggattccgtaagcaggaagggagagctcacacctctccccgaaacgggttactggcgagtgcggctgtggaacggggacaagtacgccgctaccaccacaccatttaccccacttcacataaaggtcaagccaaagagggtcggtatatttctcgactacgaagcaggtacgctttccttctataacgtgaccgacagatcccacatttacacattcacagatacttttacggagaagctttggccattgttctaccccggcattcgcgctggccggaagaacgctgccccgctcacaatcaggcctcccaccgactgggagtag

SEQ ID NO: 209746 - DNA, 1557 bp, synthetic construct
  misc_feature 1..1557: note = Description of Artificial Sequence: Synthetic coding sequence
  source 1..1557: mol_type = other DNA
atggccgagaccagcctgctggaggccggcgccagcgccgccagcacagccgcggccttggaaaacctgcaggtagaggcgtcctgcagtgtatgcctagagtatcttaaagaacccgtgattatcgaatgcggccacaacttctgtaaggcctgcataacacgctggtgggaagacctcgagagggacttcccctgccctgtctgtaggaaaacaagcaggtaccgatcactgcgccccaaccggcagctgggcagtatggtcgagattgctaagcagctgcaggccgttaaacggaagatcagagatgagtccttgtgtcctcagcaccatgaggcactctcccttttttgctatgaagaccaggaggccgtatgtcttatatgtgccattagccatactcacagagctcacacagtcgtgcccctagatgacgctacacaggagtacaaggagaagttacagaagtgcctggaaccccttgaacagaaactgcaggagattacaaggtgcaaatccagtgaagaaaagaagccgggtgaattgaaacggctggtggaatctagaagacagcagattctgcgggaatttgaagagctgcatcgcagacttgacgaggagcagcaggtgctgctgagcaggctcgaagaggaagagcaggacattctacagaggctgagggagaatgccgcacatctgggagacaaacggcgcgacctcgcccatttggctgctgaggttgaggggaaatgcttgcagagcggatttgagatgctgaaggacgtgaagtccacccttgagaaaaacatacctagaaaatttggcggctcactgagcaccatctgtccacgggaccacaaggcccttctcgggctcgtgaaggaaataaaccgatgcgaaaaggtcaagaccatggaggtcacgagtgtaagcattgagcttgagaagaattttagcaacttccccagacagtactttgccttgcggaaaatactgaaacagctcattgctgacgtgaccctggatccagaaactgcccatccaaatctggtgttgagcgaggatagaaaatctgtcaaattcgtagaaacacggctgagagatctgcccgacacgccgagacgctttactttctacccatgcgtgttggctacagagggttttacctcaggaaggcactactgggaggtggaggtgggcgataagactcattgggctgtgggggtctgcagggatagtgtgtccaggaagggcgagcttacaccactgccggagactggatattggagagttcggctgtggaacggtgataaatatgcagctaccaccacccccttcactccactacatataaaggtgaaacctaagcgggtaggaatattcctcgattatgaggctggtaccctgagcttctacaacgttacagaccggtcccacatctataccttcacagatactttcacggaaaaattgtggcctcttttctaccccggcatcagggctggccggaaaaacgccgccccgctgacaattcggccgcccacagactgggagtag

SEQ ID NO: 209747 - DNA, 1236 bp, synthetic construct
  misc_feature 1..1236: note = Description of Artificial Sequence: Synthetic coding sequence
  source 1..1236: mol_type = other DNA
atggccgagaccagcctgctggaggccggcgccagcgccgccagcacagctgccgccctggagaacctccaggttgaggccagttgctccgtctgtctcgaatacttgaaggagccggtgattatagaatgtggccacaatttttgcaaggcttgtatcacccgctggtgggaggacctggaacgcgactttccttgccctgtatgtagaaagacgtccaggtaccgatccctccggccgaatcgacagcttggatccatggtagaaattgccaagcagttacaggctgtcaagagaaagatccgcgatgagtctttgtgtccccaacatcatgaagccctgtctctcttttgctacgaagatcaagaagccgtgtgtctgatatgtgcaatctcacacacgcatagggctcatactgttgtgccactcgatgatgccacgcaggagtataaggagaagctgcaaaaatgtcttgagcccctggagcagaaactgcaggagataacgcgatgtaagtcaagtgaagaaaaaaaaccaggggaactgaagcgcctggtcgaaagcagacgccagcagattcttcgggagttcgaagagctgcaccggcgcctggatgaggagcagcaggtactgctgtctaggctcgaggaagaggagcaggatatactgcaaaggctgcgggaaaatgcagctcacctcggagataaacgtcgcgaccttgcccacctcgctgcagaagtcgaaggcaagtgtctccagtctggattcgagatgctgaagccagtcctgtccgcccgcgaggaatgtgagaaggtgaaaactatggaggtcacaagcgtctctattgagctggagaagaactttagcaacttccctagacagtacttcgcactcaggaagatcctgaagcagttaatcgcggacgtaaccctcgatccggagacggctcatccaaatcttgtgctaagtgaggatcgcaagtctgtcaaattcgtagagacacgccttagggacctacctgataccccacgcagatttaccttctacccctgcgttctcgcaacagaaggcttcacgtcaggccgccactattgggaggtcgaggtgggcgataagacacactgggctgtgggagtctgcagagattccgtcagccgtaagggagggtgtgggtatgggatgggcactaacatgcagccccctccacacctcctccctctatgtacctctcggtag

SEQ ID NO: 209748 - DNA, 1557 bp, synthetic construct
  misc_feature 1..1557: note = Description of Artificial Sequence: Synthetic coding sequence
  source 1..1557: mol_type = other DNA
atggccgagaccagcctgctggaggccggcgccagcgccgccagcacggccgctgcactggagaacttgcaagtggaagccagttgttctgtttgtttagagtatctgaaagagcccgtaattatcgagtgtggccataacttttgcaaagcctgcatcactcgctggtgggaagatctcgagcgggactttccatgccccgtgtgtaggaaaacaagtcggtaccgaagtctaagacccaatagacagctcggttccatggtcgaaattgctaaacaactacaggctgtgaagcggaagatccgtgacgagagtctttgcccccagcatcacgaggcgttatccttgttctgctatgaggatcaggaggcagtgtgtcttatttgcgctatttcacatactcaccgagcccatactgtggtgcccctggatgacgcaacccaggaatataaggaaaaactccagaagtgtctggagcccctggagcagaagctgcaagagatcacacgctgtaagagctctgaggaaaagaaacccggagagcttaagaggttggtcgaatcccggcggcagcagatattgagggaatttgaggagctgcatcgtcgtttggatgaagaacagcaggtattactgagccgccttgaagaagaggaacaggacatcctccagcgtttgcgcgaaaatgcagctcatctgggggataaacgccgtgacctggcacacctcgcagccgaggttgagggaaaatgtctccaaagcggctttgagatgctcaagccggtacttagcgcaagggaaaaaaatatccccagaaagttcgggggatctttgtccaccatctgtcctcgggaccataaggccctattagggcttgtgaaagagataaatcggtgcgagaaggtgaaaactatggaggtgacatctgtctcaatcgagctggaaaagaatttttcaaacttcccgcggcagtatttcgccctgaggaagattctgaaacagctgatcgccgacgttacactcgacccagaaaccgctcacccgaatcttgttctcagtgaggaccggaagtcagtgaaatttgtggagacacgactgagagatctgccagacacacctcggcggtttacgttttacccttgtgttttggcaaccgaaggattcaccagcgggaggcattattgggaagttgaagtcggtgacaagacacactgggcggtgggcgtgtgtcgcgatagcgtcagccgcaagggcgagctcacacctcttccagagacaggctactggcgtgttaggctttggaacggggataaatatgccgccaccacaactcctttcacccccttgcacatcaaggtgaagcctaagcgcgtgggaatctttctagactacgaagctggcaccctctccttctacaatgtgacagatcggagccatatttacaccttcactgataccttcaccgagaaactgtggcccctgttctaccctggcatcagggccggaaggaaaaatgcagctccactgaccatacgcccacccacagattgggaatag

SEQ ID NO: 209749 - DNA, 1236 bp, synthetic construct
  misc_feature 1..1236: note = Description of Artificial Sequence: Synthetic coding sequence
  source 1..1236: mol_type = other DNA
atggccgagaccagcctgctggaggccggcgccagcgccgccagcacagccgccgctctggaaaatcttcaggtggaagcctcatgcagcgtttgtcttgagtacctgaaggagccagtgatcattgaatgtggtcacaacttctgcaaggcttgtatcacccgatggtgggaggacctcgagagagacttcccctgccccgtctgcagaaagacctcccgatatcggagcctgaggccaaacagacagctgggtagtatggtagaaatcgcaaagcagctccaggccgtcaaacgcaaaattagagacgagtcactttgccctcaacaccatgaggcattaagcctgttttgctacgaggatcaagaggctgtctgcctgatctgcgccatctcgcacacacaccgggcacacaccgttgtgcctctggatgacgcgacgcaggagtacaaggaaaagctgcaaaagtgcctggagcccttggaacagaaactccaggagatcacacggtgtaaatcgagtgaggagaagaagcccggagaattgaagaggttggtcgaaagtagaaggcaacagatactcagagagttcgaggaactccatcggaggctggatgaggagcagcaggttttgctgtccagacttgaagaggaggagcaagatatcctgcagcgcctgagggagaacgctgctcatctaggtgataagcggcgggatctcgcacacctggccgccgaggtcgaaggcaaatgcctgcagtccggttttgagatgctcaaaccagtgctaagcgcgcgagaagaatgcgagaaagtaaaaacaatggaagtgacatctgtaagcattgaacttgagaaaaactttagtaactttcctcgccagtacttcgcccttcgaaagatactgaaacagctcattgcagatgtgaccctagatcctgagaccgctcaccctaatctggtcttatccgaggatcggaagtcagttaagtttgttgaaacccgtctgcgagaccttccggacacgccacgccgattcacattttacccttgcgtgctggcgaccgaggggttcacatcagggcggcattattgggaggtggaggtaggagataaaacccactgggcagtcggagtttgtcgggactctgtgagcaggaaaggcggatgtggctacggcatggggaccaacatgcagccaccgccgcatctgctgcctttgtgcaccagcaggtag

SEQ ID NO: 209750 - DNA, 1236 bp, synthetic construct
  misc_feature 1..1236: note = Description of Artificial Sequence: Synthetic coding sequence
  source 1..1236: mol_type = other DNA
atggccgagaccagcctgctggaggccggcgccagcgccgccagcacagcagcagccctcgagaatcttcaggtggaggcttcatgctctgtgtgcttggagtatcttaaggagccagtgatcatagagtgcggtcacaacttctgtaaggcttgcatcacacgttggtgggaggatcttgaacgcgatttcccttgcccggtgtgccgcaagacttcacggtataggtccctccggccaaaccgccagctgggttcaatggtggaaattgcaaagcaacttcaggctgttaagcgcaaaattcgcgatgaatccttatgccctcagcatcacgaggctctgtcactgttctgctacgaagaccaggaggcggtctgtttgatttgcgccatttcacacactcaccgggctcacaccgtcgtcccattagatgatgctactcaagagtacaaggagaaactacagaaatgtctggagcctctcgagcagaagctgcaggaaatcactcgatgtaagtcttccgaggaaaaaaaaccaggagagctgaaaaggctggtggagagcagacgccagcagatattgcgagagttcgaagagctgcacagacgactcgacgaggagcaacaagtactactgtcaaggttggaagaggaagagcaagatatacttcaacggctcagagaaaacgcggcccatttgggagataagcggagagatttagcccatctggctgcagaggttgaggggaaatgtttgcagagcggcttcgagatgctcaagcctgtgctgtcagccagagaagaatgtgaaaaggttaagactatggaggtgaccagcgtgagcattgaactggagaagaattttagcaatttcccaagacaatattttgccttgaggaaaatcttgaagcagctgattgctgatgtgacacttgaccctgaaaccgcccacccaaacctcgtcctgtctgaggatcgcaaatccgtgaagtttgtggaaacgaggctgcgcgaccttccagacacacccaggcgttttacattctacccttgtgtcctcgccaccgagggttttactagcgggcgacactactgggaggtggaggtaggggataaaacccactgggccgtgggcgtgtgccgagacagcgtgagccgaaagggaggttgtggctacggaatgggtaccaacatgcaaccacccccccatctccttccactgtgcacctcgagatag

SEQ ID NO: 209751 - DNA, 1557 bp, synthetic construct
  misc_feature 1..1557: note = Description of Artificial Sequence: Synthetic coding sequence
  source 1..1557: mol_type = other DNA
atggccgagaccagcctgctggaggccggcgccagcgccgccagcactgccgcggcattggagaatctgcaggtggaagcctcctgctccgtgtgtctggaatacctcaaagagcccgtgattatcgagtgcgggcacaacttctgtaaggcctgcatcacacggtggtgggaagatttagagcgcgatttcccatgccccgtgtgtcggaagacttcacgatatagaagtctgagaccaaatcgtcaattgggctccatggtggaaatagctaagcaactccaggcagtgaagcggaagattcgggatgaaagcctgtgtccacaacaccatgaggctctctctctgttctgttacgaggatcaagaagctgtatgcctaatctgcgctattagccacacccacagagcccatactgtggtcccccttgacgatgcaacccaagagtacaaagagaagctacaaaaatgccttgagcccctggagcaaaagctgcaggaaattacaagatgcaagtccagcgaggagaagaagccaggagagctgaaacgcctggtggagagccgtcggcagcaaatactgcgcgaatttgaagagctgcaccgccgcttagacgaagagcagcaggtgctcctctctcgactggaggaggaagagcaggacattctccagcgtctccgtgaaaatgccgcccatctcggagataaacgccgggacctggcccacttagctgctgaggttgaaggcaagtgtcttcagtcgggatttgaaatgctcaaagatgttaaaagcaccctcgagaaaaacatccccaggaagtttggcgggtctctgagcacgatttgtccacgtgaccacaaagctctactaggactcgttaaagagattaatcgatgtgaaaaggtgaaaacaatggaggtcacttccgtcagcatcgagttggagaaaaatttctccaactttccgcggcagtatttcgcccttcgtaaaatcttgaaacagctgatcgctgatgtcaccctcgacccggaaaccgctcaccctaacctggtactgagcgaggaccgtaaatccgtcaagtttgtagagactcgcttgcgcgatctgccagatactccacgccggtttacattctacccttgtgtattagctactgaaggcttcacctccggtcggcactactgggaggtggaagtcggcgacaagacccactgggccgttggagtctgtcgcgattctgtgagtcgtaagggggagctgactccactgccagaaacaggatactggcgagtccggctatggaacggagacaaatacgcagccaccacaacaccatttacgccgttgcacattaaagtcaagcctaagcgagtggggatattcctggactatgaggcaggcaccctatcattttacaacgttaccgacaggtcacatatctatacattcactgacacttttaccgagaagttgtggcccctattctatccaggaatccgagcggggcgcaaaaatgccgcaccactgactatccggcctccgacggattgggagtag

SEQ ID NO: 209752 - DNA, 1557 bp, synthetic construct
  misc_feature 1..1557: note = Description of Artificial Sequence: Synthetic coding sequence
  source 1..1557: mol_type = other DNA
atggccgagaccagcctgctggaggccggcgccagcgccgccagcactgctgccgctctggagaatttgcaggttgaagccagctgttccgtctgcctggaatacctgaaggaacccgtcattatagagtgcgggcataacttttgcaaggcttgtattactcgctggtgggaggacctggaaagagattttccctgcccagtctgccggaagactagccgctatcggagcctgaggccaaaccggcaattggggtccatggtggaaatagccaaacagttgcaagctgttaagcggaagatacgcgacgaatctttgtgcccacagcaccatgaggccttatctctgttttgttatgaggatcaagaggccgtttgcctaatctgcgcgatctcgcacacccatcgcgctcatactgtggtgccccttgatgacgctacccaggagtacaaagaaaagttgcaaaaatgtctggagcctcttgaacagaagttacaggaaattacccgatgcaagtcttccgaagaaaaaaaaccgggcgagctgaagaggctagtggagagtagacggcagcagatcctgagggagtttgaagagctgcaccgccgattagacgaagagcagcaagtgctgctctcccgattagaggaagaggaacaggacatactgcagaggctgcgggaaaatgctgcccacttgggagataaacgtcgggacctcgctcatctggccgcagaggtggaaggtaagtgtctccagtctggctttgagatgctgaaacctgtgttgtcggctcgggagaagaacatcccccgaaaattcggaggtagcctaagtacgatttgtccacgcgaccacaaagcacttctgggcttagtgaaggagatcaacaggtgcgaaaaggtgaagactatggaggtgactagcgtctctattgagctggaaaagaacttctctaactttccacgtcagtacttcgcccttagaaaaatattgaagcagctgatcgcagacgtgacattggaccctgaaaccgcacacccaaacctggtgctgtctgaggacagaaaaagcgtgaaattcgtagaaacccgtctgcgtgatttacccgataccccccgacggtttaccttttacccttgtgtgctcgcaactgaagggttcaccagtggacgacactattgggaggttgaagtgggagataagactcactgggccgtgggagtatgtcgggattccgtctcacgcaagggtgagctgacgccactgcccgaaacaggatactggcgggtgcgtctgtggaatggagataagtacgccgctactaccacacccttcacacccttgcatattaaagtgaagccaaagcgtgtaggtatcttccttgactatgaggctggtactctgagcttctacaacgtgaccgacagatcccacatatacacttttaccgataccttcaccgagaagctgtggcccctgttttatcctggaattcgcgccggacgaaagaatgcagctccattgacaatcagacctccaacggattgggagtag

SEQ ID NO: 209753 - DNA, 1557 bp, synthetic construct
  misc_feature 1..1557: note = Description of Artificial Sequence: Synthetic coding sequence
  source 1..1557: mol_type = other DNA
atggccgagaccagcctgctggaggccggcgccagcgccgccagcacggccgctgctttggagaatctgcaggtcgaggccagctgctccgtgtgcctcgaatacttgaaggagcccgttatcattgaatgtggccacaacttttgcaaagcttgcatcacgagatggtgggaggacctggagagggattttccatgtcctgtgtgccggaaaacgtctcgatacagaagcttgcgacccaacaggcagctgggctccatggtggagattgccaagcagctgcaggcggtaaagcgaaaaattcgcgacgaaagcctgtgccctcagcaccatgaggcgcttagccttttttgctacgaagatcaggaagcagtgtgcctgatctgcgcaatttctcacacacatcgggcccacacggttgtccccctggacgatgcaacccaggaatataaggaaaaactgcagaagtgccttgagcccctcgagcagaagctgcaagaaatcacccgatgcaagagctccgaagaaaaaaagccaggggagcttaaacggctcgttgagagtagaaggcaacagattctccgcgagttcgaagagctccatcgaagattagacgaggagcaacaagttctgttgagtagactggaagaggaggagcaagatatacttcagcggctacgggagaacgccgcccatctgggcgacaagcggagggacctcgcgcatttggcagcagaagtcgagggaaagtgcttgcagtctggttttgagatgttgaagccggtcctgtcagcacgcgagaaaaacattcctagaaaattcggtggctcccttagcacgatttgcccacgcgaccataaggccctgctgggcttggtgaaagaaattaatcgatgtgagaaagtgaaaactatggaagttacatctgtgtcaattgagctcgagaaaaatttttccaattttcctcgacagtattttgctctccgaaaaatcctgaaacagctgatcgctgacgtcacacttgacccagagactgcacacccaaatctggtcctctctgaggaccggaaaagtgttaaatttgtggaaacccgtctgagggatctacctgacacgccccggcggtttaccttctatccctgcgttcttgcaactgaaggttttacgagtgggcgtcattattgggaagtggaggtaggtgacaagacccattgggccgtgggagtttgccgcgacagcgtttcccggaagggggaactgacccctctgcccgaaaccgggtattggcgagttcgcttgtggaacggcgacaaatatgcggcaaccactacccctttcactcccctgcacattaaggtgaaacccaagcgcgtggggattttcttggattacgaggctggcactctgtccttttacaatgtgacagatcgaagtcacatctacacattcactgatactttcactgagaagctgtggccattgttttaccctggaatacgggctggccggaagaacgccgcacctctcaccatcagaccacctaccgactgggaatag

SEQ ID NO: 209754 - DNA, 1557 bp, synthetic construct
  misc_feature 1..1557: note = Description of Artificial Sequence: Synthetic coding sequence
  source 1..1557: mol_type = other DNA
atggccgagaccagcctgctggaggccggcgccagcgccgccagcactgctgctgccctggaaaatttacaagtggaggcctcatgttctgtctgtttggaatatctgaaggaacccgtaataattgaatgcggacacaacttttgcaaagcctgcataactagatggtgggaggacctcgaacgagattttccatgccccgtctgccggaaaacaagtcgataccgcagcctgcggcctaatcgccagctgggctccatggtcgagatagccaagcagttacaagctgtcaagaggaaaatcagagacgaaagcctgtgcccccagcaccatgaggcgctgtctttattctgctacgaagaccaagaggcggtgtgcctgatctgtgccatctcccacacccacagagcccataccgtcgtacccctggacgacgctactcaggagtacaaggagaaacttcagaagtgccttgagcctctcgaacagaagttgcaagagataacaagatgtaagtcctccgaggaaaagaaacccggagagctgaaaagactagtcgaaagccgtagacagcagatcttgcgcgagtttgaagaattgcacaggagactcgacgaggagcaacaggtccttctctcccggttggaagaggaggaacaggatatcctgcagcggttgcgcgaaaacgcagcccacctgggcgacaaaaggcgcgaccttgcccacctggccgccgaagtggaaggaaagtgtcttcagtcgggattcgagatgttaaaagacgtcaaaagcactctggagaagaacattcccaggaaattcggcggcagtctgtcaaccatctgcccgcgcgatcacaaggccttattagggctggttaaggagatcaacagatgcgaaaaagtgaaaaccatggaggtgacctcagtgtcaatcgaactggagaagaattttagcaattttccacgtcagtatttcgccttacggaaaattttgaagcagcttattgccgacgtgactctggatcctgagacggcccatccaaacttagtgctcagcgaggataggaaatctgtaaagtttgttgagacccggctacgggatttgcccgacacaccgcgtcggttcaccttttatccatgcgtgcttgcgacagagggcttcacatcaggcagacactattgggaggtggaagttggcgacaagacccattgggccgtcggcgtctgtcgtgatagtgtctcccggaagggcgaattgacccctctccccgaaacggggtactggagagtgcgactctggaatggagataagtacgctgccaccacaacgcctttcaccccactccacatcaaggtgaagcccaaaagagtcggcatcttcctcgactatgaggccggaactttgagcttctataatgtcaccgaccgctctcatatctatactttcaccgacacatttaccgaaaagctttggcccctgttctatcctggaattcgcgctggccgaaagaatgctgcacccctgaccattagacctccaacagattgggagtag

SEQ ID NO: 209755 - DNA, 1557 bp, synthetic construct
  misc_feature 1..1557: note = Description of Artificial Sequence: Synthetic coding sequence
  source 1..1557: mol_type = other DNA
atggccgagaccagcctgctggaggccggcgccagcgccgccagcacagcagcggcgctcgagaatttgcaggtggaggcttcttgcagcgtgtgcctagaatatttaaaggaacctgtgatcatcgagtgcggtcataacttctgtaaggcctgtatcaccaggtggtgggaggatctggaacgggactttccgtgtccagtgtgccgcaagacgagtcgctataggagcttgcgacctaatagacaacttggtagcatggttgagatagccaaacaattgcaagccgtgaagcgtaagatcagagacgagtctttatgcccccagcaccacgaggccctcagcctattctgctacgaggatcaggaagcagtgtgcttgatttgcgccatctcccacacacaccgtgcacacacagtggtgccgcttgatgacgctacccaggaatacaaggagaagttgcaaaaatgcctggagcccctggaacaaaaactgcaagagattacccggtgtaagagcagcgaggagaagaaaccaggagaactgaagagattagttgagagtcggcgccaacaaattctgcgagagttcgaagagttgcaccgcagattggacgaggagcaacaggtgttactgtctcggctggaagaggaggagcaggacatcctgcagcggctgcgggaaaacgcagcccacttgggggacaagagacgcgatctggcacatctggctgcagaagtcgaagggaaatgtctgcaatcaggcttcgaaatgttgaagcccgtgctgtcggccagggagaaaaacattcctcgcaaatttgggggctccctttcaaccatctgccccagggaccacaaggcccttcttggtttggtgaaagagattaataggtgcgaaaaagtcaagactatggaggtgacctccgtttcgattgagttggaaaagaatttttcaaacttccctaggcagtactttgctctacgcaagatcctgaagcagctgatcgccgacgtcaccttggaccctgaaacagcgcatcctaatctcgtgctgagtgaggacaggaaaagcgtcaagttcgtcgagacaaggcttagggacctgcctgacacccctagaaggtttactttttacccatgcgtgttagccaccgaaggcttcaccagtggaaggcactattgggaggtggaagtcggagacaagacacattgggcagttggggtgtgccgcgactccgtctcccgaaaaggcgagctcactcctctgcctgagacaggatactggcgcgttcgcctctggaatggcgataagtatgctgccaccacaacacctttcacccctctccacattaaggttaagcccaagagagtgggtatcttcctggactacgaggccggaacactgtccttttataacgtgaccgatcggtcccacatctatacatttacggacacatttaccgaaaagctctggcccctattttacccaggcattagagcaggtagaaagaatgccgcacctctcactatccggccgccgacagactgggagtag

SEQ ID NO: 209756 - DNA, 1254 bp, synthetic construct
  misc_feature 1..1254: note = Description of Artificial Sequence: Synthetic coding sequence
  source 1..1254: mol_type = other DNA
atggtggagatcgccaagcagctgcaggccgtgaagcggaagatccgagacgagtccttatgcccgcagcaccatgaggccctaagcctgttctgttatgaggaccaagaagcagtgtgcctgatctgcgctatctctcacacgcacagagctcatacggtggtgccacttgatgatgctacccaggagtacaaggagaaactacagaaatgcctagaacccctggagcagaagctgcaggaaataacgagatgcaagtcctctgaggaaaagaaacctggagaactgaaaaggctcgtcgagtctagacgccagcagatcctgagagagtttgaagaattgcatcggcgtctcgacgaggagcagcaggttcttctgtctcgcctggaagaggaggaacaggacatcttgcagaggctgcgcgaaaacgctgcccacctaggcgataagagacgagacctggcccacctggcagcagaagtggagggcaagtgtttacagagcgggtttgagatgctaaaaccagtgctctctgctcgggaagagtgcgaaaaggtcaagacaatggaagtgacgtctgtttccattgagctcgagaaaaattttagtaatttcccgcgtcaatattttgccctgagaaagattttaaagcagctgatcgctgacgtgaccctcgaccctgagactgctcacccaaacctggttttgtctgaagatagaaagtccgtaaaattcgtcgagaccagactacgggacctgcctgacactcctaggcgatttacattctatccatgcgtcctcgccaccgagggctttacctctggaaggcactattgggaagttgaggctgctcactgtgtcttagcgcaggatcctgaaaatcaagccctcgctcggttctattgttacaccgagcgtactattgccaagcggctcgtcctccgaagggacccctccgtcaagaggactttgtgtaggggatgttcatctctgctggtacccggccttacctgcactcatagacagcggcggtgtcggggtcagaggtggactgtacagacatgtttgacctgccagaggtctcaacggtttctgaacgatcccggtcatctcctgtggggcgacagacccgaagcacagttaggaagccaggctgattccaaacctttgcagcctcttccgaatacggcacacagtattagcgatagacttcctgaagagaaaatgcaaacacaaggttcctctaaccagtag

SEQ ID NO: 209757 - DNA, 1254 bp, synthetic construct
  misc_feature 1..1254: note = Description of Artificial Sequence: Synthetic coding sequence
  source 1..1254: mol_type = other DNA
atggtggagatcgccaagcagctgcaggccgtgaagcggaagatcagagatgaatccctgtgtcctcagcatcatgaggccctaagcctcttctgttatgaggaccaggaagctgtgtgtcttatttgcgcgatttcacacacccacagagcccacaccgtcgtgccccttgacgacgccacccaggagtataaggaaaagctgcagaagtgtcttgagcccctcgagcagaaactgcaagagatcacacgctgcaagtcatcagaggagaagaaaccgggagagctaaagagactggtggaaagtagacggcagcagatcctcagggaatttgaggagctacacagaaggctggatgaggagcagcaggtgctactgagtcgacttgaagaagaggaacaggatattcttcagagattgagggaaaacgctgcacacctgggtgataaacgacgcgacctggcacacctagctgccgaggtggaaggaaagtgtctccaatcaggttttgagatgctgaaaccggtattaagcgcccgagaagaatgcgagaaggtcaaaacaatggaagtcacaagcgtttccatcgagttggagaaaaatttcagcaacttcccacgacagtatttcgccctccggaagatacttaagcagctgatcgccgacgtcaccctcgaccctgaaactgcacaccccaatctggttctctccgaggaccgcaagagcgttaaatttgtagaaaccagactgcgagatctccccgatacacccaggaggttcacattctacccttgcgtcttagcaacggaaggctttacctctggaaggcattactgggaggtggaggccgcccactgcgtgctcgcgcaggaccccgaaaaccaggccctcgctagattttattgctacaccgagcgaactatagccaaaagactagtacttaggagggacccctcagtgaagcgcactttatgccggggatgcagtagtcttctggtcccagggctcacgtgtactcacaggcagcgcagatgtcgcgggcagcggtggacagtgcagacctgtctcacctgtcagcgctcgcagcgtttccttaatgaccctggtcatctactgtggggggacaggccagaggcccagctggggtctcaggccgacagtaagcctctgcagcctctgcctaataccgcgcattccattagtgatagactcccagaggagaaaatgcaaacccaggggtccagtaatcagtag

SEQ ID NO: 209758 - DNA, 1236 bp, synthetic construct
  misc_feature 1..1236: note = Description of Artificial Sequence: Synthetic coding sequence
  source 1..1236: mol_type = other DNA
atggccgagaccagcctgctggaggccggcgccagcgccgccagcactgctgctgcgctggaaaacctgcaagtcgaggcctcatgttcagtttgtttggaatatctgaaagaaccagtgatcattgagtgcggccataacttctgtaaggcatgcatcacgcggtggtgggaggatctcgaacgtgattttccatgccccgtctgcagaaagacttctcgctatcgctcgcttagacccaatcggcagcttgggtctatggtagaaatcgcaaaacagctgcaggccgtgaaacgtaagatcagggatgagtctttatgtcctcagcaccacgaggccctgagtcttttctgttacgaggaccaggaggccgtctgtctcatctgcgcgatctcccatacccacagagctcacactgtagtgccgctagatgacgcaacccaagaatacaaggaaaaattgcagaagtgcctggagcctctagagcaaaagcttcaggaaataacccgctgtaagtcctctgaggaaaagaagcccggggagctcaaacgacttgtggagagcaggcggcaacaaattttacgcgagtttgaggaactgcatagacgccttgatgaggagcagcaggtcctgctgagtaggctggaggaggaggaacaggacatactccaacgcctgagggagaacgccgcccacctgggagataaaaggcgcgacctggcccatttggccgctgaggtagaaggaaaatgcctacagtccggttttgagatgttgaaacccgtgctgtccgcacgcgaggagtgtgaaaaggttaagaccatggaagtgacgagcgtgtctattgagttagagaagaacttttccaatttcccaaggcagtacttcgccctgagaaagatccttaagcagctcatcgcagacgtcacactggatcctgagacagctcaccccaacctcgttctcagtgaggataggaagtctgtaaagttcgtggagacacgcttgcgcgatcttcctgatactccccgacggtttacattctatccttgcgtgctggcaactgagggcttcactagtggcagacactactgggaagtggaagttggggataaaacgcattgggccgtgggagtgtgcagagatagcgtgtccagaaaggggggttgtggctacggaatgggaacgaacatgcagccccctccacacctgttgcctctgtgcacatctcgctag

SEQ ID NO: 209759 - DNA, 1254 bp, synthetic construct
  misc_feature 1..1254: note = Description of Artificial Sequence: Synthetic coding sequence
  source 1..1254: mol_type = other DNA
atggtggagatcgccaagcagctgcaggccgtgaagcggaagatccgcgacgagtccctgtgtccacaacaccacgaagccctgtcgctgttctgttacgaggatcaggaagctgtctgtctaatatgcgccatcagccacactcaccgagcccatacagtggttccactggacgatgcaacgcaggaatacaaggaaaaactgcagaaatgtcttgaaccactggagcagaaacttcaggagattacaagatgcaagagcagtgaggaaaaaaagccaggggaactgaagcgtctcgtggagagcaggcgtcagcagatactaagagaatttgaagagttgcaccggagattagatgaagaacagcaggtgctgttgagccggcttgaggaggaagaacaggacattctccaaagactgcgggaaaacgctgcacacctgggagacaaacgacgtgacttagcccacctggccgctgaagtcgagggcaagtgtcttcaatcgggatttgaaatgctcaaacctgtcctatcggcaagggaagaatgcgagaaagtgaaaacaatggaggtcaccagtgtgagtatcgaattggagaagaacttctcaaacttcccaaggcagtacttcgcattgaggaaaatacttaagcagctcattgctgatgtcactttggatccagaaaccgctcacccaaacctggtactttctgaagaccgaaagtcagttaaatttgtagagactcgcttgcgagatctgccagataccccccggagattcaccttctatccctgcgttcttgccacagagggctttacaagtggccggcactactgggaagtcgaagcagctcattgtgttctggctcaggatcctgagaaccaggcattagctagattctactgctacacagagagaaccattgccaagaggctggtcctgcgcagggacccgtctgtcaagaggaccctctgccggggctgctcctctctgttggtacccggactcacctgtacacatcgacagaggagatgcaggggccagagatggacggtgcagacctgtctgacctgtcagcggtctcagaggttcctgaatgacccagggcatcttctatggggcgaccggcctgaggcccagttagggtcgcaggccgactccaaaccattacagccattacccaacactgcccattccatcagcgaccgtttaccagaagagaagatgcagactcagggttcctcaaatcaatag

SEQ ID NO: 209760 - DNA, 1557 bp, synthetic construct
  misc_feature 1..1557: note = Description of Artificial Sequence: Synthetic coding sequence
  source 1..1557: mol_type = other DNA
atggccgagaccagcctgctggaggccggcgccagcgccgccagcacagcggcagccctggaaaacctgcaggtggaggcgagttgctctgtttgtctggagtatctaaaagaaccagtcattattgaatgtggacacaatttctgcaaagcatgtattacaaggtggtgggaagatcttgaacgcgattttccatgccccgtgtgccgaaagacttcacggtacagaagtctgcggccgaatcggcagctgggctcgatggttgaaatcgccaagcagctgcaagctgtcaagcggaaaatccgggacgaatctctatgtccccagcaccacgaggcgctttcattattctgttacgaggaccaagaagccgtttgcctcatttgtgctatttcccacacccatagggcccatacagtagttcccctggacgatgccacccaggaatataaggaaaaactgcaaaaatgcctggaacccctggagcaaaagctgcaggagattacaaggtgcaaaagttctgaagaaaaaaagccaggcgagctgaagcgactggtagagagcagacgtcagcagatcctgagggaatttgaggagctgcatcggaggctcgatgaggaacagcaggtgctcttgtcaagacttgaggaggaagagcaggatatcctgcagaggctgagagagaacgctgcccatctgggagacaaacgaagagatctggcacatctggccgcagaggtagaagggaagtgcctccagtctggcttcgagatgttaaaacccgtgctgtccgcccgagaaaaaaacatcccccggaaattcggaggaagccttagtactatttgtccgcgcgatcataaggcacttctgggcctggtgaaggaaattaaccgctgcgaaaaggtgaaaaccatggaagtgacgagtgtctcgatagaactagaaaaaaacttctctaacttcccccggcagtatttcgctcttcgaaaaattctgaagcagcttatcgctgatgtgacgctggacccagagactgcccatccaaatctggtcctgagtgaagaccgcaaatcggtaaaattcgttgaaacacgacttagagatcttcccgacactcctagacgctttaccttctacccctgcgttctggcaacagaaggctttacttctgggcggcactattgggaggtggaagtgggcgataagactcattgggccgtgggcgtatgccgcgattccgtctcccggaagggagagctgacacccctacccgagactggatattggcgggtccgattatggaacggcgacaagtatgctgctaccacaaccccgtttacccccttgcacattaaagtcaagccaaagagggtgggtattttcctcgactacgaggcggggactctatcattttacaatgtgacagatcgaagtcatatatatacgtttactgacacattcaccgagaagttgtggccacttttctaccctggaattcgtgccggccgcaaaaatgcagctcccctgaccatccggccaccaaccgattgggagtag

SEQ ID NO: 209761 - DNA, 1254 bp, synthetic construct
  misc_feature 1..1254: note = Description of Artificial Sequence: Synthetic coding sequence
  source 1..1254: mol_type = other DNA
atggtggagatcgccaagcagctgcaggccgtgaagcggaagatccgagatgaatccttgtgcccacagcatcacgaggcactctctctcttctgttacgaggaccaggaagccgtgtgtctgatctgtgccatcagccacacacacagagcacacacggtggtgcctctggatgacgcgactcaggagtataaagagaaactgcaaaagtgtctagagccactggagcagaagttgcaagaaatcacaaggtgtaagtcatctgaggagaagaagcccggcgagctcaagcgccttgtggagagcagacggcagcagatcctcagagagttcgaggagctgcaccgacggttagacgaagagcagcaggtgttgttgtcccgcctggaggaggaagaacaggacatattacagcggctgcgtgaaaacgctgcacacctgggcgataagcggagagacctggctcacttggctgctgaagtggagggcaagtgtctacaatccggtttcgagatgctcaaaccggtattgtcagctagagaggaatgcgaaaaagtgaagactatggaggtgacaagcgtgtccatagagcttgaaaagaatttttcaaatttcccgagacaatacttcgccctgagaaaaatcctgaagcaactcatcgccgatgtaacattggatccggagacagcccatcctaacctggtgctgagtgaggatcgtaagtctgtgaaattcgtcgagacacggctcagggatctgcctgacacccctcgccgattcactttttatccctgtgtcctggccaccgagggctttacctccgggcgccactactgggaagtcgaggctgctcactgtgttcttgctcaagaccctgagaatcaggcattagcacgcttctactgctatactgaaaggactattgcaaagcgactggtacttaggcgggaccctagcgttaaacgcacactgtgccgagggtgtagcagcctcctcgtacccggtcttacatgcacccagaggcagagacgctgccgcggtcaacggtggaccgtgcagacctgccttacttgccaaagatcccagaggttcctcaacgacccgggccacctgctgtggggagatcgccccgaggcacaactggggtcccaagccgactcaaagcctcttcaacctctgccaaacacggcccacagtatctctgaccggctgcccgaggaaaaaatgcagactaaggggagttctaatcaatag

SEQ ID NO: 209762 - DNA, 1236 bp, synthetic construct
  misc_feature 1..1236: note = Description of Artificial Sequence: Synthetic coding sequence
  source 1..1236: mol_type = other DNA
atggccgagaccagcctgctggaggccggcgccagcgccgccagcacagctgctgcactggaaaatttgcaggtggaggcgagttgctcggtttgcctagagtatctcaaagagcccgtcataatagagtgcggacacaacttttgcaaggcatgcatcaccaggtggtgggaggatctcgaacgggactttccatgccccgtctgccgtaaaactagtcgatatagaagtctacgacccaacagacagcttggttcaatggtggaaattgccaaacagctgcaggccgtgaaaaggaaaatccgtgatgagtccctgtgtccacagcatcatgaagctctgtccttgttttgttacgaagatcaggaggccgtttgcctcatttgtgccatcagccacacccacagggcgcataccgtggtcccactagatgacgcgacacaggaatacaaagagaagctgcaaaaatgcctcgagcccctggaacagaagctgcaggagataaccagatgtaagtctagtgaggagaaaaaacccggagagcttaagaggctggtcgagtcacggcggcagcagattctgcgagagttcgaggagctccacaggcgcctggacgaagaacagcaggtgctgctctccagactggaagaggaggagcaggatatccttcaaagacttcgggagaacgctgcacatctgggggataagcgccgggaccttgctcatctggctgctgaagttgaagggaagtgtctgcagtccggtttcgagatgttgaagcctgtgctgtccgccagggaggagtgcgaaaaggtgaaaactatggaggttacttctgtttccattgaattggagaaaaatttttctaactttccaaggcagtactttgcattgagaaaaattctgaagcaattgattgccgatgttactctcgatcctgaaactgcccatcccaacctcgtgctgagtgaagaccgcaaaagcgtaaaattcgtggagaccaggttgcgcgatctacccgacacaccacggagattcaccttctacccctgcgtcctagctacggaggggtttactagcggcaggcattactgggaggtcgaagtaggtgacaaaactcattgggcagtcggagtgtgtagagacagcgtgtcacgaaaaggcggatgcggctacggaatgggcacaaacatgcagccacccccacacctgcttccgctgtgtacatctaggtag

SEQ ID NO: 209763 - DNA, 1254 bp, synthetic construct
  misc_feature 1..1254: note = Description of Artificial Sequence: Synthetic coding sequence
  source 1..1254: mol_type = other DNA
atggtggagatcgccaagcagctgcaggccgtgaagcggaagatcagggacgagagcctctgcccgcagcatcacgaagcccttagcttattctgttacgaggaccaagaagcagtgtgcctcatctgcgccatctcgcacactcaccgggctcatacggtggtgcccctcgatgatgctactcaggaatataaagagaagttgcagaagtgcctagaacccctggagcagaagctccaggaaatcacacgatgtaagagctccgaggaaaaaaaaccaggcgagctgaagagactcgtcgaatctaggagacaacaaatactacgtgagttcgaggagctgcaccgcagattagacgaagaacagcaggtgctgctcagtaggctcgaagaggaagagcaagatatactgcagaggcttagagagaacgccgctcatcttggtgacaagaggagggacctcgcacatttagcagctgaagttgaagggaaatgtttgcagtccggctttgagatgctgaaacctgtgctgtcagcccgcgaggagtgcgagaaagtgaaaaccatggaagtaactagcgtatctatagaactggaaaagaatttcagtaactttccgcgacagtactttgccctgagaaagatcctgaaacagctgatcgcagacgtgacacttgacccagagacggcacatcctaatctggtgctgagtgaggacagaaaatccgtgaagtttgtggaaacacggctaagggacctgccagacacacctcgcagatttactttttatccttgtgtcctagcgaccgaagggtttacttccgggaggcactactgggaggtggaggcggcccactgcgtcttagcacaggatcctgagaatcaggccctggctcgattttactgttatacagagcggacaatcgccaaaaggctggttctgaggcgggacccttccgtcaagcgcaccctatgcaggggatgcagcagcctcctcgttccaggcctcacttgcacccaacggcagcgacgctgccgcggtcaacgctggacagttcagacctgtttaacgtgccagagaagccagcgatttttaaatgacccgggccacctgctgtggggtgaccggcctgaggcacagctcggctcacaggctgactccaaacctttgcaaccactgcccaacaccgcacatagcatctcggacaggctccccgaagagaaaatgcaaacccagggaagcagcaaccagtag

SEQ ID NO: 209764 - DNA, 1557 bp, synthetic construct
  misc_feature 1..1557: note = Description of Artificial Sequence: Synthetic coding sequence
  source 1..1557: mol_type = other DNA
atggccgagaccagcctgctggaggccggcgccagcgccgccagcaccgcagctgcactggagaatttgcaggtcgaagcttcctgtagtgtatgtctcgaatacttgaaggagcctgtgatcattgaatgtggccacaatttttgtaaggcgtgtattacacggtggtgggaggatttggaaagagacttcccatgccccgtgtgtagaaagacatcaaggtatcgcagtttgcgtccgaatcgccagctgggaagtatggttgagatcgcgaagcagctgcaggcagttaaacggaaaattagggatgagtctttgtgcccacagcaccatgaagcactatcactgttctgttatgaagaccaagaggcggtgtgcttgatttgtgccatatcacacacccacagggcccacacagtggtacccttagatgatgctacgcaagagtataaggaaaaattgcagaagtgtctggagcctctggaacagaagctccaagaaattacaaggtgtaaaagttctgaggagaaaaaacccggtgagctgaaacgcttagtggaatcacgaagacaacaaatcctgcgggaatttgaggagctgcaccgtcgcttggacgaggagcagcaggtgctcttaagcaggctggaggaggaggaacaggatatcctccagaggctgcgagagaacgccgctcacctgggtgataaaaggagggacttagcccaccttgcggccgaggtggagggaaagtgccttcaaagcggcttcgaaatgctgaaggacgtgaagtcaaccctggaaaaaaatatcccacggaagtttggtgggtccttatccaccatctgtcctagagaccacaaggctttacttggcctggtcaaggagatcaaccgatgcgagaaagtgaagacaatggaggtgaccagcgttagcatcgaactcgaaaaaaacttcagcaattttccacgccagtattttgcccttcgaaagatcctcaagcagcttattgctgacgttactctggatcctgaaactgcccacccaaacctcgtcctctccgaagataggaaatctgttaagttcgtggaaacacggctccgggatctacctgatacacctaggcgtttcacattctatccatgcgtcttggccacagaaggtttcacatctggccggcactactgggaagtcgaagtcggtgataaaacccactgggctgtgggcgtctgtcgcgactcagtgagtagaaaaggtgaactgacacctttgcctgagacagggtattggcgagtccggctctggaatggggataagtacgctgctacaacgacgccattcaccccacttcacatcaaggttaaacctaagcgagttggcatttttctggattacgaggctggaaccttatcattctacaacgttacagatagatctcacatctacactttcacggacacattcaccgagaaattgtggccactcttttatcccggcattagagccgggagaaagaacgcggccccactgaccatccgaccacccacagactgggagtag

SEQ ID NO: 209765 - DNA, 1557 bp, synthetic construct
  misc_feature 1..1557: note = Description of Artificial Sequence: Synthetic coding sequence
  source 1..1557: mol_type = other DNA
atggccgagaccagcctgctggaggccggcgccagcgccgccagcaccgccgcggccttggaaaatctgcaggtggaggcttcatgttcggtgtgcctagagtacctcaaagaacccgtgatcattgaatgtggccacaatttctgcaaagcgtgcatcacacgctggtgggaagatttagagcgagattttccatgtcctgtctgccggaaaaccagtcgttacagaagcctacggccgaaccggcagctcgggtctatggtggaaattgccaagcagctgcaagccgtgaaaaggaagattagagatgaaagcctgtgccctcaacatcatgaagcattgagcttattttgttacgaagatcaagaggcggtgtgccttatctgcgctataagtcacacacaccgggcacacaccgtggtcccacttgacgacgccactcaggaatacaaagagaaactccagaaatgtctagagccgttggagcaaaagctacaggagattacacgctgcaaatcttcagaagagaaaaagccgggggagctcaagcggctggtggagtctcgcaggcagcagattctcagagagtttgaggagctgcaccggaggttggacgaggaacagcaggtgcttctgtcacgattagaagaagaggaacaggacattctgcagcgtctgcgagagaatgccgcccatctcggggacaaacggcgcgatttagcacaccttgctgctgaagtagaagggaagtgtcttcagtctggcttcgagatgctgaaggatgttaagtctaccctggagaagaacattccccgcaaattcgggggttccctctctacaatctgcccacgggaccataaagctctattagggcttgtgaaggagataaatcggtgcgagaaggtgaaaaccatggaggtgactagtgttagcatagaactcgagaagaacttttcgaactttccaagacagtactttgctctgaggaaaatactcaagcaactgattgccgacgttacccttgaccctgagactgctcacccaaacctggtgctgtctgaagaccgcaaatcagtgaagttcgtcgagacacgcctgcgcgatctgcctgatacacctcggaggttcacattttacccttgcgtcctcgcaacggaaggttttacttccggtcggcattactgggaggtggaggtaggtgataagacgcactgggccgtaggcgtgtgtagggacagtgtttccaggaagggcgaactgaccccgctgcctgaaactgggtactggcgcgttaggctttggaatggcgataaatacgcagcaactaccaccccattcacacccctccatataaaagttaagcccaaaagggtcggaattttcttggattatgaggccggtacgttgtccttttataatgtgaccgataggtcccacatttacaccttcacagacaccttcacagagaaactttggccattgttctacccaggaatccgcgccggacgcaaaaacgcagctccactgacaatccgcccacctaccgactgggaatag

SEQ ID NO: 209766 - DNA, 1467 bp, synthetic construct
  misc_feature 1..1467: note = Description of Artificial Sequence: Synthetic coding sequence
  source 1..1467: mol_type = other DNA
atggccgagaccagcctgctggaggccggcgccagcgccgccagcactgccgcagctctggagaacttacaggttgaagccagctgctccgtctgcctggagtatctcaaagaacccgttattattgaatgtgggcacaacttttgtaaggcctgtattactaggtggtgggaagatctggaaagggacttcccctgtccagtgtgtcgaaagacaagcagataccgctccctccgacctaatagacagttgggctccatggtcgagattgctaaacagttgcaagctgtcaagaggaaaataagagacgaatctctctgccctcagcaccacgaggccttgtcgcttttctgctacgaagatcaggaggccgtgtgcctaatttgtgccattagccatacacatcgggcccatacggtcgtgcctcttgacgacgccacccaggagtataaggaaaaactgcagaagtgcctggagcctttggagcagaaactgcaggaaatcacaagatgtaaaagctcagaggagaaaaagccaggcgagcttaaacggctagttgagtctagaaggcagcagatcctgagagaatttgaagagctccatcgccgtctcgacgaggaacaacaggtgctcctgtctcggctggaggaagaagaacaggacattctccagagactgagagagaatgctgctcacttgggtgacaagcgcagggacctcgcccatcttgcagctgaggtggaaggaaaatgtctgcaatccggctttgagatgttgaaaccggtcctctccgcccgcgaggagtgcgagaaggtgaaaaccatggaggtgactagtgtgtcaatagagctggaaaagaacttcagcaactttccccgccaatatttcgccctgcgcaagatcttaaaacaactcattgccgacgtgacgcttgacccagagacggcgcaccctaatctggttctgtcagaagatcggaaatcagttaagttcgtggagaccaggctgagagacctgcctgataccccgcggagattcacattctatccgtgcgtcttggctacagaggggtttacctcaggacgacactattgggaggtggaggtgggggacaagacacactgggctgtcggtgtgtgtagagattctgtgtcaaggaagggagaactcacacccctaccggagactgggtattggagagtccgtctatggaatggcgataagtatgctgccaccacaaccccttttacaccgctgcacatcaaagttaagccaaagagagtagggatcttcctagactatgaggccgggacattgagtttttacaacgtgactgacagatcacatatatatacattcaccgacacattcacagaaaaactgtggcctcttttttaccctggtatccgagctgggcgaaaaaacgctgctccactgacgattaggcctccaaccgattgggagtag

SEQ ID NO: 209767 - DNA, 1467 bp, synthetic construct
  misc_feature 1..1467: note = Description of Artificial Sequence: Synthetic coding sequence
  source 1..1467: mol_type = other DNA
atggccgagaccagcctgctggaggccggcgccagcgccgccagcacggctgccgctctggaaaacctacaggtcgaagcaagctgtagtgtttgcctggagtacttaaaagagcccgtcatcattgaatgcgggcacaacttctgtaaagcttgcataacccggtggtgggaggacctggaacgggattttccttgtcccgtgtgccgcaagacctcccggtaccgctcgttgcgccctaacagacagctgggttctatggtggaaatcgctaaacaattgcaggccgttaagcgaaagatccgcgacgaaagtctctgtccccagcaccacgaggccctgtccctcttttgttatgaggaccaggaagctgtctgcctgatctgcgcaatttcacacactcatagagctcataccgtagtgccactggatgatgccacgcaggaatataaggagaagctgcaaaaatgtctggagcctcttgagcagaagctccaagagattacccgatgtaagtcctcagaggagaaaaagccaggtgagctgaagcgcctagttgagagccgccgtcaacagattttaagagagttcgaggaactgcataggaggctggatgaagaacagcaagtgctcctctcccggctggaggaagaggagcaagatatcctccaacggctgcgagagaatgccgcgcacttgggtgataagaggcgagatctggcccatttggccgctgaagttgaaggcaaatgtctccaatcgggctttgaaatgctgaagcctgtgctgtcggcaagggaggaatgtgagaaagtgaaaacgatggaagttaccagcgtgtcgatcgagttggagaagaatttctctaactttccacgccagtattttgcattacgcaaaattctcaaacagctgattgctgacgtgaccctggatcctgaaacggcacatccaaatcttgttctcagcgaagaccggaaatcagtaaagtttgttgagacgcggctcagggatctgcccgacacaccgaggcgtttcactttctatccgtgcgtgttggccacagaaggatttacctcaggtagacactattgggaagtggaggtaggggacaagactcactgggccgtgggggtgtgcagggattccgtctcgcgaaagggggagctgacacctctgccagaaacgggctattggcgggtgaggctttggaatggggataagtacgccgctacgactaccccattcacccccctgcacatcaaagttaagccgaagagagttggcattttccttgactacgaggctgggacgcttagtttttacaatgtgaccgacaggtctcacatttatacattcacagatacattcacagaaaagctgtggcccctgttctaccctgggattagagccggtcgtaagaacgcagcccctctgacgatccgtccaccaacagactgggagtag

SEQ ID NO: 209768 - DNA, 1254 bp, synthetic construct
  misc_feature 1..1254: note = Description of Artificial Sequence: Synthetic coding sequence
  source 1..1254: mol_type = other DNA
atggtggagatcgccaagcagctgcaggccgtgaagcggaagatccgggacgagagtctgtgcccccagcaccatgaagcactctctctgttttgttatgaggatcaagaggccgtgtgcctgatatgtgctatttcccacacgcaccgagcacataccgtcgtgccattggatgacgcaactcaagaatacaaagagaagttgcaaaagtgtcttgaacccttggagcagaagctgcaagagattacacgctgcaagtccagcgaggagaaaaagcctggggagctgaaaaggctggttgagagtagacggcagcagattctgcgggagtttgaggagctgcatcgacgcctcgatgaggagcagcaggtgttgctgagcagacttgaggaagaagaacaagatattctgcagcggctgagagagaacgccgctcacctgggagacaagcggcgcgatctagcccatctggccgccgaagtggaaggaaagtgtctgcaaagtggcttcgaaatgctgaaacctgtgctcagtgctagagaggaatgcgaaaaggtaaagaccatggaggtgacctctgtgtctatcgagctggagaaaaacttctctaattttcccaggcagtactttgcactgaggaaaatcctcaagcagctgattgcggatgtgaccctcgacccggaaacggcccacccaaatctagttttgtcagaggaccggaaatccgtaaaattcgtggaaacccggctccgggacctgcccgacaccccccgtagatttacattttacccctgcgtgttagcgactgaaggctttacatctggccggcactactgggaggtggaagctgcacactgcgtgctcgctcaggaccctgaaaaccaggcccttgccaggttctactgctatacagaaagaaccattgctaagcgactcgtcctgcgaagggatcccagcgtgaaaagaacactctgtcgtggttgttcctctctgctggtacctggcctgacctgcacgcagagacagagacggtgcaggggacagcgttggaccgtacagacttgcctcacttgccagagatcccagcggttcctgaatgaccccggccacctgctgtggggtgaccgccctgaagcacagctgggcagccaggcagacagcaaacccctgcagccactcccgaatactgcacactccatcagtgatcgtctccctgaagagaagatgcaaacgcagggcagcagtaaccagtag

SEQ ID NO: 209769 - DNA, 1893 bp, synthetic construct
  misc_feature 1..1893: note = Description of Artificial Sequence: Synthetic coding sequence
  source 1..1893: mol_type = other DNA
atggccgccgtggccatgacccccaaccccgtgcagaccctgcaggaggaagcagtctgcgctatttgcttggactacttcactgaccctgtgagcatcgggtgtgggcataacttttgccgggtgtgtgttacacaattgtggggtggagaggatgaagaggacagagacgagctcgatcgcgaagaagaggaggaggacggcgaggaggaggaggtcgaggcggtgggggccggagctggatgggatactcctatgcgggacgaagattacgagggtgacatggaagaagaggtggaggaggaagaggagggggtgttttggacctcgggcatgagtaggtcgtcttgggataacatggattacgtgtgggaggaagaagatgaggaagaggatctggactactacctgggcgacatggaggaggaggacctgagaggagaggatgaagaggacgaagaagaggtcctggaggaagtggaagaggaagacctggaccccgtgacacctttgccacctcctccagctccgagacgctgctttacttgtccacagtgtcgcaagtcttttccgcggaggtccttccgcccaaacctccaactggcgaatatggtgcaagttattaggcagatgcatccgacccccgggcgcgggtcaagagtgacagaccaaggcatttgcccgaagcatcaggaagctcttaagcttttctgtgaggtcgacgaagaagctatctgcgtcgtgtgcagagaaagtaggtcgcacaaacagcactccgtggtgcccctggaagaagtcgttcaggagtacaaagccaagctgcagggtcacgttgaacccctcaggaagcaccttgaggctgttcagaaaatgaaagccaaggaggaaaggcgggttaccgaactcaaatcccagatgaagtccgaacttgccgctgttgcatctgaatttggtaggctgacaaggtttctcgcggaagaacaggcagggcttgaaagacggctgagagaaatgcacgaagctcaactgggcagggctggcgccgcagcttcgagattagccgaacaagccgctcagttaagcagactgctcgccgaggcccaggaacgctcgcagcaggggggactccggctgttacaggacatcaaagaaaccttcaatagatgtgaggaagtgcagcttcagccccccgaggtttggagcccagacccttgtcagcctcacagtcatgactttttgactgacgctatagtccggaaaatgagtcggatgttttgccaggcggccagggtagatctgactctggaccctgatactgctcaccctgccctgatgctttccccagaccggcgaggagttaggttagccgagcgaaggcaggaggtcgcggaccatccaaaacgcttctccgcagattgttgtgtgctgggggcccagggcttcaggtccggccgtcattactgggaagtcgaagttggtggacgacgagggtgggccgtcggcgctgccagagaatctactcatcacaaagagaaggtgggaccaggcggtagttccgtgggcagcggagacgccagctcttcacggcaccatcaccgccgccggcgtctccacctgccgcagcagcccttactacagcgggaagtgtggtgtgtaggcaccaacggaaagagataccaggctcaatcctcaacagagcagacgctgctctcccccagtgagaagccgaggaggttcggtgtttatctggactacgaggctgggcggcttggcttctacaatgcggaaaccctggctcacgtgcatacattctctgctgcctttctcggcgagcgcgtgtttcctttcttcagagtcttgagcaaggggacacgcatcaagctgtgcccctag

SEQ ID NO: 209770 - DNA, 1557 bp, synthetic construct
  misc_feature 1..1557: note = Description of Artificial Sequence: Synthetic coding sequence
  source 1..1557: mol_type = other DNA
atggccgccgtggccatgacccccaaccccgtgcagaccctgcaggaggaggcagtctgtgctatttgcctggattatttcactgacccggtttcaattgggtgcgggcataatttctgtcgagtgtgcgtcacccaactttggggaggagaagacgaggaggatcgcgatgaactggacagggaagaagaagaggaggacggggaggaggaagaagtggaagctgtcggcgccggcgcgggatgggacacacccatgcgcgacgaagactatgaaggcgatatggaggaggaagtcgaggaggaggaggagggagtgttttggacatcgggcatgagccgaagttcatgggacaacatggattatgtatgggaggaggaagatgaggaagaagacctggactactatcttggagacatggaggaggaggacctgaggggcgaagacgaggaagacgaggaagaggtccttgaggaggtggaggaggaggacctggatccagtgacccccctgcctccccctccggccccacgcaggtgtttcacatgtccacagtgtagaaagtcctttcctagaaggagctttcggccaaacctccagcttgctaacatggtccaagtgatccgccaaatgcatcccacgcccggccgagggtcgcgggtcacggaccaaggtatctgccccaaacatcaggaagcactcaagctgttttgcgaagttgatgaggaggcaatctgtgtcgtgtgcagagagtcacggagccataagcagcacagcgtggtacccctggaggaggtggtccaggagtataaagctaagttgcagggtcacgtcgaacctcttcgcaaacacctcgaagctgtgcagaagatgaaagcaaaagaagagcgccgtgtcacagagctgaaatcccagatgaagagcgaattagccgccgtcgcaagtgagtttggacgactcacccgcttcctggccgaggaacaagcgggactggagcgtcggctgagagaaatgcacgaagctcagcttggcagggctggtgccgccgcgtccagattagccgaacaggccgctcaactctcacgtctgcttgctgaggcccaagaacgaagccagcaagggggcctccgactattacaggacattaaagagacattcaacagatgcgaggaagtccagctccagcccccagaagtctggtctccagatccatgccagcctcacagccacgatttcttgacagacgcaattgtgagaaaaatgtctaggatgttttgccaagcagctcgggtcgacttgaccctcgatcccgacaccgctcatcctgctttaatgctcagtcccgaccgaagaggagtaaggcttgccgaacgccggcaggaagtggcggatcaccccaagcggttttcagcggattgttgtgtactgggcgctcagggattccgctccggccgccactactgggaggaacctaaggaaccgtcctggcctccggcccagcccagtctaacctattacgtgtgtccaaccgatagacccgagttctccttcacttag

SEQ ID NO: 209771 - DNA, 453 bp, synthetic construct
  misc_feature 1..453: note = Description of Artificial Sequence: Synthetic coding sequence
  source 1..453: mol_type = other DNA
ctgcaggaggaggccgtgtgcgccatctgcctggactacttcaccgacccagtgtctataggatgcggccacaatttctgccgagtatgtgtaacacagttgtgggggaggcgcggaggtggctctggaggctacccagttacgcctctccccccgccaccagccccccggcgctgctttacatgccctcaatgtcggaagagctttccacgtcgatcttttcggcccaacctccaactcgccaatatggtgcaggttatccgccaaatgcacccaacgcctggcaggggctcccgggttacggatcaagggatttgccctaaacaccaggaagcgctcaagctgttttgcgaggtcgacgaagaagccatttgtgtggtgtgccgtgagtcacgctcacacaaacaacattccgtagttccgctggaggaagtggtccaagaatataaatag

SEQ ID NO: 209772 - DNA, 948 bp, synthetic construct
  misc_feature 1..948: note = Description of Artificial Sequence: Synthetic coding sequence
  source 1..948: mol_type = other DNA
atgaaggccaaggaggagcggcgggtgaccgagctgaagagccagatgaagtccgagctggctgcagtggccagtgaattcgggcgcttaaccaggtttctggccgaggagcaggcgggcctcgagcggagacttagagagatgcacgaggctcagcttggtcgggccggcgcagccgcgagtagactggcggaacaagcggctcagctcagtaggttgctggcagaggcccaggaaaggagtcagcagggaggcttaagactgctgcagcaggacattaaagagacctttaaccgttacgctatagttcgaaaaatgtctcggatgttttgccaggccgcccgcgtggatcttaccctcgatcccgacacggcacacccagcacttatgctttctcccgatcggcggggggtgcgcctcgccgagaggagacaggaggtggccgaccaccctaagcgcttttctgctgattgctgtgtactgggtgcgcagggcttcagatctggccgccattactgggaggttgaggtgggcggtcgcagaggctgggctgtaggcgctgcgagagaaagcactcaccacaaagaaaaggtcggccctggcggatcctctgtggggtctggcgatgcgagctcgtcaaggcatcatcacagaagaaggcgcctccaccttccccaacaacccctgctccagagagaggtgtggtgcgtcgggaccaatgggaaacggtatcaggcccaaagttcaactgaacagaccttactgagcccttccgagaagcctcgaaggtttggagtgtatctggattacgaggccgggagattaggcttctacaatgctgaaacgttggctcacgtgcacaccttttccgccgcatttctgggagagagggtttttccattctttcgcgtgctctcaaaagggacccgaatcaagttatgtccttag

SEQ ID NO: 209773 - DNA, 1035 bp, synthetic construct
  misc_feature 1..1035: note = Description of Artificial Sequence: Synthetic coding sequence
  source 1..1035: mol_type = other DNA
atggccagcggcgtgggcgccgccttcgaggagctgccccacgacgggacatgtgacgaatgtgagccagatgaagcaccaggtgccgaggaagtttgccgagagtgtgggttctgctactgtaggcggcacgctgaggctcatagacagaagtttctaagccaccatctcgcagagtatgtacacgggagccaagcgtggacaccccctgcggacggagagggcgccgggaaagaagaagcagaggtgaaggtggaacaggagcgggagattgaaagcgaggccggagaggagtccgaatcagaggaagagtccgagtctgaagaagaatctgaaacagaggaagagagcgaagatgagagtgatgaagaaagcgaggaggattctgaagaggaaatggaggatgagcaagagagtgaagctgaagaggataatcaggaagagggagaatctgaggccgagggtgagacagaggcagaaagtgagttcgacccggagatcgagatggaggccgaacgagttgccaaaaggaagtgtcctgatcacggtctggatcttagtacttactgtcaggaagaccggcaactgatatgcgtgctctgtcccgtgattggcgcacatcagggacaccaactctctaccctggatgaagctttcgaagagttgcgatccaaggactcgggcggactcaaggccgctatgattgaactcgtcgagcggttaaaatttaagtccagcgatccgaaggtcacacgagaccaaatgaagatgtttatccagcaagagtttaagaaagtacaaaaagtgattgccgacgaagaacagaaggccctccatctcgtcgacattcaggaggcaatggcaactgctcacgttaccgaaatcctcgccgacatccagagtcacatggatagactgatgacacagatggcccaagctaaagagcaactagacactagcaatgagtccgcagagccaaaggcagaaggggacgaggaaggcccctctggcgcctccgaagaggaggacacgtag

SEQ ID NO: 209774 - DNA, 1743 bp, synthetic construct
  misc_feature 1..1743: note = Description of Artificial Sequence: Synthetic coding sequence
  source 1..1743: mol_type = other DNA
atgagcgagaaccggaagcccctgctgggcttcgtgagcaagctgacttcaggcactgctcttggtaattctggcaagacacactgccccctctgtttaggattatttaaggctcctaggctgctcccatgcttacacacggtgtgtaccacctgcctcgaacaattggagccattctcggtggtcgatatccgggggggggatagcgatacatcttccgagggcagcatatttcaggagctcaaaccccggagcctacagtcacagattggaatcttatgtccagtgtgcgacgcgcaggtcgatctgcccatggggggcgtgaaggccttgaccatcgaccaccttgcagtcaacgacgtcatgctcgaaagcttaaggggtgagggacaaggactcgtttgtgatctgtgtaacgatcgcgaggtagagaagcggtgccaaacttgcaaggctaatctgtgccatttctgttgtcaggctcacagacgccagaaaaagacgacctaccatacaatggtcgacctgaaggaccttaaaggatactcccgtatcggtaagcccatcctgtgtccagtgcaccctgccgaagagcttaggctcttttgtgaattttgcgatcgaccagtatgtcaagactgtgtggttggcgaacacagagagcacccttgcgacttcaccagtaatgttatccataagcacggtgactcagtttgggagctgctgaagggcacccagccacatgtggaggccctggaggaagctttggcccagatccacataatcaattctgccttgcagaaacgcgtggaagccgtagcagccgacgtccgcactttttcagagggatatatcaaagccatcgaggaacaccgcgataaactgttgaaacagctggaggacattcgcgctcagaaggaaaatagcctccagttgcagaaggcccagctagagcagctgctggccgatatgcggacaggagtggaattcaccgaacacctgctcactagcggtagcgatctggagattttaatcacaaagcgcgtcgtggtcgaaaggctacggaagctaaacaaggtccagtacagcacacggcccggtgtgaacgacaaaatccgcttctgcccacaggagaaagccggacagtgtcgcggctatgaaatctacggaacaataaacaccaaggaggtggacccggccaagtgtgtcctacagggcgaggacctccatagggcccgtgaaaaacaaacggcatcctttaccctcctttgcaaggacgcagcgggtgaaataatgggccgcggaggtgacaatgtgcaggtcgccgtggtgcccaaggataagaaggacagtcccgtacgcaccatggttcaggacaacaaagatgggacctactacatatcctacacgccaaaagagcccggtgtgtataccgtgtgggtctgtatcaaggagcaacacgtgcagggaagcccttttaccgtgatggtgcggaggaagcataggccacactccggcgtgtttcactgctgcaccttttgctcctcaggtggtcaaaaaacagctcgctgtgcttgcgggggcacaatgccaggtggataccttggatgcggccacggtcacaaaggccacccggggcatcctcactggagttgttgtggcaaattcaacgaaaagagcgagtgcacgtggaccggagggcagtccgccccccgatctctgctgagaaccgtggcattatag

SEQ ID NO: 209775 - DNA, 1572 bp, synthetic construct
  misc_feature 1..1572: note = Description of Artificial Sequence: Synthetic coding sequence
  source 1..1572: mol_type = other DNA
atgctgagcggcgtgaccctggagggcggcggcgcccggagcggcgagggcagaagatctcggaccgagttgaaaccccgctccctgcaaagtcagataggcatcctgtgcccagtctgtgacgcccaggtggacctgccaatgggtggtgtgaaggctctgactattgatcatctcgccgtgaatgacgtgatgcttgagtcgctcaggggcgaaggtcagggccttgtctgcgacctttgcaatgacagagaggttgagaaacgctgccaaacatgcaaagccaacttgtgtcatttctgttgtcaagctcacaggcgccagaaaaaaactacctaccacactatggtggacctcaaggatctcaaaggatatagtcggataggcaagcctattctctgcccagtgcatcctgcggaagaactccggctgttttgtgagttctgtgacagaccagtgtgccaggactgtgtggtgggcgaacatcgtgagcatccctgcgacttcacgtccaatgtcatccacaagcacggggactctgtgtgggaactgttgaaagggacacagcctcatgtggaggccctggaggaggcgctggcccagattcatatcatcaattcagctcttcaaaagagggtggaagctgtcgcagctgatgtgcggacattcagcgagggttacatcaaagctatagaggagcaccgcgacaagctactgaagcaattggaggatattagagcccagaaagagaacagtttgcagttacagaaggcacaactcgagcagctgctagccgatatgaggaccggagtcgaattcacagaacacctgttgaccagcgggagtgaccttgagatcttaattaccaagagagtcgtggtcgaaagacttaggaagctgaataaggttcaatactcaacgcgcccaggcgttaatgacaagataagattttgcccccaggagaaagctgggcaatgccgcggctatgagatttacggaactatcaataccaaggaggtggatccagccaagtgcgtgttacagggagaagacctgcatcgggcacgcgaaaagcagacagccagtttcacgctattgtgcaaagatgctgctggggaaatcatgggaagaggtggtgacaacgtccaggtggccgtcgtccccaaggataagaaggattcccccgtgaggactatggtgcaggataataaagatgggacctattatataagctatacaccgaaagagcctggtgtgtacactgtgtgggtgtgtattaaggagcagcacgtacaggggtctcctttcactgtgatggttagaagaaaacaccgcccacatagtggggtattccattgttgcacattttgttctagcggcggacagaagaccgctaggtgtgcttgcggggggacaatgcctggaggatatctggggtgcggacacgggcacaagggacaccctgggcatccacactggagttgctgtggcaaatttaacgaaaaatccgagtgcacatggacgggaggacagtctgcaccgagatccctcctgcggaccgtggccctgtag

SEQ ID NO: 209776 - DNA, 1689 bp, synthetic construct
  misc_feature 1..1689: note = Description of Artificial Sequence: Synthetic coding sequence
  source 1..1689: mol_type = other DNA
atgagcgagaaccggaagcccctgctgggcttcgtgagcaagctgacttccggaaccgccttaggtaactccggtaagacccattgtcccctctgtctcggactgtttaaggcaccgagacttcttccatgcctgcacacagtgtgtaccacttgcctggagcagctcgagccattctcagtcgtggatatccggggaggagatagcgacacatcgtcagaggggagcatctttcaagagcttaagccacgttccctgcagtcccaaataggcatattgtgccccgtgtgtgatgcacaggtagacctcccaatgggcggcgtgaaagccctgactatagaccatctcgcagttaatgacgtaatgcttgagtccttgcgaggtgaaggccaggggctggtttgtgacctttgtaatgacagggaggtggagaagcgatgccagacatgcaaagcaaatttgtgtcatttttgctgtcaagctcaccggaggcaaaaaaaaaccacataccacaccatggtcgatctcaaggatctaaaaggttactcaagaatcgggaagccaattctttgccccgtccacccggcggaggagctgcgcttattctgcgagttctgtgaccggcccgtttgccaagattgcgtggtaggagaacaccgggaacacccctgcgattttacaagcaacgtcattcacaagcacggcgattctgtgtgggaactgctaaaagggacccagccccacgttgaggcattggaagaggccttggcccagattcacataattaacagtgcgctgcaaaaacgggttgaggctgttgccgccgacgtgcgcaccttttccgaagggtatattaaggcgatcgaagagcatcgcgacaaactgctcaaacagcttgaggatataagagcacagaaggagaacagcttacagcttcaaaaggcacaattggagcagttgctggctgacatgcgtactggcgtggaatttactgaacacttactgacaagtggatcagacctcgaaatccttattacaaagcgagtggtagtagagcggctgcgaaagctgaataaagtccagtactccactcgtccaggagtgaatgataaaatccgtttttgtcctcaggagaaggctggccagtgtagaggctatgagatctatgacttgcaccgcgcaagggaaaagcaaactgcttcgttcaccctcctgtgcaaggacgcggccggagagattatgggtcgcgggggggacaacgttcaggtcgcagtggtccctaaggataagaaggactctcccgtgcgcactatggtgcaggacaacaaagatgggacctactatattagctacaccccgaaggagcccggtgtctacacagtctgggtgtgtatcaaggaacagcacgtgcagggctccccattcactgtaatggtgcgcaggaaacaccggccgcactctggggtgttccactgctgcaccttttgctcctccggcggacaaaagactgccagatgtgcctgtggtggcaccatgcctgggggctaccttggctgcgggcatggccacaagggccatccaggtcatccccactggagttgctgcggcaaattcaacgaaaaaagtgagtgcacttggacaggaggtcagtcggccccacggagcctgttgaggaccgtagctctgtag

SEQ ID NO: 209777 - DNA, 1917 bp, synthetic construct
  misc_feature 1..1917: note = Description of Artificial Sequence: Synthetic coding sequence
  source 1..1917: mol_type = other DNA
atggacggcagcggccccttcagctgccccatctgcctggagcccctgagggagcccgtaacacttccctgcggtcataatttctgcctcgcatgtctgggagcactttggccccatcgaggtgcctccggggcaggcggtcccgggggcgccgcaagatgcccactgtgccaggaaccttttccggacggcctgcagctccggaagaaccataccttgagcgagttgttgcagttgcgacagggctccggtcctgggagcggaccaggacccgcgccagctctggcaccggagccttcggcccctagtgccctccccagcgtaccggagccttctgccccatgcgctccagaaccctggccagcaggagaggaacctgttcgctgtgatgcttgtcctgagggcgcggcactcccagctgcactatcctgtttatcttgcctggccagtttttgtccagcgcacctgggccctcatgagcggtcacccgccttacggggtcaccgcctggtgccccctttgcggcggttggaagaaagtctgtgtcctagacaccttaggccccttgagcggtattgcagagccgagagagtttgtctctgcgaggcttgcgcagctcaggagcacagaggacacgaacttgtccctcttgagcaggagagggcccttcaggaggcggaacagagcaaggtgctgagtgctgttgaggacaggatggatgagctaggggctgggattgcccagtctcgaaggaccgtcgcccttattaagtccgcggcagtcgcagagcgcgaaagggtctctcgactcttcgccgatgctgctgccgctctacagggcttccagacccaggttctgggcttcattgaggaaggagaagccgcaatgttgggacgaagccagggcgacctaagaagacaggaggagcagaggagccgcttgtctcgtgccaggcaaaacctcagtcaggtccctgaggccgatagcgtgagctttctgcaggagctgcttgcacttcggctggccctagaggacggatgtggacctggccctggtcctcctcgcgaactgtcatttactaagagctcgcaggctgtaagggctgtgcgcgatatgctggcagtcgcatgcgtcaaccagtgggagcagctcagaggtcccggagggaacgaagatggcccccagaagctggactcagaagccgatgctgagcctcaggatctggaaagcacaaacctcttggagagcgaagccccacgggattatttcttaaaattcgcctatatcgttgatctggattccgataccgctgacaaatttctccagctgttcggcacaaagggcgtgaagcgggttctgtgccccattaattatccactctcacccactcgctttacacactgtgagcaagtactcggcgagggcgctctcgaccgagggacctattactgggaggtggagatcatagaagggtgggtgagcatgggagttatggcggaagatttttcaccacaagagccttatgatcgtggccggctgggacgaaacgctcattcttgctgcctccagtggaatggcaggtccttctctgtgtggttccatggcctagaagcgcctctccctcaccccttcagtccaacagtgggagtttgcctagaatacgccgacagggccctggctttctatgcagtgagggacggcaagatgtccctcctcagaaggctcaaagccagtagaccccgccgagggggtattcctgcttcccccattgaccccttccagtctaggctcgactcacactttgcaggtttatttacccacaggctgaaacctgcctttttcttagagtcagtggatgcccacctccagattgggcctctaaagaaatcttgcatctcggtgctgaaacggcgttag

SEQ ID NO: 209778 - DNA, 1482 bp, synthetic construct
  misc_feature 1..1482: note = Description of Artificial Sequence: Synthetic coding sequence
  source 1..1482: mol_type = other DNA
atggccagcggcatcctggtgaacgtgaaggaggaggtgacctgccctatctgcctcgaactgctgacgcagcctttgagcctagactgcggccactccttctgccaggcgtgtctgactgccaatcataaaaaaagcatgctcgacaaaggcgagtcatcctgccccgtttgtcgcatttcctaccaaccggagaatatacgccccaatagacatgtggcgaacatcgtcgaaaagctcagggaggtgaagctgtctcctgaaggacagaaggtcgaccactgcgctaggcacggggagaagctcttgctcttctgtcaggaggacggtaaggtgatttgctggctatgcgagagatcacaagaacaccgcggccatcacaccttcctgacagaggaagttgctcgcgaataccaagttaagttacaggccgctttggagatgttgagacagaaacagcaggaagccgaagaattggaggcagacattcgcgaagagaaggcctcctggaagacacagatccagtacgataagactaatgtcctggctgattttgaacagttgagagacatcctcgactgggaggagtcgaatgaattacaaaacctggagaaggaggaagaggacatactcaagagtctgacaaatagtgagaccgagatggtccagcagacccaatcgcttcgggaactgatttcagatctcgagcatagactccagggatctgtcatggagctgctccagaaggtatccggcaaaatcctccggactgagaatgttactctaaagaaaccagaaacttttccgaaaaaccaacgcagagtcttccgagcccccgacctgaaagggatgcttgaggtcttccgtgagctgacagatgtcaggcgttactgggttgacgttacggtcgccccgaataacatcagctgtgcggtgattagtgaagacaagcggcaagtgtcatctcctaaacctcaaattatatacggcgcccgaggcacccgttaccagacatttgtaaactttaattattgcacaggcattctcggaagccagagtatcactagcggcaagcactattgggaggtggatgtaagcaaaaaaaccgcctggattctgggcgtttgcgccggtttccagcccgacgctatgtgtaacattgaaaagaacgaaaactaccagcctaaatacggctactgggttattggacttgaagaaggagttaagtgctccgcattccaagactcaagcttccacaccccctcagtcccctttattgtccccctatccgtaattatatgtcccgatcgagtcggcgtgttcctggattacgaggcctgcactgtgtcattttttaacatcacgaaccatggctttcttatttacaaattctcccactgtagtttctctcagcccgtattcccgtatcttaatccacgcaaatgcggtgtacctatgactttatgtagcccaagctcttag

SEQ ID NO: 209779 - DNA, 981 bp, synthetic construct
  misc_feature 1..981: note = Description of Artificial Sequence: Synthetic coding sequence
  source 1..981: mol_type = other DNA
atggccagcggcatcctggtgaacgtgaaggaggaggtgacctgcccgatttgtctcgaactattgacacagcctttgtcactagattgtgggcactccttctgccaagcgtgcctgactgctaaccataaaaagagcatgctggacaagggcgagagttcctgccccgtatgtagaatttcttaccagccagagaacattcgaccgaaccgtcacgtggctaatatcgtggagaagctccgggaggtgaaactttctccagagggccaaaaagtggaccattgtgcacgccacggagagaagctcctgcttttctgtcaagaagatggtaaggtcatttgttggctttgcgaacgtagtcaagaacaccgcggccatcatacgttccttactgaggaggtggccagagagtatcaggttaaacttcaagccgctctcgagatgctgcgacaaaaacagcaggaggctgaggaactggaagctgacatcagggaagaaaaggcctcctggaagactcagatccaatacgacaaaacgaacgttctcgccgatttcgagcaacttcgggacatcttagattgggaagagagtaacgagctacaaaatctcgagaaggaggaagaggacattctaaaatctctgacaaactccgaaaccgagatggtgcaacagacacagagcttaagagaactgatcagtgacctggaacatcggctccaaggaagcgttatggagttgctgcagggagtggacggcgtgatcaagcgcacagaaaacgttacactcaaaaaacccgaaacctttccaaagaaccagagacgggttttccgggcccccgatttgaaagggatgctggaagtgttccgagaattgacagatgtgcgacgctattggggttggtcagctatggccagatccaggttcactgcaacctcaacaagtcagattcaggccattctgctcccacagccacctaagtag

SEQ ID NO: 209780 - DNA, 1482 bp, synthetic construct
  misc_feature 1..1482: note = Description of Artificial Sequence: Synthetic coding sequence
  source 1..1482: mol_type = other DNA
atggccagcggcatcctggtgaacgtgaaggaggaggtgacctgccccatttgtctcgaactattgacacaacctctttctctagactgcggacacagtttttgccaagcctgcttaactgcaaatcacaagaaatccatgttggataagggcgaatcctcttgtcccgtgtgtagaatttcttatcaaccagagaacattaggcccaatcggcatgttgccaacatcgtggagaagctgagggaggttaagctgtctcccgagggccagaaagtcgaccactgtgctcgtcacggcgagaaactgctcctgttttgccaagaggatggcaaggtgatttgttggctgtgcgagaggtcccaagagcaccgagggcatcatacattcctgaccgaggaagttgccagggagtatcaagttaaactgcaggccgcgttggaaatgcttaggcagaaacagcaggaagctgaggaactggaggccgatatccgagaggagaaggcttcatggaaaacccaaattcagtatgacaagactaacgtgctggccgattttgagcagttaagggacatcctcgactgggaggagagtaatgaattgcaaaacctggaaaaagaagaagaggatatattgaaatctctgactaactctgaaaccgaaatggttcagcagacacagtcactcagggagcttattagtgatttggagcaccgactccaggggtccgttatggagctgttacagggcgtggatggcgtcattaaaaggacggaaaacgtgactctgaaaaagcccgagacgtttcccaaaaaccagagaagggtattccgcgccccagatcttaaaggcatgctggaggtttttagggaactgacagacgttagaagatattgggtggacgttacggtggctcccaataatatctcctgtgcagttatcagtgaagataagagacaggtcagcagcccgaagccgcagattatctatggcgcaagaggcactagatatcaaacctttgttaattttaattattgtaccgggattttaggatcacagagcatcacaagtggtaagcattactgggaagtggatgtgtcgaagaagaccgcgtggatcctgggcgtctgcgcggggtttcagcctgacgccatgtgcaacatcgagaaaaatgagaattatcagcctaagtacgggtactgggtgatcggcttggaagaaggagttaagtgctccgccttccaggattcatcttttcatacccccagcgtcccattcattgtacctctgagcgtgattatttgtcccgacagggtcggtgttttcttagactacgaagcgtgtaccgtctctttctttaacatcaccaaccatgggttccttatatacaagttctcacactgcagtttttcccagcccgtgtttccatacctcaacccccgaaaatgtggagtcccaatgaccctgtgctccccctcctcatag

SEQ ID NO: 209781 - DNA, 1044 bp, synthetic construct
  misc_feature 1..1044: note = Description of Artificial Sequence: Synthetic coding sequence
  source 1..1044: mol_type = other DNA
atggccagcggcatcctggtgaacgtgaaggaggaggtgacctgccctatctgtctcgagctgctgactcagccattgagcctggactgtggacattccttttgtcaagcctgcctcacagctaaccataaaaagtcaatgctggataaaggcgagtcatcctgtcccgtgtgtcggatttcttatcaacccgagaatatccgccccaatcgacacgtggctaacatcgtggaaaaactgcgggaggttaagttgagccctgagggacaaaaggtggaccactgcgccagacacggtgagaaactgttgctcttctgtcaagaagacggcaaggtgatctgctggctttgcgagcgctctcaggagcatcgggggcaccatacctttttgaccgaggaggtggcaagagaatatcaggtaaaattacaggctgctctcgagatgctgagacagaagcaacaggaggctgaagagttggaggcagacatccgggaagagaaggcatcttggaagacccagatccagtacgataagacaaatgtgctcgcagacttcgaacagctgagggatattctcgattgggaagaaagcaacgagctgcagaacctggaaaaggaggaggaagatattctgaaaagtttaactaatagtgagacagagatggtacaacagacccagagcctgagagagcttatctctgatctcgagcaccggctacagggaagcgtgatggaactacttcagggagtggatggcgtgatcaaacgcacggaaaatgtgacactgaagaaacccgaaactttccccaaaaaccagcggagagtgttcagggcgcccgacctgaaagggatgcttgaagttttcagggaactgactgatgtgaggcggtattgggggaaagagaagagtcactaccataaacctccctgcggcctcagtctgctgctcagtctatcatttaggatcctctgttctctgttggggtcttgtttcaagatctacgatagccccagcaagacccacattacttatccttccctgtag

SEQ ID NO: 209782 - DNA, 984 bp, synthetic construct
  misc_feature 1..984: note = Description of Artificial Sequence: Synthetic coding sequence
  source 1..984: mol_type = other DNA
atggccagcggcatcctggtgaacgtgaaggaggaggtgacctgcccaatctgtttggaactgctcactcagcctcttagcttagattgcggccatagtttttgtcaggcatgcttgacggcaaatcacaagaaatctatgctggataaaggtgagtcttcctgccctgtgtgccgcatcagctaccagccggagaacattagacctaaccgccacgtggccaatatagtggagaagctgagggaagttaaactgagccctgagggacagaaggtagaccattgtgcccggcatggcgagaagctgctgctgttctgtcaggaggacggtaaggttatatgctggctctgcgagcgctcccaggagcaccgtgggcaccatacattcctcactgaagaagtagcccgagaataccaggtgaagctccaagcagccctggagatgttacggcagaagcagcaggaggctgaagaactggaagccgatatcagggaagaaaaggcttcctggaaaacccagatccagtacgataagacaaacgtgctcgccgattttgagcagttgagggacatactcgattgggaagagagcaatgaactgcaaaacctggagaaggaggaagaggacattctgaagtccttgacaaactccgaaaccgaaatggtccaacaaactcagagcctccgggagctgatttctgacctggagcaccgcctgcagggctccgtcatggagctcctgcaagccggcgtgcagtgtctgatcttacggacggagaacgtgacactcaagaaacccgaaactttcccgaagaatcagaggcgcgttttccgagcgcctgacttgaaaggaatgctcgaggtattccgagaactcacggacgtgcgtcgctattggggttggtctgctatggccagatctcggtttacagctacgtcaacatcccagatccaggccattctgttgccacagccacctaagtag

SEQ ID NO: 209783 - DNA, 981 bp, synthetic construct
  misc_feature 1..981: note = Description of Artificial Sequence: Synthetic coding sequence
  source 1..981: mol_type = other DNA
atggccagcggcatcctggtgaacgtgaaggaggaggtgacctgcccgatctgtctggaactcctaacacagcctctgagtctggattgcgggcacagtttctgtcaagcctgcttgaccgcgaaccacaaaaagagtatgctcgacaaaggcgagtccagctgtcctgtgtgcagaatttcttatcagcctgagaacattaggccaaaccgacacgtcgctaatattgtagaaaaacttagagaggtgaagttgtctcctgagggtcagaaagtggatcactgtgcaagacacggggaaaaattgctcctgttttgccaggaagatggcaaggtcatttgctggctctgtgaaaggagccaagaacacagaggccatcatacgtttctgacggaggaagtggccagggagtaccaagtgaaactccaagctgccctggaaatgctacgccaaaagcaacaagaagcagaagaactggaagccgatatacgcgaagagaaggctagctggaagacgcagattcagtacgacaagaccaatgttttggccgatttcgagcagttgcgcgatattcttgactgggaggagtcaaatgagcttcagaatttggaaaaggaagaggaagatatattaaaaagtctgacaaactcagaaaccgagatggtgcagcagactcaatcactgcgtgaattaatctcagacctggaacatagattacagggatcagtcatggagttactgcagggggtcgatggcgttatcaaacgcactgagaacgtcactctcaagaagcccgaaacctttccaaagaaccagcgaagagtgttccgggcgcccgacctgaagggaatgctcgaagtgttcagagagcttactgacgttcgccgatattggggctggtcagccatggctcggagcaggttcacagctactagcaccagtcagatccaagccattctactgcctcaaccccccaaatag

SEQ ID NO: 209784 - DNA, 630 bp, synthetic construct
  misc_feature 1..630: note = Description of Artificial Sequence: Synthetic coding sequence
  source 1..630: mol_type = other DNA
atggccagcggcatcctggtgaacgtgaaggaggaggtgacctgcccaatatgcctcgaactgttgacgcaacccctgagcctcgattgcgggcattctttctgccaggcctgcctaaccgccaaccataagaagagcatgttggacaagggcgagagcagctgccccgtatgcaggatttcgtatcagccagaaaatattagacccaacaggcatgtcgcgaacatcgttgagaaattgagggaggtgaagctatctcccgagggccaaaaggtggaccattgcgcaaggcatggggagaagctactgctattttgtcaggaagatggcaaggtaatttgctggttgtgtgagagaagtcaggagcatcgggggcaccataccttccttaccgaggaagtcgctcgggaatatcaggttaagctccaggccgccttagaaatgctccgccagaagcagcaggaagctgaggagctggaggccgacattagagaagaaaaggcatcctggaaaacccagattcagtacgacaagaccaacgtcctggccgactttgaacaacttagggacattttggattgggaagaatcgaacgagcttcagaacctagagaaggaagaagaggactag

SEQ ID NO: 209785 - DNA, 219 bp, synthetic construct
  misc_feature 1..219: note = Description of Artificial Sequence: Synthetic coding sequence
  source 1..219: mol_type = other DNA
atggccagcggcatcctggtgaacgtgaaggaggaggtgacctgccccatctgtcttgagctgttaacccagccacttagccttgattgtggccatagcttttgccaggcctgcctgaccgccaaccacaaaaagtcaatgctcgacaagggagagtcgtcttgtcctgtgtgcagaatatcctaccagccagagaacattagacctaaccgacactag

SEQ ID NO: 209786 - DNA, 816 bp, synthetic construct
  misc_feature 1..816: note = Description of Artificial Sequence: Synthetic coding sequence
  source 1..816: mol_type = other DNA
atggccagcggcatcctggtgaacgtgaaggaggaggtgacctgccctatctgtctcgaactactgacacagcccctctccttagattgcgggcactcattctgtcaggcatgtctcacagctaaccataagaaatctatgctggacaagggggaatcatcttgtccagtctgtcgcatcagttaccaacctgagaatattcgtccgaaccgacatgtagccaacattgtcgaaaaacttagagaagttaaactctcccctgaagggcagaaagtagatcattgtgcgagacacggtgagaaactgctcctcttttgccaggaagatggcaaagtgatttgctggctgtgcgaaaggtcccaggagcatcgaggccaccatacgtttctgacggaagaggttgcccgtgagtaccaggttaagctgcaggccgccctggagatgttgcgacagaagcagcaggaagcagaggaacttgaagcagacatccgagaagagaaagcatcttggaaaacgcagatacagtacgataagacaaatgttctggctgactttgagcaactgagagacatcctagactgggaggagtccaatgagctgcaaaacctggagaaagaggaagaggacattctgaagtccctcaccaactctgagactgagatggtgcagcaaacacagagcttacgtgagttgatctctgacctggagcaccggctgcaggggagcgtcatggagcttctgcaggatggggagcgagatctggaagaagctaggaactttagcaaaaagtctaaggaatccgtcagtagctcatag

SEQ ID NO: 209787 - DNA, 1464 bp, synthetic construct
  misc_feature 1..1464: note = Description of Artificial Sequence: Synthetic coding sequence
  source 1..1464: mol_type = other DNA
atggcctggcaggtgagcctgctggagctggaggactggctgcagtgtccaatttgcttagaagttttcaaagaacctctgatgcttcaatgcggccattcatactgcaagggctgcctcgtttctctgagttgtcacctcgatgcagagctccgctgtcctgtgtgtcgccaggccgtggacgggtctagctcactcccaaatgtttcattggctagagtgatcgaagccttgcgactcccaggagaccccgagccgaaggtttgtgtccaccaccggaacccactgtctctgttctgcgaaaaggaccaggaactgatttgcggactttgtggattactcgggagccatcagcaccatcccgtgaccccggtgtcaactgtgtattcgcgtatgaaggaggagcttgccgcgctcatctctgagctaaagcaggagcagaagaaagtcgacgagctgattgcgaagctggtgaataacaggacccgaattgtcaacgagagcgatgtattctcttgggtgatacgacgggaattccaggagttgcaccatctcgtggatgaggagaaagcccggtgcttggaggggattggaggacacactcgtgggctggtggcaagcttggacatgcagctcgaacaggcgcagggaactcgcgagcgtctggcgcaggcggagtgcgtgctggaacagttcggcaacgaggaccaccacaagttcatcagaaagtttcatagcatggcctcccgcgcagagatgccgcaggccaggcctctcgaaggcgccttttcgcctatcagttttaagcccgggctgcatcaggcagacatcaaactcactgtttggaagaggctgttccggaaggtccttccagctcctgagccattaaaacttgacccagccaccgctcaccccctcttggaactgagcaagggaaacaccgttgtgcagtgcggtctcctggcccagagacgggccagccagcctgaaaggtttgattatagcacttgcgtcttagcctctcgcggcttctcttgtggccggcattattgggaagtagttgtggggtcaaaatctgattggaggctcggcgtaattaagggtactgcatccagaaaagggaagcttaaccggtctcccgagcacggcgtgtggctcatcggcctcaaggaaggcagagtctacgaggcatttgcctgtccacgcgttcctctccccgtggcaggccatccacatcgaatcggactctacttacactatgaacagggtgagcttactttcttcgacgccgatagaccagacgacctccgcccattatacacctttcaagcagacttccaggggaagttgtatcctatactcgacacatgttggcatgagagaggaagtaactcattgcctatggtcctcccacccccatccggtcccggacctttgtccccagagcagcctacgaagctgtag

SEQ ID NO: 209788 - DNA, 1464 bp, synthetic construct
  misc_feature 1..1464: note = Description of Artificial Sequence: Synthetic coding sequence
  source 1..1464: mol_type = other DNA
atggcctggcaggtgagcctgctggagctggaggactggctgcagtgccctatctgcctggaggtcttcaaggagcccctgatgcttcagtgtggccattcttattgcaagggttgtctggttagcctttcttgtcacctggacgcagagctgcgctgccctgtctgtcggcaagctgtggacggatcgagcagtctgcccaatgtctcactggctcgggtgattgaagctctgcggcttcccggggatcctgagcctaaagtctgtgtccaccaccgcaacccactctctctgttctgtgagaaagatcaggagctgatttgcggactttgtggactattggggagccaccagcaccaccctgtgaccccggtctccaccgtctactcccggatgaaagaggaactcgccgctcttatctctgaacttaaacaagagcagaagaaagtcgacgaactgattgcaaaactcgtgaataaccgcactcgcatcgtgaacgagtctgacgtcttctcttgggtcatccgccgcgaatttcaggagctccaccatttggtcgacgaagagaaggcccggtgcttggaaggtattgggggccatacaaggggacttgtagccagcctagacatgcagctggagcaagcacaggggactcgtgagaggttggctcaggccgagtgtgttctggagcagttcggaaatgaggaccatcacaaattcataagaaagtttcacagcatggcctctcgggcagagatgccgcaggcccgcccattggaaggcgcatttagcccaatatcatttaagcccggcttgcatcaagcggacattaagctgacagtgtggaagagattattccgcaaggtccttccagcacctgagcctctcaagctggatccagcaaccgcgcaccctctactggagctgtccaagggaaataccgtggtccagtgtgggctcttagctcagaggcgcgcatcccagcccgagagattcgattatagcacttgtgtcttggcatcccgcggctttagctgtgggcggcactactgggaggtagttgtgggcagcaaatctgactggaggctgggcgtgattaaaggcactgcctcccggaaagggaagttgaacagaagtcccgaacacggggtctggctgattgggctgaaggaaggacgcgtttacgaggcatttgcttgccctcgggttcccctaccagtcgccgggcatccacatagaattggattatacctgcattacgagcagggagagttaacatttttcgacgccgatcggccggacgacctgcgccctctttacactttccaagccgacttccagggtaaactctatcctatcctggacacttgttggcatgagagaggtagtaatagccttcccatggtcctcccacccccaagtggccccggccccctgtcgccagaacagccgaccaaactttag

SEQ ID NO: 209789 - DNA, 1467 bp, synthetic construct
  misc_feature 1..1467: note = Description of Artificial Sequence: Synthetic coding sequence
  source 1..1467: mol_type = other DNA
atgaccagccccgtgctggtggacatccgggaggaggtgacctgcccaatctgcctagaactgctgacggagcccctttcaattgactgtggccatagcttctgtcaggcatgtatcaccccgaacgggcgggaatccgtaataggccaggaaggagagagaagctgcccggtctgccagacgtcctaccagccagggaatttacggccaaatcgccatctggctaacatagtgcggcgcttgcgcgaggtggtgctcggaccaggaaaacagctgaaagcagtgttgtgcgcggatcatggcgagaaattgcagcttttttgtcaagaagacgggaaagtcatctgttggctgtgcgagcgctcgcaggaacaccggggccatcacacctttcttgtagaagaagtcgcccaggagtaccaagagaaatttcaagagtcattaaagaaattgaagaacgaagaacaggaggcggagaaacttactgcatttattcgtgaaaaaaaaactagctggaaaaaccagatggagccagagagatgccggattcaaactgagttcaatcagttacgcaacatactcgatcgagtggagcagagggagcttaaaaaactggagcaggaggagaaaaagggcctgcggatcatcgaggaggccgagaacgatctcgtgcatcagacacagtccctgcgcgagctaatcagcgacctggagagacgatgtcagggcagtacaatggagctcctccaggacgtgagcgacgtaactgagaggtctgaattttggaccctacggaagcccgaagccctaccaaccaaactgcgatcaatgttccgcgcgccagacctgaagcgcatgctcagagtctgccgcgaattaaccgatgtccagtcctattgggtcgacgtgactctgaatccacacacagctaaccttaatctggtcctggctaagaaccgcaggcaggtccgttttgtgggagccaaggtttcaggaccctcttgtcttgaaaaacattatgactgctcggtcctcgggagccagcacttctccagtgggaagcattattgggaagtggatgtggccaagaagacagcctggattttaggagtgtgctccaacagtctggggccaactttctcattcaaccatttcgcgcagaaccactcagcttattccagataccaaccgcaatcaggctactgggtaattgggctgcagcataatcatgaatacagggcatacgaagactcgtcacccagcctcctactgagcatgacggttccccccaggcgcgttggagtcttcctggattacgaggccgggaccgtatcattttacaatgtcacaaatcacgggtttccaatctatactttctcaaagtactacttccccaccactctgtgtccatatttcaacccatgcaattgcgtgatccccatgactctgcgaaggccctctagctag

SEQ ID NO: 209790 - DNA, 1551 bp, synthetic construct
  misc_feature 1..1551: note = Description of Artificial Sequence: Synthetic coding sequence
  source 1..1551: mol_type = other DNA
atgtgcggcagcgagcggatcctgcaggccggcaacatcctggagattagggttggccaggccggcgctcgccgcgtggctaccatgaccagccctgttctagtggacatcagagaagaggttacatgccccatctgcctggaactgctgaccgaacccctgagtatcgactgtggccactccttttgtcaggcctgcattaccccaaatgggcgcgagagcgtgatcgggcaggaaggggagaggtcttgccctgtttgccaaacctcttatcaaccaggaaatctgagaccgaacagacacctagctaatatcgtgcggagattaagagaagtggtattaggacctggaaaacagctcaaagcggtgctgtgtgccgatcacggtgagaagttacagttgttttgccaggaagatggtaaggtgatttgctggttgtgcgagagaagtcaggagcacagaggccaccatactttccttgtcgaggaggtggctcaagagtaccaggagaagtttcaggagtcattgaaaaaactgaagaatgaggaacaggaagcagagaaactgacagctttcattagggagaaaaaaacctcatggaaaaatcagatggaacccgagcggtgtcgaatccagacagaatttaaccagctgcgcaacatcctcgatcgggtggaacaacgtgagttgaagaagctggagcaagaagagaagaaaggactccggatcattgaggaggccgaaaacgatcttgtgcaccagacacagtccctccgagaactcataagcgacctggaacggcggtgccagggcagcacgatggagttactgcaagatgtaagtgatgtcaccgagaggtccgaattttggactctaaggaaacccgaagcactacccacaaaactcagatccatgtttcgggcccccgatcttaaacgcatgctacgcgtatgccgggagttgacagacgtgcaatcttactgggtcgatgtaacgcttaacccccacactgcaaacctgaatttagtgcttgcgaaaaatcggagacaggttagattcgtgggagccaaagtgagcggcccgtcctgcctagaaaaacattacgattgctccgtccttggcagccagcactttagtagtggtaaacattattgggaggtagatgtggccaagaaaacagcgtggatactgggggtctgttctaattctctgggacctacattctcatttaaccacttcgcgcagaatcacagcgcatactcgagatatcagcctcagagcggctactgggtgattgggttgcaacacaatcacgaatatagggcttacgaggatagctccccgtccctcctgttaagcatgacggtgcctccacggagggtgggtgtgttccttgattacgaagccggtaccgtgtctttctacaacgtgacgaatcacggttttccgatttataccttctccaagtattactttcctaccacactctgtccttactttaacccttgcaattgcgttattcccatgactttgagacggcctagcagctag

SEQ ID NO: 209791 - DNA, 1389 bp, synthetic construct
  misc_feature 1..1389: note = Description of Artificial Sequence: Synthetic coding sequence
  source 1..1389: mol_type = other DNA
atgaccagccccgtgctggtggacatccgggaggaggtgacctgccctatttgccttgagctgcttacagaaccactgagcatcgactgtgggcactctttctgtcaggcgtgtatcacccccaacggcagggagtctgtgataggacaagaaggcgaaagatcctgcccagtctgccagacatcttatcagccaggcaacctaaggcctaacaggcaccttgcaaatatcgttcgcagactccgtgaagaggacggcaaggtaatttgttggctgtgtgagagatctcaggagcaccgtggacaccatacttttttagttgaggaggtggcccaagagtatcaggagaagttccaggaatcgcttaagaagctgaaaaatgaggaacaagaggcggaaaagttgaccgccttcattcgtgaaaagaaaaccagttggaagaaccagatggaacccgagcgctgcaggattcaaaccgagtttaaccaactgcggaacatcctggatcgagtcgaacaacgcgagctgaagaaattggagcaggaagaaaagaaagggctcagaatcatagaagaggcagagaacgacctagtgcatcaaactcagtccttgcgagagttgattagcgatctcgaacgcagatgtcaagggtcaaccatggagctgcttcaggatgtttctgacgtaacggagcgcagcgaattctggacactgaggaaaccagaggctttgccaaccaagcttagatccatgtttagagccccagacttgaaacggatgttacgggtgtgccgggagctaacagacgtccagagctactgggttgacgttaccctcaatcctcacacagctaacctaaacttggtgctcgcaaagaatcgaagacaggtcagattcgtcggggccaaggtttcaggcccaagttgtctggagaagcattatgactgtagtgtgctaggaagccagcatttctcctctgggaaacactactgggaggttgacgtagcaaaaaaaacagcatggatactcggggtctgctctaatagtttgggacccacgttcagcttcaaccacttcgctcagaaccactcagcatattcccggtatcaacctcagtctggttactgggtgataggcctgcagcataaccatgaatatcgcgcctatgaggactcaagcccaagcctcttactctctatgactgtacctccaagaagggtcggcgtgtttctggactatgaagcaggaaccgtcagcttttacaacgttactaatcatggattccctatatacacattttctaagtactactttcctaccactctgtgtccatattttaatccttgtaattgtgtcatccctatgactctgcgacggccaagtagctag

SEQ ID NO: 209792 - DNA, 1188 bp, synthetic construct
  misc_feature 1..1188: note = Description of Artificial Sequence: Synthetic coding sequence
  source 1..1188: mol_type = other DNA
atgtgcggcagcgagcggccctggcggaagaccgccgccctgctgtccgggggctgggagggacatctcttggcatgtgagcggtcacaggagcaccgaggacatcacacatttctggttgaagaggtggcgcaggaataccaggagaagttccaggagagcttgaaaaagctgaagaatgaggagcaggaggctgaaaagctgactgcatttatacgcgagaagaagacgtcctggaagaaccagatggaaccagaacgctgcagaatacaaactgaatttaatcagctcagaaatatcctggatagggtagagcagagggaactgaaaaaacttgagcaagaagagaagaagggcctcagaatcattgaagaggcagagaatgatttggtgcatcagacccaatcactgcgcgagctgatatcagacctggaaaggcggtgtcaaggttctactatggagttgctgcaggacgtgagcgatgttaccgagcgatcagaattttggacactgcggaaaccggaagcgctgcccaccaagcttagaagcatgtttcgagctcctgatctaaagcgcatgttgcgcgtgtgcagagaactcacagacgtccagtcttactgggtggatgtaaccctaaatccccacaccgccaacctgaacttagttctggcaaagaacagacggcaagtcaggttcgttggagccaaagttagcgggccctcttgcttagagaaacactatgattgttcagtactaggctcacagcactttagctccggcaagcactactgggaggttgatgtggcgaaaaagactgcatggattttaggagtgtgttccaacagcctcggccccactttttccttcaaccatttcgcccagaaccactcagcctacagccgctatcagcctcagtccggctactgggtcatcggcctgcagcataaccacgagtaccgggcatatgaggattcctctccctccctccttctgtccatgaccgtgcccccacgccgagtcggcgtgtttctcgactacgaggcgggcaccgttagtttttacaatgtcaccaaccatggcttccccatttacaccttttctaagtactacttccctacaaccctttgcccttacttcaacccttgtaattgcgtcatcccgatgacattgcggaggccatcgagctag

SEQ ID NO: 209793 - DNA, 942 bp, synthetic construct
  misc_feature 1..942: note = Description of Artificial Sequence: Synthetic coding sequence
  source 1..942: mol_type = other DNA
atggagcccgagcggtgccggatccagaccgagttcaaccagctgaggaacattctggaccgtgttgagcagcgagagctgaagaagctggaacaggaagaaaagaagggcctgaggattattgaagaggctgaaaatgatctcgtgcatcagacccagtccctgagagaattgataagtgacttagaacgcagatgtcaaggctctactatggaactactgcaagacgtgagcgatgtcacagagcgctccgagttttggactctgcggaagccagaagctcttccaaccaaattgaggtccatgtttcgggcacccgacctgaaaaggatgctgcgcgtttgtagagagctcacggatgtgcagtcttattgggtggatgtcacccttaacccacacactgccaatctgaacctagtgctggccaagaataggagacaagttagatttgttggcgccaaagttagtggcccctcttgtctcgagaagcactacgattgtagcgtgctgggatcacaacacttttcttccggcaagcactactgggaggttgacgtggccaaaaaaaccgcctggattctgggagtgtgctccaattctcttggacccactttcagtttcaaccactttgctcagaaccacagtgcctactcacgttaccagccccagagtgggtactgggtcattggacttcagcacaaccacgagtatagagcttacgaggattcttccccatcattgctcctatctatgaccgttccacctcgtagagttggcgtctttctagactacgaggcagggactgtgtccttttataatgtcactaaccacggattcccgatctataccttttccaagtactactttcctaccactctctgtccttactttaacccttgcaattgcgtgatcccgatgacattgagacgacctagttcatag

SEQ ID NO: 209794 - DNA, 942 bp, synthetic construct
  misc_feature 1..942: note = Description of Artificial Sequence: Synthetic coding sequence
  source 1..942: mol_type = other DNA
atggagcccgagcggtgccggatccagaccgagttcaaccagctgcggaatatcctcgaccgcgtcgaacagcgggagctgaagaaactcgaacaggaggaaaagaagggcctgaggatcatagaagaggccgaaaatgatctggttcatcaaacacagtccttaagggaactcatatcagatctggagaggagatgtcagggctcgacgatggaactgctgcaggacgtgagcgatgttaccgagcggtctgagttttggaccctgagaaagccagaagctctaccaacgaaacttcgaagtatgttccgagcacctgacctgaagcggatgctgagagtctgcagagagttgacggacgtccagagctactgggtggatgttacattgaaccctcacacagcaaatttaaacctcgtcctcgctaaaaaccgacggcaggtccgcttcgtgggagcaaaggtgtcaggacctagttgccttgagaagcattacgattgctctgttttgggttctcagcatttttcttcagggaaacattactgggaagttgatgtcgctaagaagaccgcctggatcttgggagtctgctcaaattcattgggtcccacattctcattcaaccactttgcccagaaccatagtgcctactctcgatatcagccacaatccggttattgggtgattgggctgcagcataatcacgagtaccgagcatatgaagattctagcccgagtttactgctgtctatgacagtgccccctaggcgcgttggtgtgttcttggattacgaggctggtactgtgtctttttacaacgtaacgaaccacggatttcccatatacaccttcagcaagtactatttcccgactacactctgtccgtacttcaacccatgtaattgcgtcatcccgatgaccctgcggcggccatcgagctag

SEQ ID NO: 209795 - DNA, 942 bp, synthetic construct
  misc_feature 1..942: note = Description of Artificial Sequence: Synthetic coding sequence
  source 1..942: mol_type = other DNA
atggagcccgagcggtgccggatccagaccgagttcaaccagctgaggaacatcctagatcgcgtcgagcagcgcgagctgaaaaaactcgagcaagaggaaaagaaaggacttaggatcattgaggaggcagagaatgatctggtgcatcagactcaaagtctccgggaactgatttccgaccttgaaaggcggtgccaggggtctacgatggaactcttacaagacgtctctgatgttacggagcgttccgaattttggacgcttagaaagcccgaggcgctgcccacaaagctgcgatccatgttcagagcccccgacctgaagcgaatgctgagggtctgcagagaacttaccgacgtccagtcttattgggtcgatgttacccttaacccgcataccgcaaatctcaacctggtgctcgccaagaaccggagacaggtgcggttcgtcggggccaaagtgtccggcccatcatgtttggagaaacattatgattgttcggtgctggggagccagcatttctctagcggaaaacactactgggaggtggatgtggccaagaagacagcctggattctaggcgtgtgcagtaactctcttggaccgaccttttcattcaatcacttcgcacaaaatcattcagcctacagccggtaccagccacagagcggctattgggtgattggcctgcaacacaaccacgagtatcgcgcatatgaggactcttcaccatctctgttgctcagtatgactgtaccacccaggcgcgtaggcgtcttcctggactacgaagcggggaccgttagtttctataacgttaccaatcatgggttccccatttacaccttcagcaagtactattttcccaccacgctctgcccatacttcaatccctgcaactgtgtgatacctatgaccctccggcggccaagctcttag

SEQ ID NO: 209796 - DNA, 942 bp, synthetic construct
  misc_feature 1..942: note = Description of Artificial Sequence: Synthetic coding sequence
  source 1..942: mol_type = other DNA
atggagcccgagcggtgccggatccagaccgagttcaaccagctgcgaaatatcctcgaccgtgtcgaacagcgagaattaaagaagttggagcaggaggaaaaaaaaggccttcgaatcatcgaggaggcagagaacgatcttgtgcaccagacacagtccttacgggaactgatctctgacctggagcggcgttgtcagggttctactatggagctcttgcaggacgtgtccgacgtgactgagcgaagcgagttttggacactgcgtaaacccgaagcactgcccactaaactcaggtccatgtttcgtgcccccgatctaaagcgcatgttacgcgtctgtagggaactaactgatgtccagtcttactgggtcgatgtaactctgaacccccacaccgccaatctgaatcttgtcttggctaagaaccgccgccaggtaaggttcgtgggagccaaagtcagcgggccaagttgccttgagaagcactacgattgctctgtgctcggaagtcaacatttcagcagcggaaaacattactgggaggtagatgtggccaaaaaaacagcatggattctgggcgtgtgcagcaattcactcgggcctaccttctccttcaaccatttcgcccagaaccactctgcttactcccgttatcagccgcagagcgggtactgggtgataggcctgcagcataaccacgagtacagagcgtacgaagacagctcaccgtccttgctgctgtctatgacagtgccccctaggagagtcggagttttcctcgattacgaggcgggaacagtgagcttctataatgtaactaaccatggctttccaatctatacattttcgaagtattacttccccaccacattgtgcccttactttaacccctgcaattgtgtgattccgatgaccctgcgcagaccgagtagctag

SEQ ID NO: 209797 - DNA, 3651 bp, synthetic construct
  misc_feature 1..3651: note = Description of Artificial Sequence: Synthetic coding sequence
  source 1..3651: mol_type = other DNA
atggcccggaactgcagcgagtgcaaggagaagcgggccgcccacattctatgcacctattgcaacaggtggctatgctcttcatgcactgaagagcatcgccattctcctgtacctggaggacccttttttcctcgggcacagaaagggtcccctggggtcaacgggggtcctggtgatttcacgctgtactgtcccctgcacactcaggaagtcctcaaacttttttgcgaaacttgcgacatgctgacatgccattcttgtctggtcgtggaacataaggagcacagatgtagacacgtggaggaggttctacagaatcaaagaatgttgttagaaggagtcaccacccaagtggcacacaagaagagctcactccaaacctctgcaaagcagatcgaggaccgcatctttgaagtgaaacatcagcacagaaaggtggaaaaccagattaagatggcgaagatggtgttaatgaacgagttgaacaagcaagccaacggtttgattgaagagctggaggggattaccaatgagcgtaaaaggaagctcgaacaacagttgcaatctatcatggtccttaacagacagttcgaacacgttcagaactttattaactgggcagtgtgctctaagacgtctgtgccatttcttttcagcaaggagttaatcgtgtttcagatgcagcggctgctcgagacttcctgcaatacggaccctggctctccctggtcaatccgatttacgtgggaacctaatttctggaccaaacagctcgccagcctgggttgtatcacgaccgaaggaggccaaatgtctcgcgccgacgcacccgcctacggcggacttcaggggagtagccctttctaccaatcacatcagtctcccgtcgcacaacaagaggccctgtcccaccccagccacaaattccagagccccgcagtgtgtagttcgagcgtgtgctgcagtcattgtagcccagtgagcccctccttgaagggccaggtcccacccccttctatacatccagctcatagcttcagacagccacccgagatggtacctcagcaactcgggtcactgcagtgttccgccctcctaccccgggaaaaagaactggcttgtagtccacatccaccaaaactgctgcaaccttggcttgaaactcagccacctgtggaacaggaaagtaccagccagaggctcgggcaacaactcaccagccagccagtatgtatcgtgccccctcaggacgttcagcaaggcgcgcacgctcaacctaccctccagaccccttctatacaggtgcagtttgggcaccaccagaaacttaagctgtcacatttccagcagcaaccgcagcagcagttaccacctccccctccgcctctgccccatcctccaccaccactgccaccccctccccagcagccgcatccaccgttaccacccagtcagcatttggcttcgtcacagcatgaaagcccccctggacccgcctgcagccaaaatatggacataatgcatcataaattcgagctggaggaaatgcagaaagacctcgagctgctcctccaggcacaacagcccagtctccagctttcccagacgaaatctccccaacacctgcaacagactatcgttggacagattaactatattgtccggcagcctgctcccgtccagagccagagtcaagaggaaaccctgcaggctaccgatgagcccccagcgagccagggctctaaaccagcgttgcctttagacaaaaatacagcggccgccctgccccaagcttctggagaggagacccccctttcagtgcctcctgtggacagtactattcagcacagcagcccaaatgtcgtgcggaaacacagcacttctctgtccataatgggattttcaaacaccctagaaatggaactgagcagtacgaggcttgaacggcccctagaaccgcagatacaatcggtgtccaacttgactgctggggccccacaggcggtcccatcgctgctcagcgcacccccaaaaatggtgagctcacttacaagcgtacaaaatcaggcgatgcccagcctgactactagtcacctccagacggtgccgtccctcgtgcatagcacattccagtcaatgcccaatctcatatctgacagccctcaggctatggcttctcttgcaagtgaccacccccaggccggtccctcacttatgtcgggacacactcaagcagttccatcactagccacatgtccactgcagagtattcctccggtcagcgatatgcagcccgagactggaagcagctctagctccgggagaacttctggcagcctgtgtcccagggacggagcggacccatcccttgagaacgctctgtgcaaggttaaactggaggaacctatcaacttgtctgtgaagaagcctccactggctcctgtcgtaagcacttcaacagccttacagcagtaccaaaatcctaaggagtgtgaaaattttgaacagggtgccctcgagctggacgccaaagaaaaccagtccatcagagcattcaactcagaacacaagataccttacgtgagactggagagactgaaaatatgcgctgcctcttcaggagagatgccagtgtttaagttgaaaccccagaagaatgaccaggacgggtcttttctgctgatcattgaatgcggaactgagagcagcagcatgtccattaaagtgagccaggaccgcctctccgaggcaacccaggctcctggcctggagggtaggaaggtgactgtgacatccctcgctggccagaggccgcctgaagttgaaggaacatcacccgaagagcatcgcctgattcctagaacccctggagctaaaaagggccctcccgccccgattgagaatgaggacttttgcgctgtatgtctgaatggtggagaactgttatgctgcgacaggtgtccaaaggtattccatctgagttgccacgttccagccctgctgagcttccctgggggagagtgggtctgtactctgtgtcggagtcttactcagcctgaaatggagtacgactgcgagaacgcctgctacaatcagcccggcatgcgtgccagccctgggctctccatgtacgaccagaaaaaatgtgaaaagcttgttctctccttgtgttgtaataatttgtccctgcctttccacgagccggtgagtccccttgctcggcattactaccagatcattaaacggccaatggacttaagcatcattaggcgaaaacttcagaagaaggatcccgcacactacaccacaccggaggaagtggttagcgacgtgaggctcatgttctggaactgtgcgaagttcaactacccagatagtgaagtggcagaggctggccggtgtctggaagtgttttttgagggatggctgaaggaaatctaccctgagaaaaggtttgcccagcctcgacaggaggactcagattccgaagaggtgtctagcgagtctggctgcagcactccccagggatttccatggcctccttacatgcaggagggcatacagcctaaacggcgcaggaggcacatggagaacgaacgcgcaaaaaggatgagcttccgcttggctaatagcatttcccaggtgtag

SEQ ID NO: 209798 - DNA, 1458 bp, synthetic construct
  misc_feature 1..1458: note = Description of Artificial Sequence: Synthetic coding sequence
  source 1..1458: mol_type = other DNA
atggaccccaccgccctggtggaggccatcgtggaggaggtggcctgcccgatctgtatgacgtttctcagggagccaatgtccatcgattgcgggcacagcttctgtcatagttgtctgtccgggttgtgggagattcccggggaaagccagaattggggttatacatgcccactctgccgagcacctgtgcagccccggaatctacgccccaattggcagcttgctaatgttgtggagaaggtgcgacttctgagacttcaccccggtatggggctgaagggcgacctgtgtgaacgccacggcgaaaaattgaaaatgttctgcaaagaagatgtccttatcatgtgcgaagcttgctctcagtcacctgagcacgaggcacactcagtcgtacccatggaggatgtcgcctgggagtataagtgggagctgcatgaagccctggagcatctgaagaaggaacaggaggaggcctggaagctagaggtcggggaacgtaagcggacggccacttggaagatacaggtggagacgcgcaagcagtccatcgtttgggagtttgagaagtatcagagattgctggagaagaagcaaccaccccatcgtcagctcggcgcggaagtcgccgccgcacttgcgtcactgcaaagagaagcagccgagacgatgcagaagctcgagctcaatcattccgagttgatccagcagtctcaggttttgtggcgtatgatcgccgaattgaaagagagatctcagcggcccgtacgctggatgctgcaggacatccaggaggtgctaaaccggagcaaaagctggtctctgcagcaaccagagccgatttctctggagctgaaaactgactgccgggttctgggccttcgagagatcctcaagacttatgcggccgacgtgcggctggacccggacacagcttatagccgattgatagtcagcgaggaccgtaaacgcgtgcattacggtgataccaaccaaaagttacctgacaaccccgaacggttttaccgctacaacattgtactgggatctcagtgcatctcaagtggccgccactactgggaggtcgaggtgggagataggtcagaatggggcctgggcgtttgcaaacaaaacgttgacagaaaagaggttgtctatttaagtcctcactatggattctgggtcattaggttgcgcaagggcaatgaataccgcgccggtaccgacgaatatccaatcttatccttacccgtgcctcccagacgcgttggcatattcgttgactacgaagcacatgatatttcattctacaacgtcacagactgtggcagtcacatcttcacattccctcgctatccgttccctgggaggttgctgccctatttttctccctgctatagtatcggcactaataatacagccccattagccatttgctctctggatggagaggactag

SEQ ID NO: 209799 - DNA, 621 bp, synthetic construct
  misc_feature 1..621: note = Description of Artificial Sequence: Synthetic coding sequence
  source 1..621: mol_type = other DNA
atgcagaagctggagctgaagaccgactgccgggtgctgggcctgcgcgagatcctgaagacatatgctgcagatgtgagactggatcccgataccgcctacagccgtcttattgtttccgaagacaggaagagggtgcattacggggataccaaccagaaacttcccgacaaccctgagagattctaccgatataacattgttctgggctcgcagtgcataagttctggtagacattattgggaggttgaggttggcgaccggtcagagtggggactgggcgtctgtaagcaaaacgtggacagaaaggaagtagtttatcttagcccacactatggcttttgggttatccgcctccgtaaaggaaacgagtaccgcgctggtacggatgagtatccgatcctcagtctcccagttcccccccggagagtgggcatctttgtcgattacgaagctcacgatatttccttctacaatgtgacggactgtggcagtcacatcttcacgtttccgagatatccgttccccggtagactgctcccttatttctccccttgttacagtatcggaacgaacaatacagctccactcgccatttgtagcctggatggcgaggattag

SEQ ID NO: 209800 - DNA, 1536 bp, synthetic construct
  misc_feature 1..1536: note = Description of Artificial Sequence: Synthetic coding sequence
  source 1..1536: mol_type = other DNA
atggccgccgtgggcccccggaccggccccggcaccggcgccgaggccttagcactcgccgccgaactacagggagaggcaacttgcagcatctgtctagagctatttcgagaaccagtctcggttgagtgcgggcattctttttgcagagcatgcattgggagatgctgggaacgtcctggagccgggagcgtcggagccgccacaagggccccccctttcccattaccttgcccgcaatgcagagagccagccaggcccagccagctgcggccaaacagacagcttgctgccgttgccacactactgaggcgtttttccctgcctgcagccgcgcccggggagcacggtagccaggccgccgcagcccgtgccgccgcagcgaggtgtggccaacacggggaacccttcaaactatattgtcaggacgacggacgcgccatatgcgtggtttgtgaccgtgcccgggaacaccgagagcatgccgtcctcccgctggacgaggctgttcaggaggcgaaggagttactagagtcccgactgagagtgttgaagaaggaactcgaagactgcgaagtcttcagatcaacagagaaaaaagagtctaaagaactgctgaagcaaatggccgcagaacaggaaaaggttggcgcggagttccaggcgctgcgtgctttcctggtggaacaggagggccggttactcggcaggttagaggagctgagcagggaagttgctcagaagcagaacgagaacttggcccagctaggagtggagattactcaactgtccaaactgagctctcaaatccaggagaccgcacagaaacccgatctggattttctacaagaatttaagagtactttgtccagatgtagcaacgtgcctggtcctaagccaaccacagtctcatctgaaatgaagaataaggtgtggaatgtcagcttgaagactttcgtactgaagggtatgctgaagaagttcaaagaggatctccggggcgagctggaaaaggaggaaaaagtggaactgacactggacccagataccgccaatcccaggctcatcttatctttggatctaaagggagttagactgggcgagcgggcacaagatctgcctaatcacccctgccgctttgacacaaacacgagagtgctggcctcatgtggtttttcttcaggacgacaccactgggaggtggaggtcggctctaaggatggctgggcattcggggtggccagggaatctgtgagaaggaaaggcctgacgccttttacaccggaggagggggtctgggccttgcagctgaatggcggacagtactgggctgtcacatcacctgagcggtcccctttgtcctgcggccatttaagccgagtcagggttgctctggatctggaggtcggcgctgtgtccttctacgccgtggaggacatgaggcacctctatacctttagagtcaacttccaagaacgtgtcttcccattgttctctgtgtgcagtactggtacctaccttcgaatttggccatag

SEQ ID NO: 209801 - DNA, 666 bp, synthetic construct
  misc_feature 1..666: note = Description of Artificial Sequence: Synthetic coding sequence
  source 1..666: mol_type = other DNA
atggccgccgtgggcccccggaccggccccggcaccggcgccgaggctctcgcattggcagccgagctacaaggcgaggctacttgctctatttgccttgaattatttagggaacccgtctctgtcgaatgtggccactcattctgcagagcatgtatcgggaggtgttgggaacgtcccggcgctgggtctgtgggggcagctacacgcgccccaccatttccgctgccctgccctcagtgtcgtgaacccgcgagaccttcgcagctgcggccgaataggcagctcgctgctgtggcaacgctattgagacggttttcccttcccgctgccgcccccggggagcatggctcccaggccgccgcagctagggccgctgcggccagatgcggtcagcatggcgagccattcaagctgtactgtcaagatgatgggagagccatttgcgttgtgtgtgatcgggctagggagcacagggaacatgcagtgcttcccctcgacgaggcagttcaagaagcgaaggaattacttgaatctaggctgcgcgttctgaagaaggaattagaggattgtgaagtgttcaggtccactgaaaagaaggagtctaaagagctactagtgagccaggcccccgctggaccaccttgggacatcactgaggcttag

SEQ ID NO: 209802 - DNA, 912 bp, synthetic construct
  misc_feature 1..912: note = Description of Artificial Sequence: Synthetic coding sequence
  source 1..912: mol_type = other DNA
atggccgccgagcaggagaaggtgggcgccgagttccaggccctgagagcatttctggtcgaacaagagggccgacttttgggcaggcttgaagagctgagtcgtgaagtagcccagaaacagaatgagaaccttgcacaactcggtgtggagatcacgcagttgtcaaaactctcttcccagatccaagaaaccgcccaaaagcctgatttagacttcttgcaggaattcaaaagtaccttatcgcgctgctccaacgtgcctggacccaaacctacgaccgttagctctgaaatgaaaaataaagtctggaacgtgagccttaagactttcgtgctgaaaggcatgctaaaaaagtttaaagaagatctccggggagagttggaaaaggaagagaaggttgagctgaccctagaccccgacactgccaatccacggctgattctttcactcgacctgaaaggagttcgtctcggagagcgagcacaggaccttccaaatcatccctgccgttttgatacgaacaccagggtgctggcctcctgtggcttctcttctgggcgccaccattgggaggtagaagtcggctcaaaggatgggtgggctttcggagttgcacgggagtcagtgcgtcggaaggggctgacgcccttcaccccagaggagggggtgtgggctctgcagctgaacgggggacaatactgggcagtgacttctcccgagcgctctcctctgagttgtggccacctctctcgggtccgggtggcccttgatttggaggtgggggcggtcagtttttatgctgtggaggatatgcggcatctctataccttcagagtcaactttcaagagcgtgtcttccctttgtttagcgtatgcagcacagggacttacctgaggatttggccctag

SEQ ID NO: 209803 - DNA, 912 bp, synthetic construct
  misc_feature 1..912: note = Description of Artificial Sequence: Synthetic coding sequence
  source 1..912: mol_type = other DNA
atggccgccgagcaggagaaggtgggcgccgagttccaggccctgagggctttcctggtagagcaagagggacgactactggggcgcctggaggagctcagcagagaagtcgcacagaaacagaacgagaacctggcacagttgggagtggagatcacccagctctccaagctgagtagccagatccaggagaccgctcaaaaacctgacctggattttctgcaggaatttaagtcgactttgtccagatgttccaacgtgccagggcctaagcccacaactgtctctagcgagatgaagaataaggtgtggaacgtgtcactaaaaacttttgttctcaaaggtatgttaaaaaaattcaaagaggacctcaggggggagttggagaaggaagaaaaggtcgaactgaccctggaccccgataccgccaatccacggctcatcttaagccttgatctgaaaggggtccggttgggggaaagggcccaagatctccctaatcacccatgtagatttgatacaaacactagggtgttagccagctgcgggttctctagcggacgacaccattgggaagttgaagtggggagtaaagatggctgggcattcggcgtcgcccgcgaatcggtccgcagaaaagggcttacccctttcacacctgaagaaggcgtctgggctcttcaactcaatggggggcagtattgggccgttacatcgccagaaagatctccgcttagctgcggccatttaagccgtgttcgggtcgccctggatctcgaggtaggcgcagtgagcttctacgccgtcgaggacatgaggcatctttacactttccgcgttaactttcaggaacgcgtgtttccacttttcagcgtatgctctactgggacctacctaagaatttggccttag

SEQ ID NO: 209804 - DNA, 990 bp, synthetic construct
  misc_feature 1..990: note = Description of Artificial Sequence: Synthetic coding sequence
  source 1..990: mol_type = other DNA
atgacccaggccaccggccagatgctgtgcctgcacgtgcaggtgccacttcagcttcttctcttagggcaaaagcagatggccgcggagcaagaaaaagtcggagctgaatttcaagcactacgcgccttcctggtggagcaggagggcagactcctgggaagattggaggagcttagcagggaggttgcgcagaaacagaatgaaaacctggcccaactcggcgttgaaatcacacagctgtcgaaactctcgtctcagattcaggagacggcccagaaacctgatttagattttctacaggaatttaaatctacccttagccgatgctctaacgtaccaggtccgaaacccacaactgtgtcatccgagatgaagaataaggtgtggaacgttagccttaagacttttgtgctgaagggcatgttgaagaagtttaaggaggatctccgaggcgaactggaaaaggaggagaaagtggagctcactctggatcccgatactgccaaccccagactgattctgtctctggatctgaagggggttcgacttggagaacgggcacaggacctcccaaatcatccatgtcgatttgatactaacaccagggtcctcgcgagttgtggattctcatccgggcggcaccactgggaggtcgaagtggggtcaaaggatggatgggccttcggggtggcccgggaatccgtaagacggaagggactcacccccttcacaccagaagagggggtttgggcacttcaactgaatggcggccagtactgggcagtgactagccctgaacgtagccctctgagctgcggtcatctgagtagggtgagagtggcactcgacttggaggtcggcgccgtttctttttacgcagtcgaggacatgcgccatctttatacattccgagtgaatttccaagagcgagtgtttcccctgtttagtgtttgtagcacaggaacctatcttaggatatggccatag

SEQ ID NO: 209805 - DNA, 912 bp, synthetic construct
  misc_feature 1..912: note = Description of Artificial Sequence: Synthetic coding sequence
  source 1..912: mol_type = other DNA
atggccgccgagcaggagaaggtgggcgccgagttccaggccctgagagccttcctggtggagcaagaaggccggctgcttggacggctggaagagcttagtcgagaagttgcccagaagcagaacgagaaccttgcacaactcggcgttgaaatcacacagctgtctaagctgtcttctcagatccaggaaacagcgcagaaaccagatctcgacttcctacaggagtttaagtcaaccctgtcccgatgtagcaacgtccccggtccgaaaccgactactgtttcatccgaaatgaagaacaaggtgtggaatgtgagtcttaagaccttcgtgcttaagggtatgttaaaaaagttcaaggaggatctgagaggcgagcttgaaaaagaggaaaaggttgaactcaccttggatccagacaccgctaatccgaggctgatactgagcttagacctaaaaggggtaaggttaggagagcgggcccaagacctgccgaaccacccctgtcgatttgacaccaacactcgggtcctggcgagttgcggtttcagctcaggtagacaccactgggaggtggaggtgggctctaaagatggatgggcattcggcgtggccagagagtccgtgaggcggaaaggattgacccccttcaccccagaggagggagtctgggccctgcagctgaacggtgggcaatattgggctgtgaccagtcctgaacgttcacctctttcttgtggccaccttagtagagtgcgtgttgcgcttgacctggaagttggcgcagtgtccttttacgccgtagaggatatgcgtcacctctatacgtttcgcgtcaactttcaggagcgggtgttccccctgttttccgtgtgcagcactggtacatacttgagaatctggccttag

SEQ ID NO: 209806 - DNA, 1434 bp, synthetic construct
  misc_feature 1..1434: note = Description of Artificial Sequence: Synthetic coding sequence
  source 1..1434: mol_type = other DNA
atgagcgccgcccccggcctgctgcaccaggagctgagctgccccctctgtctgcaacttttcgatgcgccagttactgctgaatgcggccacagtttctgtcgtgcatgcctcggaagagtggcaggtgaacccgccgccgacggaaccgtgctgtgcccgtgctgtcaggccccaacacgacctcaggctctctcaaccaatcttcagctcgcgcgcctggtcgaagggctcgcacaggtgccgcaagggcactgtgaagaacacctcgaccctctctcaatctactgtgagcaggatagagcgttagtctgcggagtgtgcgcctcgctggggagtcatcgggggcaccggttgcttcctgccgccgaagcgcatgcacgtctgaagacccagctgccgcagcagaaactccagttacaagaagcctgcatgcggaaggaaaaatcagtggcagtcctagaacaccagctggtggaggtggaggagactgtgcgacagttcaggggtgccgtgggggagcaactcgggaagatgcgcgtgttcctcgccgccctggaggggtcattagacagagaagcagaaagggtaagaggcgaagcaggggttgcgctgagacgggagcttggttcattgaatagttatctcgagcagcttaggcagatggagaaggtcctggaggaggtagccgataaaccccagacagagttcctgatgaagtactgtctggttacctctcggttgcagaagatcttggctgaaagtccccctccagctcgcctcgacatccagctcccaattatctcagacgatttcaagtttcaggtgtggcgtaagatgtttagagccttgatgcccgccctcgaggaattaacttttgaccctagctcagcacaccccagtctggtggtgtcctcgtctggaaggagggttgagtgctccgagcagaaagcaccaccagctggagaggacccgaggcagtttgataaggccgtagctgtagtcgcccatcagcaactctccgaaggtgaacactattgggaagttgacgttggcgataagcctagatgggctttaggcgtgatagctgcagaggcgccacggcgcgggcgcttacatgctgttccctcccaaggcctgtggctgctaggtctgagggagggtaaaattctcgaagctcacgtcgaagctaaagaacctcgcgccctccgctctcctgagcggagacctactcggattggtctttatctgtcctttggcgatggagtgctgtccttttacgacgcatccgatgccgacgcgctcgtgccactcttcgctttccacgagaggttaccgaggccggtgtacccgttttttgacgtgtgttggcacgacaaagggaaaaatgcccagccacttctgctggtcggccctgagggtgccgaggcctag

SEQ ID NO: 209807 - DNA, 753 bp, synthetic construct
  misc_feature 1..753: note = Description of Artificial Sequence: Synthetic coding sequence
  source 1..753: mol_type = other DNA
atggcctggcaggtgagcctgctggagctggaggaccggctgcagtgcccaatttgcttggaagtcttcaaggagtctctaatgctgcagtgcggacactcctactgtaagggatgcctcgtcagcctcagctatcatttagacacaaaggtgagatgtccaatgtgctggcaggttgtcgatggcagcagctcccttcccaatgtgagcctcgcctgggtgattgaagcactaagactgcccggagatcccgaaccaaaggtatgtgtccatcacaggaatccattgagcctattttgcgaaaaggaccaagagttgatatgtggtctgtgtggcttgttaggctctcatcagcaccatcctgttaccccggtgtctaccgtgtgctcacgcatgaaggaagagcttgcagcgctgttctctgaactcaagcaggaacagaaaaaggtggacgagctgatcgccaaactcgtgaaaaaccgcacccgcattgtcaacgagtccgatgtgttttcctgggtgatcaggagggagtttcaggagctgcggcatcccgttgacgaagaaaaggcaaggtgcctcgaaggcattgggggccataccagggggttggtggcctctctggatatgcagctggaacaggcccaagggaccagagagcgcttggctcaggctgagtgcgtgttggaacaattcggaaacgaggaccatcatgaatttatctggaagtttcattctatggcctcccgctag

SEQ ID NO: 209808 - DNA, 849 bp, synthetic construct
  misc_feature 1..849: note = Description of Artificial Sequence: Synthetic coding sequence
  source 1..849: mol_type = other DNA
atggcctggcaggtgagcctgctggagctggaggaccggctgcagtgcccaatctgcctcgaggtttttaaagaatccctcatgcttcaatgcgggcacagctactgcaaaggctgcctagtgtccctctcctaccacctggataccaaagtgagatgcccaatgtgctggcaggtcgtggatggctcctcctcactaccaaacgtgtccctggcctgggtgattgaggcactgaggttgcccggcgatcctgaacccaaggtttgtgtgcaccataggaacccattgagcctgttttgtgagaaagaccaggagctgatctgcggactatgtgggctgcttggatcacaccaacatcaccccgtcacgccggtgtctaccgtctgctcccgcatgaaggaggagctagctgccctgttcagcgagctgaaacaagagcagaagaaagtggatgagctaatcgccaagcttgttaagaacaggactcgcattgttaatgaaagcgatgtcttcagctgggtcataaggagggaattccaagaacttcgacacccagtggacgaagaaaaggccagatgcttggaagggatcggcggtcacacaagaggtctcgtggcttcactggatatgcagctggagcaggcacaaggaactagagagaggctggcccaggctgagtgtgtgctcgagcagttcgggaacgaggaccaccacgaatttatttggaaatttcatagtatggcgtctaggctgactaagactgaggagcttgagaaaaagtggagaaatggattggccgcttctcactctctgcctcagcaggtgcgccctcaaagaagaaccccttag

SEQ ID NO: 209809 - DNA, 753 bp, synthetic construct
  misc_feature 1..753: note = Description of Artificial Sequence: Synthetic coding sequence
  source 1..753: mol_type = other DNA
atggcctggcaggtgagcctgctggagctggaggaccggctgcagtgccctatttgcctagaagtgttcaaagaatccctgatgctccagtgtggccactcgtactgcaagggctgtctcgtgtctctctcctaccatctggatacaaaggtcagatgtccaatgtgttggcaagtagtggatggatcatccagcctccctaatgtgagtctggcgtgggtgattgaagctttgcggctccctggtgatcccgagcccaaagtatgtgtgcaccatagaaatcccttgtcactgttttgtgaaaaggatcaggagctgatttgtgggttgtgcggcctgttgggcagccatcaacatcatcctgttacgcccgtgagtaccgtttgctctaggatgaaagaagaactggctgcacttttctcagagctcaaacaggagcagaagaaagttgatgaactcatagccaaattggtgaaaaaccgaacacgcatagtgaatgagagtgacgtattctcctgggttatccgccgtgagttccaggagctgcgtcatcccgtcgatgaggagaaggctagatgcctggagggaatcggcggacatacacgcggcctcgttgcttccctggatatgcagttagagcaagctcagggcactagggagcgattagctcaggccgaatgtgtcctagagcagttcggcaatgaggaccaccatgaattcatatggaaattccactccatggcttctagatag

SEQ ID NO: 209810 - DNA, 750 bp, synthetic construct
  misc_feature 1..750: note = Description of Artificial Sequence: Synthetic coding sequence
  source 1..750: mol_type = other DNA
atggcctggcaggtgagcctgctggagctggaggaccggctgcagtgtccaatatgccttgaggtgtttaaggaaagcctcatgctgcagtgcggacatagctattgcaaaggctgcctagtgtcgctctcgtatcacttggacacgaaagtgcggtgtcctatgtgctggcaggtagtagacggctcctcaagtctgcctaatgtctcgttagcttgggtaatcgaagctttgcgcctacccggcgacccagaaccaaaagtctgcgtgcaccataggaatcctctgtctcttttttgcgaaaaggatcaagagctgatctgtggcttgtgtgggctcctgggctcccatcagcatcaccccgtgacccccgtatcaactgtgtgttcgcgcatgaaagaagaactggctgccctgtttagtgaattgaagcaggaacagaaaaaggtcgacgaacttatagccaagctggtcaaaaacaggacacgcattgtgaatgaatccgacgttttctcctgggtgataaggcgcgagttccaggagctaagacatcctgtggacgaagaaaaggcccggtgcctcgaaggtatcggtgggcatacgagaggcctggtcgcatccctggacatgcagctggagcaagcacaaggcacccgagagcgcctggcccaagctgagtgtgtgctcgagcaatttgggaatgaggatcaccatgagttcatctggtttcactccatggccagcagatag

SEQ ID NO: 209811 - DNA, 753 bp, synthetic construct
  misc_feature 1..753: note = Description of Artificial Sequence: Synthetic coding sequence
  source 1..753: mol_type = other DNA
atggcctggcaggtgagcctgctggagctggaggactggctgcagtgtcccatctgtctggaggtgttcaaggagtctttgatgctccagtgcggtcacagctactgtaagggctgcctcgtgagtctgtcttatcacctggacaccaaagtgcggtgcccaatgtgctggcaggtggttgacggctcttccagtctccccaatgtgagtctcgcgtgggtcattgaggcgctgagacttcccggggatccagagcctaaagtgtgcgtccaccatagaaaccctctaagcctcttctgtgagaaggatcaggagttgatttgcggcctttgcggcctattgggatcacaccaacaccacccagtcacccccgtgagcacagtctgtagccggatgaaggaggagctggcagcgctctttagtgaactgaagcaggagcaaaaaaaggtcgacgagctgatcgcaaaacttgtgaaaaatcgcactaggattgtcaacgagtcagatgtttttagttgggtgattaggagggagttccaggagctccgacacccagtagacgaggagaaggcacgttgcctcgaaggtataggaggacatactaggggacttgtggcaagcttggatatgcagttagaacaggcccagggaactagggagcgactcgcacaggccgagtgtgtcctcgaacagtttggtaacgaggatcatcacgagttcatctggaagtttcactccatggccagtagatag

SEQ ID NO: 209812 - DNA, 750 bp, synthetic construct
  misc_feature 1..750: note = Description of Artificial Sequence: Synthetic coding sequence
  source 1..750: mol_type = other DNA
atggcctggcaggtgagcctgctggagctggaggactggctgcagtgtcctatctgcctagaggtcttcaaagagtcccttatgcttcagtgtgggcactcctactgtaaaggatgtctcgtttcgctgagctaccatctagacacaaaagtcaggtgtcccatgtgctggcaggttgttgacggatcatcaagccttcctaatgtgagtctggcttgggtgatagaggccttaaggctacccggcgaccctgagcccaaggtttgtgtacatcatagaaaccctctgtccctattctgtgagaaggaccaggagttgatttgtgggctatgcgggttgcttgggtctcaccagcaccaccctgttacacccgtgtctacagtttgtagccgaatgaaggaggaactggccgctttatttagtgaacttaaacaagaacagaagaaggtggacgaactgatcgcaaaacttgtgaagaacaggacacggatagtcaatgaaagtgacgtattctcatgggtgatccgacgggagtttcaggaacttcgtcacccggtggatgaagaaaaggctaggtgtttagaagggattggtggccatactagagggctggtcgcctccctggacatgcaactcgagcaggcgcaagggacgagggagcgcttagctcaggctgagtgcgtgctcgagcaattcggcaacgaggatcatcatgagtttatttggtttcattccatggcctctcgatag

SEQ ID NO: 209813 - DNA, 1656 bp, synthetic construct
  misc_feature 1..1656: note = Description of Artificial Sequence: Synthetic coding sequence
  source 1..1656: mol_type = other DNA
atggccgagaactggaagaactgcttcgaggaggagctgatctgccccatttgtttacacgtttttgtcgagcccgtgcagcttccctgtaaacacaatttttgtcgaggctgtataggagaagcctgggccaaggacagtggcctggtaagatgcccagaatgtaatcaagcatataatcagaagcccggcctggagaagaatctgaaactgaccaacatcgtggaaaaatttaatgcactgcacgtagagaaacctccagccgccctccactgtgtgttctgccgacgtggaccaccgttgcccgcacagaaggtgtgtttgagatgcgaagccccttgttgtcagtcacacgttcagacacacctgcagcagccaagtacagccaggggccaccttctggttgaggccgatgatgtgcgcgcatggagttgcccgcagcataacgcctacagactgtatcactgcgaggcggagcaggtggcagtgtgtcaatactgctgttattatagcggggctcaccaggggcacagcgtctgcgacgtcgagatcagacggaatgagattcgcaagatgttaatgaagcaacaggaccgattagaagagagggagcaggacatcgaagaccagctgtacaagctggaatctgataagaggctagttgaggagaaggtgaaccaactgaaggaagaggttcggctccaatacgaaaaactgcatcagctgctggatgaggacttacggcagaccgtcgaggtgttggacaaggcccaagccaagttttgctcggaaaatgctgctcaggcgctccaccttggtgagcggatgcaggaggcaaagaaactgctgggctctttacagttgcttttcgacaagacggaggacgtgagctttatgaaaaacacaaagagcgtgaagatcctgatggaccggacacagacgtgtactagctcttccctctcgcccacgaagatcggacatctgaattcaaaactctttcttaacgaagtggcaaagaaagaaaagcaactgcgcaagatgctggaaggtccattctctacgcctgtgcctttcctacagtccgtcccactgtatccttgcggtgtttcctcaagcggggccgagaagcgcaagcatagcactgccttcccagaagctagtttcctggagacctcctccggacctgtgggcgggcagtacggtgccgctggcactgccagcggcgaggggcagtcaggccagccattggggccatgttccagtacccagcacctcgtagccttacccggaggcgcccaacctgtccattcctcacccgtctttcctccgtcacagtatcccaatgggtccgcggcacagcaacccatgctcccccagtacggtggaagaaagatcctggtatgctcagtggacaactgttactgctcctccgtggccaatcacggcggccaccaaccatacccccgttccgggcacttcccttggactgttccatcacaggaatactcacatcctctgccccctactccatctgtaccccagagcctaccttctctggctgttcgtgactggctcgacgccagccagcagcccgggcaccaggacttttaccgggtttacgggcagccctccactaaacactacgtgacatcttag

SEQ ID NO: 209814 - DNA, 1653 bp, synthetic construct
  misc_feature 1..1653: note = Description of Artificial Sequence: Synthetic coding sequence
  source 1..1653: mol_type = other DNA
atggccgagaactggaagaactgcttcgaggaggagctgatctgccctatatgcttacatgtttttgtcgaacctgtgcagctcccctgcaagcacaatttctgtaggggctgcataggagaagcgtgggctaaggattcagggctcgtgcggtgtccagagtgtaatcaggcatataaccaaaaaccaggcttagagaaaaacctcaagctgaccaatatagttgaaaagttcaacgcgctacatgtggaaaaacctccagccgcactccattgtgtcttttgccgtagggggcctccgcttcctgctcagaaggtctgccttaggtgtgaagcgccatgttgccaaagtcacgtgcaaacccatcttcagcagccttcaacggcccgcggacatctcctcgtggaagctgacgacgttagagcctggagttgtccccagcacaacgcatatagactgtatcactgtgaagcagaacaggtcgctgtgtgtcagtattgctgttactactcgggagctcaccaggggcatagtgtgtgtgatgttgaaatccggaggaatgagatcagaatgttgatgaagcagcaggatagactggaagagagggaacaagatatcgaagatcagttatacaaactcgaatcagacaaaagacttgtggaggagaaggtgaaccagctaaaagaggaggtccggctgcagtatgaaaagctacaccagttattggacgaggatttgcggcaaacggtggaggtgctcgacaaagcccaggccaaattctgttcagaaaacgcagcacaagctctgcacctaggagagaggatgcaagaggcaaaaaagctcctaggcagcctgcaattgctgtttgataaaaccgaggacgtgtcctttatgaaaaatacaaagtcggtgaagattttgatggaccgcactcaaacatgtaccagttcctctctgtccccaacgaaaatcgggcatttaaacagcaaactgtttctcaatgaggtggcgaagaaagagaagcagctgcggaaaatgctcgagggaccattttcgaccccggtgccatttttgcagtccgtgcccctgtatccgtgtggcgtttcctccagtggagccgagaagcgcaagcactccaccgcgtttcctgaagcgtccttcttagagacctcctcgggcccggttggaggccaatatggagccgccggcactgcttctggcgaggggcagtcaggacagccactgggcccatgcagcagcactcagcacctggtggcacttcccggtggggcccagcctgttcacagcagcccagtattccctccctcccagtatcccaacggctccgccgcgcaacaaccaatgttaccccagtatggtggacgcaagatcctggtatgcagtgtggataattgctactgtagtagcgtggcaaatcacggcgggcatcaaccctatcctaggtcaggccattttccatggactgtgcctagccaggaatacagtcaccctctgcctcctacaccgtcggtcccgcagagcctcccctccctcgccgtgagggactggcttgatgcttctcagcaacccggacatcaggatttttaccgtgtgtacggtcagcctagcaccaagcattacgtgactagttag

SEQ ID NO: 209815 - DNA, 2133 bp, synthetic construct
  misc_feature 1..2133: note = Description of Artificial Sequence: Synthetic coding sequence
  source 1..2133: mol_type = other DNA
atggaggagatggaggaggagctgaagtgccccgtgtgcggcagcttctatcgggagccaattatactcccatgctctcataatctgtgtcaggcctgcgcaaggaacatcttggttcagactccggaatctgagtcaccgcagtcccaccgggccgccggatccggcgtctctgattatgactatctggatctggacaaaatgagcctgtattcagaggcggactcgggctatggttcctatggtggctttgcgagcgcgccaacaactccctgccagaagtccccaaacggagtgcgtgtgtttccgccagctatgccgccacccgcaacccacctgtcgcccgcccttgcgccagtgcccagaaatagctgtattacctgtcctcaatgccacagaagcctgatactggacgacagggggctccggggattccccaagaatcgggtgctggagggggtgatcgataggtatcagcagtccaaagccgcagccctgaaatgtcagctctgcgagaaagcaccaaaagaagccactgtaatgtgcgagcagtgcgatgtgttttattgcgatccttgtagacttaggtgtcatcctccacgggggcctctggccaagcatcggctggtgccgccagcccagggcagggtatcgcgacgtcttagtcccagaaaggtgagcacgtgcactgaccacgagcttgaaaatcacagtatgtattgcgtccagtgcaaaatgcctgtgtgttaccagtgtttggaggaaggtaaacactccagccacgaggttaaggcacttggcgctatgtggaagctgcataagagtcagctgagccaggcccttaacggcctgtcagatagagcgaaggaagctaaggagttcttagtccagctgcgaaacatggtacagcaaattcaggaaaactcggtcgagttcgaagcttgcttagtcgcacaatgcgacgctctgatcgatgccctcaatagaaggaaggctcagctgttggcgagggtcaataaggagcatgagcataaacttaaggtggttcgggaccaaatttcccactgtaccgtaaagctccgccagacaaccggccttatggaatactgcttggaggtcatcaaggaaaacgatccttcgggattcctacagatatccgacgccctaatccggcgtgtgcacctgacggaggaccagtggggaaaaggaacactgacgccgcgaatgactactgattttgacctgtcgctagataactctcccctactccaatctatacatcagctagattttgtccaggttaaagcttcaagccccgttcctgcgacacccatcctacaactcgaggagtgctgcactcataacaatagcgccacactgtcctggaaacagccaccactaagtaccgttcctgcagacggctacatcctggagctggatgatggcaatggaggtcaattcagagaagtgtatgtcggcaaagagacaatgtgcactgttgacggcctacactttaactcaacttacaatgcccgggtgaaagcgttcaataagactggtgtaagcccatattccaagaccctggtgctccagacttccgaagtggcttggtttgccttcgaccctggatccgctcattccgacatcatcctgagcaacgacaatttgaccgttacgtgctcgtcttatgatgatcgagtggtcctcggaaagaccggctttagtaaaggaattcactactgggagttgactgtcgatcggtacgacaaccaccctgaccccgcattcggcgttgcgagaatggacgtaatgaaggacgtgatgctcggcaaggatgataaagcctgggctatgtatgtggacaacaatcggtcctggtttatgcataataattcgcatactaacagaaccgagggaggtatcaccaagggcgccactatcggcgttctattggatttgaacaggaagaaccttactttctttatcaatgatgagcaacagggtcccatcgcttttgataacgtggagggtctgttttttcccgcagtgtcactcaatcgcaatgtccaggttaccctccatacaggattgccggttccggacttttattccagtagggccagcatcgcatag

SEQ ID NO: 209816 - DNA, 2409 bp, synthetic construct
  misc_feature 1..2409: note = Description of Artificial Sequence: Synthetic coding sequence
  source 1..2409: mol_type = other DNA
atggaggagatggaggaggagctgaagtgccccgtgtgcggcagcttttacagggagcccatcattttgccatgcagtcacaatctgtgccaggcatgcgcgcggaatatactcgtgcaaactcctgaatccgaatctccacagtctcacagggcggcggggagtggtgtctccgattacgactatttggaccttgacaagatgagtctatactccgaggcagactcaggctacggaagctacggaggatttgcatcagcccccactaccccatgtcagaaaagtcccaacggcgtcagagttttccctcctgccatgcctcccccagccacacatttgtctccagctctcgcccctgtacccagaaacagttgcattacctgccctcagtgtcacagaagcttaatccttgacgataggggccttcggggctttcctaaaaaccgggtgctggaaggtgtgatcgatcgctaccagcagagtaaagccgctgcccttaaatgtcagttgtgtgaaaaggccccaaaggaggcaacagtgatgtgtgaacagtgcgatgtcttttattgcgacccttgccgcctaaggtgtcacccaccacgaggcccactcgctaaacacagactggtgcctcccgcccaaggaagggttagcagacggctctcaccaagaaaagtgtccacgtgcaccgaccatgagctcgagaatcattcaatgtattgcgtccagtgcaagatgcccgtgtgctaccagtgcttggaagaggggaaacattcttctcatgaggtcaaggcccttggcgccatgtggaagctacacaagtcccagttatcccaagcgctaaatggactgtcagacagagcaaaagaggccaaagaatttctcgtgcaactccgcaatatggtgcagcagatccaagaaaactcagtggagtttgaggcctgcctggttgctcagtgtgacgcacttatcgatgccctgaacagaagaaaagcccagctcctggcacgggtcaataaggagcacgagcataaactgaaagtggtcagggaccagatcagtcactgcaccgtaaaattacggcagaccacgggcttgatggaatactgcctcgaggtgataaaagagaacgacccctcagggttcttgcagatatctgatgcactcatccggcgggtgcacttgaccgaagatcaatggggcaaaggcacgttgacacctcgaatgactacagactttgacctttctctcgacaacagtccattgcttcagagtatacaccagctggacttcgtgcaggtgaaggtgcctgccactcccatcctgcaactggaagaatgttgtacccataataattccgccacactgtcctggaagcaaccacccttgtccaccgtccctgccgatggttatatcctggagctcgacgatggtaacggtggccagtttcgagaagtgtacgtcgggaaggagactatgtgtaccgtcgacggactccacttcaatagcacgtataacgcccgcgtaaaggccttcaacaagaccggggttagcccctactccaagacacttgtcctccagacttcagaggataccgatagcgaggaacagaccctccccttcccagtcccatcagaacggctgccgttaaggagaatgtctcccttctcctccacacttaacctacagccttcatttccaggaagaagttattttgactttcgtagttcccctcatcagctttctctgcactcaagtttgcagtctctgaacgcacccggatgtaactttgaaacccagagcgctccttactctcagctcgttgatatcaaaaaattgctggctgttgcttggttcgcttttgacccagggtcagctcactcagatattatcctgtcgaacgacaacctgactgtaacttgcagttcttacgacgatagggtcgtcctgggaaagacggggttctccaagggtatccactactgggaattaaccgttgaccggtatgacaaccatcccgaccctgcgttcggcgttgcacgtatggacgtcatgaaagatgtcatgctggggaaggacgataaagcctgggctatgtacgtggataacaatcgcagttggttcatgcacaacaacagtcatacaaatcgcacagaggggggcattaccaagggggcaactatcggtgtgctcctcgatctgaaccgaaaaaacctgacattctttattaacgacgaacagcaaggaccaatcgcctttgataacgtggaaggtctttttttccccgccgtgtccctgaatcgaaatgtgcaagtgtctacacttccattgcggctcaattcatgttgttggttaccggtgcaacgtctgccacgcgcagtgcagtctaacagaagggaaggatcttag

SEQ ID NO: 209817 - DNA, 1653 bp, synthetic construct
  misc_feature 1..1653: note = Description of Artificial Sequence: Synthetic coding sequence
  source 1..1653: mol_type = other DNA
atggaggagatggaggaggagctgaagtgccccgtgtgcggcagcttttatagagagcccataattctgccctgtagccataacctttgccaggcatgcgctagaaatatcttggtccaaactccagagtccgagagcccgcagtctcatcgcgcagcaggatccggcgtctcagactacgactacctggatcttgacaagatgtccctttacagcgaggctgattccgggtacggatcttacggtggcttcgccagtgccccgacaactccttgccaaaaatctcccaacggtgtaagggtgttcccacctgcaatgcctcctcctgctactcacctatcgcctgctctggcccccgtccccaggaactcatgtatcacctgcccgcagtgccaccgttcattgatattggatgatcgcggcttgagggggtttccaaaaaatagggtgttggagggcgtgattgatagatatcagcagtccaaggctgccgcccttaagtgccagttgtgcgaaaaggctccgaaggaggcaacggtgatgtgcgaacagtgtgatgtgttttactgcgacccctgccggctgagatgccacccaccaagggggccgctcgctaagcatcgcctcgttccgccagctcaggggagagtcagtaggaggctctccccaaggaaagtgtccacttgtaccgaccacgaactggagaatcactccatgtactgcgtccagtgcaaaatgccagtatgttaccagtgtctcgaagagggtaaacacagtagccacgaggtgaaggctctgggggctatgtggaaactccataagtcccagctcagccaggctctgaacggcctttctgatagagccaaagaagcaaaagagtttttagtgcagctcagaaacatggttcagcaaattcaggaaaatagcgtagagtttgaagcgtgtctggttgcgcagtgcgacgcactcatcgatgccttgaacaggcgtaaagcacaactcctcgcgagggtcaacaaggaacacgaacacaagttgaaggtggtgcgtgatcaaatttctcattgcaccgtcaaactcaggcaaaccaccggccttatggagtattgtctcgaggttatcaaggaaaatgatccttctgggtttttacaaatttccgacgccttgatccgccgcgtacacctcaccgaggaccagtggggaaagggaactctgacgccgagaatgaccacggactttgatctgtcgctggacaattcgccactgttgcagagcattcaccagctggatttcgtacaggtgaaggcgagtagtcctgtacccgccacccccatactacagcttgaagagtgctgtactcacaataactccgccacactcagctggaaacaaccaccactctctaccgtgcccgcagacgggtatattctggagctcgatgacggcaacggggggcagtttcgggaggtgtacgtggggaaagaaaccatgtgcaccgtggatggacttcactttaacagtacgtataatgctcgggttaaagcattcaacaaaactggagtgtcaccatattcgaaaaccttggtattgcaaacaagtgaaggaaaggccctccagcagtacccatccgagagagaactgcggggcatatag

SEQ ID NO: 209818 - DNA, 3750 bp, synthetic construct
  misc_feature 1..3750: note = Description of Artificial Sequence: Synthetic coding sequence
  source 1..3750: mol_type = other DNA
atggccaccgccgccaccgaggagcccttccccttccacggcctgctgcccaaaaaagagacaggtgcagcctcctttctgtgtagatacccggaatacgacggtagaggcgtattaatcgccgttctggacacaggcgtcgaccccggggctccgggcatgcaggtcaccacggatgggaagccaaagatcgtcgatatcatcgatactacgggctccggcgacgtgaacaccgccactgaggtggagcccaaggatggcgagattgtgggcctctcgggacgcgttttgaagattcctgcctcatggaccaatcccagtggaaaataccacatcgggatcaaaaatggttatgacttctaccctaaagcactgaaggaacgtattcagaaggagaggaaggagaaaatttgggaccccgttcaccgggtggctttggctgaggcctgccgaaagcaggaggaatttgatgttgcaaacaacggatcatcgcaggccaataaattgattaaagaggagctccagtcccaggtggagctgctgaacagctttgagaaaaaatatagtgatccaggccccgtgtacgattgtctggtgtggcatgatggggaagtctggagagcctgcatagactcgaatgaggacggggatctcagcaagagcaccgtccttaggaactacaaggaagcccaggagtacggctccttcggcacagccgagatgctcaattactccgttaacatttacgatgacggcaatctgctgtccatcgtgacatcaggtggagcgcatggcacccatgtagcctctatagccgccggtcacttccccgaggaacccgagcggaacggagtggccccgggggctcagattctgagcatcaagattggagatacacgattatctactatggaaaccggaactggactgattcgtgccatgattgaagtgatcaaccacaagtgcgacctcgtaaactactcctatggcgaggcaactcactggcccaatagcggtaggatctgcgaagttattaatgaggctgtctggaaacacaatatcatctatgtatcttctgcaggaaataacggcccatgcctgagcactgtcggctgccccggcggtacgacctcctccgtaataggtgttggggcctacgttagccctgatatgatggtggctgaatacagtctgcgggagaagctgccagccaaccagtatacctggtcctcgcggggcccgtccgccgacggagcattgggggtgtctatttcagccccaggcggagccattgctagtgtgccaaactggacactgaggggcacacagctgatgaacgggacgtcaatgtcttccccaaacgcatgtggaggcatcgccctgatcttgtcaggcctgaaagccaataatatcgattacacggtgcactcggtcaggcgcgccctagaaaacaccgccgtcaaagccgacaatattgaagtgtttgctcagggccatgggattatacaggtcgataaagcttatgattacttagtgcagaatacatccttcgccaataagctgggtttcaccgtgactgtgggaaacaacagaggcatctacctcagagatccagtccaggtggccgctcccagcgaccacggggtgggaattgaacccgtttttcctgaaaacacagaaaatagcgaaaagataagcttacagttgcaccttgcactcacatccaatagcagctgggtgcagtgtccctctcaccttgagctcatgaaccaatgtcgccatatcaacattagagtagaccctaggggtctacgcgagggcctccactacaccgaagtgtgtggatacgatattgctagtccaaatgccggacctctgttcagggttccaataaccgctgttatcgcagcgaaagtgaatgagagcagtcactacgacctcgccttcaccgacgtccacttcaagcccggacagattagacgccactttattgaggtgcctgaaggggccacctgggccgaggtcacggtttgttcttgctcctccgaagtctccgctaaattcgtcctacacgcggtgcagctggtcaagcagcgcgcgtataggtcacacgagttctacaagttttgtagtctccccgagaagggtactcttaccgaagccttccccgttctaggcggaaaagccatagagttctgtattgccagatggtgggcttcactgagtgatgtgaacatcgattatacaatcagtttccacggaatcgtgtgcaccgccccacagctgaatattcacgcatccgaagggatcaaccgttttgatgtgcaaagctctcttaagtacgaggatttggctccatgcatcacacttaagaattgggttcagacccttaggcccgtcagcgccaagacaaagccacttgggtccagagacgtgctgcctaataaccgccaattatatgagatggtactcacctacaactttcaccagccaaagagtggagaggttacgcccagctgccctctcctgtgcgagctcctgtacgagtccgagtttgattcgcagctgtggatcatctttgatcagaacaaacgacagatggggagcggagatgcctacccacatcaatattcgctgaagctggaaaagggtgactacaccattagactgcagatccggcacgagcagatatctgacctggaacgtctcaaggatctaccctttattgtgtctcatcgcctgagcaacaccttgtccctggatatccatgagaatcatagcttcgccctgctgggcaaaaagaaatcgtcgaacctgaccctcccaccgaaatacaaccaaccattctttgtaacatctctccccgacgataaaatacctaaaggagccggcccagggtgctatctggcagggtcactgaccctttctaagacagagctcggcaagaaagcggacgtgatccctgttcattattatttgattcctcctcctactaaaaccaagaacgggagcaaggacaaagaaaaagattcagagaaagaaaaggacctgaaagaggagtttaccgaagccctgcgtgacctgaagattcagtggatgactaaattggactcctctgacatttataacgagttgaaggagacctaccctaactacttgccactctacgttgctaggttacaccagctggacgccgagaaagagcggatgaagagactgaatgaaatcgtcgacgcggctaacgcggtaatatcacacattgaccagactgctctggcggtgtacattgctatgaagacagacccccgtccagacgccgccaccatcaaaaacgatatggacaagcaaaaaagcacattagtggacgcactttgccggaaaggttgtgccctcgccgatcaccttttacacacacaggcacaagatggcgcaatctccacagacgccgaggggaaagaggaggaaggagaatcacccctggacagcctcgcagaaactttttgggaaactacaaaatggactgacctgttcgacaacaaggtactcactttcgcttacaagcatgctctcgttaataagatgtacggccgtggtctgaaattcgctaccaaactggtagaggagaagccgaccaaagagaactggaaaaactgtattcagctgatgaaactacttggttggacccattgtgccagcttcaccgagaactggctgcctattatgtaccctcccgattactgcgtgttctag

SEQ ID NO: 209819 - DNA, 1791 bp, synthetic construct
  misc_feature 1..1791: note = Description of Artificial Sequence: Synthetic coding sequence
  source 1..1791: mol_type = other DNA
atgctgcccagccaggcccagggcctgctgtggtgggtgttccccctctttcccgccagttccctcagttacccacctgtgtcgtacagagcagatgggcttgcccggaacacctttctgaaagcctgttcagaaagcagctcatcctccaacatttccacaatgctggttacacatgactacacagctgtaaaagaggatgaaatcaacgtctaccagggcgaggtggtgcagatcttagcttcgaatcagcaaaatatgtttctggtgtttagggcggctacggaccagtgccctgctgcagagggctggatccccggctttgtgctgggccacacaagcgccgtaattgtcgagaatcctgatgggaccttaaagaaaagcacaagctggcacaccgcactcaggttgcgcaaaaagagtgaaaagaaagacaaagacggcaagcgcgaaggcaaacttgaaaacgggtaccgaaagtcacgtgaggggctgagcaataaggtgagcgtgaaacttctgaatcctaactacatctatgacgtgcctccggagttcgtgattcccctgtccgaagttacttgtgaaaccggtgaaactgtagtgctccggtgtcgcgtgtgtggtaggccaaaagccagtataacctggaagggtccagagcacaatactctcaacaacgacgggcattactctatttcgtacagtgatcttggggaagctaccttgaagatcgtcggagtgactacggaagacgacggcatttacacatgcattgctgtaaatgatatgggttccgctagctcttccgcgtcgctccgcgtgctaggccctggaatggatgggattatggtcacatggaaagataacttcgacagtttttactcagaggttgctgagcttggccggggcaggttttccgtggtgaagaaatgcgatcagaagggtacaaagcgcgcagtggcgacaaagtttgtgaataaaaaactaatgaagagagaccaggtgactcatgagctgggcatcctgcaatccctccagcaccccttacttgtgggcttgctggacaccttcgagacaccaactagttacattctggtattagaaatggccgatcaggggaggcttcttgattgtgttgtcagatggggctccttgactgagggtaaaattcgggctcaccttggagaggtactggaggccgtccggtacctgcacaactgccgaatcgcacacctagaccttaagcctgagaatattttggtcgacgagagcttggctaagcctactatcaaattggcggacttcggcgacgctgtccagctgaacacaacctattatattcatcagctgctggggaatcctgaattcgcggcacctgaaatcatccttggaaatccagtatcgctgacttcagacacgtggagcgtcggggtcttgacctatgttctcctctctggtgtttccccctttctggacgattcagtcgaagaaacgtgccttaacatttgtcggcttgatttctctttcccggacgattactttaaaggagtctcccagaaagccaaggagtttgtatgtttcctattgcaagaagatcccgcaaaaaggccgtccgccgccttggcactacaggagcagtggctgcaggccggcaatggccgatccactggcgtgcttgatacatcaaggctgacatcattcatcgaacggaggaagcatcagaacgacgtgcggccgatacgcagcatcaagaacttcctccaatctcgcttactgcctcgcgtatag

SEQ ID NO: 209820 - DNA, 9294 bp, synthetic construct
  misc_feature 1..9294: note = Description of Artificial Sequence: Synthetic coding sequence
  source 1..9294: mol_type = other DNA
atgagcggcagcagcggcggcgccgccgcccccgccgccagcagcggccccgccgcagctgcttctgctgccgggtcaggatgtggtggcggcgccggggaaggcgctgaggaggctgcaaaagacctagccgatatagccgccttctttcggtctgggttcaggaaaaatgacgagatgaaagcgatggatgtactccccatcctcaaagagaaagtagcctacctgagtggtggccgagataagagagggggacccatacttacgttccccgcgcggtctaaccacgaccgcatccgtcaggaggaccttcggcgcttaatcagctacctggcctgcattcctagtgaggaagtgtgcaagcggggtttcaccgtgattgtggatatgcggggcagtaagtgggactctataaagccgctcctgaagatattacaggaatctttcccatgctgtatccatgtagctctcatcatcaagcctgacaacttctggcagaaacaaaggaccaactttggtagttctaaattcgagtttgaaacaaacatggtaagcctggaaggactgactaaggtggtcgacccttctcagctgacccctgaatttgatggctgtctcgagtacaaccatgaggagtggatcgaaatcagggttgcatttgaggactacattagtaatgctactcatatgctttctaggctggaggaactacaggatatactcgccaagaaagaactgccacaggacttggagggggcccggaacatgattgaggaacattcacaactgaagaagaaggtgataaaagcacctattgaggatctggacctcgaaggacaaaagctgttgcagcgaatccaatctagcgaatcattcccaaaaaagaactccggaagcgggaacgccgatctccagaatctattgccaaaggtgagcacgatgttggacaggcttcactctacacgacagcacctacaccagatgtggcacgtgcgcaaattgaagttagaccaatgcttccagctgaggctcttcgaacaagatgctgaaaaaatgtttgattggattactcacaataaagggttgttcctcaattcttacactgagattggaacaagccatcctcacgcaatggaacttcaaacccaacataaccacttcgcaatgaactgtatgaatgtctacgtcaatattaaccggattatgtctgtcgccaaccgcttagtggagagcggacactatgcaagccagcagattaggcagatcgcatctcaattggaacaggagtggaaagctttcgcagccgcgctggatgaaaggagcaccctccttgacatgtctagcatcttccatcagaaagcagagaagtatatgagcaatgtggatagctggtgtaaggcatgcggcgaggttgatctgcctagcgagctacaggatctggaggacgccattcatcatcatcagggtatctacgagcacataacactcgcctacagtgaggttagccaagacggcaaaagtctgttggacaagctgcagcgccctttgacacctggctcctctgattctctgactgctagcgcaaattattcaaaggccgttcaccatgtgttggatgtgattcacgaagtactgcaccaccagaggcagctggaaaatatttggcagcaccggaaagttcgactgcatcagagattacagttgtgcgttttccagcaagatgtgcaacaagtgctggactggatcgagaaccatggtgaagctttccttagcaagcacactggcgtggggaagagcttacacagagccagagccctgcagaaaagacatgaagacttcgaagaggtagcccagaatacctacactaatgcagacaaactgctggaggcagctgagcagctagctcagacaggcgaatgcgaccctgaagagatataccaggccgcccatcagctagaggatcgcatccaggacttcgtacgcagagtcgaacagcgcaaaatcttactggatatgtcagtgtccttccacactcacgtgaaggagctctggacttggctggaggagctgcagaaagaactgctggatgacgtgtacgccgagagcgtagaggcagtacaggacctcatcaaacgattcggacagcaacagcagactactctccaggtgacagtcaacgtgatcaaagagggcgaagatctaatccagcagctgcgagattcagcgatatctagcaataagacacctcacaactccagcatcaatcatattgaaaccgtactgcaacaactagacgaggcccagtcgcagatggaagagctctttcaagagcgaaagatcaaattagaactgtttttacagctgcggatctttgagcgtgatgctatagatattatttcagatctggagtcatggaatgacgagctaagccagcagatgaacgacttcgacaccgaggatctcaccattgccgaacagcgcctacaacatcatgctgacaaagctttgaccatgaacaacctgacattcgacgtcatccatcaggggcaagaccttttacagtacgtgaacgaagtacaagccagtggtgtggaactcctgtgtgatcgagatgtcgacatggctacccgggtgcaggacctactcgagttccttcatgaaaagcagcaggagctcgaccttgccgcggagcagcacaggaaacatctggaacagtgtgtgcagcttcggcatttacaggctgaggttaaacaggtcctaggctggatcaggaacggcgagtctatgctcaacgccggtttaattactgcctcatcgctgcaggaggcagagcagctgcagagagagcatgaacaattccagcacgccatagaaaagactcatcagtcagcattgcaggtgcagcagaaggccgaggccatgcttcaggctaatcattacgatatggacatgataagggactgcgccgagaaagtcgcttcacattggcagcagctgatgttaaagatggaagatcgcctcaaacttgtgaatgcctctgtggccttctacaaaacctccgagcaagtgtgttcagtgttggaaagcctagagcaggaatacaaacgagaggaggactggtgcggcggcgcagacaaacttggacctaactcagagactgatcacgtcacaccaatgataagcaaacacttagaacagaaagaggctttcctgaaagcttgcacactggcccgcagaaatgcagatgtttttttgaaatatttacacaggaattccgtcaacatgccagggatggtcactcacattaaggcccccgagcagcaggtgaaaaatatacttaatgaactctttcagagggaaaatagagtactccattactggaccatgagaaaacggcgactagaccaatgccagcagtatgtggtgttcgagcgctctgccaagcaggccctcgaatggattcacgacaacggggagttttatctgtccacccacacgagtacagggtcatccatccagcatacccaagagctcctgaaggaacatgaggaattccaaataaccgcaaagcaaactaaagaacgtgtcaagcttctgatacaactcgcggatggcttctgcgaaaaaggccacgcacacgctgccgagattaaaaagtgtgtcacggccgtggacaagcgataccgcgactttagcctgagaatggaaaagtaccgcaccagccttgaaaaagctcttggcatttcatcggactctaataagtcctctaagtccttacagttggacattatcccagcatcgattccaggtagtgaggtgaaattaagggacgccgcccatgagctgaacgaagagaagagaaagtccgctcgcaggaaggagttcatcatggctgagctgatccagaccgagaaggcctacgtgcgggatctcagggagtgtatggacacctacctctgggagatgactagtggggtcgaggaaatacccccaggcatcgtgaataaggagttgattattttcggaaatatgcaggaaatttatgagtttcacaataacatctttctaaaagagctggagaaatacgaacagttacccgaagatgtgggccactgttttgtcacatgggccgataagtttcaaatgtacgtcacctactgtaagaacaaacccgacagcacccagcttattttggaacatgcaggcagctactttgacgaaatccaacagcggcacggtcttgcgaatagcataagcagctacctcatcaaaccagtccagcggattacaaagtaccaattactgttgaaggaactgttgacctgctgcgaagagggaaagggcgaaattaaggacgggttagaggtgatgttatctgtgccaaaacgcgcaaatgacgccatgcacctgtctatgctcgaaggcttcgatgagaacattgagtctcaaggagaacttatactccaagaaagctttcaggtgtgggatccaaagaccctgatcaggaaaggtagggagcgccacttgtttctgttcgagatgtcactcgttttctccaaggaggttaaagattcctccggccgcagtaagtatctgtacaaaagtaagttgtttacatctgagctgggggtgaccgagcacgtcgaaggcgacccttgtaaattcgccctttgggtgggccgaactccgacctccgataacaagattgtgctgaaggccagcagcatcgaaaataaacaggactggattaagcatatccgagaggtcatccaggaaaggacgatccatctcaagggtgccttgaaggagccaatccatatccccaagaccgctccagctacccggcagaaaggccgacgcgatggtgaagacttggacagtcagggcgatggttcaagtcagcccgacaccatcagcatagcttctaggacctcacagaatacactcgactccgataaactttctggagggtgcgagctgactgttgtgattcacgactttaccgcttgtaacagcaatgagctcacaatacgccgaggccagacggtggaggtgctggagcggccacatgataagcccgactggtgtttggtgcgcactactgatcgcagccctgctgccgagggtctggtcccctgtggatctctgtgcatcgcccatagcagatctagtatggaaatggaaggcatcttcaatcacaaagatagtttatcagtaagttccaacgatgctagcccaccagctagtgtggcctcactacagcctcatatgattggcgctcagtcctcacccggtccaaaacgacctggaaataccctacgcaagtggctgacctcccctgtgaggcgcctgtcctctggaaaagcggatggtcatgtgaagaagttagctcacaagcataagaaatccagggaggtcagaaagtctgcggatgccggcagccagaaggatagtgacgatagcgcagcgacaccccaagacgaaaccgtggaggagcgggggcgcaacgaggggctgtcgtctggtacgctaagtaaatccagctccagcggcatgcaatcatgcggcgaagaggaaggagaggagggcgccgacgcggtacctctgccccctcccatggctatccagcagcactctctcttacagcctgattctcaggacgataaggcatcgagccgcttgctggtgcgtcctacgtcgagcgagaccccatctgccgccgagttagtaagcgccatcgaagagctggtgaaaagcaagatggcactcgaagatcgcccttcctcccttctggtggaccagggggactcaagcagtcccagttttaatccttctgacaactctttgctcagtagcagctccccaattgacgagatggaagaacgaaagagttcaagcttaaagcggcggcactatgtacttcaggagctcgtcgagactgagagagattacgttagagacctgggttacgtagtcgagggatatatggcccttatgaaggaggacggtgttcctgacgatatgaaggggaaagacaagatcgtgttcggcaatatacatcagatatatgattggcatagagactttttcctgggggaattggaaaaatgtctcgaagaccccgagaaactcggcagccttttcgtgaaacatgagagaagactccacatgtacattgcctactgccaaaacaaacccaaatccgaacatatagtctcagagtatattgacacattcttcgaggatctgaagcaaagactcggccaccgcctccaactaaccgacttactgatcaagcctgtacagcggataatgaagtatcaactcttgctaaaggatttcctgaaatactccaaaaaagcctcgctggacacatcagagctggagcgggctgtggaggtcatgtgcatagtgccccggcgctgtaatgacatgatgaatgtcggacgtcttcagggcttcgacggaaaaatagtggctcaggggaaactgctccttcaggacacatttctggtcacggaccaggacgcaggactcctgccccgctgcagggagcgtagaatcttcctgttcgagcagatcgtgatattctccgagccactggacaagaaaaaagggttctcaatgcctggtttcctgttcaagaattctataaaggtgtcctgcttatgtcttgaggagaatgtggaaaatgacccctgtaagtttgcgctcacaagtagaaccggggacgtggtcgagacctttatcctccacagttcatcaccttctgtcagacaaacatggattcacgaaatcaatcagatattggagaatcagcgcaattttctgaatgcattgacaagccccattgagtatcagcgcaatcattctgggggcggaggcggcggcggctccggtggctcaggaggcggaggcgggagcggtggaggaggcgctccgtccggtggctctggacactcaggagggccctcaagttgcggcggagccccctcaacttccagaagtcggccaagcagaataccacaacctgtccgccaccatccaccggtcttggtcagtagtgcagcttcatcacaagcagaggctgataagatgtcgggaacgtccacccctggaccgagtctaccccctcccggcgccgctcctgaagccggacccagcgccccatccaggcggcctcctggcgctgatgcggaaggatcagagagagaggcagagcctatccctaaaatgaaggtgctggagagccctagaaagggagcagccaacgcaagcgggagttcccctgacgcacctgcgaaagatgcccgagcttccctcggcaccttaccccttgggaagccccgcgccggggccgccagcccccttaacagccctctgtcaagcgcggtcccgtctttggggaaagaaccctttcctccttcatcccctctgcagaagggtggatcattctggtcgtctattcctgccagccccgccagtcgccccgggagcttcacattccccggcgacagcgactcccttcagcgacaaacacccaggcacgccgcccctggtaaagataccgaccgcatgtctacctgctcatctgcatctgaacagagcgtgcaatctacgcagtccaatggatcggaatcctcttcttcaagcaatatctccacgatgctcgtcactcacgactacaccgcggttaaagaggacgagatcaacgtctatcagggggaagtagtgcaaatccttgccagtaaccagcaaaatatgtttctggtgttcagagcagcgaccgatcaatgcccagctgctgagggatggatcccaggttttgtcctgggccatacaagtgctgtgattgtggagaatcctgatgggacattaaaaaagtccacaagctggcataccgctttacgactgcggaaaaaaagcgaaaagaaggacaaggatgggaagagagaggggaagctggagaacggttaccggaagtccagggaaggcctcagtaacaaagtatccgttaaattactgaatcctaattacatttatgacgtaccacctgaattcgtcatcccgctgtctgaggtgacgtgtgaaaccggagaaactgtggtgcttagatgccgcgtctgtggccggcctaaggcatccatcacctggaagggaccagagcataatacactcaataacgatggccattattccatcagttatagtgacctaggtgaggccactctgaagatcgtgggggtcactactgaggatgatggaatttacacctgcattgcagttaacgacatgggctcagccagttcttccgcatctctccgggtgttgggacctggaatggacggcatcatggtgacgtggaaggataacttcgactctttttattctgaagttgctgaacttggcagaggccgattttccgtggttaagaagtgtgatcaaaaaggaaccaagcgggccgttgccacaaaattcgtgaacaaaaaactcatgaagagggaccaagtcacccatgagctcggaatactgcaaagtctccagcaccctttacttgtcggtctgctcgatacgttcgagactcctacatcatacatccttgtcctggagatggctgaccagggacgcctgctggattgcgtggtcaggtggggttctcttaccgagggtaaaattcgcgcacatctgggagaagtccttgaggcagtgaggtacctccacaactgccggatagcacatctggacctcaagcccgagaacatcttagtcgacgagtcattggcaaaacccacaatcaaattggcagactttggcgacgccgtccagttgaatactacatactacattcaccagttgttaggcaatcctgagtttgctgctcccgagattatccttgggaatcccgtaagcctgacctcggacacatggagtgtgggcgtcctcacttatgtgctgctgtccggcgtctctccttttctggatgatagcgtggaagaaacctgtctcaatatttgcagactggacttctctttccccgatgactacttcaagggggtgtcacagaaagcaaaagaattcgtgtgcttcctactacaggaggacccggctaaaagacctagcgctgccctagccttgcaggagcagtggttgcaggctggcaatggccgatccacaggggttcttgacaccagtcgcttgaccagtttcatcgagcggagaaagcaccagaacgatgtgagacccattcggtctatcaaaaacttcctacaatccagattgcttccccgagtttag

SEQ ID NO: 209821 - DNA, 7503 bp, synthetic construct
  misc_feature 1..7503: note = Description of Artificial Sequence: Synthetic coding sequence
  source 1..7503: mol_type = other DNA
atgctggaccggctgcacagcacccggcagcacctgcaccagatgtggcatgtccgaaaattaaagctagatcaatgttttcaactgaggctgtttgaacaggatgccgagaagatgttcgactggattacccataataaaggtctgttcctaaatagctatacagagatcggaacttcccacccacacgccatggaactgcagactcagcacaatcatttcgccatgaattgtatgaatgtctatgtgaatattaacagaattatgtccgtggccaacaggctggtcgagagtggacactatgcctctcagcagattcggcagattgcctcccaattagagcaggagtggaaggccttcgccgccgccctggatgaacgcagtacattgctagatatgtctagtattttccatcagaaagccgaaaaatatatgtcaaatgttgacagctggtgcaaggcctgtggcgaggtggacttgccctccgagcttcaagaccttgaggacgctattcaccatcaccaggggatctatgaacatatcacactggcatactctgaagtctcacaggacgggaaatcccttctcgacaagctccaacggcccctcacccccggttcttccgattcactgacagcttccgccaattattcaaaagcggtccatcacgtcttggatgtgatccacgaggtccttcaccatcaaagacaacttgagaacatttggcagcaccgaaaggtccgcttgcaccagcggctccagctgtgcgtctttcagcaagatgtccaacaggttctggattggattgaaaaccacggcgaagccttcctctccaaacatactggcgttggaaagagccttcatcgggcgagggcgttacaaaagagacacgaagacttcgaggaggtggcgcagaacacatatactaacgcagacaagctgctggaggcagctgaacagttggcccagaccggggaatgtgatcctgaggaaatctaccaagccgcgcaccagcttgaggacagaattcaggatttcgtccgtagagtggaacagaggaaaatactcctggatatgagtgtctcctttcatacccacgtgaaggaactgtggacttggctggaggaactgcaaaaagagctgctcgatgacgtttatgctgaaagcgtggaagccgtgcaggacctcatcaagaggtttggacagcagcagcagactacactccaggtcacagtcaacgtcataaaggagggtgaagacctgatccaacaacttcgcgactcagcaatctcttctaataagacgccccacaacagctcgattaatcacattgagaccgtgctacagcaactggatgaagcacagtctcagatggaggagttgtttcaggaaaggaagattaagctggaactgtttcttcaactccgcatctttgaaagagatgcaatcgacatcatatcggacctggagagctggaatgacgagctcagccagcagatgaacgattttgacacagaggacctgacaatagccgagcagagactccagcaccacgccgacaaagccttaacaatgaacaacctgaccttcgacgtcattcatcaaggacaggacctgctgcaatatgttaacgaagtgcaggcctccggcgtggaactgttatgtgatagagatgtggatatggccacgagagttcaggatctactggagtttctccatgagaagcagcaggagttggacctggcagccgagcagcacaggaagcacctagaacaatgtgtgcagctccgccatctgcaagccgaagtgaagcaggtgctgggctggatccggaatggtgaatcaatgcttaacgcggggctgattacagccagttccctccaggaagccgaacagctgcaacgggagcacgaacaattccagcacgcaattgagaaaacccaccaatctgcgctgcaagtgcaacagaaggcagaggcgatgctgcaggccaaccattacgacatggacatgattcgggactgtgcggagaaggtggcgagtcattggcagcagctgatgctcaagatggaggatcggctaaaattggtgaatgctagcgtggccttctataagaccagtgagcaagtgtgttctgttctcgagtctctggaacaggagtataaacgggaagaggactggtgtggtggagccgacaagctgggacccaacagtgagactgaccatgttactcctatgatatccaaacatcttgaacagaaggaggcatttctgaaggcatgtaccctcgctcgacgcaatgccgatgtcttccttaagtaccttcaccgcaattccgtgaacatgcctggcatggtaactcacataaaggccccagagcaacaagtgaagaatatcctgaatgaattattccaaagagagaacagggtgctgcactactggacaatgcgtaaacgtagacttgatcagtgccaacagtacgttgtcttcgaacgctccgctaaacaagccctggagtggatccatgacaacggcgaattttatctgtcaacgcacaccagcaccggcagctcaatccagcatacccaagaactgctgaaggaacacgaagagtttcagatcaccgccaagcagacaaaagagagagtcaaactgctgattcaactcgcagacggcttctgcgagaaggggcacgcccacgcagcggaaatcaagaagtgcgtgaccgccgttgacaagcgataccgggatttttccctcaggatggagaagtaccgcacgagcctcgagaaagcacttggtattagcagcgattctaacaagagctcaaagagcttgcagttggacattattccggcgagtattccaggcagcgaggtgaaactccgggatgccgcacacgagttaaatgaggaaaagcgaaaatcggcacgaagaaaagaattcatcatggcggaactcattcaaactgagaaggcttacgtgagggatttgcgggaatgcatggatacttacctctgggaaatgacctcaggcgtggaggagattcccccagggatagtgaacaaggagttaataatcttcggtaatatgcaggaaatatatgaattccacaataatattttcctgaaggaactagaaaagtacgagcagctacccgaggatgttggtcattgcttcgtgacttgggcagacaaatttcagatgtacgtcacttattgtaaaaacaagcctgacagcactcagctgatactagaacacgccggtagctattttgatgagatccagcagcgacatggcctcgctaactcaataagcagttatctaattaaacctgttcagcggatcacaaaataccagttactgctgaaagaattgttaacttgttgtgaggagggcaagggtgagatcaaagatggccttgaagttatgctgagcgttccgaaacgcgccaatgacgccatgcaccttagcatgctggaagggtttgatgagaacatagagtcccagggcgagctcattcttcaggaaagctttcaggtttgggaccccaaaacactgatccgtaagggcagggagaggcacctttttctattcgagatgagtttagtgttcagcaaagaggtcaaagatagttccgggcggagcaagtacttatacaaaagcaaactgtttaccagcgagctgggcgtgaccgaacacgtggagggggacccctgcaagttcgcgctatgggtcggacgaaccccaaccagcgataataagatcgtgttgaaggctagtagcatagaaaacaaacaggactggattaagcatatccgcgaggtaatccaggagaggactatacatctgaagggcgcgctaaaagaaccaatccatatcccgaagacagctccagcgacgcggcagaagggcagaagggacggagaagatttagacagccagggggacgggtcttcccagcccgatacaatcagtatcgcctcacgcacctctcagaacaccctcgacagtgataaactttctggaggctgtgaacttactgtagttattcacgacttcacagcctgcaactctaacgaacttaccatccggcgaggccagacagtggaagtgcttgaaagaccacatgacaagccggactggtgcctcgtgcgcactacagatcgatcccccgcagctgaggggctggtcccttgtggctctttgtgcatagcccatagtcgtagttcaatggagatggagggtatttttaaccataaggactcccttagtgtgtcatcaaatgacgccagtcctcctgcttcagtcgcatcactgcagccccatatgattggggcccagtcctcacccggaccaaagagaccgggcaatacccttcgaaagtggttaacatcccccgttcggcggctatcctcaggaaaggcagatggccatgtgaaaaaactggcacacaagcataaaaaaagcagggaggtacgcaagtccgcagacgccgggagtcagaaggactcagatgatagtgctgctacaccacaggatgagacagtcgaagagagggggaggaacgagggcctctcaagcgggactctgtccaagagttcctccagcggcatgcagtcttgtggagaagaagagggggaagaaggcgccgatgccgtccccctccccccccccatggccatccagcagcactccctgctccaacccgattcacaagatgacaaggcttcctcccggctcctggtgaggcctaccagcagcgagacccccagcgctgctgagctcgtatcagcaatcgaagaattggtgaagtctaagatggctctggaagatcggccttcgtccctcctcgtcgaccagggagatagctcgagccccagcttcaaccccagcgataactcactcttgagctcttcttccccgatcgacgagatggaggagagaaaatccagttccctcaaaaggaggcattacgtcctccaggaactggtggagaccgaacgggactacgttcgtgatctcggttacgtggtggaaggctacatggccttaatgaaggaagatggagttccagacgacatgaagggcaaggataaaatcgtcttcggtaatatccaccagatctacgactggcatcgggactttttcctaggcgagcttgaaaaatgccttgaggacccagagaaactgggctcactatttgtcaaacacgagcgccgcctgcatatgtacatcgcctactgtcagaataaacccaaaagtgagcacatagtatcagaatatattgacacattctttgaagatctgaagcagagacttggtcaccgactgcagctgacggacctgcttatcaagcccgtgcagcgaatcatgaaataccagctcctgctaaaagactttctcaaatactcaaagaaggctagtttggatactagtgagctcgagcgcgccgtagaggtcatgtgcattgtcccccgccgctgcaatgacatgatgaacgtgggcagactgcagggttttgacggtaaaatcgtcgcacagggaaaactgttattgcaagacaccttcctggtgactgatcaggatgctgggttgctacctcgctgcagagagaggcgaatttttctgttcgaacaaattgtcatctttagcgaaccccttgacaagaagaaagggttctctatgcctggtttcctgttcaagaattctatcaaggtgtcctgcctctgcctggaggagaacgtggaaaatgatccttgcaaattcgccctgacctcgcggactggagatgtcgtcgagacattcattctgcacagcagttcaccttccgtgcgccagacatggattcacgagatcaaccagatactggaaaatcagcgcaactttctcaatgccctcactagcccaattgagtaccagcgaaatcactccgggggcggaggggggggcggaagtggcggtagtggaggcggcggaggttccggcggcggaggagccccatccgggggcagcggccattcaggggggccttcatcatgcgggggcgccccatccacgtcacggagtagaccttcacgtatcccacaaccagttcgtcaccacccccccgtacttgtatcaagcgcagccagttcccaggccgaggcagacaagatgtctggcacctctaccccaggcccttcgttaccaccccctggggctgcgcccgaggcagggcccagcgcaccaagcaggcggcccccaggagcagacgctgagggctcagaaagagaagccgagccaattccaaagatgaaagtacttgagtcaccccgcaagggtgccgctaacgccagtgggtctagccccgatgcgccggctaaagatgccagggctagcctgggaactttgccgttgggaaagccacgggctggagctgcctctccactcaactctccactcagctcagctgtcccgtccctgggcaaagagccattcccgccttcatctcctctgcaaaagggtggcagcttctggtcgtcaattcccgcttctccggctagtagacccggcagctttacgtttcctggcgattctgacagtttacagaggcagacaccaagacacgccgccccaggaaaagataccgataggatgtccacctgtagctccgcctctgaacaaagtgttcagtcaacccagtctaacggttcggaaagttcatcatcctccaacatctctaccatgctcgttacacacgattatactgctgtgaaagaggacgaaatcaatgtttatcaaggcgaagtggtgcagatactggccagcaaccagcagaatatgttcctcgtctttcgcgccgccacggatcaatgtccggctgccgaggggtggattcccgggtttgtactgggccacactagtgcagtgatcgttgagaacccagatgggacactgaaaaaatccacatcctggcacacagctctccggctccggaagaaatccgaaaagaaagacaaggacgggaaaagagaaggcaagctggagaacggttataggaaatcaagggaaggactctcaaataaggtttccgttaaactcctaaaccctaattacatctatgatgtgccaccagagttcgtcattcccttgtcagaggtaacttgcgagaccggggaaacagttgtcttgagatgtagagtctgcggccggcctaaggcttccataacctggaaaggcccagaacacaataccttgaacaacgacggacactactcgatcagctactccgatcttggggaggctaccctaaaaatagtaggtgttaccacggaagacgatggaatctatacctgcatcgccgttaacgacatggggtcggccagttcaagtgcatccctacgagtactgggccctgggatggacggcattatggtcacgtggaaggataattttgacagtttttattctgaggtcgcagagttggggcgtgctaactggaacaactggtctccatattag

SEQ ID NO: 209822 - DNA, 8766 bp, synthetic construct
  misc_feature 1..8766: note = Description of Artificial Sequence: Synthetic coding sequence
  source 1..8766: mol_type = other DNA
atgagcggcagcagcggcggcgccgccgcccccgccgccagcagcggacctgctgccgccgcgtctgctgcagggtccgggtgcggtggtggcgcgggtgaaggtgctgaagaggccgccaaggatctggccgacatcgccgccttttttcgctcgggattccgtaaaaatgacgagatgaaggcaatggatgtactcccgattctaaaggagaaggtggcttacctgagtggcgggcgggataagcggggcggacctatcttaacttttcctgctagaagtaatcatgacagaataagacaggaagacctgcgaaggctgatctcatatctcgcatgtattcctagcgaagaggtctgcaaaagggggtttaccgtcatcgttgacatgaggggctccaagtgggatagtatcaagccattactcaaaatattacaggaaagtttcccctgttgcatacatgtcgctctgatcattaagcccgacaacttttggcagaagcagagaacaaactttggttcttccaagtttgaattcgagacaaacatggtaagcctcgaagggctcaccaaagtcgttgacccctcccaactcacccccgagttcgatggttgcctggaatacaaccatgaggagtggatcgagatccgagtggcattcgaagattacatctcgaacgccacgcacatgctgtcccgcctggaggaactgcaggacatactcgctaagaaggagttgccccaggatttagaaggcgcccggaatatgattgaggagcactcacagctgaaaaagaaggtgatcaaagccccgatagaggatcttgacctggagggacagaagctcctgcagagaatccagtcatccgagtccttccccaagaaaaacagtggtagcggtaacgctgatctgcagaacctgttaccaaaagtgtccactatgctggaccgcctccatagcacccgtcagcatttacaccagatgtggcacgtaagaaaattaaagttggatcaatgtttccagttgcgtctctttgaacaggacgccgaaaaaatgttcgactggataactcataacaaagggttattccttaactcctataccgaaataggaacctcacaccctcatgcgatggagctgcagactcagcacaatcactttgcaatgaactgcatgaacgtgtacgttaatataaacaggattatgtccgttgcaaatagactggtggaatccggacactacgcctctcagcagatccgtcagattgcctcacaattggaacaggagtggaaggccttcgccgcagctctagatgagcgatctacactgttggacatgagctccatcttccaccaaaaagccgagaagtatatgtctaatgtggacagctggtgtaaggcatgtggcgaggtagacctaccctcagagctgcaggacctggaagatgctatccaccaccatcaggggatctatgagcacatcacgctggcttactcagaagtctctcaggacgggaagagtctgctggataagctacagcggccgctcacgcctggttcatctgactccttgactgcttccgccaattacagtaaggccgtccatcacgtactggacgtcatccatgaggtgcttcaccatcaaagacagcttgaaaatatatggcaacaccgcaaggtgcggctccaccagcgcctgcagctgtgtgtgtttcagcaggacgtgcagcaagtcctggactggatcgaaaatcacggggaggctttcctgtcaaaacacactggcgtaggaaagtcgttgcatcgcgcaagagctctccaaaagaggcacgaggacttcgaagaggtggcacaaaatacgtacactaatgctgacaagttacttgaggctgctgaacagctcgcccagacgggcgaatgcgatccagaagaaatctatcaagcagcccaccagctggaagatcgaatacaggatttcgttcgcagggtggagcagcggaaaattctacttgacatgagtgtgagttttcacacccatgtgaaggagctctggacgtggctcgaagaattgcagaaagaactgttagacgatgtgtacgcagaatccgtggaagccgtccaggacttgatcaaacggtttggccagcagcagcagaccaccctgcaggtgaccgtgaatgtcataaaagaaggagaagacctcatccagcaactacgcgacagcgccatttctagcaacaaaacgccccacaacagttccatcaaccacatagaaactgtgttgcaacagctcgatgaggcacaatcacagatggaggagctgttccaagagaggaagattaagcttgagctatttcttcaactccgcatcttcgagcgagatgccattgacattataagtgatcttgaatcttggaatgatgagctctcacagcagatgaatgatttcgacactgaggacctgactatagccgagcaacggttgcagcatcacgccgataaggctctcactatgaacaatctgacttttgacgtcatccaccaggggcaagacctgcttcagtacgtgaatgaagtccaggctagcggagtggaactgctctgcgacagggatgtggacatggccacccgtgtgcaggacctgctggaatttttgcatgaaaaacagcaggaactggatctggccgcagaacagcacagaaagcaccttgaacagtgtgtccaactaaggcatcttcaggcagaagtcaagcaggtcctaggttggattagaaacggggaatcaatgctaaacgcaggactgatcacagctagtagcctgcaagaagccgagcagttgcagcgagaacatgaacagtttcaacatgcgatagagaaaacgcaccaatcagcactccaggtccaacagaaggcggaagccatgctccaagccaaccactatgatatggacatgattcgggactgtgcagagaaggttgcaagccattggcaacagttgatgctcaaaatggaagatcggttaaagctggtgaatgcgtccgtggccttctataagacgagtgagcaggtgtgcagcgtgctggagtcattagagcaggagtacaaaagagaagaagattggtgtgggggagctgataaactagggcccaactcagagaccgaccatgtgaccccaatgatatccaagcacctagagcagaaagaggcatttctaaaagcttgtaccctcgctcgacgcaacgcagacgtgttcctcaaatatcttcatcgtaactctgttaatatgcctggcatggtgactcacatcaaagcacccgaacaacaggtgaagaacatccttaacgaactgttccagcgggaaaaccgcgtgctccactactggaccatgaggaaacggagactagaccagtgtcagcagtacgtggtgttcgaaagaagtgccaagcaggccctggagtggatccacgacaatggtgaattctacctctctacgcacacatctacagggagttctattcagcatacccaggagctcctgaaggagcacgaagaattccagatcacagcaaagcaaactaaagaacgcgttaaattgttgattcagctggctgatggcttttgcgagaagggccacgcccacgcggccgagatcaaaaaatgtgtaaccgctgtcgacaagcgttatcgagatttctcactccgtatggaaaagtacaggacatccctcgagaaggccctaggtattagttctgactctaacaaatccagtaagtccttacagttggacatcatccccgccagtattcctggttcggaggtgaagttaagggatgcggcacatgagctgaacgaagagaagcggaagagcgcgagaaggaaagaattcataatggccgagctaattcagaccgaaaaagcctatgtccgtgatttaagggaatgcatggatacttacctgtgggagatgacatcaggtgtggaagaaatcccccctggcatcgttaacaaggagctgatcatatttggaaatatgcaggagatttacgagtttcacaacaacatcttcctgaaagaattagagaaatacgagcagctcccggaggacgttggacattgcttcgtaacttgggcagataaattccagatgtatgtaacatactgtaaaaacaaacctgacagcacccagttaattctggagcatgcaggaagctactttgacgaaattcagcagcgccatggcctggcgaattccatttcaagttacctcatcaaacccgtccagagaatcacaaagtaccaacttctgctgaaagagctcctgacgtgctgcgaagagggaaagggagaaattaaggacggtcttgaagtgatgctaagcgtgccaaaacgcgccaatgatgctatgcacctttccatgcttgaggggttcgatgaaaacatagagagtcaaggcgagctcatcctacaagagagcttccaagtatgggatcccaagacactaattagaaaaggacgggagcgccatctgttcctcttcgaaatgtcactggttttcagcaaggaagtcaaagatagctcggggagaagtaaatacctttataagagtaaattgtttacctctgagctaggcgttaccgaacacgtggaaggagatccctgcaaattcgctctgtgggtcggcagaacccctacctctgacaacaaaatagtcctgaaggcgtcatcgattgaaaataaacaagactggatcaagcacattagggaggtgattcaggaaaggacaatccatctcaaaggagccctcaaggaacccatccacattcccaaaactgcaccagcaacccgccagaagggtcgtagggacggggaggacctggacagccaaggtgacggatcgtctcagcctgataccatctctatcgcctctcgaacttcccagaacactcttgactccgacaaactgtcaggtgggtgcgaactgacagtcgtcatacacgacttcaccgcctgtaactcaaacgagctgaccatacgtcgtggccaaaccgttgaagtgctagaacgcccacacgacaaaccagactggtgtctggtgagaacgaccgatagatcccctgctgcagagggcctggtgccatgcgggagcctctgcattgcccactcgcggtcctcgatggaaatggagggaatcttcaaccataaagatagccttagtgtgagctctaatgatgcttcaccacccgctagcgtggctagcctccaaccccatatgataggcgcccaaagcagcccaggcccaaaacgccccggcaatacgcttcgaaaatggctaacgtctcctgtgaggcgcttgtcgtccggaaaggccgacggccatgtgaaaaaactagctcacaagcacaaaaaaagtcgagaggtcagaaagagcgccgatgctggaagccaaaaggattctgacgatagcgcggcaacgcctcaggatgagaccgtcgaggagagagggcgcaatgaagggctctcttctggcacgctgagtaaaagttcttcatcaggaatgcagtcctgcggggaggaggaaggtgaggaaggagccgatgctgtgccgctcccgcctcccatggctattcagcagcacagtttgcttcagcctgactcacaggatgacaaagcatccagccggttgttggtgagaccaacaagctccgagacccccagcgccgctgaattagtgtccgccatagaggaattggtgaaatccaagatggcgctcgaagaccgtccctcaagcctgttggtcgatcaaggggacagctcatccccgtctttcaatcccagcgacaatagcctcctgtcttctagctctcccatcgatgaaatggaggaacggaagtcgtccagtttaaagaggcgacactatgtgctccaggagctagtggaaaccgagagggattatgtgcgcgatctgggctacgtggtcgaaggttacatggctctcatgaaagaagatggagtgcctgacgacatgaaagggaaggacaagatcgtgtttggaaacattcaccagatctacgactggcacagagatttctttctgggcgaactggaaaagtgtctcgaggatcctgaaaagctcggctctctattcgtgaagcacgaacgtcgactccatatgtacattgcttactgccagaataaacccaaaagcgaacacatcgtttctgagtacattgacaccttttttgaggacctgaaacagcgcctcggtcaccggttgcagctcaccgacttattgatcaagcccgtgcagaggatcatgaagtatcagctattgctaaaagacttcctcaagtatagcaaaaaggccagcctggacacatccgaacttgaaagggcagtggaggtcatgtgcattgtgccaagaagatgcaacgacatgatgaatgtaggcagactccaaggattcgacggtaagatagtcgcccagggtaaactgcttctccaagatacatttctggtgaccgaccaagacgcggggctgctgccccgctgtagagagaggcgcatttttctgtttgagcagatcgtgattttcagcgaacccttagataaaaaaaaaggattctctatgccagggttcttgtttaagaacagtattaaggtttcttgcctttgcctggaagaaaacgtcgaaaacgatccgtgtaagtttgcgctgactagtcgcacaggagacgtcgtagagacttttatattgcacagctccagccccagtgtgaggcagacttggatccatgaaatcaatcagattctcgaaaaccagcggaatttcctcaacgcactcaccagcccaatagagtatcagcggaaccactctggaggaggtggcggaggaggatctggtggctccggtggcgggggcggaagcggcgggggaggagcaccatcaggggggtcggggcattctggtggcccctcctcctgcggtggagcgcccagtaccagtcggtctagaccctctcgcattccccagcccgttagacatcaccccccagtgctcgtctcttccgccgcctctagtcaagccgaggcggacaagatgtcggaatcagagagttcttccagtagcaacattagcacaatgctggttacccacgattatacagcagtcaaagaggatgagattaatgtctatcaaggtgaagtggttcagatcctggccagtaaccaacagaacatgtttttggtgtttcgagcggcaaccgaccagtgtccagccgctgagggttggattcccggctttgtgctgggtcatactagtgccgtcattgtcgagaatccagatggtacgctaaagaagtccactagttggcatacggctctaagactccgtaagaagtccgagaaaaaggacaaagatggcaagagagaggggaagctggagaatggttacagaaagtcaagagaggggttaagtaataaggtaagcgtgaagctcctgaatccaaattacatctacgatgtccctcccgagttcgttataccactttccgaggtgacatgtgagacaggcgaaaccgttgtcctgcggtgccgggtgtgcggacgccctaaagccagtatcacctggaagggccctgaacacaatactctgaataacgatgggcattacagcatttcttattccgaccttggagaggcaaccctgaagatcgtgggtgtgaccacagaggacgacggcatctatacatgcatcgcagttaatgatatgggctccgccagctcttccgcatctcttcgcgtcctgggtccggggatggacgggataatggtaacctggaaggataactttgatagcttttactctgaagttgcggaactcggcagggggcgcttctcggtggtcaagaagtgcgaccagaagggtaccaaacgggctgtggcaaccaagtttgtgaataaaaaattaatgaagcgcgaccaggttacacacgaactcggcattttacagagccttcagcatccgttgctcgtgggacttctagatactttcgaaaccccaacctcctatatcctcgttctggaaatggcggaccagggccgattgttggattgtgtagtccgatggggatctctgactgaagggaagatccgggcccacctaggcgaggtcctcgaagccgtacgctatctgcacaattgtcggattgctcatctggacttgaagccggaaaatattctggttgacgaatcattggctaagcccaccataaaactggctgactttggtgacgcagttcagcttaatacgacatattacatccatcagctgctaggtaaccccgaatttgcggcccccgagatcatcctgggtaatccagttagcctgaccagcgatacatggagcgtaggtgtgctgacctacgtccttctgtctggcgtgtcaccgttccttgacgacagtgtcgaggagacatgtctaaacatttgtcgactagacttttcgttccccgacgactacttcaagggcgtgtctcagaaagcaaaggaattcgtttgctttctgctgcaggaggacccagctaaacgcccaagcgctgctttggcactgcaggagcagtggctacaggcgggaaatggtcggtcgaccggcgtgctcgatacctccaggctcactagcttcattgagcggcgcaaacaccaaaatgacgtgcgtccaatccgttccataaagaacttcctgcagagcaggttactcccaagagtctag

SEQ ID NO: 209823 - DNA, 768 bp, synthetic construct
  misc_feature 1..768: note = Description of Artificial Sequence: Synthetic coding sequence
  source 1..768: mol_type = other DNA
atggccctggaggaccggcccagcagcctgctggtggaccagggcgatagtagttctccttcttttaacccgagcgataacagcttactttcttccagcagtccaatagacgaaatggaggagcgcaaatcaagctctttgaaaaggcgacattacgtgctccaggaactagtggagaccgaaagggattacgtgcgggacctgggctatgtggttgaggggtacatggctttgatgaaggaggatggcgtgcctgacgatatgaagggtaaggacaaaattgtgtttggcaacattcaccagatatacgattggcacagggatttttttcttggggaattggaaaagtgtctggaagatcccgagaagcttgggtcactgtttgttaagcacgagagaaggctgcatatgtacattgcatattgccagaataagcccaagagcgaacacatagtgagcgaatatattgacacattttttgaggaccttaaacagagactaggccacaggttgcagctgaccgacctgctcatcaagcctgtgcagcgcatcatgaagtatcagctgctgttgaaggacttcttgaaatacagtaagaaagcgtccctcgatacgtctgagctggaacgtgctgtagaagtaatgtgcatcgtcccgcgccgctgcaatgacatgatgaatgtgggccggctgcagggattcgacgggagggtagtggcgctgtgccaccgatttaaggaaactttccgcgaaatatgctggttttag

SEQ ID NO: 209824 - DNA, 1203 bp, synthetic construct
  misc_feature 1..1203: note = Description of Artificial Sequence: Synthetic coding sequence
  source 1..1203: mol_type = other DNA
atgaacggccagctggacctgagcggcaagctgatcatcaaggcccagctcggcgaagacatacgcagaattccaattcataatgaggacattacatatgatgagctggtgctgatgatgcaaagggtgtttcggggcaagctgctgtccaatgacgaggttaccatcaaatacaaggacgaggacggggaccttatcacgatcttcgactcgtcggatttatccttcgcaatccaatgttcccggattctgaaactcacactcttcgtgaatggccagccaagaccacttgaatcttctcaagtgaaatatttgcggcgtgaattaattgagctgcggaataaggtcaacagacttctcgactctctcgaaccacctggcgagccggggccttcaaccaatatacccgaaaatgatactgtggatggccgagaggagaaaagtgccagcgactctagcggaaagcagtctacccaagttatggccgcatctatgagcgctttcgacccccttaaaaaccaagatgaaattaacaaaaatgtcatgtccgcatttgggctgactgacgaccaggtgtcggggccaccaagcgccccagctgaagataggagcggaacccccgacagcattgcatcatcatcaagtgccgctcatcccccgggagtgcagcctcaacagcccccatacacgggcgctcagacccaggccggtcagattgaaggtcagatgtaccagcaatatcagcaacaggcaggttatggggcacagcagccccaggcaccaccacaacagcctcagcagtatgggatacagtacagcgcatcctactcacagcagaccggaccacagcagccccagcagttccaggggtatgggcagcagccaacttctcaggccccagcccccgccttctcgggacaaccacagcagctaccggcacaacctccacaacagtaccaggcctccaactatcccgcgcagacttatacagcccagacaagtcagcctactaactacacagtcgccccagccagccaacccggtatggccccatcccagcccggggcataccagccgcggccagggtttacatccctcccagggagtactatgactcctccaccttccggccctaatccctacgcccggaacagacctcctttcggtcagggctacacccagccaggcccgggatacaggtag

SEQ ID NO: 209825 - DNA, 1101 bp, synthetic construct
  misc_feature 1..1101: note = Description of Artificial Sequence: Synthetic coding sequence
  source 1..1101: mol_type = other DNA
atgaacggccagctggacctgagcggcaagctgatcatcaaggcccaattaggcgaagacataagaagaatcccaatccacaatgaagatatcacctatgatgagctcgtgctgatgatgcagcgcgtgtttcggggaaagctgctgtcgaacgatgaggtgaccatcaaatataaagacgaagatggagatttaatcacgatttttgacagtagcgatttgtcatttgccatccagtgctcgaggatcctgaaactaaccctctttgtaaacggtcagccgaggccactcgaaagcagccaggtgaaatatctaagacgagaattaattgagttgaggaataaagtgaacagattactggactctttggagccccccggggaacccggaccctctacgaatattcctgagaacgacacagtggatggccgtgaagaaaagagcgcatctgattcctctggaaagcagagcacccaggttatggccgcgagtatgagtgcatttgatccacttaaaaatcaggatgaaatcaacaaaaatgttatgtcagccttcggcctgaccgacgatcaggtctccggaccgccgtctgcacccgcggaagacagatctggcaccccagactctatcgcttcctcttccagcgccgcccatccccctggggtccagccccagcaacctccttacaccggtgctcaaacacaggctggacagatgtatcagcagtattcaaacaggcccgcgatggtgcattcatcacgtcgccttcacctcagcagcttaaacagcatggttttttctatacagcaggcaattgtttcaagattagacctcaacaatctgtcctccagccgcgatatggcatcgaaccagttgccacggcatcagctgctcccatttctcgtatcactaaataattgcctgctatcccggcactcctcaacaaggcgtgcgataattctccacaaattgactctgcctaaacttctcagcttattaatcatcctgtggctgctgccccttaatttggagtggttacaggcaaacttaggcccgataaaccaggaccaagtcttgttgcattttctcgaggtgccttag

SEQ ID NO: 209826 - DNA, 474 bp, synthetic construct
  misc_feature 1..474: note = Description of Artificial Sequence: Synthetic coding sequence
  source 1..474: mol_type = other DNA
atgaacggccagctggacctgagcggcaagctgatcatcaaggcccagctcggcgaggatatcagaaggattccgattcataatgaagacattacatatgatgagttagtgctgatgatgcagagggtgtttagagggaaactgttgtcaaacgatgaagtgaccatcaaatacaaggatgaggatggtgatctgataaccatattcgacagttctgacctatctttcgccatccaatgttctaggatcttaaagttgaccctctttgtcaatggacagccacgacctttagagtcttctcaggtgaagtacttaagacgggagctaatcgaattgagaaacaaggtcaacaggctgctggattcgctggagcccccgggcgagcctggcccatctactaatatacccgagaatgacactgttgacggaagggaggaaaagtcagcttcggattccagcggtaagcagagctag

SEQ ID NO: 209827 - DNA, 387 bp, synthetic construct
  misc_feature 1..387: note = Description of Artificial Sequence: Synthetic coding sequence
  source 1..387: mol_type = other DNA
atgaacggccagctggacctgagcggcaagctgatcatcaaggcccagcttggggaggatatccgccggatcccaatccataatgaagacatcacatatgacgaattggttctgatgatgcagcgtgtatttagagggaaactactgtccaacgatgaggtgaccataaagtataaagacgaggatggggacctgataacaatcttcgacagctctgatttgtcatttgccattcagtgctctaggatcctgaagttaactctattcgtaaatggacaacccagacccctggaatcatcacaggtgaagtatctacgtagggagctgattgagctgagaaataaggtaaatcgcttattggatagcctggaaccccctggtgaatag

SEQ ID NO: 209828 - DNA, 546 bp, synthetic construct
  misc_feature 1..546: note = Description of Artificial Sequence: Synthetic coding sequence
  source 1..546: mol_type = other DNA
atgaacggccagctggacctgagcggcaagctgatcatcaaggcccaactgggcgaggacattcgcaggattccaattcataacgaggacataacttacgatgagctggttctaatgatgcaacgcgtctttagaggaaaacttctgtccaacgacgaggtgaccatcaaatacaaggacgaagatggagacctcattaccatcttcgacagcagtgatctcagttttgccatccagtgctcccgaatcttaaagctgaccctcttcgtgaacggccagcccagaccattggagtcttctcaagtgaaatacttacggcgcgagctgatcgaactgagaaataaagtgaatagacttcttgacagtctggaacctccaggggaacctggaccctcaaccaacatccctgagaacgacacagtggatggcagggaagagaagtcagccagtgactcttctgggaaacagtctactcaggtcatggccgcaagcatgtctgcatttgacccactgaagaatcaggatgaaatcaataaaaacgtgtag

SEQ ID NO: 209829 - DNA, 1203 bp, synthetic construct
  misc_feature 1..1203: note = Description of Artificial Sequence: Synthetic coding sequence
  source 1..1203: mol_type = other DNA
atgaacggccagctggacctgagcggcaagctgatcatcaaggcccagttgggcgaagacatcaggcgcattcctatccataacgaagatatcacctacgacgagctcgttcttatgatgcaaagggtctttcgcgggaaactcttatctaatgacgaggtcacgataaaatacaaggatgaggatggcgatctaattaccatttttgattcatcagatctctcattcgctatccaatgcagtcgcattttgaagttaacacttttcgtgaatggccagcctcgcccacttgaatcctcccaggtgaagtaccttcggcgggagcttattgagctgcggaacaaagtgaaccgcctcttagattccttagagccgccaggagagccaggaccctccaccaatattcccgagaatgacactgtagatggtcgcgaggagaaatcagccagcgatagctctgggaagcagagcactcaggtgatggccgccagcatgtccgcgttcgacccgctaaagaatcaggacgaaatcaataaaaacgtcatgtcagcctttggcctgacggatgaccaggtgtccgggccccccagtgcccctgctgaagataggtccggaacaccggacagtattgcctcatcttcctcagccgctcaccccccaggtgtgcagccccagcaacccccgtataccggggctcagacacaggccggccagatcgagggtcagatgtatcaacagtatcagcagcaggcaggatacggcgcccagcaaccacaggcacctccccagcagcctcagcaatatggaatccaatattcggcttcatattcccagcagacggggccccagcaaccacagcaatttcaaggatatggtcaacagcctacctcccaggcccctgcccctgcgttctcaggccagccccaacagctcccggcgcagccccctcagcagtatcaggcctcgaactacccagcccagacctatacagcgcagacttctcagcccactaactacacagtagcccctgcctcacaacctgggatggccccgtcccagccaggcgcctaccaaccacgccccggttttacttctcttcccggctctaccatgacccctccaccctcgggccccaatccatacgctcgcaatcggccaccttttggacagggatacacacagccgggccctgggtaccgttag

SEQ ID NO: 209830 - DNA, 1191 bp, synthetic construct
  misc_feature 1..1191: note = Description of Artificial Sequence: Synthetic coding sequence
  source 1..1191: mol_type = other DNA
atgaacggccagctggacctgagcggcaagctgatcatcaaggcccagctgggcgaggatatcagacggattcccatccacaatgaggatattacatacgatgagttagttctcatgatgcagcgagtcttcaggggaaagcttctaagtaatgacgaggttaccattaaatacaaggacgaagacggagatttaatcacaatttttgactcctctgacctctcctttgccatacagtgttcccgaattctgaaattgacactgtttgtcaatggccagccccgccccctggagtctagtcaggtcaagtatctgcggagggagctgatcgagttgcgaaacaaggttaacagactccttgacagcttagagccaccaggggaacccggaccttccacaaatattccagaaaatgatactgtggatggacgcgaggagaagtccgcctccgattccagtggcaagcagagcacccaggtgatggctgcatccatgagcgcattcgatccgctcaaaaatcaagatgaaatcaacaaaaatgtgatgtcggccttcggactgacagacgatcaggtgagtggcccgccgtcagcccctgccgaggacagatcaggcacacccgatagtatagcatcaagctcttctgccgcccacccacccggggttcagccacaacagccaccttacaccggggcccagactcaggctgggcagatgtatcagcagtatcaacaacaggcaggctacggcgcccagcaaccgcaggcccctccacagcagccccagcagtatggtatccagtactccgccagctactcccaacagactggaccgcagcagccccagcagtttcagggttatggccagcagcctacatctcaagcgcctgctcctgccttttctggccaacctcaacagctgcccgcccagccacctcagcaatatcaggcttcaaattaccctgcacagacctataccgcgcagactagccaacccaccaattacacggttgcccccgcatcacagccgggtatggcacccagccagccaggtgcctatcagccgcgtccgggcttcactagtctccccggatcaacgatgaccccccctccgagcggccctaacccctatgcacgcaatcgtcccccgtttggtcagggctacacccagcctggaccgggttatagatag

SEQ ID NO: 209831 - DNA, 729 bp, synthetic construct
  misc_feature 1..729: note = Description of Artificial Sequence: Synthetic coding sequence
  source 1..729: mol_type = other DNA
atgggcgaggccagcccccccgcccccgcccggcggcacctgctggtgctcttgctcctcctctcaacgcttgtgatccccagtgcagccgcccctatccatgatgccgatgcacaggaaagctccctaggacttactggtctgcagagcctccttcaaggattctcccggttgtttcttaagggtaatttgctgcggggaatagacagcctgttttctgcacccatggattttagaggcctacctggaaattaccacaaagaagaaaaccaagaacatcaattgggtaacaatacactgagctcccacctccagatcgacaagatgacagataacaagacaggggaagtgctaattagcgaaaacgtcgtagccagcatccagccagctgagggtagctttgagggtgatctaaaagtcccgcgcatggaggagaaggaagccctggtgccgatccagaaggcaaccgattcgttccacaccgagctccacccacgcgtggctttctggatcatcaaactgcctcggcgcaggtctcaccaggacgcactggaaggggggcactggctgtccgaaaagcgtcatcggctccaggcaatcagagatgggttacgtaaggggacccacaaggatgtcctggaagagggcaccgaatcatctagccattcccgcttgtctccgagaaaaacccatttactgtacatcctgagaccatcgcgccagctgtag

SEQ ID NO: 209832 - DNA, 1980 bp, synthetic construct
  misc_feature 1..1980: note = Description of Artificial Sequence: Synthetic coding sequence
  source 1..1980: mol_type = other DNA
atgcagggcagcagcctgtggctgagcctgaccttccggagcgcccgggttctctcgagagcccgcttcttcgaatggcagagtcctgggcttcccaacacagccgccatggagaacggtaccggaccttacggggaggaacgccctcgcgaggtccaggaaaccacagtgacagagggagccgccaaaattgcattcccttcagcaaacgaagtcttctacaaccccgtgcaggagtttaacagggatctgacatgcgccgtcatcaccgagtttgcacggattcagctgggcgcaaagggtattcagattaaggtgccaggcgagaaggatacacagaaggtcgtggtagacctctccgaacaggaagaagaaaaagttgaactgaaagaaagtgagaacttagccagtggcgatcaacctcgtaccgcggcagtcggggaaatatgcgaggaaggactgcacgtccttgagggcctggcagcctccggcctgagatccatccgattcgcgctcgaagtgccagggttgcgatccgtagtcgcaaacgacgcgtccaccagagccgtcgatttgattcgccgcaatgtccagctcaacgatgttgcccaccttgttcagccatcacaagctgacgccagaatgctgatgtaccagcatcagagagtaagcgaacgcttcgacgtcattgacctggatccctatggttcgcccgcaacctttctggacgctgccgtgcaggcggtgtccgaaggaggattactatgtgttacctgtacagacatggccgttctcgccggcaatagcggagaaacatgctactcaaagtacggcgcgatggctctgaaaagccgtgcatgccatgaaatggctctgcgcatcgtgttacattcacttgacctgagggctaattgttatcagcggtttgtggtcccactgcttagcattagtgcggacttctatgtacgagtgttcgtgagggtatttactggacaagcgaaggtgaaagcatccgccagcaaacaggccctcgtgttccaatgtgtgggttgcggcgctttccatctacaacgactgggtaaagcgtccggggtgccgagcggtcgggccaagtttagtgccgcttgcgggccccccgtgacccctgagtgcgagcattgtggccagagacaccagctcggtgggcccatgtgggctgaacccatccacgacctggacttcgtaggacgggtgctggaggccgtgtctgctaatcctggccggtttcataccagcgagcggattcgcggggtacttagcgtgattaccgaggaactgcctgatgtacccttgtactatactttggatcagctgtcaagtacgatccattgcaacactccgagcttgctgcagctaagaagtgctctcctacatgccgatttccgcgtgtcactcagtcacgcctgtaagaacgcggtgaagactgacgctcccgccagtgcgctgtgggacataatgcggtgctgggagaaggaatgtccagtcaagagagagcgactcagcgaaacctccccagccttccggatcctctcagtggagccccgcctgcaggccaattttacaattcgagaggacgccaacccttcatccaggcagaggggtctgaagcgtttccaagctaatcccgaggctaactggggacctcgtccacgcgcccgccctggtggcaaagcagcagacgaagcgatggaggagaggaggaggctcctccaaaacaagcgtaaggaaccacccgaggacgtggcccagcgggctgcacggctaaaaacctttccctgcaaacgcttcaaagagggcacttgccagaggggcgaccaatgctgctactcgcactctcctcccactccacgggtgtctgcagatgctgcccccgactgccccgagactagcaaccagacaccacctggtccgggtgccgctgctggccctggaattgattag

SEQ ID NO: 209833 - DNA, 1980 bp, synthetic construct
  misc_feature 1..1980: note = Description of Artificial Sequence: Synthetic coding sequence
  source 1..1980: mol_type = other DNA
atgcagggcagcagcctgtggctgagcctgaccttccggagcgcccgcgtactctcccgtgccagattcttcgaatggcaatcaccaggtctccctaatacagccgcgatggagaatggcacaggaccatatggggaggaacgccctcgggaggtgcaggagacaacggttacagagggggctgcaaaaatcgcatttccttctgccaacgaagtcttctacaatccagtgcaggaattcaatcgcgacctcacctgcgctgtaattaccgagttcgccaggatacagttaggcgcaaagggcattcagataaaagtgcccggtgagaaggatacccagaaagtggtagttgacctgagtgaacaagaggaggagaaggtggagcttaaggaatccgagaacctcgctagtggggatcagccacgaacagccgccgtgggcgagatttgcgaggaagggctgcacgtactggaggggctggccgcctcgggactccggtctatcaggtttgcgctggaggtccccggactacgatcagttgttgcaaacgacgccagtacccgcgccgttgatctgatccgtagaaacgtccagttgaacgatgttgctcacctcgttcagcctagccaagcggatgcccgcatgctgatgtaccaacaccagagagtgtccgaacgcttcgacgttatagatctggatccatacggctctccagcaactttccttgatgctgctgtgcaggctgtcagcgaggggggactcctgtgcgtcacatgtacagatatggctgtgcttgcaggtaacagcggcgaaacttgctactccaagtatggcgccatggctctcaaatcacgtgcttgccatgagatggcactccggattgtgcttcacagcttggacctgcgggctaattgctaccaaaggttcgtggttccacttctcagcatttcagctgatttttatgtgcgagtatttgtgagggtgtttaccggccaggccaaggtgaaggcgagcgccagtaagcaggctttagtctttcagtgcgtcggctgtggtgcgtttcacctgcagcggcttggaaaggcctccggagtcccctccggcagagccaagttttccgccgcctgcggacccccagtgacacccgaatgtgagcactgtggacagcgtcaccaactgggtggtcccatgtgggctgaacctatacacgatctggattttgtggggcgcgtgcttgaagcagtgtcggcgaacccgggccgcttccacacaagcgagcgcattcggggggttctctctgttataactgaggagctgccagatgtccccctgtactataccctcgaccaactcagctctaccatccactgcaatacgccatcactgctgcagctccgctcggcgctcctacatgctgacttcagggtttcgttaagccatgcatgcaagaatgcagtgaaaaccgatgcccccgccagcgccttgtgggacatcatgcgctgttgggagaaggagtgtcccgttaaaagagagcggctctctgagactagccctgccttccgtattctgtccgtcgaacctagactccaggccaacttcactattagggaggacgcaaatcccagttcgagacagcgggggttaaaaaggtttcaggccaatccagaagccaactggggccccaggccccgagcgcggcccggaggaaaggccgctgacgaagcaatggaggagcgacggagactcctacagaacaaacggaaagagcctcccgaagacgtggcacagcgcgccgcacgcctgaagacttttccatgcaagaggttcaaggaggggacttgccaaaggggagatcagtgctgttacagtcacagcccccctacgccacgggtgagtgcagacgccgccccagactgcccagaaacaagcaatcagacacctcctgggcccggggctgcagctggaccggggatagactag

SEQ ID NO: 209834 - DNA, 1878 bp, synthetic construct
  misc_feature 1..1878: note = Description of Artificial Sequence: Synthetic coding sequence
  source 1..1878: mol_type = other DNA
atgagcgagaacctggacaacgagggccccaagcccatggagagctgcggccaggagagttcaagcgccttgagctgcccaaccgtgtcagtccctccagccgctccagcggctctggaagaagtagaaaaggagggagcaggagcggcaacaggaccgggtcctcagcccggcctttattcctacattagggacgacctctttaccagcgaaatctttaagctggaactgcagaacgtgcctcggcacgcctcgttttcagatgttcgacggtttcttggaaggttcggactgcagcctcataagaccaaactgtttggccaaccaccatgtgccttcgtgacctttcgatcagccgccgagagagataaggccctgagagtcttgcacggagccctctggaagggccggcccctgtccgtacgcctcgcacgcccaaaggctgacccaatggcccggagacgtagacaggagggcgaatcagagcccccagtgacaagagtcgccgacgttgtgacacctctctggaccgtgccttatgctgagcaattggagcgaaaacaattggaatgcgaacaggtcctacagaagctcgccaaggaaattggtagcaccaatcgggcgctcctgccttggctgctggaacagcgccacaaacacaacaaagcatgctgtccgctagagggcgtgcggcccagcccccagcagaccgagtatagaaataagtgcgagtttttggtaggtgtcggagtcgatggggaggataatactgtgggctgccgtctcggcaagtataaaggtgggacctgtgccgtcgccgctccttttgacaccgtacatattccagaagcaaccaagcaggtcgttaaggccttccaagaattcataagatcaacaccttactccgcatatgaccctgagacgtataccgggcattggaaacagctgactgtaagaactagccgtagacaccaagcaatggcaatcgcttactttcatccacagaagctatctccggaagagttagccgagctcaaaacaagcttggctcagcatttcaccgccggtcccggaagagccagcggggtcacctgtctgtattttgttgaagaaggacaaaggaaaaccccaagtcaggagggccttccacttgaacatgtggcaggtgataggtgcatacatgaagaccttttggggctgacctttcggattagcccacatgccttttttcaggtgaatacccctgctgcagaggtgctgtatacagtcatacaagattgggcccaactcgacgccggttctatggtgctggatgtctgctgcggcacgggaacaatcggcctggctctcgcccggaaggtaaagcgcgttattggtgtggaactgtgccctgaggccgtcgaagatgctcgcgtaaatgctcaagataacgagttatccaacgtggaattccactgtggcagggccgaagacctagtgcccaccctggttagccggctggcaagccagcatctggtggcaatactggaccccccacgcgcaggcttacactcaaaagtgatcttggcaatcagacgggctaagaacctaaggcggttactgtatgtgtcatgcaacccgcgcgccgccatgggcaatttcgtggatctgtgccgcgcaccctccaaccgagttaaaggaattcccttccgacccgtgaaggctgtggcagtcgacttgtttccgcagaccccacattgcgagatgctcattctcttcgaaagagttgaacaccctaatggaacaggcgtcttgggcccccacagtcctccagcgcagccaacacctggacctcctgataacacattacaggagacagggacgtttccctcgagctag

SEQ ID NO: 209835 - DNA, 1878 bp, synthetic construct
  misc_feature 1..1878: note = Description of Artificial Sequence: Synthetic coding sequence
  source 1..1878: mol_type = other DNA
atgagcgagaacctggacaacgagggccccaagcccatggagagctgtggtcaagagtcaagctcggccctctcttgccctaccgttagcgtgccgcctgcggccccggcagccctcgaggaggtcgagaaagagggggctggagccgcaactggtcctggaccccagcccggtctatactcctacattagagacgaccttttcacctcagagattttcaagctagaacttcagaacgtgccgcggcatgcctcttttagcgatgttagaagatttctcggccggttcggactccaaccgcataaaacaaagctattcggacagcctccttgtgcgtttgtgacattccgctcagccgccgagagggataaagcattgcgcgtgctgcacggagccttgtggaagggacgtccattatctgtacgcttggctagacccaaagcagacccaatggcgcgccgaaggcgtcaggagggggagtctgagcctccagtcacacgcgttgctgacgtagtgacgcctctgtggactgtcccatatgctgagcagctggagaggaaacagttggaatgcgaacaggtcctgcaaaagctggcaaaggaaattggttctaccaaccgggcattgttaccatggttattggagcaaaggcataagcacaataaggcttgttgcccactggaaggtgtgagaccctcaccacaacagaccgaatataggaacaaatgtgagttcttggtcggagttggtgtggacggggaggataacaccgtgggttgccgcctcggcaagtacaagggcggcacgtgcgctgtggccgccccctttgacacagtccatatcccagaggcaacgaagcaggtagtgaaggctttccaagagttcatcaggtctacaccgtactccgcctacgatccagaaacatataccggtcactggaaacagctgactgttcgaaccagccgaagacaccaagcgatggccatcgcttacttccatccacagaagttgagccccgaagaactggcggaacttaagacatcactggctcagcattttacagccggccctggcagggcatcaggggtcacctgcctttactttgtagaggagggccagaggaaaacaccctctcaagaaggtctcccacttgaacatgtagccggagatcgttgcatacacgaggacttgctagggctgacatttaggatttccccccatgccttctttcaggtgaacacaccagccgctgaggtgctttacacagtcatccaggactgggcccagcttgacgcaggcagcatggtgctggatgtatgttgtggcaccgggacgatcggtctggctttagcaaggaaggttaaaagggtcatcggcgtggaattatgccccgaagctgtagaggatgctcgcgtgaatgcccaggataacgaattgtctaacgttgagttccattgcggcagggcggaagatttagtgcctactttagtgtccaggttagcaagccaacatctggtggcaatactggatccccctcgagcaggtctgcacagtaaggtgattctggccattaggagggcgaagaatctgcgcaggcttttgtatgtttcctgtaatccaagggcagccatggggaactttgttgatctgtgtagggcgccctcaaacagagtgaaagggataccatttcggcctgttaaggccgtggccgtcgacctttttcctcaaaccccccactgtgagatgctgatcttgtttgagcgggtggagcatcccaacgggactggcgtgctaggcccccactccccacctgctcaacctacacccggacccccagacaacacgctgcaggagaccggcactttcccttcaagctag

SEQ ID NO: 209836 - DNA, 1689 bp, synthetic construct
  misc_feature 1..1689: note = Description of Artificial Sequence: Synthetic coding sequence
  source 1..1689: mol_type = other DNA
atgagcgagaacctggacaacgagggccccaagcccatggagagctgcgggcaagagtcatcgtcagcattgagttgcccaactgtctctgtgccacctgctgcaccagcggcccttgaggaggttgagaaagagggggctggcgcggccactggccctggaccccagcctgggctttacagctacattagagatgacctgttcaccagcgaaatatttaagcttgagctacagaacgtgcctcgtcacgcctccttctccgatgtgcggaggttcctgggacggtttgggctgcaaccccacaagactaaactgtttggacagcctccctgcgctttcgttacctttcgctcagccgcggagagagacaaagcactgcgagtgctgcatggggctctgtggaaggggagacctctgtccgtgcgtctggccaggccaaaggcagatcctatggccaggcgacggaggcaagagggtgaatccgagccccccgtcacgcgggtggctgacgtggtgacgccattgtggaccgttccatacgccgagcagctcgagcgtaaacagctcgaatgtgagcaagttcttcagaaacttgctaaagagatcggaagtactaaccgggcgctgctgccttggctactggaacaacggcacaagcacaacaaggcatgttgcccacttgaaggtgttagaccctcgccacagcagacagagtacaggaacaaatgcgagttcctggtgggcgtgggggtggatggcgaagacaatacagtggggtgtaggttggggaagtacaagggtggcacatgcgccgtggctgcaccctttgacaccgtgcacatcccagaggcgaccaagcaagtcgtcaaggcttttcaggaattcatcaggtccactccgtacagcgcttatgaccctgagacctatacagggcactggaagcagttgaccgtgcggacgtcacgccgccatcaggccatggccattgcgtatttccacccgcagaagctctcgcccgaggaactggccgagctaaaaacgagccttgcgcagcactttacggccggccctgggcgagccagcggggtcacctgcttgtacttcgtggaggagggtcagcgcaagactccttcacaggaaggactccccttagaacacgtcgctggcgatcggtgtatccacgaggatctgctaggcttaacatttcggatctcaccccacgccttcttccaggtgaatactccggctgcagaggtcctgtacaccgtgatccaggattgggcccaactcgatgcaggcagcatggtcctcgacgtttgctgtggcaccgggaccataggcctggccctggcccgaaaggttaaaagggtgatcggagtggagctctgtccggaagccgtggaagatgctcgagtgaatgctcaagataacgaattatcaaacgtcgaatttcactgcggcagggccgaggatctggtgcctactctggtgtccaggcttgccagtcagcatctggtggctattttagacccgcctagggcaggactgcattccaaggtgatcttagctatccggcgagcaaaaaatctgcggcgcctgttgtatgtgagctgtaaccctagagctgcgatgggcaatttcgttgacgcacctttgtttccaccacaaccgttgcagtccccaatctag

SEQ ID NO: 209837 - DNA, 1530 bp, synthetic construct
  misc_feature 1..1530: note = Description of Artificial Sequence: Synthetic coding sequence
  source 1..1530: mol_type = other DNA
atggtgctgtggatcctgtggcggcccttcggcttcagcggccggttcctcaagctcgaatcacactcaataaccgagagtaagtcactaattcctgtggcctggacatcattaactcagatgctcctcgaagcgccaggtatctttctgcttggacagaggaagcgtttctcgacaatgccggaaaccgaaacccacgaaagagagaccgagctcttttcgcctccgtccgatgtgagaggcatgaccaagttggaccggactgccttcaaaaagaccgtcaacattccggtgcttaaggtgagaaaggaaatcgtgtcgaagctcatgagaagccttaaaagggcagccctacagcgccccggaattcgtcgggtgatcgaggaccccgaggacaaggaaagtcgactaattatgctcgacccatacaaaattttcacacatgacagctttgaaaaagctgaattgtcggtgctggagcagttaaatgtatctccgcagatatctaagtacaatttagagctgacgtacgaacatttcaaatcagaggaaattctaagggctgtgttgccggaaggtcaggacgtgacttctgggttcagccgaatcggccacattgctcatttaaatttaagggatcaccaactttctttcaagcacctcatcgggcaagtaatgatagacaagaatcctggcatcacatcagctgttaataaaattaataacatcgacaatatgtaccgaaatttccagatggaggtgctctccggggagcagaatatgatgacgaaggtccgggagaacaactacacctacgagttcgacttttccaaggtgtattggaacccgcgcttgtcaactgaacatagtcgaatcactgagctcctcaagcctggggacgtgctctttgatgtttttgctggggtggggccttttgctattcccgtagctaaaaagaactgcactgtgtttgccaatgaccttaaccctgaatcccacaagtggctcctgtataactgtaaactcaacaaggtggatcagaaagttaaggtgttcaacctggacgggaaggattttttgcagggcccagttaaagaagaactcatgcagcttctgggcctgtcaaaagaacgaaaaccctctgtacatgtcgtaatgaatttgcccgctaaagcaatcgaatttctgtctgcttttaagtggctgcttgacggccagccatgctcgagtgagttccttccgatcgtccactgctactccttcagtaaagatgctaaccctgctgaggatgtcaggcagcgtgctggagccgtattgggaatcagtcttgaagcctgttcgtctgtccatctcgtccggaatgtcgctcctaacaaggagatgttgtgcatcacatttcagattcctgctagcgtgctgtacaagaatcagactcgtaatcccgagaatcatgaggacccgccactgaaaagacagagaacagccgaagctttctctgacgagaagactcagatcgtcagtaatacctag

SEQ ID NO: 209838 - DNA, 1266 bp, synthetic construct
  misc_feature 1..1266: note = Description of Artificial Sequence: Synthetic coding sequence
  source 1..1266: mol_type = other DNA
atgcaggccctgcggcacgtggtgtgcgccctgagcggcggcgtggattccgccgttgcagcccttttactgcgtcgtcgcggctatcaggtcaccggggtctttatgaaaaactgggactccctagacgagcatggagtttgtaccgccgacaaggattgcgaggatgcatatagagtctgtcagatattggatatcccttttcatcaggtgagttatgtgaaggagtactggaacgacgtattttcggactttcttaatgaatacgagaaaggacgcacgcctaacccggacatcgtttgtaacaaacatatcaagttctcttgtttctttcactatgcagttgacaatctgggagcagacgccatcgccacgggacactacgcgagaacctctctggaagacgaggaggttttcgagcaaaagcatgtgaaaaagccggaaggcctttttagaaatcgcttcgaggtccggaatgccgtgaagttactgcaggctgcggactcatttaaggaccagaccttttttctctctcaagtttctcaggatgctctgcgtaggaccatattccccctgggcggccttactaaagagttcgttaagaagattgcagccgagaataggctacaccacgtccttcagaagaaagagagcatgggtatgtgttttatcggcaagcgtaattttgaacattttctgctgcaatatctgcagccgagaccaggacactttatctcaattgaggataacaaggtcctcgggacgcacaagggctggttcctctacacactgggacagcgggccaacattggcgggcttagagaaccctggtacgtggtcgaaaaggattcagtgaaaggagacgtatttgttgccccacgcactgaccatcccgcactgtacagggatctgttgcgcacctcccgagtgcactggattgctgaggaaccaccagcagctctggtccgcgataagatgatggaatgccacttccgtttccgacaccagatggccctggtgccttgtgttctaacacttaatcaggatggaacagtctgggtgaccgcagtacaggccgttagggctcttgcgacaggtcaattcgccgtcttttataaaggtgacgagtgcctggggtctgggaaaattttaagattgggtccatctgcatataccctgcaaaaggggcagcggagggcaggcatggctacagaatctccctccgactcgcctgaagatggcccaggcttgtccccgcttctgtag

SEQ ID NO: 209839 - DNA, 300 bp, synthetic construct
  misc_feature 1..300: note = Description of Artificial Sequence: Synthetic coding sequence
  source 1..300: mol_type = other DNA
atgcaggccctgcggcacgtggtgtgcgccctgagcggcggcgtggatagcgctgtcgccgccttgctcctgcggaggcgtgggtaccaagtgaccggcgttttcatgaaaaattgggacagcctggacgagcacggcgtgtgcacagcagataaagactgcgaggacgcttatcgagtgtgtcagattctggacatcccatttcatcaagtgtcctatgtcaaggagtattggaacgatgtcttccggggccgttgtcactgccataggagcctctgcaaaaacttccctggcaggtag

SEQ ID NO: 209840 - DNA, 396 bp, synthetic construct
  misc_feature 1..396: note = Description of Artificial Sequence: Synthetic coding sequence
  source 1..396: mol_type = other DNA
atgaagaactgggacagcctggacgagcacggcgtgtgcaccgccgataaggactgtgaggatgcatatcgcgtttgccaaattctggatatcccatttcaccaggtgtcctatgtcaaggaatattggaacgacgttttctcagactttctgaacgaatatgaaaagggtcgaaccccaaacccagacatcgtctgcaataaacacataaagttttcttgtttctttcactacgctgtcgataacctaggagctgacgccatagctactggacattacgccaggacttctctggaagatgaagaagtgttcgaacagaagcacgttaagaaacctgaggggctgttcagaaatagatttgaagtgaggaacgctcggtttccccgaatgccatag

SEQ ID NO: 209841 - DNA, 300 bp, synthetic construct
  misc_feature 1..300: note = Description of Artificial Sequence: Synthetic coding sequence
  source 1..300: mol_type = other DNA
atgcaggccctgcggcacgtggtgtgcgccctgagcggcggcgtggacagcgcagtggctgctctcctgctaaggaggagagggtaccaggtgactggcgtatttatgaaaaattgggattccttagatgaacatggtgtgtgcaccgccgataaggattgtgaggacgcctatagagtctgtcagatcttagacattccgtttcaccaggtttcctatgttaaggaatattggaacgacgtatttcgaggcagatgccattgtcaccgctctctgtgtaaaaatttccccgggcgctag

SEQ ID NO: 209842 - DNA, 300 bp, synthetic construct
  misc_feature 1..300: note = Description of Artificial Sequence: Synthetic coding sequence
  source 1..300: mol_type = other DNA
atgcaggccctgcggcacgtggtgtgcgccctgagcggcggcgtggatagtgcggtcgctgctctgctgctgaggcgtcgcggctaccaagtgaccggtgttttcatgaagaactgggatagcctcgacgaacacggcgtgtgcacagccgacaaagactgcgaggacgcttatagagtctgtcaaatcctggatataccattccaccaggtaagttacgtgaaggagtactggaatgacgtttttcgcggaaggtgtcattgtcacaggagtctgtgtaaaaatttccccgggcgctag

SEQ ID NO: 209843 - DNA, 300 bp, synthetic construct
  misc_feature 1..300: note = Description of Artificial Sequence: Synthetic coding sequence
  source 1..300: mol_type = other DNA
atgcaggccctgcggcacgtggtgtgcgccctgagcggcggcgtggactctgcggtcgccgccctcttgctgcggaggcgaggttaccaggtgacaggggtctttatgaaaaattgggacagccttgatgaacatggggtgtgtaccgccgacaaggattgtgaggatgcctatcgagtttgtcagatcctcgatattccatttcaccaagtgagctacgtgaaggaatattggaatgatgtgttccgtgggcggtgtcattgtcaccgcagcctatgtaaaaacttccctgggcgctag

SEQ ID NO: 209844 - DNA, 501 bp, synthetic construct
  misc_feature 1..501: note = Description of Artificial Sequence: Synthetic coding sequence
  source 1..501: mol_type = other DNA
atgcaggccctgcggcacgtggtgtgcgccctgagcggcggcgtggattcagcagtggccgcacttctgctccggaggcgaggataccaggttaccggagtcttcatgaaaaattgggattccctggacgagcatggtgtttgtactgctgacaaggattgtgaggacgcttatcgagtctgccagattctagacatcccctttcaccaagtgagctatgtcaaggagtactggaacgacgtgttcagcgatttccttaacgagtatgaaaaggggcggaccccaaaccctgacatagtctgtaataaacacattaagttcagttgcttcttccattatgccgtggataatctcggcgccgacgcgattgccaccggtcattatgcaaggacatcactggaagatgaggaagtgtttgaacagaaacatgtgaaaaaacccgaggggttatttagaaaccgctttgaggtgaggaacgcccggtttcctagaatgccatag

SEQ ID NO: 209845 - DNA, 1038 bp, synthetic construct
  misc_feature 1..1038: note = Description of Artificial Sequence: Synthetic coding sequence
  source 1..1038: mol_type = other DNA
atggagcccctgcgggtgctggagctgtacagcggcgtgggcggcatgcaccatgcattgagggaaagctgtatccccgctcaggtggtggcagcaatagatgtgaataccgtggctaacgaggtttataagtacaattttccccacactcaattgctggccaaaaccatagagggcatcacgctggaagagtttgatagactttcctttgacatgatcctgatgtcacctccctgtcaaccttttacacgtgaccttcttatacaaactattgaaaattgcggctttcagtatcaagagttcctcctcagccctacaagtctagggatcccaaatagcaggctgcggtacttcctgatagcaaaactccagtcggagcccctgccttttcaagcacctggccaagttctcatggaattccccaaaatcgaatcggtccatcctcagaagtacgcaatggatgtggaaaataagattcaagaaaagaatgtggagccaaacatcagcttcgacgggtccatacagtgttcggggaaagacgcaattctgttcaaactcgagacagcggaggagattcacaggaagaaccagcaggatagtgacctcagcgttaaaatgttgaaggactttctcgaagatgatactgacgtcaatcagtatcttctgccacccaagtccttgctccgctatgccctccttctcgacatcgtgcagccgacttgcagacgctctgtttgctttaccaaaggttacggctcatacatcgaaggaacagggagtgttctccaaaccgccgaggacgtgcaggtcgagaacatctacaagagcctgacaaacttgagccaggaggaacagatcaccaaactgctgatcctcaagctgcgttatttcacccctaaggagatcgccaacttgctgggattcccaccagagttcggcttccctgagaaaatcactgttaaacagaggtatagactgctcggcaactctctgaacgtgcatgttgttgccaagcttatcaagatcctatacgagtag

SEQ ID NO: 209846 - DNA, 216 bp, synthetic construct
  misc_feature 1..216: note = Description of Artificial Sequence: Synthetic coding sequence
  source 1..216: mol_type = other DNA
atggagcccctgcgggtgctggagctgtacagcggcgtgggcggcatgcatcacgccttacgtgagtcttgcatccccgcacaagtcgttgctgcaattgacgtgaatactgtcgccaatgaagtctacaagtacaattttccacacactcagcttcttgccaagaccatagaaataacaaaaatcaccaaagtgtacagcttcgggaaatgctag

SEQ ID NO: 209847 - DNA, 354 bp, synthetic construct
  misc_feature 1..354: note = Description of Artificial Sequence: Synthetic coding sequence
  source 1..354: mol_type = other DNA
atggagcccctgcgggtgctggagctgtacagcggcgtgggcggcatgcatcatgccctcagggagtcctgcatcccagcccaggtcgtggcagccatcgatgtgaatactgtagcaaatgaagtgtataagtataattttccgcacacccagctcttagctaagacaattgagaggccactagatacgaacaatcgaaagctgtggctttctgtccccagggtaagtatcatatcgaatttgtcctggcacagcaaatttaaggcgaccatatttagttactgcaaggcctcggtgcgggcaatcacccttagcagcccgtggtctgggaccgatggtgtgcctcaaaactag

SEQ ID NO: 209848 - DNA, 1176 bp, synthetic construct
  misc_feature 1..1176: note = Description of Artificial Sequence: Synthetic coding sequence
  source 1..1176: mol_type = other DNA
atggagcccctgcgggtgctggagctgtacagcggcgtgggcggcatgcatcacgctctcagagagagttgtatccccgctcaggtggtagctgccatagacgtaaataccgtggcgaatgaagtgtacaagtataactttccccatacacagctcctcgctaagactatagaggggatcactcttgaggagtttgaccggctctcttttgacatgatcctgatgtcccccccctgtcaaccattcactagaataggtcggcaaggtgacatgaccgactcccgcacgaacagcttcctacacatacttgatatcctgccccgcctccagaaactaccaaagtacattcttctagagaacgtgaaagggttcgaagtatcgtctactcgtgatttgctgattcaaaccatcgaaaactgcggttttcagtatcaggagttcctgttgtcgccaacttcgttgggaattcccaatagccgccttcggtattttttgatcgctaaactgcagtcagagccactcccctttcaagcacccgggcaggtgctgatggagttccctaagattgaatccgttcaccctcagaagtacgcaatggacgtggagaacaaaattcaggagaagaacgtcgagccaaacattagttttgatggatccattcagtgtagcggtaaagatgcgatactctttaaactggaaactgccgaggagatccatcgtaagaaccagcaggacagcgacttgtcagtgaagatgctgaaggacttcctggaggacgacactgacgtcaaccaatacttgttgcctcccaaatctttgcttcgctacgctttgttactggacatcgttcagcccacttgccgacgctctgtttgctttacaaaggggtacggatcatacattgagggcaccggcagtgtgctgcaaactgctgaagatgtgcaggtcgaaaatatttacaagtctctgaccaatctgtcacaggaggaacagatcactaagctgctgattttaaaactcaggtatttcacccctaaggagattgccaatctgctggggttcccaccagaattcggatttccagagaagataacagtgaagcagcggtatagactgctgggtaatagtttaaatgtgcacgtggtcgccaaattaatcaaaattctctacgaatag

SEQ ID NO: 209849 - DNA, 1104 bp, synthetic construct
  misc_feature 1..1104: note = Description of Artificial Sequence: Synthetic coding sequence
  source 1..1104: mol_type = other DNA
atggagcccctgcgggtgctggagctgtacagcggcgtgggcggcatgcatcatgcacttcgagagtcctgtattcctgctcaggtcgttgctgctatcgatgtgaacaccgtggctaatgaagtctataaatataacttcccacacacccagctcttggcgaaaacaatcgagggaatcacactggaagagttcgaccgcttgtccttcgacatgatactaatgtcccccccatgccagccttttacacggctgcaaaagttgcccaagtacatcctcctcgagaatgtgaaaggcttcgaagtttcgtcaacgcgcgaccttctcattcagacgattgagaactgtggattccagtaccaggaattcctgctaagtccgacctctctaggcattcctaacagcagattgcgctacttcctcattgccaagttacaatctgaacccctgccgttccaagcaccagggcaggtgcttatggagtttccaaagatcgaatcagtgcacccacaaaagtacgccatggacgttgagaataagattcaggagaaaaatgtggaacccaatattagctttgacggttcaatccagtgctctggaaaggatgcgattctattcaagttagagactgcggaggagatacacagaaagaatcagcaggactcggatttaagcgtcaagatgctaaaagatttcttggaggatgataccgacgtaaaccaatacctgctcccgccaaagtctctgctgagatacgcgctacttttagacattgtgcaacccacatgcaggcggtcggtgtgttttactaagggttacgggtcttatatcgaagggactggaagcgtgctacagaccgcagaagatgtgcaggtggaaaacatctacaagtcacttaccaacctgagccaagaggagcagatcaccaagctgctgattttgaaactgcggtacttcactccgaaggagatcgcaaatctcctcggtttcccaccggagttcggcttccccgagaagatcacggtgaagcaacgatataggctgttgggcaatagcctcaatgttcatgtggtagcaaagttgattaagattctctacgagtag

SEQ ID NO: 209850 - DNA, 933 bp, synthetic construct
  misc_feature 1..933: note = Description of Artificial Sequence: Synthetic coding sequence
  source 1..933: mol_type = other DNA
atgagcaccctgagcctgatgaagtacaccagcatcatcttcctgacgcactcctatttacccagaagactcaagatagggcgccaaggagatatgactgactcaagaaccaacagcttccttcacattctggacattctgccgcgagaccttctaattcaaaccatagagaactgcggctttcagtatcaggaatttttgctctcaccaaccagcctgggtatccctaattccagactgagatactttctcatcgccaaattacagagcgagccattgccattccaagcgccgggacaggtcctgatggagtttcctaagatcgaaagtgtacaccctcagaagtatgcaatggacgtggaaaataaaatccaggagaagaacgtggaaccaaatattagcttcgatggaagcattcaatgttcaggcaaagacgccatcctgttcaagctggagacagcagaagagatccacagaaaaaaccagcaggattcggacctcagtgtgaaaatgctcaaagacttcctggaagacgataccgatgtgaatcagtacctgctgcctcccaagagcttactgcgctatgccttgctcttggacatcgtccagcctacctgtaggcggagcgtttgttttaccaaggggtatgggtcatatattgaaggaacgggttcggtcctgcagacggccgaagatgtgcaggtggagaatatatacaaatcactgaccaacctgagccaggaagagcagattacaaagctgctgatcctcaaattacgttatttcactccaaaggaaatcgctaatctgttggggtttccacccgaatttggatttccggagaagatcactgtcaagcagaggtaccggcttcttggaaattcactcaatgtgcacgtagtcgcaaagcttattaagattttgtacgagtag

SEQ ID NO: 209851 - DNA, 1305 bp, synthetic construct
  misc_feature 1..1305: note = Description of Artificial Sequence: Synthetic coding sequence
  source 1..1305: mol_type = other DNA
atgctgcggtgcctgtaccactggcaccggcccgtgctgaaccggcgctggtcacggctgtgtctccccaaacagtacctgtttactatgaaactgcaaagccccgaatttcaaagcctttttacggaggggctgaaatcactgactgaactttttgtcaaagaaaaccatgagttgaggatagcaggtggggccgtgagagatcttctgaatggcgtcaaaccacaggatatcgacttcgcaaccaccgccactcctactcagatgaaggagatgttccagtccgcagggatccgcatgatcaacaatcgcggcgagaagcatggtaccatcaccgccaggctccacgaggagaactttgaaatcactaccttgagaattgatgtgaccacggatgggaggcatgccgaagtggagttcacaactgactggcagaaagatgcggaacgaagggatctgactattaattccatgttcctcggctttgatggcactttattcgactactttaacggctatgaagacctcaagaataagaaggtgcggttcgtgggacacgccaaacaaagaatacaagaagattatctcagaatcctccgctattttcgattttacggaaggatcgtcgacaagcccggtgaccatgatcctgaaaccttagaggctatagccgaaaatgctaaaggcctcgccgggatcagcggggagaggatctgggttgaactgaagaaaatcttagttggcaatcatgtcaaccatctgatccacctcatctacgaccttgatgtggcaccatatatcggactccccgcaaatgcctctctggaggagttcgacaaggtgtcaaagaatgttgacggtttctcacctaaaccagtcacgttgctcgcttccctgtttaaagttcaagatgatgtaacgaagttggatttgcgcctgaagatcgccaaggaagaaaagaatttgggactgttcattgtgaagaaccggaaggacttgataaaggccacggactcgtctgaccccttaaagccttaccaagacttcatcattgacagcagggaaccggacgcaaccacgagggtgtgcgagctgttgaaatatcagggcgaacattgtctactaaaagagatgcaacagtggagcattccaccttttcctgtgtcaggtcacgacatcaggaaggtgggaattagttctgggaaggaaattggagcactgctgcaacagttgcgggagcagtggaaaaagagtggataccaaatggaaaaagacgaactattatcatacattaaaaaaacttag

SEQ ID NO: 209852 - DNA, 1245 bp, synthetic construct
  misc_feature 1..1245: note = Description of Artificial Sequence: Synthetic coding sequence
  source 1..1245: mol_type = other DNA
atgctgcggtgcctgtaccactggcaccggcccgtgctgaaccggaggtggagcagactgtgcctgccaaagcagtatctgttcaccatgaaacttcagtctccggagttccagtccttattcacggagggactgaaatccctaacagagctatttgtcaaggagaatcacgagctgcgcatagccgggggagctgtgcgtgacctcctgaacggggtgaagccccaggatattgatttcgccaccactgctaccccaacccagatgaaggagatgttccagagcgcaggtattagaatgattaacaaccgaggcgagaaacatggaaccattactgccaggctgcacgaggaaaacttcgagatcactaccttgcgcattgatgtgacaacagacggccgtcatgcagaggtggagttcacaaccgattggcagaaagatgcggaaagacgcgatctaactatcaattcaatgttcctaggcttcgatggcaccctttttgactactttaacggatacgaagacctgaagaataagaaggtccggttcgtgggacacgccaaacagcgcatacaagaggactatttgcgcatcttgaggtacttccggttctatggaagaattgtggataagcccggagatcacgatccagagactcttgaagcaattgctgaaaacgccaaaggactggcaggaatctcaggtgaaaggatttgggttgaactcaaaaagatcctggtgggacttccagccaatgcttcgttggaggagttcgataaggtgtctaagaacgtggatgggttcagcccaaaacctgttacgctgctcgcttccctttttaaggtccaagacgatgttacaaagctcgatcttcgtctcaagatcgccaaagaagaaaagaacctgggtttgtttatcgtcaagaatcgcaaagacctgatcaaggcaactgattccagtgatcctttaaagccgtaccaggacttcataatagatagccgggagcccgacgcaactacccgggtctgcgaactgctcaaatatcaaggagagcattgtctcctgaaggaaatgcagcagtggtcaatcccgcccttccctgtcagtggtcatgatattcggaaagtgggtatctccagcggaaaagaaatcggcgctctcctccaacagttgcgtgaacagtggaagaagagtggttatcaaatggaaaaagatgagcttttgagttacatcaaaaagacctag

SEQ ID NO: 209853 - DNA, 174 bp, synthetic construct
  misc_feature 1..174: note = Description of Artificial Sequence: Synthetic coding sequence
  source 1..174: mol_type = other DNA
atgctgcggtgcctgtaccactggcaccggcccgtgctgaaccggcgatggtcccgtctttgcctgcctaagcaatacctgtttacaatgaagcttcagtcccccgagttccagtccctgtttaccgaaggcctgaagagcctcaccgggattaatgctttccatgaaaattag

SEQ ID NO: 209854 - DNA, 174 bp, synthetic construct
  misc_feature 1..174: note = Description of Artificial Sequence: Synthetic coding sequence
  source 1..174: mol_type = other DNA
atgctgcggtgcctgtaccactggcaccggcccgtgctgaaccggcgctggtcccgcctctgccttccaaaacagtatctattcaccatgaagctgcagtccccagagttccaaagtctgttcaccgaaggccttaagtcactcactggcattaatgcttttcatgagaactag

SEQ ID NO: 209855 - DNA, 189 bp, synthetic construct
  misc_feature 1..189: note = Description of Artificial Sequence: Synthetic coding sequence
  source 1..189: mol_type = other DNA
atgctgcggtgcctgtaccactggcaccggcccgtgctgaaccggcgttggtcgcgcctctgcttgcccaagcaatacttgttcaccatgaaattgcaaagccccgaatttcagagcctgtttacagagggtttaaagagcctgacagaacttttcgtgaaggagaaccatgaactgaggattgcctag

SEQ ID NO: 209856 - DNA, 174 bp, synthetic construct
  misc_feature 1..174: note = Description of Artificial Sequence: Synthetic coding sequence
  source 1..174: mol_type = other DNA
atgctgcggtgcctgtaccactggcaccggcccgtgctgaaccggcgttggagtcgcctgtgcctccctaagcagtacctctttaccatgaaactgcaaagccccgaatttcagtcgctgttcactgagggactgaagagcttaaccgggataaatgctttccacgaaaactag

SEQ ID NO: 209857 - DNA, 1305 bp, synthetic construct
  misc_feature 1..1305: note = Description of Artificial Sequence: Synthetic coding sequence
  source 1..1305: mol_type = other DNA
atgctgcggtgcctgtaccactggcaccggcccgtgctgaaccggagatggagccggctctgtctgccaaaacagtacctattcacaatgaaactacagtctccagagtttcagtctctgtttacagagggactcaagagcctgacagagttgttcgtcaaggaaaaccatgaattgcgcatcgctggtggagcagtgcgagatttgctgaacggcgtcaaacctcaggatatagatttcgccaccactgcaacccctacgcagatgaaggaaatgttccagtccgcgggcattcgcatgattaacaatcggggggaaaaacatgggaccattactgcccgacttcatgaggagaatttcgaaatcaccaccctaagaattgacgtgacaaccgatggacgacacgccgaggtagaattcaccacggactggcagaaggatgctgaaagaagagacctgactatcaatagtatgtttttagggttcgatgggacgttgttcgattactttaatggatacgaagatctaaagaacaagaaagtgcggtttgttggacacgcgaagcagcgtatccaagaggactacctgaggatcctccggtacttccgattctatggcaggattgtggacaaacccggggatcacgaccccgaaaccttagaagcaatagctgagaatgccaagggactggctgggatcagcggggagcggatttgggtggagctgaagaaaatccttgtgggtaaccacgtaaatcatttgatccatttgatctatgatcttgatgtcgccccctacattggcctgccggcaaatgcctcactggaggaatttgataaggtgtccaagaatgtcgatgggttctcccctaagcctgtgacactgctcgcgtctctgtttaaagtgcaggacgacgtgaccaagctagacctgagactgaaaatcgccaaggaggaaaaaaatctcggtcttttcatcgttaaaaatcgcaaggatttaattaaggcaaccgacagttcagaccccctgaagccttaccaggactttatcatcgattcacgcgaacctgatgctacaactcgtgtttgcgaactgcttaaatatcagggagagcattgtcttctgaaagagatgcagcaatggtctattcctccattccctgtgtctggacacgacattcggaaagtggggatctcttccgggaaggaaatcggcgcacttttgcagcagctcagagagcagtggaagaaatcaggctatcagatggagaaagatgagttactgtcgtatattaaaaagacctag

SEQ ID NO: 209858 - DNA, 762 bp, synthetic construct
  misc_feature 1..762: note = Description of Artificial Sequence: Synthetic coding sequence
  source 1..762: mol_type = other DNA
atgaacttcagcggcggcggccggcaggaggccgccggcagccggggaagacgggccccccgtcctcgcgaacaggatagggatgtgcagctctctaaagccctttcctatgcactgcgacatggggcccttaagcttgggcttccaatgggcgctgacggtttcgtgccactgggtaccctcctgcaactgcctcagttcagaggattctccgctgaggacgtgcaacgggtagttgacactaaccggaaacagagattcgcactgcagctgggcgacccctcaacggggctcctaatccgagcgaaccaaggacattccttgcaggtgccaaagctggagttgatgcctttggaaactccgcaagcactgcctccaatgctcgtccacggcacattttggaaacattggccttctatcctgcttaagggtctgagctgccagggaagaacccatatccacctggcacctggccttccgggagatcccggtattatctccgggatgcgaagccattgtgagatcgctgtgtttattgatgggcccctggctctggcggatgggattcctttcttccgctccgctaacggtgtgattctgaccccaggaaatacagatggttttcttttgcccaagtattttaaagaagctttacagctgcgtcccactcgcaagccacttagtctcgctggggacgaagagactgagtgccaatccagcccgaaacactccagtcgggagagacgtagaatccagcaatag

SEQ ID NO: 209859 - DNA, 768 bp, synthetic construct
  misc_feature 1..768: note = Description of Artificial Sequence: Synthetic coding sequence
  source 1..768: mol_type = other DNA
atgaacttcagcggcggcggccggcaggaggccgccggcagccggggccggcgggcaccgagacctagggagcaggaccgagatgtccagctctctaaggcgctgtcttacgccctcaggcacggtgccctcaagctcgggctccctatgggggcagatggctttgtccccctcggcacactgctacagctgccacagttccggggtttcagtgctgaggatgtgcagagggtggtggacactaataggaagcagcgcttcgccctgcaactgggcgatccatctactggactcctgatccgggcaaaccagggccattcgctccaagtgggggttcccaagctggagttaatgcccttagagacgcctcaagccttaccccccatgctcgtccacggaactttctggaagcactggccgtcgatccttcttaagggcctgagttgtcagggtcggacacacatccatctggcacccggtctgcctggagatcccggaattatctcagggatgcggtcccactgtgagatcgctgtatttattgacggtccactggcgctcgcggacgggatacccttttttcgttctgctaatggggtgatccttactcccggaaacactgacggcttccttttgccaaaatattttaaagaggcgctgcaactcaggcccaccaggaaaccactgagcctcgcgggggacgaagaaacagaatgtcaaagcagccccaaacatagtagtagagaacgccggcgaatccaacaatag

SEQ ID NO: 209860 - DNA, 615 bp, synthetic construct
  misc_feature 1..615: note = Description of Artificial Sequence: Synthetic coding sequence
  source 1..615: mol_type = other DNA
atgggcgccgacggcttcgtgcccctgggcaccctgctgcagctgccacaatttcgcggatttagcgcagaagatgtccagcgcgtagtggatacaaatcggaagcaaagattcgcactgcagctgggagatccctccactggactcctgatcagggccaaccaggggcattcacttcaagtccctaaacttgaactcatgccactggaaaccccgcaagccttgcctccaatgttggtgcacgggaccttttggaagcactggcccagcatcctgctgaagggcctctcttgtcagggccgtacgcacattcacctggcgcccgggctgccgggggatcctggtattatctctgggatgcgcagccattgcgaaattgcagtgtttatcgacggccctctggccctggcggacggaattcccttcttccgctctgccaatggggtgattcttacccctggaaacaccgacggatttttactacctaagtatttcaaagaggccttacagctgcgtcccacacgtaagccattgtcactggctggagatgaggaaaccgagtgtcagtcttctcccaagcatagctctcgggagaggcgtcgcatccaacagtag

SEQ ID NO: 209861 - DNA, 651 bp, synthetic construct
  misc_feature 1..651: note = Description of Artificial Sequence: Synthetic coding sequence
  source 1..651: mol_type = other DNA
atgaacttcagcggcggcggccggcaggaggccgccggcagccgggggcggcgcgcccctagacctcgagagcaagatagggacgtacagctctctaaggcccttagctacgccctgagacatggtgctctaaagctgggcctgccaatgggggccgatggcttcgttccgttgggaaccctgcttcagttgccccagtttagaggctttagcgcagaagatgtacagcgtgtggtggacaccaacaggaagcagcgctttgccctgcaactcggcgatccatccactggactcctcatccgggctaatcagggtcactccctccaggtaccgaagctggaactcatgcccctggaaaccccccaggcactccctcccatgctcgttcatggaaccttttggaagcactggcctagcatcctgttaaagggcctgtcttgccaggggcggactcacatccacttggcgcctgggttacctggggatcctggaataattagtggcatgaggtcccattgcgagatagccgtcttcatcgatggaccgctggccctggcaggcaagcccctcagcctggcaggtgatgaggagacagaatgtcagtcatcccccaagcactcatccagagaacgcaggcggattcagcagtag

SEQ ID NO: 209862 - DNA, 504 bp, synthetic construct
  misc_feature 1..504: note = Description of Artificial Sequence: Synthetic coding sequence
  source 1..504: mol_type = other DNA
atgggcgccgacggcttcgtgcccctgggcaccctgctgcagctgccacaattccggggtttctcagccgaggacgtgcagcgagtagtggacactaacagaaaacagcgatttgcgctccagctcggggacccctccaccggcttgctgatcagggccaaccaaggccatagcctgcaggtaccaaagcttgagttgatgcccctggagacaccccaggccctacccccgatgctggtccacggaaccttctggaagcactggcctagcatcctgttgaaagggctgagttgccagggacgaactcacatccacctggcaccaggattaccgggcgatcccggtattatctccggaatgcgctcccactgcgagatcgccgtgtttatcgatggccccctcgctctggctggcaaacccctgagccttgcaggtgatgaggagacagagtgccagtccagtcctaaacattccagccgagagcgcagaaggatacagcagtag

SEQ ID NO: 209863 - DNA, 516 bp, synthetic construct
  misc_feature 1..516: note = Description of Artificial Sequence: Synthetic coding sequence
  source 1..516: mol_type = other DNA
atggaggagcggggcgacagcgagcccacccccggctgcagcggcctaggaccgggcggcgtgcgaggatttggggatggcggaggagctccttcctgggcacccgaagatgcatggatggggactcaccctaaatacctggaaatgatggagttggatatcggagatgccacccaggtctacgttgctttccttgtgtatttggacctaatggaaagcaagtcatggcacgaggtaaactgtgtgggcctgcccgagctccagctcatttgcctggttggaaccgagattgaaggggaaggactgcagacagtagttcctacccccataactgcctcgctgagccacaatcggattagggaaattctgaaagcatctagaaagctgcagggagaccctgatctgcctatgtctttcacattagccattgtggaatcagactcgaccatcgtctattacaagctgacagatgggttcatgctgcccgacccacagaatatcagcctgaggcggtag

SEQ ID NO: 209864 - DNA, 390 bp, synthetic construct
  misc_feature 1..390: note = Description of Artificial Sequence: Synthetic coding sequence
  source 1..390: mol_type = other DNA
atggaggagcggggcgacagcgagcccacccccggctgcagcggcctcgggcctggcggcgtgcgaggcttcggtgacggcggaggcgcacccagctgggccccggaggacgcctggatggggacccaccctaaatatctggaaatgatggaattagacattggggatgccacccaagtttatgtcgcgttccttgtttatctggacctaatggagagcaagtcctggcacgaagtgaattgtgtgggccttcccgaactgcagctgatttgtctggtcggcacagagatcgaaggagaaggcctccagaccgtggttccaacgccgattaccgcgtcgctctcacataatcgaattttcctgcttgaggacgatatccatgtcagctag

SEQ ID NO: 209865 - DNA, 1398 bp, synthetic construct
  misc_feature 1..1398: note = Description of Artificial Sequence: Synthetic coding sequence
  source 1..1398: mol_type = other DNA
atggccgaggccgtgttccacgcccccaagcggaagcggcgggtgtacgagacatacgagtcccccctgccaatccccttcggacaggaccacggaccattgaaggagtttaaaattttccgagccgaaatgataaataacaatgttatagtgcgtaacgccgaagacattgagcagctgtacggaaaggggtattttggcaaagggatcctcagccggtcaaggccctcattcacaattagcgatcctaagctcgttgctaaatggaaggatatgaagacaaatatgccaatcattacatctaaacgctaccagcactcagttgagtgggctgcagaattgatgcgtagacaggggcaagatgaaagcaccgtgcggagaatcctgaaggactataccaaaccattggaacatccacccgtgaagcgtaacgaagaagcccaagtacatgataagctcaatagcggcatggtcagtaacatggagggtacagccggaggggaaagaccctctgtggtgaacggggactctggaaaaagcgggggcgtcggagacccacgggagcctctgggttgcctgcaagaaggctccggctgtcacccaactaccgagagtttcgagaaaagcgtgcgggaagacgcgagcccccttcctcacgtttgttgctgcaaacaggacgctctgatcctgcagcgcgggctccatcatgaggacggatctcagcacatcggcctgctgcatccaggagaccgcgggcctgatcacgaatacgtgttagtggaagaggcggagtgcgctatgagtgagagagaggcagcacctaatgaggaactggtgcagcgcaataggcttatttgtagacgcaacccatatagaatctttgagtacctgcagctcagcctagaggaggcgttcttcctggtgtatgccctggggtgcctatccatctattatgaaaaggagccactcaccattgtgaaactctggaaggcattcacagtggtgcagccaactttccggactacctacatggcatatcactacttccggagcaagggatgggtcccgaaagtaggtctaaagtatggaacggacctcctcctctatcgcaaagggccccctttttaccatgctagctattctgtgatcatcgagctggtcgacgaccactttgagggctccctgcgacgcccgctcagttggaagtcgctcgctgcactgagccgggttagcgtgaacgtgagcaaggaactgatgttgtgttacctgattaagccatctaccatgactgacaaagagatggaatcgccagagtgtatgaagcgaatcaaggtgcaggaagtcatcctcagccgatgggtctccagcagagagagaagcgaccaggacgatttgtag

SEQ ID NO: 209866 - DNA, 1320 bp, synthetic construct
  misc_feature 1..1320: note = Description of Artificial Sequence: Synthetic coding sequence
  source 1..1320: mol_type = other DNA
atggccgaggccgtgttccacgcccccaagcggaagcggcgggtgtatgaaacctatgagtccccgctgcctatcccgttcgggcaggaccacggtccattaaaggaatttaagatttttagagccgagatgataaacaacaatgtgatcgttagaaacgcagaagacatcgagcagctgtatggcaaggggtatttcggcaaggggatcctatcaagatcgcggcccagtttcactattagcgaccccaagttagtggctaaatggaaagatatgaagaccaatatgcctataatcacctctaagcggtatcagcatagcgtcgagtgggcagcagagctgatgagacggcagggacaggatgaatccacggtccgccgcatcctaaaggactacaccaagcctctggagcaccctccagttaaaagaaatgaggaggctcaggttcacgacaaactgaattccggtatggtcagtaacatggaaggaacagccggaggagaacggccgtcggtcgtgaatggagatagtggaaagtccggtggagtcggagatccaagggaacctttggggtgtcttcaggagggttctggatgccacccaaccaccgaatccttcgaaaagagtgtgagagaggatgccagcccattaccacacgtctgttgttgcaagcaggacgcgttaatcctccagcgcggccttcatcacgaagatgggtcccagcacattggacttttacatcccggtgaccgcggcccagaccacgagtacgtacttgtggaggaggcagagtgcgctatgtctgagcgggaagctgcccccaatgaggaagcgtttttcttggtgtatgccctcgggtgcctatctatttattacgagaaggagccactgactatcgtgaagttatggaaggcctttacagtggtgcagccaactttccggaccacatacatggcatatcactattttagatcaaaggggtgggtgccaaaggtggggctcaagtacgggactgaccttttactgtacaggaagggccccccgttttaccacgcctcatacagcgtcatcatcgaactggtggatgatcactttgagggtagcctgcgcagaccactgtcttggaaatcactcgcagctctctctcgagtgtctgtgaacgtctctaaggagctgatgttatgttatctcattaagccatcaaccatgactgacaaagagatggagtctcctgagtgtatgaaacgtataaaagtgcaggaagtgattctatcaaggtgggtctcctccagagaacggagtgaccaagatgacctgtag

SEQ ID NO: 209867 - DNA, 1347 bp, synthetic construct
  misc_feature 1..1347: note = Description of Artificial Sequence: Synthetic coding sequence
  source 1..1347: mol_type = other DNA
atggccgaggccgtgttccacgcccccaagcggaagcggcgggtgtatgaaacgtatgagtccccgctcccgatcccattcggtcaagaccatggcccgcttaaagagttcaagatatttagggctgaaatgatcaacaacaatgtgattgttcgcaacgcagaggatatagaacagctgtacggtaaggggtacttcgggaagggcattctgtctcgctcccggccttctttcaccatttcagatcctaagcttgtcgcaaagtggaaggacatgaaaactaatatgcctatcatcacaagcaaaagataccagcattctgtggaatgggcagcggagctgatgcgcaggcagggtcaggatgagtcgactgtccgaaggattcttaaagattacacaaagcctctggagcacccgcccgtcaagcgcaacgaagaagcacaggtccacgataagctgaacagcggcatggtttctaacatggaaggcaccgcggggggcgagaggccctccgttgtcaatggtgattctggcaagagcggcggggtcggggatccccgtgaacctctgggttgtcttcaagaagggagtggctgtcacccaaccacagagagttttgaaaaatcagttagagaagacgccagtcccctgcctcacgtgtgctgctgtaaacaggatgccctgatcttacagaggggtctgcatcacgaggatgggagccaacatataggcctgttgcatccaggggatagaggcccagatcatgaatacgtcctggttgaagaggctgaatgcgcaatgagtgaacgcgaggccgcgccaaacgaggaactagtgcagcgaaacagattgatttgtaggagaaacccatatagaatatttgaatacttgcagctgagtctcgaagaagagcccctgaccatcgtaaagctttggaaagcattcacagtggtgcaacccactttccgcacaacatatatggcttaccactacttccgctctaaagggtgggtccccaaagtgggacttaagtacggtacagatctgttgctgtaccgtaaaggcccacctttttaccacgccagttattctgtcatcattgagctggtggatgaccactttgaggggtctcttcgccgacctcttagttggaaatcacttgccgccttgtcgcgggtaagcgtcaacgtttctaaagagctgatgctatgttacctcattaagccatcaaccatgactgacaaagaaatggagtcccctgaatgcatgaagagaattaaagtccaggaggtgattctgagccgctgggtttcctcccgggagcgatccgatcaggatgacttgtag

SEQ ID NO: 209868 - DNA, 1398 bp, synthetic construct
  misc_feature 1..1398: note = Description of Artificial Sequence: Synthetic coding sequence
  source 1..1398: mol_type = other DNA
atggccgaggccgtgttccacgcccccaagcggaagcggcgggtgtacgagacctacgaaagtcccctgccaatcccctttgggcaggatcacggacccctgaaggagttcaagattttccgtgcagagatgatcaataacaacgtcatagtgcggaacgccgaggacatcgaacagctctatggcaaaggctacttcggcaagggaattctgagccggagcaggccttccttcactatttcggaccccaaattagtcgccaagtggaaggacatgaaaacaaacatgcccatcattacctcaaaacggtatcaacatagcgttgagtgggccgctgagttgatgcgccggcaggggcaggatgaaagcacggtcagaaggatcctcaaggattacacgaaacctctcgaacacccgcccgtcaagcgtaacgaggaagcacaggtacacgacaagctgaattccggtatggtatctaatatggaaggtacggctggcggagagagaccaagtgttgtgaatggcgactcagggaaatccgggggtgtcggcgacccccgcgagcccttgggctgccttcaggaaggcagcggctgtcacccgacaacagaaagctttgagaagtcggttcgtgaagatgcgtcgccgctgccccatgtctgctgttgcaagcaagacgccctcattctgcagaggggtttgcaccacgaagatggctcccagcacattggcctcctgcatcccggagatcgtggccccgaccatgagtacgtgctggtcgaggaggccgagtgcgccatgtccgagagggaagccgccccaaacgaggaactggttcagcgtaatcgcctgatctgccgacgaaatccgtatcgcatatttgagtacctccagttatccctggaagaggctttctttctcgtgtatgcgcttggttgcctgagcatctattatgaaaaagagccactgacaattgtgaaactttggaaggctttcacagtggtacagcctaccttccggacaacttatatggcctaccactacttccggtccaaaggctgggtccccaaagtgggactgaagtatggaactgatctgctgctctaccggaagggtccccctttctatcatgcttcgtatagtgtcattatcgagttagtggatgatcacttcgaggggagtctgcgaaggccactatcatggaaatctcttgccgctctcagccgtgtcagcgtgaatgtctcgaaagaattgatgctctgttaccttattaaaccctccacaatgaccgataaagagatggaatcccctgaatgtatgaagcgcatcaaggtccaggaggtaatcttgtctagatgggtgtccagtcgggagaggagcgaccaggatgatttatag

SEQ ID NO: 209869 - DNA, 1320 bp, synthetic construct
  misc_feature 1..1320: note = Description of Artificial Sequence: Synthetic coding sequence
  source 1..1320: mol_type = other DNA
atggccgaggccgtgttccacgcccccaagcggaagcggcgggtgtacgagacatatgaatctcctctgcctattcctttcggtcaggatcacggaccattaaaggagtttaagatctttcgcgcagagatgataaataataacgtaattgtaaggaacgcggaggatattgaacaactgtacgggaagggctattttggtaaaggcattcttagccgatcgcgacccagttttactatttcagaccccaaattggtggccaagtggaaggatatgaaaaccaatatgcccatcatcacctctaagaggtaccagcatagtgtggaatgggccgcagagcttatgcgcagacaaggtcaggatgagtcgaccgttagaagaatcttaaaggattatacaaagccactcgagcaccctcccgttaaaagaaatgaggaggcacaggtccacgacaaactcaatagtggaatggtctctaacatggaaggtacagccgggggcgaacggccatccgttgtgaacggcgactccggaaagagtggcggcgtcggcgaccccagggagccactcggctgtctgcaggaaggatctgggtgccatccaacgacggagtcttttgagaaatcagttcgtgaggacgcttcccctctgccgcacgtctgttgttgcaaacaggatgctctgatattgcaaagaggcctacaccacgaggatggcagccagcatattggcctgctccatcccggggacagaggaccagaccatgaatacgtgctcgtggaggaggctgaatgcgcaatgagtgagcgggaagccgcccccaacgaagaggccttcttcctagtgtatgccttgggttgcctgagcatctactacgaaaaagaacctctgaccattgtgaagttgtggaaagcatttactgtcgtgcaacctacttttcgcactacctatatggcctatcattattttcggtctaaagggtgggtcccaaaagtggggttgaaatacggtacagatctgctcttgtatcgcaagggtcctcctttttaccacgcatcttacagcgttattatcgaattggtggatgatcacttcgagggatcactcagacgacccttatcatggaagagtctggccgctctttcacgcgttagcgtgaatgtgtccaaagagcttatgctgtgctaccttataaagccaagtaccatgacggacaaagaaatggaatctcccgaatgcatgaaaagaattaaggttcaggaagtgattttatcaagatgggtcagcagtagggaaaggagcgaccaggacgacctttag

SEQ ID NO: 209870 - DNA, 1209 bp, synthetic construct
  misc_feature 1..1209: note = Description of Artificial Sequence: Synthetic coding sequence
  source 1..1209: mol_type = other DNA
atggccgaggccgtgttccacgcccccaagcggaagcggcgggtgtacgagacctatgaatccccactgccaatacccttcggacaggaccatggtcccctgaaagagtttaagatattcagggcagaaatgatcaacaacaacgtaatcgtccgcaatgccgaggacattgaacaattatatgggaaggggtattttggtaaggggattctgagccgatcccggccttcatttaccatcagcgatccaaaacttgttgcgaagtggaaagatatgaagaccaacatgcccataattaccagcaagcgttaccagcattctgtagagtgggccgcagagctgatgagacggcagggacaagatgagtcaacggtgcggcgcatactgaaagactacaccaagcccctcgaacacccacccgtgaaaaggaacgaggaagcccaggtgcacgataagttgaatagcggcatggtgtcaaatatggaggggactgcaggtggagaacgaccctcagtcgttaatggggacagtggcaagtccggcggggttggggacccgcgcgaacctctgggttgcctccaggagggatccggctgccaccctactaccgagtcctttgaaaagagtgtgagggaggacgcatccccactgccccacgtatgctgttgtaaacaagacgccctgatacttcagagaggactgcatcacgaggatggctcacagcacattgggctgctgcatccaggcgataggggccccgaccatgagtacgttctggttgaagaggcggagtgcgcaatgtctgaaagggaggccgctccaaacgaggaagcattcttcctggtgtacgcgttaggatgtctgtcgatctactatgagaaggagccactgaccatcgtgaaactgtggaaggcatttactgtggtacagcctacgttccgaacaacatatatggcctaccactatttccgaagtaagggctgggtgcctaaagtgggactgaagtacggaactgacctgctgctgtacaggaagggacccccgttttaccacgcttcttacagtgttattattgagctcgtggacgaccactttgaagggtctttgcggcggcccctgagttggaaatcgcttgctgccctgtccagagtgtctgtcaacgtaagtaaagttacacagcaccaactctgtcactggagtgtcacctag

SEQ ID NO: 209871 - DNA, 1137 bp, synthetic construct
  misc_feature 1..1137: note = Description of Artificial Sequence: Synthetic coding sequence
  source 1..1137: mol_type = other DNA
atggccgaggccgtgttccacgcccccaagcggaagcggcgggtgtatgaaacgtatgagagcccccttcctatcccattcggacaggaccacggcccactcaaggagtttaagatcttccgggcggagatgataaataataacgtgatcgtgagaaatgccgaggacattgaacagctgtatgggaaaggctactttggcaaggggattctcagcagatcacgaccttcattcaccattagcgatccaaaactcgtagctaaatggaaggacatgaagaccaacatgcccataattacgtctaaaaggtatcagcactcggtggaatgggcagctgaactcatgcggagacaaggtcaggacgagagcacagtgcgcagaatcttgaaggattataccaaacccctggagcatccgcccgtgaagcgcaatgaagaggcccaggtccatgacaaactcaatagtggcatggtgagcaatatggaagggaccgccggcggcgaacgtccctctgtggtcaatggcgactcaggcaagagcggcggcgtgggagatccaagagagcctctgggatgcctccaagagggtagcggctgtcatcccacaaccgagtcgttcgaaaagtctgtgagagaggacgctagtcccttgccccatgtgtgctgttgcaagcaggatgctctgatactacagcgggggctacaccatgaggatggcagccagcacattggcctgttacatcctggggataggggtcctgatcatgagtacgtgctcgtggaggaagccgagtgcgccatgtccgagagagaagccgcacccaacgaagaacttgtgcaacgcaaccgtctgatttgtaggcggaacccctatcgtatctttgaatatttgcaattgtccctggaagaagcgttcttcctggtgtatgccctgggttgtctgtctatatattacgaaaaggagcccctcaccatcgtgaaattgtggaaagcttttacagtcgtacagcctacatttcgcactacctacatggcttatcattactttcgcagcaaaggctgggtgcctaaagtcggtctgaagtacggtaccgatctgctgctgtatagaaaggggccccccttctatcacgcctag

SEQ ID NO: 209872 - DNA, 1317 bp, synthetic construct
  misc_feature 1..1317: note = Description of Artificial Sequence: Synthetic coding sequence
  source 1..1317: mol_type = other DNA
atggccgaggccgtgttccacgcccccaagcggaagcggcgggtgtatgaaacctatgaatcccctttgcccatcccattcggccaggaccacggtcccctcaaggaattcaagatcttcagggccgaaatgatcaacaacaacgtgattgtccgtaacgcagaggatatagaacaactgtatggcaaggacatgaaaactaatatgccaattatcacgagcaagaggtatcagcatagtgtcgaatgggcggccgaactcatgcgccggcaggggcaggacgagtccaccgtgcgccgcatcctgaaagattacaccaagccactggagcacccacctgtcaaacgcaacgaggaagcgcaggtccatgataagcttaactcgggaatggtgtccaacatggagggcacggcaggcggcgagaggccttctgtggttaatggggacagtggcaaaagcggaggggttggtgatccccgcgaaccactgggatgtctgcaagagggtagtggctgtcaccctacaaccgagtctttcgagaagtcagtccgggaagatgctagtcctcttccgcacgtgtgctgctgcaagcaggatgcactcattctccaaaggggacttcatcacgaggatggtagccagcacattggcctgctacacccaggcgaccgagggcccgatcacgaatatgtgcttgtggaagaggctgagtgcgccatgagcgagagagaggctgctcctaacgaggaattggtccagaggaacagactcatatgccgccgcaatccatataggatttttgagtatttgcagctttcccttgaagaagccttcttcctggtgtatgcactgggctgtctatccatatactatgagaaagagcctttgacaattgtcaaactgtggaaggcattcaccgtggtgcagcctacctttcgaaccacatacatggcctaccactacttccggtccaaagggtgggtgccaaaagtgggactgaaatatggcacagacctccttctgtacaggaaggggccgccattttatcatgccagctactcagtgatcattgagttggtggacgaccattttgagggctccctgcgccgccctctctcctggaaaagcctggccgccttaagccgggtgagtgtgaacgtctctaaggagctcatgctctgctatctcattaaaccgagtaccatgactgacaaggaaatggagagcccagaatgcatgaaaaggattaaggtgcaggaggtgattttgagcaggtgggtgagctctagagagcgatctgaccaagacgacctgtag

SEQ ID NO: 209873 - DNA, 1221 bp, synthetic construct
  misc_feature 1..1221: note = Description of Artificial Sequence: Synthetic coding sequence
  source 1..1221: mol_type = other DNA
atggccgaggccgtgttccacgcccccaagcggaagcggcgggtgtacgaaacgtacgagagcccgctccctatccctttcgggcaggaccatggcccgctaaaagaatttaagatcttccgagccgagatgatcaataacaacgtgattgtccgcaatgccgaggatatagagcagttgtacgggaaggggtatttcggtaagggcatcctaagcaggtcaagaccgagctttaccataagcgaccccaaattagtggccaaatggaaggacatgaaaaccaacatgcctatcatcacttcaaagcgctaccagcacagtgtggagtgggcggctgaattaatgcgccggcagggtcaggacgagtccaccgtaaggaggattctgaaggactacaccaagcccctggagcaccccccagtgaagcgcaacgaggaagctcaagtgcacgacaaactgaactctgggatggttagtaatatggagggcactgcgggaggagaaagacctagcgtgcggggcctacatcatgaggatggatctcagcacatcggcctgctacaccccggggaccgaggccctgaccatgagtatgtactagtcgaggaggccgagtgcgcaatgagcgaacgggaagccgcacctaatgaggaattggtgcagcgcaaccggttaatctgccgacggaacccataccgaatttttgaatacctgcagttgagcctcgaagaggcttttttcctagtgtatgccctgggctgcctttctatatattatgagaaggagcctctcacaatcgtaaaactctggaaagcctttaccgtggtccagcctacctttcgcactacttatatggcataccactacttcagaagcaaaggctgggtgccgaaggttggtctcaaatatggtaccgatctgctcctgtatagaaaagggcctccattctaccacgcctcttattccgtgatcatcgagttagtggatgatcattttgagggatctctccggagacccctgagctggaagtccctggctgctttgtcccgcgtctctgtcaatgtttcaaaggagctcatgttgtgttacctgatcaagcctagcactatgacagacaaggagatggagagccctgagtgtatgaagcggatcaaggtccaggaggtgatactgtcgagatgggtgagctccagagagagatccgaccaggacgatctctag

SEQ ID NO: 209874 - DNA, 933 bp, synthetic construct
  misc_feature 1..933: note = Description of Artificial Sequence: Synthetic coding sequence
  source 1..933: mol_type = other DNA
atgctggtggtggaggtggccaacggccggagcctggtgtggggcgcagaggcggtgcaagccctgcgtgaacgtttgggagtcggtggtagaaccgtgggggccctgccgaggggacccaggcaaaattccagactaggattgccactgctactgatgcccgaggaggccagattgctggccgaaattggcgcggtcacattagtctccgcccctcggcctgattctcgccatcatagtttggctctgaccagcttcaaacgtcaacaggaagaaagcttccaggaacaaagtgcactggccgctgaagcacgcgaaacccgccgccaggagttgctggagaaaatcaccgaagggcaggctgcaaagaagcagaaactcgagcaagcttctggtgcctcatctagccaggaggcggggtcctctcaagccgctaaagaagatgagacgtctgatgggcaggcttctggtgaacaggaagaggctggaccatcgtctagccaggctggaccatctaatggggtcgccccgctgccgcgctctgcactacttgtgcagttagctacggcacggccgagacccgtcaaggcccggccgttagactggcgggtgcagagtaaggactggccccacgccgggagacccgcacatgagctcaggtacagtatataccgcgacctgtgggagcgggggttctttctgtcagccgcaggtaagttcggaggagactttctggtgtaccctggagacccactgcgtttccacgcccactatatcgctcaatgttgggccccagaagacacgattcctctccaggacctggtcgccgctgggcggctcggcacctccgtcaggaaaaccttgttgctgtgtagcccccagcccgacgggaaagtggtttacacaagcttgcagtgggccagtctgcagtag

SEQ ID NO: 209875 - DNA, 933 bp, synthetic construct
  misc_feature 1..933: note = Description of Artificial Sequence: Synthetic coding sequence
  source 1..933: mol_type = other DNA
atgctggtggtggaggtggccaacggccggagcctggtgtggggcgccgaagctgttcaggcactgcgcgagcgattgggggtgggaggacgcaccgtaggagctcttccacgcggtccgcggcaaaacagtagactcgggttgcccctcttgttaatgcctgaggaggctcggttactggcggagattggtgcagttactctggtgtccgcccctcgaccagatagcagacaccacagtctagccctgacctctttcaaacggcagcaggaggagagctttcaggagcagtcagctctcgcagcagaggcccgcgagactagacggcaggaactgctggagaagatcaccgaggggcaggccgcaaagaagcagaagctggaacaggcatccggtgcaagttctagtcaggaagcgggctctagccaggccgcaaaagaggacgaaacatctgatggccaggcctcaggggagcaagaggaggcgggaccttctagttcccaggccggaccctccaatggtgtagcccctctcccccgatcagctctcctggtgcagctcgcaacggcgcggcctcgccctgttaaggctcgtcccctggattggcgggttcagtccaaagattggccgcatgcaggaaggcccgctcatgagctgaggtacagcatatatcgcgacctgtgggagcgggggttttttttatctgccgcagggaaatttgggggggatttccttgtgtatcccggggatcccctacgattccacgcccactacatcgcacagtgctgggccccagaagatactattccccttcaagacctggttgccgccggccgcctaggcacctctgtgaggaagactctgctcctgtgcagtcctcagcccgatggcaaagtggtatatacctccctacagtgggccagccttcagtag

SEQ ID NO: 209876 - DNA, 933 bp, synthetic construct
  misc_feature 1..933: note = Description of Artificial Sequence: Synthetic coding sequence
  source 1..933: mol_type = other DNA
atgctggtggtggaggtggccaacggccggagcctggtgtggggcgcagaggctgtgcaggcgctgcgagagcgtctgggggtcggtgggaggaccgttggcgcattacctcgcggcccaagacagaacagtcggctggggttgcccctactgcttatgcccgaggaggctaggcttctggccgaaattggagcagtcactttagtttcagcaccaaggcctgacagtcgccaccacagtcttgctctgacctccttcaaaaggcagcaagaggaatcttttcaggagcaatcagcactggcagcagaagccagagaaacgagaagacaagaactgctagagaagatcacggaaggccaggccgcgaagaagcagaagttagagcaggctagtggtgcttctagtagccaggaggctggttccagtcaggcagctaaggaagacgagacaagtgacggccaggcatcgggagaacaggaggaggcggggccaagcagttctcaagccggcccgtcaaacggcgtcgcgcctcttccacgttccgcccttctcgtgcaacttgccactgccagaccaagaccagtgaaggcccggcctctggactggagggtgcaatccaaagactggccccacgccgggagaccagcacacgagcttcggtattcaatctatagggatctctgggaaagggggttcttcctcagtgccgctggcaagtttggcggagactttctggtatacccaggcgatccattgcgctttcatgcacactacatcgctcagtgttgggcccctgaggacaccatacccctgcaggatttggtggctgctgggcggttgggaacgtctgttcggaagaccctgctactgtgttccccacagccagacggaaaggtggtgtataccagcttgcagtgggcctccctgcaatag

SEQ ID NO: 209877 - DNA, 939 bp, synthetic construct
  misc_feature 1..939: note = Description of Artificial Sequence: Synthetic coding sequence
  source 1..939: mol_type = other DNA
atgctggtggtggaggtggccaacggccggagcctggtgtggggcgccgaggccgtgcaggccctccgggaaaggctgggtgttggcggtagaaccgtgggtgctctgccccggggtccaagacagaacagtaggctcgggctgcctctgctcctcatgcctgaagaggcgaggctgctggctgaaataggcgctgtgaccctggtatcagcccccaggccagactctcgtcatcattccttggcactcacttctttcaaaaggcaacaggaagagagtttccaagagcaatcagcactcgccgccgaagccagagagactagacggcaagagcttcttgaaaagattaccgagggccaggccgccaagaagcaaaaactggagcaggcttccggcgcctcgtccagccaggaggctggttccagccaggctgccaaagaggacgagacctctgacggacaggcatctggcgaacaggaggaggctggcccatcatcctctcaggccggcccttccaacggggtggcgccgctccctcgctcagcgctgctcgttcagctggcaactgctcggccgcgtccagttaaagccaggccactggactggcgcgtgcagagtaaggattggccacacgccgggcgtcccgcccatgagcttcggtactccatctacagagatctgtgggagcgcggctttttcctctccgccgccggtaagttcgggggggacttcctggtttatccaggcgaccctctgcgattccacgcgcactacattgctcagtgttgggccccagaggacaccattcctctgcaggacctggtcgctgctggaaggttgggaacgtctgtccgcaaaacgctcctattgtgtagcccacagccagacggatttaaaagccaagaggtgagtattaatctggtctataagtgcagttag

SEQ ID NO: 209878 - DNA, 729 bp, synthetic construct
  misc_feature 1..729: note = Description of Artificial Sequence: Synthetic coding sequence
  source 1..729: mol_type = other DNA
atgctggtggtggaggtggccaacggccggagcctggtgtggggcgccgaagctgtacaggctttgcgggagcggctaggcgtgggtggacgaactgttggggctcttcctcggggaccccgacagaattcaagacttggcctcccccttcttctgatgcctgaggaggccagactccttgcagaaattggggccgttactttggtgtcagcaccacggccagatagccggcaccactcccttgcactgacatcctttaagcgccagcaggaggagagcttccaggaacagtccgcacttgccgctgaggcccgtgaaactaggcgccaggagttgttggagaaaattacagagggacaggctgctaagaagcaaaagctagagcaggcttcaggcgctagctccagccaggaggccgggtctagccaggctgccaaggaggacgagacctctgatggtcaggcgagtggggagcaagaggaggccggccctagcagctcccaggccggaccctcaaacggcgtggcaccattgccgagatctgcgcttttagtgcagcttgccactgcacgacccagacccgtgaaggctcgccctctggattggcgagtacagagtaaggattggccccacgcaggccggcccgcgcatgagttgcgctactccatttatcgggatttatgggagagggggttctttctgtccgccgccggcaagttcggcgggtag

SEQ ID NO: 209879 - DNA, 1581 bp, synthetic construct
  misc_feature 1..1581: note = Description of Artificial Sequence: Synthetic coding sequence
  source 1..1581: mol_type = other DNA
atggagcccgagcccgagcccgccgccgtggaggtgcccgccggccgcgttttgagcgcgcgtgaactgttcgcagctcgctcaaggagccagaagctgccgcaacgctcccatggtcccaaggattttctgccagacgggtctgccgctcaggccgagaggctgaggcgatgtagagaagagctttggcagctccttgccgagcagcgagttgagagactcggctctttagttgcagccgagtggagaccggaggagggttttgtggagctgaaatctcccgctggaaagttttggcagaccatgggctttagcgaacagggaagacaaaggctgcatcctgaagaggcactgtatctcctggaatgcggatctatacacctgttccaccaggatctcccgctgagcatccaggaggcttaccaacttctgctgactgatcatactgttacgttcttgcagtatcaggttttttctcatttaaagcggctgggctacgtagtccgtcgtttccagcctagctccgtgctatcgccctacgaaagacagctcaacttagacgcaagtgtacagcatcttgaagatggggatggcaaacggaaacgctcttccagctcaccccgaagtatcaacaaaaaggctaaggcgctggacaattctctgcagcccaaaagtctcgctgcaagcagccctcccccgtgctcacagcccagccaatgccctgaggagaaaccccaggaatccagccccatgaagggcccagggggcccatttcagctgcttggtagtttggggccatcgcccggcccagccagagagggggtcgggtgcagctgggaatcaggcagggccgaaaatggcgtgactggggctggcaagcggagatggaattttgagcagatcagcttccctaatatggcctccgactctcgacacacactgctgcgggctcccgcccctgagctcctccctgctaacgttgctggaagggagactgatgcagaatcttggtgccaaaagctgaatcaacgcaaggagaaactatccaggagagagagagaacaccacgcggaagccgcccagttccaggaggatgtaaatgccgatccagaagtgcagaggtgttcgagctggcgcgagtacaaagagctgctacagcgccgacaggttcagaggtcccagcgccgggcgccccatctgtggggccagccagtcacccctctactgtctccgggccaggcatcttcccccgccgtcgtccttcagcacatctccgtgctccagaccacccatctgcccgacggtggcgcacgcctcctggaaaaatccggcgggttggaaatcatttttgatgtgtatcaggctgatgccgtggccaccttcaggaagaacaaccccgggaagccctacgcaaggatgtgcatttccgggtttgatgagccagtgcctgacctgtgtagcttaaagcgtctgagctaccaaagtggtgacgttcctctcatcttcgccctggtggaccacggggacatctcgttctacagttttcgcgatttcaccctgcctcaagacgtgggccattag

SEQ ID NO: 209880 - DNA, 594 bp, synthetic construct
  misc_feature 1..594: note = Description of Artificial Sequence: Synthetic coding sequence
  source 1..594: mol_type = other DNA
atgggcttcagcgagcagggccggcagcggctgcaccccgaggaggcactgtatctcctggagtgcggcagcatacatctttttcatcaggacctgccactgtccatccaggaagcttaccagctgttactgacggaccacaccgtgacttttctgcagtaccaggtcttctcccacctaaaacgactgggttacgtggtgcggcgcttccagccttcctctgtcctgtccccttatgaaaggcagctcaacctcgatgcttctgttcagcacctcgaagacggagatgggaagcggaagcggtccagcagcagccctagaagcataaacaagaaggccaaggcgctcgataactctctacagccaaagtctctcgctgcctcaagcccccccagcggaacatccaggtgtccaaggatgtgggggacagaccttacagctctgcagcggatggagctcgcccccggcgaccgtgactgccttttttctggaaccatctccgccgcatcgtgcacccagacattgacctgctccttccgcgggcagagcggaccatggccgtgggtgtctgacacacacagagtgaagctgtag

SEQ ID NO: 209881 - DNA, 534 bp, synthetic construct
  misc_feature 1..534: note = Description of Artificial Sequence: Synthetic coding sequence
  source 1..534: mol_type = other DNA
atggagcccgagcccgagcccgccgccgtggaggtgcccgccggccgggtgctaagcgcaagggaacttttcgctgcgaggtctaggagtcaaaagctgccccagagatctcacggacctaaggactttttgcccgacggttctgcagcacaagccgagaggctgcgacggtgtcgcgaggaactttggcagctgctcgccgaacaacgggtggagagactgggcagccttgtagcagccgagtggcgccctgaagagggctttgttgagctgaagtctcctgccggaaaattttggcagacaatgggcttcagcgaacagggtaggcagcgcctgcacccagaggaagcactgtacctgctagagtgcggatctattcacctcttccaccaggacttacccctgagtatccaagaggcctaccagctgttgctgacagatcataccgtaacttttctgcagtaccagccaccagaggaggtgggcttgtgcggatctaccatccctacgaaattgtgcccggttcccgtgtag

SEQ ID NO: 209882 - DNA, 4296 bp, synthetic construct
  misc_feature 1..4296: note = Description of Artificial Sequence: Synthetic coding sequence
  source 1..4296: mol_type = other DNA
atggaccggcggaacgactacggctaccgggtgcccctgttccagggacccctgccgccaccagggtccttgggactgcctttcccccctgacatacagacagagaccactgaggaagatagcgtactgttgatgcatactttactagccgccactaaagacagcctcgccatggatccaccggtcgtaaatcgacctaagaagtcgaagaccaagaaggctccaatcaagaccataaccaaggctgctcccgcagcacctcccgtcccagccgccaacgagatagcaacgaacaagccaaagattacttggcaggctctgaatctgcctgtgattacacaaatcagccaggccttacctaccactgaggttacgaacacgcaggcttcttccgtcaccgcccaaccaaagaaagccaacaaaatgaaacgcgtaaccgccaaagctgcacagggctcacagtcccctactggacacgaaggtggcactattcagctcaaaagcccactgcaggtgctgaagcttccagtgattagtcagaacattcacgcaccaattgccaatgaatctgcttcatcccaagccctcatcacgagtattaaaccaaaaaaggccagcaaggctaagaaagcagccaacaaagcaattgcgtcagccaccgaggttagccttgccgcaaccgccactcacaccgccacaactcagggacagatcaccaacgagaccgcctctatccacaccacagcagcatcaatccggaccaaaaaggccagcaaagctcggaagaccattgctaaggtgattaataccgataccgagcacatcgaagcattgaacgtgactgacgcagcaacgcgtcaaatagaggctagcgtggtggccatccgccctaaaaagtcaaaaggaaagaaggctgctagcagaggcccaaacagcgtgagcgaaatatctgaagccccactggccacccaaattgttacgaatcaggccctcgcggcaacactcagggtaaaacgggggtcaagggcacgcaaagccgctacaaaagctcgggcaacagagtcccagacccctaacgcagaccaaggggcgcaggctaagattgccagcgcgcagactaacgtttcagccttggagacccaggtagcagccgctgtgcaggccctagccgacgattaccttgcccagctgtctctcgagccgactacccggacccgaggcaagcgcaaccgcaaaagcaagcatttaaacggagatgagcgttcagggagcaattatcgtcgcattccctgggggcggcgccctgcccccccaagagatgtggcaatactccaggagagggctaacaagctcgtaaaatatctactggtcaaagaccagaccaagattcctataaagcgctccgatatgctccgtgacgttattcaagagtacgatgaatactttccagaaataattgaacgagcatcctacaccctggagaaaatgttccgggttaacctcaaggaaattgacaagcagagtagcctgtatattctgatatcaacacaggagtccagcgccggcatcctcggaacgaccaaggatactccgaaactgggcctgctgatggttattctgtctgttattttcatgaacggtaataaggcatccgaagccgtgatttgggaggttctgagaaaacttgggttgcgacccggggtgcggcactccctgtttggcgaggtgagaaaattaataacagatgagttcgtaaaacagaagtatctcgagtataagagagtgcctaattcccgcccaccagagtatgagtttttctggggtctgcggtcgtatcatgagacgtctaaaatgaaggttttgaagttcgcctgtcgcgtacagaagaaagatccaaaagactgggcagtccaataccgagaggcagtcgagatggaggttcaagccgctgcagtcgctgtcgctgaggccgaggcacgggccgaggccagggcccagatgggcatcggagaagaggcagtcgcaggaccatggaactgggatgatatggacatcgactgcctgacccgggaggagctgggggatgatgcgcaggcatggtctagattctctttcgagatcgaggcgagggctcaggaaaatgccgatgcatcaacgaacgtgaatttttccagaggcgccagcaccagagccggcttttccgacggcgcttccatctcctttaacggagccccttcctcaagcgggggtttttccggaggtcccggaattacgttcggggtggcaccctcaacttcagcctccttcagcaacacggcatctatttccttcggggggaccttgtcaacgtcatcaagcttcagctctgccgccagcatcagtttcgggtgcgcgcattctacatcaacatccttcagttctgaagctagtatatcctttggtggtatgccctgtacctccgcatctttttcgggaggagtttcatcaagtttctctggacccttgtcaacctccgcaaccttctccggtggcgcctcatctggattcggaggaaccctgagcacaacagcaggattctctggggtgttgtccacatctacatcctttggttcagcccccactacaagcaccgttttttcgagcgcattgtccacttccacgggatttgggggcatcctcagtacatctgtctgtttcggtggttcgcctagtagctccggttcattcggcggtaccctgtctacatcaatttgcttcggcggctccccctgtactagcacgggcttcggcggcaccctgtctaccagcgtcagcttcgggggctcctcctccacgtcagctaactttggtgggaccctgtccacatcgatttgtttcgatggctcccctagcaccggcgcaggcttcgggggggccttaaatacatctgcttctttcggcagtgtattgaatacgtctacaggcttcggtggcgctatgagtacttctgcagactttggaggaaccctctctacttccgtgtgctttgggggatctccggggacatctgtttcatttgggagcgcgctcaatactaacgctggctatggtggcgcggtaagtaccaataccgacttcgggggcacgctttctacaagcgtctgctttggcggttccccgtctacaagcgcagggttcggcggggccttaaacacgaacgctagcttcggctgtgcagtttccacgagtgcctctttcagcggcgccgtttccacatccgcctgtttctcgggggcccctattactaacccaggctttgggggagcattctccacatctgccggctttggaggggctctgagcaccgctgcagacttcggcggaacgccttcgaactcaattgggttcggcgcagccccgtcaacctccgtgagttttggaggggcccacggaacctctctttgcttcggcggcgctccctctacgtccctctgtttcggcagtgcatctaataccaacttgtgtttcgggggccctcccagcactagtgcgtgcttttcaggagcgacatctccgtcattttgcgacggcccgtctacatccacgggcttcagtttcgggaatggcctgtccacgaacgccggcttcggcggtggcctcaacacatctgccgggtttggaggcgggctcggtaccagcgccgggtttagtggaggcttgagcacaagctccggattcgatggcggtcttggcaccagtgcgggctttggtggaggacctggtacttctacggggtttggcggcggactaggtacaagcgcagggttctccgggggcctgggtacatcggccggcttcgggggaggactcgtgacttccgacggatttgggggtggtttgggaaccaatgcttcctttggatccacgctgggcacaagtgcgggattttccggtggtcttagcacctccgatggatttggtagcaggcccaatgcgtccttcgacagaggcctgtcaacgattatcggctttggtagtggctctaacaccagtaccggctttaccggggagccaagtacctccacaggtttttcttccggtcccagctcaatcgtcggcttctccggaggcccatctacaggggtggggttctgtagtggtccctctacttctgggttttctggcgggccaagtacaggggctggcttcggagggggccctaacacaggcgccggattcggcggagggccctctacctcagctggttttggtagtggagccgcatcattaggagcttgcggtttttcctatggctag

SEQ ID NO: 209883 - DNA, 2121 bp, synthetic construct
  misc_feature 1..2121: note = Description of Artificial Sequence: Synthetic coding sequence
  source 1..2121: mol_type = other DNA
atggaccggcggaacgactacggctaccgggtgcccctgttccagggcccgcttccaccaccagggagcttggggctgccgttcccacctgacatccagaccgaaacgaccgaagaggattctgttctgttaatgcatacacttttggcggccacgaaagattccctcgctatggacccgccggtggtgaatagacccaagaagtccaaaaccaaaaaagctccgatcaagacaataacaaaagcagccccagctgcaccccccgtgcctgcagcgaacgagattgctaccaataagccgaagataacctggcaagccctgaatcttccagttattacccagatctcccaggccctcccaaccaccgaggtcaccaatactcaggccagcagcgtcacagctcagcccaagaaggcgaataaaatgaaaagggtgacagcaaaggctgcccaaggcagccagtccccgactggtcacgagggaggaactattcaactaaaaagccccctgcaggtgctaaaactccctgttatatcacagaatatacacgctcccattgcgaacgaatccgctagtagccaggccctcatcacttctattaagccaaaaaaagcctcaaaagcgaaaaaggccgccaacaaggctatcgccagtgcaaccgaggtgtcccttgcagcaacagcaacacacaccgctactacacaggggcagatcactaacgaaaccgccagcatccacacaacggccgcatcgatcagaacgaagaaggccagcaaagccaggaagaccatcgcaaaagtcattaacacagacacggaacatatcgaggcgctgaacgtcactgatgccgcgaccagacaaatcgaagctagcgtagtcgccatcaggcctaaaaaatccaaaggcaagaaggcggcgtctcgcggtccaaactcagtgtctgagatcagtgaagcccctctggccactcaaatcgtgactaaccaagccctagccgccacactgagagtgaaaagggggagccgtgctagaaaagcggcaaccaaagcgcgcgctacagagtcccaaacgcctaacgccgatcagggtgcgcaagcaaaaattgctagtgcccagacaaatgtctctgcgctggaaactcaggtcgctgccgccgtgcaggctctggcggacgactatctggcacagttgagtctggagccaacaactcgcacgcgtggaaagaggaatagaaaatccaagcatctgaacggtgacgagcggtccgggtcaaattataggcgaatcccttggggccggcgccccgctcccccaagggatgtggccattttacaggaacgtgcaaataagctggtgaaatacctattggtgaaagatcagaccaaaatcccgatcaaacgcagcgatatgctccgggacgttatacaggagtacgatgaatactttcctgaaattatcgaacgagcgagttatacattagagaaaatgtttcgagttaacctgaaggagattgacaaacagtcttcactgtatattctcatttccacccaagagagctccgccggcatcttgggcactaccaaggacactcctaagcttggcctgctgatggtgatcctgtcagtcatctttatgaacggtaacaaggcttctgaggccgtcatatgggaagtactgcggaaattaggccttcgacctggcgtgcgacatagcctgtttggcgaagtgcgtaaacttatcactgacgaattcgtgaagcagaagtatctggagtacaaacgggtgcccaattcaagacctcctgaatacgaatttttctggggccttcgcagttaccacgaaacctccaaaatgaaagtcttgaaatttgcttgccgcgtgcagaagaaagaccctaaagattgggcggtgcagtacagagaagccgtggaaatggaggtccaggccgccgctgtggctgtggccgaagctgaggcaagggccgaaatatactctccttgcctgcagatacccctaatcaattgctcttctccaagccatggggccaaagtacatccctggaatctgtgtcctcattcttctcaggggtcgtatggccagtcagcggaaggcgtaatgtag

SEQ ID NO: 209884 - DNA, 1074 bp, synthetic construct
  misc_feature 1..1074: note = Description of Artificial Sequence: Synthetic coding sequence
  source 1..1074: mol_type = other DNA
atggaccggcggaacgactacggctaccgggtgcccctgttccagtcaaagcatctgaatggtgatgagaggagcggctcaaactaccggcgcataccttggggacgaagacccgctcctccacgcgacgtggccatactgcaggaacgggctaataagttggtgaaatacctgctcgtcaaggatcagaccaagattcctattaaaagaagcgatatgcttcgggatgtgattcaggagtatgacgagtacttccctgagatcattgaacgggcatcctacaccctggagaagatgtttagagttaatctaaaagagattgataaacaatccagcttatatattctgatctccacccaggagagctctgccggcatcctcgggacaactaaggatacccccaaactgggtctgcttatggtgatcctgagcgtgatatttatgaacgggaacaaggcctccgaggccgttatttgggaggtcctgaggaagctcggcttacgccctggcgttagacacagcctctttggtgaggttagaaagctcatcacggacgaattcgttaagcaaaagtacctggagtacaagagagtcccgaactctcgacctcctgaatacgaatttttctggggactccgctcctaccatgagacctctaagatgaaagtgttaaaattcgcctgtcgtgtccagaaaaaagatccaaaagattgggccgtgcaataccgagaggccgttgagatggaggtgcagctgcagctgtggctgtggttacggctgaaaccaggactgagtgggagtaatacctccacagggtttaccggcgagccttctacctcaaccggttttagctcaggaccaagcagcatcgtgggcttttccggcggccctagcaccggcgtcggattttgcagcggcccttccacatctggtttttccggggggccgtctactggggcgggattcggcgggggacccaacaccggggctggcttcggaggcggcccttccacctcagctggctttggcagcggagcagctagtctcggggcgtgcgggttttcctacgggtag

SEQ ID NO: 209885 - DNA, 2121 bp, synthetic construct
  misc_feature 1..2121: note = Description of Artificial Sequence: Synthetic coding sequence
  source 1..2121: mol_type = other DNA
atggaccggcggaacgactacggctaccgggtgcccctgttccagggccctctgccacccccaggctcgctaggcttgcccttcccacccgacatccagaccgagactaccgaggaggacagtgtcttgctaatgcatactctgctggccgcaaccaaagactcccttgcaatggatccccccgtggttaacaggccgaagaaaagcaaaaccaaaaaagctccgattaagactataactaaagctgccccagcagcaccacccgttcccgccgcaaacgaaattgccacaaataagcccaaaattacctggcaggcccttaatctgccagtgattacgcaaatatcccaggctttacccaccacagaggtcaccaacacccaggcatccagtgtgactgctcagccaaaaaaggctaacaagatgaagagggtcacagccaaggccgcccaaggaagccaatcacccaccggccacgagggtggcacaatccagctgaaatctccactgcaggtcctgaaactgccagtaatcagtcagaacattcacgctcctatagctaacgagtccgcctcttctcaggcgcttatcaccagcattaagcctaagaaagccagcaaagctaagaaggcagccaataaggccatcgcctctgccaccgaggtatcgctggccgcaacggccacgcacaccgccactacacagggccaaatcactaatgagacggcaagcatccatacaaccgccgctagcattcgtaccaaaaaagctagtaaggctcgtaaaactattgcaaaggtcatcaacacggatactgagcatattgaggcactgaacgtcactgatgccgcaaccaggcagatagaggcctcagtggtagctattcggcctaagaagtcaaaagggaaaaaggctgcttctcggggcccaaacagtgtgagcgagatctcagaagctccattggctactcagatcgtaactaatcaagctctcgcagccaccctgagagtcaagagaggttcaagagctcgaaaagctgccaccaaggctcgagccactgaatcacagacacctaacgcagatcaaggtgcacaggccaaaattgcaagtgctcagacaaatgtgagtgctctggaaacccaggtggccgcagcagtacaggccttggctgatgattacctcgcacagctttccctcgagcctacaactaggactaggggcaaacggaataggaagagcaagcatctcaacggtgatgagagaagtggctctaattataggcgtattccgtggggcagacggccggctcctccccgagacgtggccatactccaggagagggccaataaactggtgaagtacttgcttgtaaaggaccaaaccaagatacctattaagagaagcgatatgctgagggatgttatccaggaatatgatgaatatttcccagaaatcattgaacgcgctagttacacattggagaaaatgtttcgggtgaatctgaaggagatcgacaagcagtcaagcttgtacatcctgatcagcacgcaggagtcctctgctggaatactaggcacaaccaaggacacccccaagctggggctgctgatggtcatcctttcggttattttcatgaatgggaataaggcatcagaggctgtcatatgggaggtattgcggaagctcggattacggcccggcgtccgtcattccttgtttggggaggtgcgaaagttgatcactgatgaatttgtgaagcagaagtaccttgagtacaagcgggtgccgaacagcagacctccagaatacgagtttttctggggcctcagatcataccacgagacttctaagatgaaggtgcttaaatttgcttgccgcgtccagaagaaagaccctaaggactgggccgttcagtaccgcgaggctgtagaaatggaagttcaggcggccgccgtcgccgtagccgaggcggaagcccgagccgagatctactccccatgtctgcaaatcccattgattaactgtagttcgccaagtcacggggcaaaggtacatccctggaacttgtgcccacacagtagccaaggctcctatggacaatcagctgaaggcgtgatgtag

SEQ ID NO: 209886 - DNA, 3105 bp, synthetic construct
  misc_feature 1..3105: note = Description of Artificial Sequence: Synthetic coding sequence
  source 1..3105: mol_type = other DNA
atggaccggcggaacgactacggctaccgggtgcccctgttccagtccaaacaccttaacggagacgaacgctctgggtctaactaccggcgaatcccttgggggaggcgccccgctccaccccgcgatgtagctattctgcaggaacgcgctaataagcttgttaaatatctgttggtgaaggatcagacaaaaattccaatcaaaaggagcgacatgcttagagatgtcatccaggagtatgacgagtacttccctgaaattatagagcgcgcgtcttataccctggaaaagatgttccgcgtaaacctgaaggaaatcgataaacagagctccctgtatatcctcatttccacccaggagtcatctgctgggattttgggaaccacgaaagacacacccaagctgggcctgctaatggtgatcctgtctgtgatttttatgaacggaaataaagcttctgaagccgtgatatgggaggtattacgaaagttggggctgcggccaggcgtgagacacagcttgttcggggaggtaaggaagctgatcactgatgagttcgttaagcagaaatatttggaatataagagagtgcctaactcaagaccacccgaatatgaattcttttggggactgaggtcttatcatgagaccagtaagatgaaggttttaaaatttgcctgccgggttcagaagaaagatcctaaggattgggcagtgcaataccgggaagccgttgaaatggaggttcaggccgccgccgtggcagtcgcagaggctgaggctagggccgaggctcgtgctcagatgggaatcggagaggaggccgtggctggcccatggaattgggacgacatggacatcgactgcctgactagggaggaactcggtgacgatgcccaagcctggtctagatttagttttgaaattgaggcccgggctcaggaaaacgctgatgcctctacaaacgtgaacttttctcggggcgccagtacccgcgcggggttctccgacggggcatccataagcttcaacggcgccccctcatcatcaggaggcttcagcggcggtcccggtatcacattcggggttgcgccatccacttccgcctccttttctaacactgcttcgatcagcttcggaggcactttatctacaagctcttccttcagtagtgctgcatccatctcattcggctgcgcacattcgacatcaacgtcgttctcttctgaggcgagtatttcattcggaggaatgccttgcaccagcgcctcattttccggcggagtgagcagctccttctccggaccgctctccactagcgccacgttttccggaggggcttcatcagggtttggcggcacgctgtctaccaccgccgggttttctggcgtcctgtccactagcactagctttggctcggctccaactacctcgacggtattttctagtgcgctgtccactagtacaggttttgggggcattctgtcaaccagtgtgtgtttcggaggcagtcctagctcttccggctccttcggtggaaccctgagtactagcatctgcttcggggggagcccctgtacaagcaccggcttcggcggaacactgtcaactagcgtgagtttcggaggctcttcatccaccagcgccaacttcgggggcactctgtcaactagcatctgcttcgatgggtctccttctaccggagctggctttgggggcgcacttaacactagtgcgtccttcggttctgtcctgaatacaagtaccggctttggtggtgctatgagtacatcagccgacttcgggggtaccctgtccacctccgtctgttttggcgggtccccagggaccagtgtgtctttcggatcagccttgaataccaatgctggctatggcggtgctgtgtctacaaatactgacttcggcggcacactgagtacctctgtgtgcttcggaggaagtccaagcacaagcgctggattcggaggtgctttaaacacaaacgctagtttcgggtgtgccgtatcaacctccgcatccttctctggcgctgtgtctacatctgcctgctttagcggtgctccaattacaaaccctgggtttgggggcgccttctccacaagtgcgggatttggcggggcgctgtctaccgctgccgatttcggagggacaccaagtaactcaataggttttggcgctgcgcccagcactagcgtttccttcgggggagctcacggcacttctctgtgttttggaggcgcacctagtacctctttgtgttttggctccgcctccaacactaacctgtgctttgggggcccgccttcaacttcagcatgcttctccggcgctactagtccttccttttgtgatggcccttctaccagtaccggattcagttttgggaatggtctgtcaacaaatgcaggttttggaggaggtctcaatacttctgcggggtttggaggcggcctcggcacctcagcaggcttctcgggagggcttagcacctcctctggctttgacggtggcctagggacaagcgccgggtttggcggcggtccaggtacgagtaccggatttggaggagggctgggcactagcgctggatttagtggtggtctgggtacatctgccggcttcggcggcggcttagtgacctcagacggattcggcggcggcctcgggaccaatgcatcattcggctcaaccttgggtacaagcgctggattttcggggggcctgtctacctccgacgggttcggaagccgcccgaacgccagtttcgatcgcgggctcagcacaatcatcggatttggctccggttccaatacttccacaggcttcaccggcgagcccagcacatctacgggcttctccagcgggccgtcatccatagtgggtttctccggcggtcccagcaccggcgtcggcttctgttctggtccttcaaccagtgggttttcaggcgggccctcgacaggggccggtttcggcggcggccctaacacgggcgccggcttcggcggggggccttcaacctctgcaggatttggcagcggggcggcaagcctgggtgcctgcgggttctcctatggttag

SEQ ID NO: 209887 - DNA, 693 bp, synthetic construct
  misc_feature 1..693: note = Description of Artificial Sequence: Synthetic coding sequence
  source 1..693: mol_type = other DNA
atgcacaccctgctggccgccaccaaggacagcctggccatggaccccccagtcgtcaacaggcccaagaaaagcaagaccaagaaggcccctatcaagacaatcacgaaagctgccccggccgcccctccagttcctgcagctaacgagatcgccactaacaagcccaaaatcacgtggcaggcgctcaacctacccgtgatcacgcagatctcccaagctctgcccaccaccgaggttaccaatacacaggcgtcgtcagtgaccgcccagcctaagaaggcgaacaagatgaagcgtgtgacagcgaaggcagctcaggggtcccagtctcccacgggccacgaaggagggacgatccaactgaagtcacccctccaggttctgaaactgcctgttatctctcagaatatacatgctccaattgcaaatgaaagcgccagttcccaggccttaatcacatccatcaagcctaaaaaggcctctaaagccaagaaggctgccaataaggccatcgccagcgctacggaagtgtcgttggcagctaccgctactcacacagccacaacccaggggcaaatcaccaatgagacagccagtatccataccaccgctgcctctattagaacaaagaaagcatccaaagcgcgtaaaacgatcgcaaaagtcattaacacagataccgagcactag

SEQ ID NO: 209888 - DNA, 510 bp, synthetic construct
  misc_feature 1..510: note = Description of Artificial Sequence: Synthetic coding sequence
  source 1..510: mol_type = other DNA
atggaccggcggaacgactacggctaccgggtgcccctgttccagggacccttgccccccccaggtagcctcggcttgcccttcccacccgatattcagacagaaacaacagaggaagatagcgttctgctcatgcataccctgttggcggcaacgaaagatagcctcgcaatggatccacctgtcgtgaatcgccctaagaagagtaaaacaaagaaagcccctatcaaaacaattacaaaggctgctcctgccgcccctccggtgcccgccgccaatgaaatcgcgaccaacaaaccaaagatcacttggcaggccctgaatctccctgtgataacacagataagtcaggccttacccaccaccgaggttacaaacactcaagctagttccgttactgcacagcccaagaaggcgaataagatgaaaagggttacagcgaaggcagcccagggctctcagagccccaccggacatgagggtggtactatccagctgaagtccccttag

SEQ ID NO: 209889 - DNA, 2889 bp, synthetic construct
  misc_feature 1..2889: note = Description of Artificial Sequence: Synthetic coding sequence
  source 1..2889: mol_type = other DNA
atgctgcgggacgtgatccaggagtacgacgagtacttccccgagataatcgagagggcatcttacaccttagagaagatgttccgcgtaaatctgaaggaaatcgacaagcagtcaagcttgtatatcctgattagcacccaagagagcagcgctggcatcctcgggacgacaaaggatactcccaaactgggcctgctcatggtgatcctttccgtcatctttatgaacggaaacaaggcttcagaagcagtgatatgggaggtgttgagaaagctcgggctccggcccggggtgaggcacagcctattcggagaggtgagaaaactgatcaccgacgaattcgtaaagcagaagtatcttgagtataaaagggttcccaacagcaggccaccagaatatgagttcttttggggtctcagatcctatcacgagacttcaaagatgaaagttctgaagttcgcatgccgggtacagaaaaaagacccaaaagattgggccgtccagtatcgtgaagcggttgagatggaagtgcaagcagcagcagttgccgtagccgaagcggaggccagggcagaggcccgggcgcagatggggattggagaggaagccgtggcgggtccgtggaactgggacgatatggatatcgattgcctgacccgcgaggaactcggagatgacgcgcaggcctggtctcgcttcagcttcgaaatcgaggcccgtgcccaagaaaacgcagacgccagtacgaacgtcaatttcagtcggggggcttctacaagagcaggattctcagacggtgcaagcataagctttaacggggctccaagctcaagcgggggcttcagcggaggaccaggcattacattcggagtcgctccgagcacttcagcctctttttcaaataccgccagtatcagttttggtgggaccctgtctacaagcagttcattctctagcgccgcttccatttccttcggctgcgcccacagtaccagtaccagcttcagcagtgaagcatcaatatccttcggcggtatgccctgcacctcagccagcttttcaggcggcgtgtcttcttcttttagcggacccctcagcacctccgcaaccttctctggtggcgccagctctggatttggcggcaccctttccacaacagctggcttttccggcgtgctcagcacgtctacttcttttggatccgcacccaccactagcacagtgttttcatccgcattgtccacgtccaccggcttcggcggcatcctctcaacgtctgtctgttttgggggtagtccgagcagttccggttcttttggggggacactgagcacctccatatgctttggcggcagtccgtgcacaagcacgggatttgggggcactctttcgacgagcgtcagttttggcggcagcagctccacatcagcaaatttcggaggcacactatccacctcaatctgtttcgacggctccccatctacaggcgccggatttggaggcgcactgaacacctccgcctcttttggaagcgtactgaacacgagtactggtttcggtggcgccatgtcgactagcgccgatttcggcggaacgcttagcacctcagtttgttttggcggctcccctgggacatcagtgtcatttggctccgccttaaacactaacgctgggtacgggggcgccgtcagcacgaacacagacttcggaggtactctcagcacctccgtctgctttggcggctccccctctaccagcgcaggttttggcggggccctgaatacaaatgctagctttgggtgtgccgttagcacctctgcatcattttcaggcgcagtctcaaccagcgcttgcttttctggggctccaatcaccaaccccgggttcggcggcgcattctccacgtctgcaggctttgggggcgctctatcaactgccgctgatttcggtggtacgccgtccaacagtatcggttttggggctgcccctagtacgtctgtgagctttgggggagcccatggtacttcactgtgtttcgggggtgccccgtcaacatccctgtgctttggatctgcatcaaataccaacttatgtttcggtgggcccccaagtacctcagcatgtttttctggcgctactagtcctagcttctgcgacgggccttcgacctccaccggatttagcttcggcaacggattgagtaccaatgccggatttgggggtggcctcaatactagcgctggttttggaggaggactggggacaagtgccggcttttcgggcggactgtcaacgtccagcggcttcgatgggggtctgggcacaagtgccggtttcggcggaggacccgggactagcacaggctttgggggcggcttaggaacctccgccggattttctggcggcctgggcacctctgctggcttcggcggcggcctagtgacgagcgacgggtttggaggcggcttggggacaaacgcctcctttggctctactctggggactagcgccgggttttccggaggattatcaacgtccgatggcttcggctctcgacccaacgcctcttttgaccggggtctaagtacaatcatcggcttcggttctggttccaatacatcgaccggcttcactggggaaccaagcacatccaccgggttcagctcaggacctagctccattgtggggttctcaggcgggccctcaacaggggtgggattttgttctggcccatctacttcgggattttcgggcggcccgtctacaggcgctggctttgggggaggtcctaatacgggagcagggtttggaggagggccatcaacatctgctggttttgggtcaggcgccgcgtccttaggggcctgtggcttcagctatggttag

SEQ ID NO: 209890 - DNA, 366 bp, synthetic construct
  misc_feature 1..366: note = Description of Artificial Sequence: Synthetic coding sequence
  source 1..366: mol_type = other DNA
atgcacaccctgctggccgccaccaaggacagcctggccatggacccgccagtcgtcaatcgccccaaaaaatccaaaaccaagaaagcccccatcaagactatcacaaaagccgctcctgcagcaccacccgtgcctgccgcaaacgaaattgcaacaaacaagcccaagattacatggcaggcacttaatctgcccgttataacacagatctctcaagccctccctaccaccgaggtgaccaatacacaggcatccagtgttacggctcaacccaaaaaggctaataagatgaaacgagtgaccgcaaaggcggctcagggctctcagagcccaactggacacgaaggcggaacaatccagtag

SEQ ID NO: 209891 - DNA, 579 bp, synthetic construct
  misc_feature 1..579: note = Description of Artificial Sequence: Synthetic coding sequence
  source 1..579: mol_type = other DNA
atgcacaccctgctggccgccaccaaggacagcctggccatggaccctcccgtcgtgaacaggcctaaaaagagcaagaccaagaaggcacctatcaaaacgattaccaaagcagctcccgccgctcctccagtgccggcagccaacgagattgcaaccaataagccgaagattacttggcaggctctgaatctcccggttatcacacagattagccaagccctcccgaccacagaagtgactaatacacaggcatcctcagtgaccgctcagccgaaaaaagccaacaaaatgaagcgtgtcacagctaaggcagcccaaggaagccaaagccctaccggccacgagggaggaacaatacaattgaagtccccccttcaggtgctcaaactgcccgtcataagccaaaatatccacgcacctatcgccaacgaatcagccagcagccaagctttgatcacatcgattaagcccaaaaaagccagcaaagccaagaaggctgccaacaaagcaattgcatccgcaaccgaggtgtccttggccgcaaccgctacacacaccgccaccactcaaggatag

SEQ ID NO: 209892 - DNA, 531 bp, synthetic construct
  misc_feature 1..531: note = Description of Artificial Sequence: Synthetic coding sequence
  source 1..531: mol_type = other DNA
atggaccggcggaacgactacggctaccgggtgcccctgttccagggcccacttcctccacctgggtcactgggactgccatttccaccggacatccagactgagacaactgaggaggacagtgtacttttgatgcataccctgttggcagcaacaaaagattcactcgctatggaccctccggtggtaaacagaccgaagaagtctaagacaaagaaggcacctattaagaccattaccaaggccgcacccgcggctccccctgttccagctgctaacgagatagcaacaaataagccgaagatcacatggcaggcactcaacctcccagtaattacacagatcagccaggccctgcctaccacggaagtgacaaatacacaggcaagctctgtgactgcccagccgaagaaggccaacaaaatgaagagggttaccgcaaaagctgcccagggatcacagtctcccacgggccatgaggggggtactatccagttgaagtcgcctcttcaggtgcttaaactaccttag

SEQ ID NO: 209893 - DNA, 507 bp, synthetic construct
  misc_feature 1..507: note = Description of Artificial Sequence: Synthetic coding sequence
  source 1..507: mol_type = other DNA
atggaccggcggaacgactacggctaccgggtgcccctgttccagggacctctaccgcctccagggtccctcggactgcccttcccgcccgacattcagactgaaaccacagaggaggattccgtcctactgatgcacactctgctcgccgctactaaggatagcctggccatggatcctcccgttgttaatcggcccaagaagtcaaaaactaagaaagctcctattaagactatcaccaaggcagccccggctgccccgccagtccccgcggccaacgagatagccactaataaaccaaagattacatggcaagctctgaatctgcccgtaatcactcagatctcccaggccctccccaccaccgaagtgaccaatacccaggcgagctcagtcacagcccagcctaaaaaggccaataaaatgaaaagggtgaccgcaaaggcagctcagggttcccagtctcccacgggtcacgagggcggaacaatccagcttaagtcttag

SEQ ID NO: 209894 - DNA, 2046 bp, synthetic construct
  misc_feature 1..2046: note = Description of Artificial Sequence: Synthetic coding sequence
  source 1..2046: mol_type = other DNA
atggaccggcggaacgactacggctaccgggtgcccctgttccagggtcctctccccccacccgggtctctggggttgccattccctcctgacatccaaactgagacgacagaggaggacagcgtgcttctgatgcacactctgctcgccgctaccaaggactcactggcgatggaccctcccgtggtcaataggcccaagaaatccaagaccaagaaagcacccataaagaccattacaaaagccgccccggccgcccccccggttcccgccgccaacgaaattgcgacaaataaacctaagataacctggcaggcgttgaaccttcccgtcataacccagatctcccaggcgctgccaacaaccgaggttacaaatactcaggcctcatcagtgacagcgcagcccaaaaaggccaataagatgaagcgcgtgaccgccaaagcggcacagggctcccagtcccccacaggccatgaaggtggcaccatccaactcaagtcccccctgcaggtgctgaagctccccgttatctcccagaacattcatgccccaatcgcaaacgagagtgcaagctcccaggccttgatcacgtccatcaagccaaaaaaagcctctaaagccaaaaaagctgcaaacaaagcgatcgcgagcgccaccgaagtgtctttggcagccactgccactcacaccgccacaacacagggacagatcactaatgagaccgctagcatccatactactgcggccagtatacggactaagaaggcctcaaaagcaaggaaaaccatagccaaggtgataaatactgatactgaacacatagaagctctgaatgttacagacgccgccacccgccagatcgaggcgtccgtcgtcgccatacgccccaagaagtctaagggaaagaaggcggcttcccgtgggccaaactctgtttctgaaatctcagaggctcctctcgctacccagatagttaccaaccaggccctggcagccacgttaagagtcaaacggggctcacgggcccggaaggccgccacaaaagccagggccacagaaagtcaaacaccaaatgcagatcagggtgcgcaggccaagattgcttccgctcaaacgaatgtgagtgccctagagacccaggtcgcagcagccgttcaagcactggccgacgattacctggcccagctctcacttgagcccaccacccgcaccagggggaagcggaaccgaaagtctaagcatctcaacggcgatgagagaagcgggtccaactatagaaggatcccgtggggaaggcgaccagctccgccccgggatgtggcaattctgcaggagcgtgccaacaaactggtaaaatatctattggtaaaagaccagacgaagatcccaatcaagcggtcagatatgctacgagatgtgattcaagaatatgatgaatatttccccgaaataatcgaacgcgcctcctacacgctggagaagatgtttcgtgtaaacttgaaggagatcgataagcagtcttccctctacattctcatcagtactcaggagagttcagccggtatcttaggaaccacaaaggatactcctaagctgggtttactaatggtcattttgagtgtcattttcatgaatggcaataaggcttcggaagctgttatctgggaggtattacgaaagctgggcttgcggccaggggttcgacacagcctctttggagaggttcgcaaactgatcacagatgagttcgtaaagcagaagtacctcgagtataagcgagtaccaaacagccgacctcccgagtatgaatttttttgggggctccgttcttaccatgagacatctaaaatgaaggtgttgaagttcgcgtgtcgggttcaaaagaaggatcctaaggactgggccgtacagtatcgggaggccgttgagatggaggtccaagccgcagcggtggccgtggccgaggccgaagctagagcggaatggttccaacatcagcattggctgtattggcggacccagcatcaacatgggctccagtag

SEQ ID NO: 209895 - DNA, 372 bp, synthetic construct
  misc_feature 1..372: note = Description of Artificial Sequence: Synthetic coding sequence
  source 1..372: mol_type = other DNA
atgcacaccctgctggccgccaccaaggacagcctggccatggacccccccgttgtgaataggcccaaaaaatcaaagacaaaaaaggcacccattaagacaataaccaaggccgctccagccgctccccctgtgccggctgcaaacgaaattgctaccaacaaacctaagataacctggcaagctctcaacttaccagtcattacacagatctctcaagccttaccaaccaccgaagtcacgaatactcaggcatcttccgttacagcacagccaaagaaggctaataagatgaaacgcgtgacggctaaggctgcccaagggagccagtcccctacggggcacgagggagggacaattcaattgaaatag

SEQ ID NO: 209896 - DNA, 216 bp, synthetic construct
  misc_feature 1..216: note = Description of Artificial Sequence: Synthetic coding sequence
  source 1..216: mol_type = other DNA
atgcacaccctgctggccgccaccaaggacagcctggccatggacccgcccgtggttaatcggccaaaaaaaagtaagacaaagaaagctccgattaagacgatcaccaaggctgcgccagctgcccctcccgtgccggcggccaacgagattgcaacgaacaagccaaagatcacctggcaagcattaaatctgccagtaataacacaaatttag

SEQ ID NO: 209897 - DNA, 195 bp, synthetic construct
  misc_feature 1..195: note = Description of Artificial Sequence: Synthetic coding sequence
  source 1..195: mol_type = other DNA
atgcacaccctgctggccgccaccaaggacagcctggccatggacccccccgtcgttaatagaccaaaaaaaagcaagactaaaaaagctcccatcaaaaccattaccaaagccgctcccgctgcaccgcccgtgcccgccgcaaacgagattgccaccaataagcctaaaattacttggcaggcactcaattag

SEQ ID NO: 209898 - DNA, 930 bp, synthetic construct
  misc_feature 1..930: note = Description of Artificial Sequence: Synthetic coding sequence
  source 1..930: mol_type = other DNA
atggaccggcggaacgactacggctaccgggtgcccctgttccagtcaaaacacctaaatggggacgagcgctccggaagtaattaccgtcgcatcccgtggggacgccggcccgcccccccaagagacgtagccatcctgcaggaaagggccaacaagctggtgaaatacctactggtaaaggaccagactaagataccaattaaacgaagcgacatgctgcgggacgtgatccaagaatacgacgagtacttccctgaaatcatcgagcgcgcaagttacactctagagaaaatgttccgggtcaaccttaaggaaattgataagcagagcagcctctacatactgatcagtacccaggaaagtagcgcaggcatattaggcaccacaaaagacactccaaagcttggcctgctgatggtgattctcagtgtgatcttcatgaacggcaacaaggcttcagaagctgttatttgggaggtgttgcggaagttaggtctacggccaggtgtgcggcacagtctgttcggggaggtgagaaaactcatcaccgacgagtttgttaaacaaaaatacctcgaatacaaaagagtaccgaactcccgtccaccagaatacgaattcttctggggacttaggtcataccacgagacaagcaagatgaaagtgttgaagtttgcatgtcgcgttcagaagaaagaccctaaagactgggcagttcagtatcgggaagctgtcgaaatggaggtccaggcggcagccgtcgctgttgctgaggccgaagcccgagcagagatctacagcccctgcctccaaatccctctgattaattgttcctcaccttcacatggagctaaagtccatccctggaacctttgtccccactcatcacagggctcatacggacaaagcgccgagggagtaatgtag

SEQ ID NO: 209899 - DNA, 1263 bp, synthetic construct
  misc_feature 1..1263: note = Description of Artificial Sequence: Synthetic coding sequence
  source 1..1263: mol_type = other DNA
atgcccggcggctgcagccggggccccgccgccggcgacggccggctccgccttgcccgcctggcccttgttttgttgggatgggtgagcagcagcagccccacaagctctgcatctagtttctccagctcggctccgttcctggctagcgcagtaagtgcccaaccccctcttcctgaccagtgtcccgcactatgcgaatgttcagaggctgcaagaacagtcaaatgtgtgaacaggaatttaaccgaggttcctacggacctgccggcctatgtcagaaatctcttcctgacaggcaatcagttggccgtgcttcctgcgggagcctttgcccgcaggccacccctggcggagttggccgctctcaatctgtctggatctcggctggacgaggtcagggcgggcgccttcgagcacttaccatcccttcgacagttggacttgtctcataatcccctggccgacctctccccgtttgcattcagcggctccaatgcttctgtgagcgcgccgagccctcttgtggagctgattttgaaccacattgtccccccagaggatgaacggcagaatcggtctttcgaggggatggtagtggccgccctcctggctggccgggcccttcagggactgaggaggctggaactggcctccaatcacttcctatatttacctcgtgatgtgctggcccagcttcccagtctgcgtcatttggatctctccaacaacagcttagtgagcttgacctatgttagtttccgtaatcttacacaccttgaatctctgcatcttgaggataatgctctcaaagtccttcacaatggcacgcttgcagaactgcagggtctgcctcacattcgtgttttcctcgataacaatccgtgggtgtgtgactgccacatggctgacatggtcacgtggcttaaggagacagaggtagtgcaggggaaggaccgcttgacttgcgcctatcccgagaagatgcggaacagagtgttacttgaactgaattcagccgacctggattgtgaccccatacttcccccctcattacagacctcttacgtatttctaggaattgtcttggctctcataggagcgatattcctgttagtgttgtatctcaatcggaaaggcatcaaaaagtggatgcataacattagggatgcttgccgcgaccacatggagggctatcattataggtatgaaatcaacgcagatcctcgtctgaccaacttgtcgtcaaactctgacgtctag

SEQ ID NO: 209900 - DNA, 1263 bp, synthetic construct
  misc_feature 1..1263: note = Description of Artificial Sequence: Synthetic coding sequence
  source 1..1263: mol_type = other DNA
atgcccggcggctgcagccggggccccgccgccggcgacggccggctcagactggccagattggcactggtgctgttgggttgggtatcttcgagtagtcccacatcttcggcctccagcttcagctcatcagcgccgtttctcgcctctgctgtgtccgctcagcctccacttccagatcagtgcccagccctgtgtgaatgttctgaggccgcccgtactgtgaaatgtgtgaatcgtaacctaacagaggtgcccaccgatttgcccgcctatgttagaaacctatttcttacaggcaaccagcttgcagtcctccctgctggggccttcgcgaggcgcccccctctggcagaattggcggcccttaatctaagtgggtccaggctcgatgaggttagggctggcgccttcgaacacctgccttcgctgcgacagctggacttatctcacaacccactcgctgatctgagtcccttcgctttttctggctctaatgcatccgtcagtgcaccttcacctcttgtagaactgatactgaatcacattgtacctccagaggatgagcggcaaaaccgctctttcgagggtatggtcgtagcagcccttttagcaggcagagcactgcaaggtttaaggaggctggagttggcttccaatcatttcctttatctgccccgggatgtcctcgcacagctgcccagtctccgccacctggatctctctaacaattccctggttagtctgacctacgtctcttttaggaatctgacacatctagagagtttacacctggaggataacgcactaaaagttttgcacaatggcaccttagcagaactgcaggggctaccacatattagagtattcctggacaacaatccctgggtttgtgactgtcacatggcggacatggtgacatggctcaaagagactgaagtcgtccagggcaaggataggctcacatgtgcttatcctgagaaaatgcgaaatcgggtactgctggaactgaactcagcagacctggactgcgaccccatcctgcccccttcactccagaccagctatgtctttctgggaattgttttagccctcatcggagcaatcttcctcctggtcttatacctaaataggaaaggtattaaaaaatggatgcacaacatacgtgacgcatgcagggaccacatggaaggctaccactatcggtatgagatcaatgctgatcctaggctaaccaatttatcctccaatagtgacgtctag

SEQ ID NO: 209901 - DNA, 1263 bp, synthetic construct
  misc_feature 1..1263: note = Description of Artificial Sequence: Synthetic coding sequence
  source 1..1263: mol_type = other DNA
atgcccggcggctgcagccggggccccgccgccggcgacggccggctgaggttagctaggttggcattggtcctgttggggtgggtgagtagcagctcgcctactagctctgcttctagcttttcctcctctgctcctttcctggcctccgcagttagtgctcagcctcccctgcccgatcagtgccccgccctgtgcgaatgttccgaggccgcaagaaccgttaaatgcgttaacaggaatctgaccgaggtgcccactgatcttcccgcatacgtcagaaacctgtttttaactggcaatcagctggcggtcctgccagccggcgcatttgctaggagacccccactagcagaattagcagccttaaacctttctggtagtaggctggacgaagttagagccggcgccttcgagcacttgccaagtttaagacagcttgatttaagccataacccgctggcggacctgtcacctttcgccttctctggtagtaatgccagtgtgtcagccccgagcccgcttgtggagcttattctcaaccatatcgttccaccggaggacgaaaggcagaaccgtagttttgagggcatggtggtcgccgccctgctggcgggcagggctttgcagggacttcgcagactggagttggcatcaaaccatttcctgtatttaccgcgcgatgtcctcgcacagctgccctctcttagacatctggacctgagcaacaattcactggtttccctgacatatgtgtctttccgaaacctaacgcacctcgagtccttgcatctggaggataatgcactcaaggtcttgcataacggaaccctcgccgagttgcaaggactgccacatattcgggtgttcctcgataacaatccttgggtgtgcgattgccacatggccgatatggtcacatggctgaaggagactgaggtggtacagggtaaggaccgcctgacctgtgcctacccggaaaaaatgaggaaccgtgtgctcttggagcttaattccgccgacctcgactgcgaccccatcttacccccctccctgcagaccagttacgtgtttctggggattgtgctggcgctaatcggcgcgatattcctgcttgtcctgtatctgaacaggaaaggaattaagaagtggatgcacaatatccgggacgcctgcagggatcacatggagggttaccactatagatatgagatcaacgccgacccgcgcctgacgaacctttcgagcaattccgatgtttag

SEQ ID NO: 209902 - DNA, 1056 bp, synthetic construct
  misc_feature 1..1056: note = Description of Artificial Sequence: Synthetic coding sequence
  source 1..1056: mol_type = other DNA
atggccctgcccttccagaaggagctggagaagtacaagaacatcgatgaagacgaactactagggaagctgtccgaagaagaattgaagcagttagagaacgtccttgatgacctcgatcctgaatccgccatgttacctgcagggttccggcaaaaggaccaaacccagaaggctgcaaccgggccattcgacagagagcacctcctgatgtacttggagaaagaggcacttgagcagaaggacagggaggatttcgtcccatttactggagagaaaaagggtcgggtgtttatcccaaaggaaaaacctattgagactagaaaggaggaaaaagtgacgctggatccagagctggaggaggcactagcttctgcttccgacacagaactatacgacctagccgccgtgctcggagtgcacaatctactgaataatccaaaattcgatgaagagactgcaaacaataaggggggaaaggggcctgtccggaacgtagtgaagggggaaaaagttaagccggtatttgaagagccacccaacccaaccaacgtggagattagtctgcaacagatgaaagccaacgatcctagcctccaggaagtaaacttaaataatattaagaatattccgattcccacgttgcgcgaatttgcgaaagctctggaaaccaacacgcacgtcaagaagttcagcttggccgcaacccgctcgaacgatcccgtagccatagcgtttgccgacatgctgaaggtgaacaagacactgacctcattgaatattgaatctaatttcattactggcacgggtattcttgccctggtggaagctctaaaagagaatgacacactgactgagattaagatcgacaaccaacgccaacagcttggtaccgcagtggaaatggagatagcccaaatgctggaagagaattctcgtatcctcaaattcgggtaccagtttactaagcaggggccccgcacacgagtggccgccgcgattaccaaaaataacgatctcgtgcgcaaaaaaagagttgaggctgatcggcggtag

SEQ ID NO: 209903 - DNA, 948 bp, synthetic construct
  misc_feature 1..948: note = Description of Artificial Sequence: Synthetic coding sequence
  source 1..948: mol_type = other DNA
atggccctgcccttccagaaggagctggagaagtacaagaacatcgacgaggatgagcttcttggaaaactctcagaagaagaacttaagcaactggagaacgtactggatgatttagatccagaaagcgccatgctccccgccgggttcagacaaaaggatcagacacaaaaggcagccaccggtccatttgatcgcgagcacctcctcatgtatctggagaaggaagctcttgagcaaaaagatcgggaggattttgtgccgttcacaggcgaaaagaaaggcagggtgtttatccccaaggagaaacctattgagactcggaaagaggagaaggtaacactggaccctgaattggaagaggctttggcttccgcatctgatacagaactatacgatctggctgccgtgctgggcgttcacaacctcctgaacaatcccaagttcgacgaggaaaccgcaaataacaaaggcggcaaaggccctgtacggaacgttgttaagggggagaaggttaaacccgtgttcgaggaacccccaaacccaaccaatgttgaaatctctctgcagcagatgaaggccaatgacccaagcctgcaggaggtaaacctcaacaacataaaagcattcgcagatatgttgaaggtgaataagacgctaaccagcctgaatatcgagtccaactttattacaggcactggtatcttagccctcgtagaagcgcttaaggagaacgatacactaacagagatcaagatcgacaaccagagacagcaactgggaacagcagtcgagatggagatcgcgcagatgctggaggaaaacagccgaatcctgaagtttgggtaccaatttaccaagcaggggcccagaacacgagtcgcagctgccatcacaaagaacaacgacctggtcaggaagaaacgagttgaggctgaccggcgctag

SEQ ID NO: 209904 - DNA, 1059 bp, synthetic construct
  misc_feature 1..1059: note = Description of Artificial Sequence: Synthetic coding sequence
  source 1..1059: mol_type = other DNA
atggccctgcccttccggaaggacctggagaagtacaaggacctggacgaggacgaattgctgggaaacctatccgagacagagctcaaacagctggagactgttctagatgatctggatcccgagaacgcactcctgccggcggggtttcggcaaaaaaatcagacatccaagtctacaactgggcccttcgaccgagaacacttactgtcttacctggaaaaggaggctcttgagcacaaggaccgcgaggattacgtgccctacaccggcgagaagaagggcaaaatctttatcccgaagcagaagcccgtacagaccttcactgaggaaaaggtgagtcttgacccggaactcgaggaggccctgacttccgcctcggataccgaactgtgcgatctggctgccattttaggcatgcataacctgattaccaatacaaagttctgcaatatcatgggatctagcaatggagtggatcaggagcacttcagtaatgttgtcaaaggcgagaaaattctgccagtttttgacgagccaccaaacccaacaaacgtggaggagagcctgaaacgcaccaaggagaacgacgcccaccttgtggaagtcaacctcaacaacatcaagaatatacccatccctacactaaaggatttcgctaaagcactggaaacgaacacacacgtgaagtgtttcagcctcgcagccaccagaagtaacgaccctgtggcaacagcttttgcagaaatgttgaaggtgaacaagaccttaaagtcactgaacgttgaatccaacttcattactggcgttggaattctggcgctgatcgacgctctgagagataacgagacattagccgaactgaaaatcgacaatcaacgccaacagcttggaacggccgttgaactggagatggctaaaatgttggaagaaaacacaaacatcctgaaatttgggtaccaattcacccagcagggtcctaggacccgcgctgccaatgccattacaaagaacaacgatctggttagaaaaaggcgggtggagggggaccaccagtag

SEQ ID NO: 209905 - DNA, 1059 bp, synthetic construct
  misc_feature 1..1059: note = Description of Artificial Sequence: Synthetic coding sequence
  source 1..1059: mol_type = other DNA
atggccctgcccttccggaaggacctggagaagtacaaggacctggatgaggatgagctcctgggaaacttatctgaaactgagctcaaacagctcgagaccgtgctggacgatctggatcctgaaaacgcacttctccccgccggctttcgtcagaaaaaccagacctcaaaatcaacaaccggcccttttgatagagaacatctgttgtcctatctggaaaaggaggctctcgagcacaaggaccgtgaagattacgtgccgtatacaggtgaaaagaaaggaaaaatctttattcctaagcagaagccagtacagacattcactgaggaaaaagtgtccctagacccggagctggaagaagccttgacgtctgccagcgacacggagctgtgcgatctggcggctatactgggcatgcacaatctgatcacaaacactaaattctgcaatatcatggggtcttcaaacggcgttgaccaagaacacttcagcaacgtagtgaagggcgagaaaattctacctgtgttcgatgagccccctaacccaacaaacgtagaggagagcttaaaaagaacaaaggaaaacgacgcccacctagtagaggtgaacctgaataacatcaaaaatattcccatacctaccttaaaggatttcgccaaggcactggagaccaacacccatgttaaatgcttcagtttggccgccactcgaagtaatgaccccgtggctactgcattcgcagaaatgctgaaagtcaacaaaactctgaagtctctgaatgtggagagtaacttcattacaggggttggtatcctcgctttaattgatgctctgagggataacgagacactggccgagctgaaaatcgacaatcagcggcagcagctaggaactgccgtggaactggaaatggctaagatgttggaggaaaacaccaacatcttgaagttcggataccaatttactcagcagggaccacgcacacgtgcagctaacgccatcacaaaaaacaatgatttggtcaggaaacgcagagtggaaggcgatcaccaatag

SEQ ID NO: 209906 - DNA, 102 bp, synthetic construct
  misc_feature 1..102: note = Description of Artificial Sequence: Synthetic coding sequence
  source 1..102: mol_type = other DNA
atggccctgcccttccggaaggacctggagaagtacaaggacctggacgaagacgaactgctaggtaatctgtctgaaactgaactcaagcagctggagtag

SEQ ID NO: 209907 - DNA, 1038 bp, synthetic construct
  misc_feature 1..1038: note = Description of Artificial Sequence: Synthetic coding sequence
  source 1..1038: mol_type = other DNA
atgagcagctaccagaaggagctggagaagtaccgggacatcgacgaggacgagatcctgcggactctgtcaccagaagaactggagcaactagattgcgagctgcaagaaatggatcctgaaaacatgttgctgcccgccggcttacggcagcgcgatcagacaaagaaaagtcccactgggcccctggaccgagaggctttgctgcaatatcttgagcagcaggcactcgaggttaaggaaagagacgacctggtcccgtttaccggcgagaaaaaggggaaaccctacatccagccaaagcgcgagataccagccgaggagcaaattaccctggaacctgagttggaagaagctttggctcatgctaccgatgccgaaatgtgcgacattgccgccattctcgatatgtataccttaatgtctaacaagcagtattacgacgccctctgtagtggtgaaatttgtaacacagagggtatctccagcgtcgtgcagcctgacaagtataaacccgtgcccgacgagcccccgaatccaacaaacattgaagaaatactaaaacgggtaaggagtaacgataaggaattagaagaggtgaacctgaacaatatccaggacatccctattcccatgctgtccgagttgtgcgaggcaatgaaggccaatacatatgtaagatctttctctcttgtcgcgacccgctctggcgatcctatcgccaatgccgtcgcggacatgctgcgggagaatcgtagtttgcagagtttgaacatagagtcaaatttcatcagctctactggactcatggccgtgctgaaggccgtcagggaaaacgcaacactgactgagctgcgggttgacaaccagagacaatggcccggagacgccgtggaaatggaaatggcgaccgtgctggagcagtgccccagcatcgtgcgctttgggtaccacttcacccagcaaggaccccgcgcccgagctgctcaggccatgacgcggaataacgagctgaggaggcagcagaagaagcgatag

SEQ ID NO: 209908 - DNA, 831 bp, synthetic construct
  misc_feature 1..831: note = Description of Artificial Sequence: Synthetic coding sequence
  source 1..831: mol_type = other DNA
atgagcagctaccagaaggagctggagaagtaccgggacatcgacgaggacgagatcctgagaactctgtctccagaagaactcgagcagttggattgcgaactgcaggagatggatcccgagaatatgctgctaccggccggactgcggcagcgtgatcagaccaaaaagtcgcccactggccccctggaccgcgaggctctcctgcaatacctggaacaacaagctctcgaggttaaagaacgtgacgatcttgtacctttcacaggagagaaaaaaggggtggtgcaacctgacaagtataaacctgtgccggacgaacccccaaatcctacaaatatcgaggaaattttaaaaagggtgaggtctaatgataaagaactcgaggaagttaatcttaataacatacaagacatccctattcctatgttgtctgagttgtgtgaagctatgaaggccaatacatatgttagaagctttagcctcgtggccaccaggtcaggcgacccaatcgccaacgctgtcgctgatatgctccgcgaaaacaggagcctccagtcccttaatatcgagtcaaactttatcagcagcaccgggctgatggcggtgttgaaagcagtgagggagaacgccactttgaccgagcttagagtggataaccagcggcagtggccaggagacgcagttgagatggaaatggccactgtcctggagcagtgtccaagcattgtgagatttggctaccactttacccagcagggccctagggccagagccgcccaggccatgactcgaaacaatgagttacgacggcagcagaagaagcgatag

SEQ ID NO: 209909 - DNA, 429 bp, synthetic construct
  misc_feature 1..429: note = Description of Artificial Sequence: Synthetic coding sequence
  source 1..429: mol_type = other DNA
atgagcagctaccagaaggagctggagaagtaccgggacatcgacgaagacgagatcctccgaaccctgtctccggaagagctggagcagcttgattgcgaactgcaggaaatggaccccgagaatatgcttctgccggccggtctgcgccagcgcgatcagactaagaagagccctaccggaccgcttgacagggaggctctgctgcagtacctggaacaacaggctctggaagtgaaggaaagagacgatcttgtgccttttacaggagagaaaaaagggaagccctacattcagcccaaaagagagatccctgcagaggaacaaattacactagaacccgagctggaggaagccctggcccatgctaccgacgctgagatgtgtgacattgcggctattctagacatgtacaccctgatgagctag

SEQ ID NO: 209910 - DNA, 855 bp, synthetic construct
  misc_feature 1..855: note = Description of Artificial Sequence: Synthetic coding sequence
  source 1..855: mol_type = other DNA
atggacgccatcaagaagaagatgcagatgctgaagctggacaaggaaaacgcccttgatagggctgagcaggcagaagccgataagaaagctgcggaggacagaagtaagcagctcgaggaggacattgctgctaaggagaagctgctccgcgtgagtgaagacgagcgggacagggtgctcgaggaactgcacaaggccgaagattcactgttagctgctgaagaggcagctgccaaggccgaagctgacgtcgcatccttgaatagaagaatccagctggttgaggaagagctggaccgcgcccaggaacggctggcaacggcacttcagaaactagaggaggccgagaaagcagcggacgaatccgagcgcggaatgaaggttatcgagtcccgagcgcaaaaggacgaagagaaaatggagatccaagagatccagctaaaggaagcgaaacacattgccgaggacgccgatcgaaagtacgaggaggtcgctcgaaagctcgtaatcattgaatctgatcttgagcgcgcagaggaaagagctgagctgagcgaaggcaagtgcgctgagttagaggaggagctgaagacagttacaaacaatctgaagtccctggaggcccaggccgaaaagtactcacagaaggaagatcgctatgaagaggaaatcaaagttttgtctgataagctcaaggaggccgagaccagggcagaatttgcagagcggagtgtgacgaagctcgagaagtccatagacgaccttgaagaaaaggtggcgcatgcgaaagaagagaacctctccatgcatcaaatgctggaccagactctgctcgaactcaacaacatgtag

SEQ ID NO: 209911 - DNA, 855 bp, synthetic construct
  misc_feature 1..855: note = Description of Artificial Sequence: Synthetic coding sequence
  source 1..855: mol_type = other DNA
atggacgccatcaagaagaagatgcagatgctgaagctggacaaggagaacgcgctggaccgggccgagcaggccgaagccgacaaaaaagccgcggaggaccggtctaaacaactggaagacgaactggtgtccctccagaaaaagctgaaaggcacagaggatgagttggataaatactcagaggcattgaaggatgcacaggagaagctcgagctcgctgaaaagaaagccaccgacgctgaggccgatgtggcaagtctgaacagacgtattcaactggtggaggaagagttggaccgggctcaggaacgactggctaccgcacttcaaaaacttgaagaggccgagaaagccgcagatgaatcggaaaggggcatgaaggtgatcgagtctcgtgcccagaaagacgaggaaaaaatggagattcaggagatccagcttaaagaggcaaaacacatcgccgaagacgccgacaggaagtacgaagaggtggcacggaagctggtcataatcgagagtgacctggaacgtgcagaggaaagggccgaattgagcgaggggcaagtgaggcagctggaagagcagctgagaattatggaccaaaccctgaaggccctcatggctgcagaggataaatattctcaaaaggaagaccgctacgaggaggaaatcaaggtcctgagcgataagctcaaggaagctgagacacgcgccgaattcgcggagagaagcgtgaccaagcttgaaaagtctatcgatgacctggaagacgaactttacgctcaaaaactaaaatacaaagctatatccgaagagctggaccacgccctgaacgatatgaccagcatgtag

SEQ ID NO: 209912 - DNA, 738 bp, synthetic construct
  misc_feature 1..738: note = Description of Artificial Sequence: Synthetic coding sequence
  source 1..738: mol_type = other DNA
atggccggcagcagcagcctggaggccgtgcggcggaagatccggagtctgcaggaacaggcagatgctgctgaggagcgtgccggcactcttcagagagagttggaccacgagaggaaactccgcgagacagctgaggctgacgtcgctagcctgaatcgacgaattcagctcgttgaggaggagttggatagagcacaggagcgactcgcgactgcattacaaaaactggaagaggccgagaaggctgctgatgagagcgaacgcggcatgaaagtgattgagagccgcgctcagaaagacgaggagaagatggagatccaagagatacagctgaaagaagccaagcacatcgcagaggatgcggaccgaaaatatgaggaggtggccagaaagctggtgattatcgaatctgatctggagcgcgccgaggaacgcgctgaactaagcgagggtaaatgcgctgaacttgaagaagaactaaaaaccgtaaccaacaacctgaaatctctggaagcgcaagccgagaaatacagccaaaaagaagatcgatatgaggaggagattaaagtgctctctgacaaactgaaggaggccgagaccagggcggagttcgcagaacggtctgtaacgaaactagaaaaatctattgacgacctggaagatcagctgtaccagcaactcgagcaaaaccggcgactcacgaatgaactgaaactggctctgaatgaggattag

SEQ ID NO: 209913 - DNA, 981 bp, synthetic construct
  misc_feature 1..981: note = Description of Artificial Sequence: Synthetic coding sequence
  source 1..981: mol_type = other DNA
atggacgccatcaagaagaagatgcagatgctgaagctggacaaggaaaacgctctcgatagggcggaacaggcagaggcggacaaaaaggccgccgaggaccggtcaaagcagctagaagaggacatcgccgcaaaggagaaacttctgagggtatccgaagatgaaagggatcgtgtcctggaggaactccataaagcggaagacagtcttctcgcggcagaggaagccgccgcaaagctcgaagatgaacttgtgtctcttcagaagaagctgaaaggaactgaagatgaacttgataaatacagtgaagctctcaaggatgctcaagagaaattggagctggcggaaaagaaggctaccgatgccgaggccgacgtggcatccctgaacaggcggattcagctggtggaggaggagctggacagagcgcaagagagactcgccactgcccttcagaagctcgaggaagcagagaaagctgcagatgaatcagagagagggatgaaggtgattgaatcaagagcccaaaaagacgaagagaaaatggagattcaggagatacagctaaaggaagccaaacacatcgctgaggacgctgatagaaagtatgaggaagtggcacggaaactggtgattattgagtcagacctggagagggccgaggaacgagccgaactcagcgagggcaagtgcgccgagctggaagaggaattgaagacggtgaccaacaatcttaagtccctggaagctcaggcagaaaagtacagccagaaagaggataggtacgaagaggaaattaaggttctgtctgataagctcaaggaggccgagaccagggcagagttcgccgagagaagcgtcaccaaattagagaagtccatagatgatctggaggagaaagtggctcacgctaaggaggaaaatctgagtatgcaccagatgctggaccagacccttctggagcttaataacatgtag

SEQ ID NO: 209914 - DNA, 855 bp, synthetic construct
  misc_feature 1..855: note = Description of Artificial Sequence: Synthetic coding sequence
  source 1..855: mol_type = other DNA
atggacgccatcaagaagaagatgcagatgctgaagctggacaaggagaatgctctcgatcgagcagagcaggccgaggccgataagaaggccgcagaggatagatctaagcagctggaggatgagcttgtgagtctccagaagaaattaaagggaaccgaggatgaactcgataagtactcagaagcgcttaaagatgcccaggaaaagttagagctggcagaaaagaaagcaacggatgccgaagcagatgtggcatccctcaaccgaagaatacagctcgttgaggaggaactggatcgtgcacaagagagactggccacagcgctgcaaaagctcgaagaggccgagaaagccgccgacgagagtgaacgaggcatgaaagtgattgagtctcgggctcagaaagacgaagagaagatggagatccaggaaatccaactcaaagaggctaaacacatcgcagaggacgccgatcgtaaatatgaggaggtcgctaggaaactggtcatcatcgaatcagacctggaacgcgcagaggagagagcggaactttccgaaggtcaagttcggcagttagaagagcagctcaggatcatggaccagaccctcaaggcgctgatggcggcagaggacaaatactcccagaaggaggatagatacgaagaggaaatcaaggtcctttccgacaagttaaaggaggccgagacccgcgccgaatttgctgaaaggtccgttacaaagttggagaagtccattgacgacctggaggagaaggtcgcccatgcaaaggaggaaaacttgagtatgcaccaaatgctggatcagaccttactggaattaaacaacatgtag

SEQ ID NO: 209915 - DNA, 855 bp, synthetic construct
  misc_feature 1..855: note = Description of Artificial Sequence: Synthetic coding sequence
  source 1..855: mol_type = other DNA
atggacgccatcaagaagaagatgcagatgctgaagctggacaaggagaacgccctcgatcgggcggagcaggctgaggctgataagaaggcagccgaggatcgaagcaaacagctggaggacgaactggtctcacttcagaagaaactgaagggcacagaggatgagcttgacaagtacagtgaggcgctgaaggacgctcaggagaagcttgaactcgccgaaaaaaaggcgactgacgctgaggccgatgttgctagcctgaatcggaggattcagcttgtcgaagaagaactcgaccgcgcccaggagcgtttagctacagcacttcaaaagttggaagaagccgaaaaagctgcggatgaatccgaacgcggtatgaaggtgatcgagagccgggcgcaaaaggacgaggaaaaaatggagatccaggagatccaactcaaggaggctaaacacattgctgaagatgccgatcggaagtacgaagaagtggctcgcaaactcgtgatcatcgagtctgacctggagcgcgcggaagagcgggccgagctcagcgaaggaaaatgcgccgaactggaggaagagttgaagaccgtcaccaataacctgaagtccctcgaggctcaggcggaaaagtatagtcagaaagaagacaggtacgaggaggagattaaggtccttagcgataagttgaaggaggccgagacacgcgcggaattcgccgagcggagcgtaactaaattggagaaatctatcgacgacttagaagacgaactgtatgcccagaaacttaagtataaggcgatcagcgaggaactcgaccatgcgctgaatgacatgacctctatttag

SEQ ID NO: 209916 - DNA, 855 bp, synthetic construct
  misc_feature 1..855: note = Description of Artificial Sequence: Synthetic coding sequence
  source 1..855: mol_type = other DNA
atggacgccatcaagaagaagatgcagatgctgaagctggacaaggagaacgccttagacagggccgaacaggccgaggcggataaaaaagccgccgaggataggagtaagcagcttgaggaagacatcgcagccaaagaaaaactcctccgcgtgtctgaggatgagcgtgacagggtcctggaagagttgcacaaggccgaagacagcctgctggcagcagaagaggcagctgccaaagccgaggccgatgttgcttctcttaaccgcagaattcaactggtagaggaagagctggaccgcgctcaagaaaggttggctaccgctcttcagaaactggaagaagctgaaaaggctgctgacgagagcgaacggggcatgaaagtgatagagagccgggcccagaaggacgaggaaaagatggagatccaagaaatccagcttaaagaggcaaaacacattgctgaagatgcagatcggaaatatgaggaagtagccagaaaattagtgatcatcgaaagtgatctggaaagggcagaagagcgtgccgaactgtctgaaggtcaggtgcgtcagctagaagaacagctgagaatcatggaccagacactcaaggcactgatggcagccgaggataaatactctcagaaggaggacaggtacgaagaggagatcaaggtgctgtctgacaaactgaaagaagccgagactagagcggaattcgccgagaggagtgtcaccaaactggaaaaatcaatagacgacctcgaggaaaaggtcgcacatgccaaagaggagaatttgtcgatgcaccagatgttggaccagactttactggaactgaacaatatgtag

SEQ ID NO: 209917 - DNA, 855 bp, synthetic construct
  misc_feature 1..855: note = Description of Artificial Sequence: Synthetic coding sequence
  source 1..855: mol_type = other DNA
atggacgccatcaagaagaagatgcagatgctgaagctggacaaggaaaacgccttagaccgcgccgagcaagccgaggccgataaaaaagctgccgaagatcggtcaaagcagctggaagatgaacttgtcagtttacagaaaaagctaaagggaactgaggatgagctcgacaaatattcggaggccctaaaggatgctcaggaaaaactcgagcttgccgagaagaaagcgaccgacgctgaggccgacgtggcctctctgaacaggaggattcaattggtcgaagaagagctggatcgggctcaggagaggctggcaacggctcttcagaaattggaagaagccgaaaaagctgctgatgagtcggaaagagggatgaaggtcattgagtcaagggcccagaaagatgaagagaagatggagatccaggaaatccagctgaaggaggctaagcatatcgccgaagacgcggaccggaagtatgaagaggtggctcgtaaactggtgatcattgagagcgatctggaaagagctgaggaacgcgcagagctctccgagggcaaatgcgcggaactcgaagaggagctgaaaactgtaaccaacaatctaaagtctctggaagcccaggctgaaaaatatagtcagaaagaagacaggtacgaagaggagattaaggtgctgtcagacaagttgaaggaggcagaaacgagggccgagttcgctgagaggagtgtgacgaaactggagaagagtatcgatgatttggaggaaaaggttgcccacgccaaggaagagaacttaagtatgcatcagatgttggatcagaccctgcttgagcttaataacatgtag

SEQ ID NO: 209918 - DNA, 798 bp, synthetic construct
  misc_feature 1..798: note = Description of Artificial Sequence: Synthetic coding sequence
  source 1..798: mol_type = other DNA
tgacgggccgagcaggccgaggccgacaagaaggccgccgaggaccggagcaagcagctggaggatgagctggtttccctgcagaaaaagctcaaagggactgaggatgagctggacaagtattctgaggccctcaaagacgcacaggaaaagctcgaactggcagaaaagaaagctacagacgctgaggcggatgtggcgagtctgaaccggcgtatccagctcgtggaagaagagttagatagggcccaggagcgcctggcaacagcactgcaaaaactcgaagaagcagaaaaggccgcggacgaaagcgagaggggaatgaaggtgatcgaatcacgagcccagaaagacgaggaaaagatggaaatccaggagatccaactcaaagaggcaaagcacatagcagaagacgccgacaggaaatatgaagaggttgctagaaagcttgtcattatcgagtcggaccttgagcgtgccgaagagcgagcagagctgtccgaaggtaagtgtgctgaactggaggaagagctcaagaccgttacaaacaatcttaagtcattggaagcacaggccgaaaaatattctcagaaggaagacaggtatgaggaagagataaaggtgttatcggataaattgaaggaggctgagacgcgggcagagtttgctgagagatctgtgaccaaactagagaagagtatagatgatctggaagatgagctgtacgcacaaaaactgaagtacaaggcgataagcgaagaactagaccatgctttaaatgacatgacgtccatgtag

SEQ ID NO: 209919 - DNA, 855 bp, synthetic construct
  misc_feature 1..855: note = Description of Artificial Sequence: Synthetic coding sequence
  source 1..855: mol_type = other DNA
atggacgccatcaagaagaagatgcagatgctgaagctggacaaggagaacgcaattgatcgcgccgaacaggccgaggcagacaagaagcaggccgaagataggtgtaagcaattagaagaagaacagcaagcactgcagaagaagctcaagggtacagaggatgaggtggagaaatattcagagtccgttaaggaagcccaagaaaagctggagcaggccgagaaaaaggcaacagatgcggaagcagatgtagcatcgctgaaccgccgcattcagcttgtcgaagaggagctcgatcgcgcacaggaaaggctggcaaccgcgctacagaaactggaagaagccgaaaaggccgcagacgagtcagaacgggggatgaaggtcatcgaaaatagagccatgaaagacgaggaaaagatggaactgcaagagatgcagctgaaagaagctaaacatatagcagaggactcagacaggaagtatgaggaagtggccagaaagctggttatcttggagggagagttagagcgtagtgaggaaagggccgaagtcgcagagtccaagtgcggcgacctggaggaggaactgaagattgtgaccaataacctgaagtcattagaagcacaggccgacaagtattccaccaaggaggataagtatgaggaggagatcaaactgctggaggaaaagctcaaggaggccgagactcgggccgagtttgccgaaaggagcgtcgctaaactggagaagactattgatgatttggaagagaccttagcttctgccaaagaagagaatgtcgagatccaccagacgctcgaccagaccctgctggaactgaacaacctctag

SEQ ID NO: 209920 - DNA, 855 bp, synthetic construct
  misc_feature 1..855: note = Description of Artificial Sequence: Synthetic coding sequence
  source 1..855: mol_type = other DNA
atggacgccatcaagaagaagatgcagatgctgaagctggacaaggaaaacgcaattgaccgggccgagcaggccgaagctgataaaaagcaggcagaagataggtgcaagcagctagaggaagagcagcaggcgcttcaaaagaaactcaaaggaacggaggatgaggtcgagaagtatagcgagtccgtgaaagaagcacaagaaaaactcgaacaggcagagaagaaagcaaccgacgctgaggccgacgttgcgagcttgaatagacggatccagttagtagaggaggaactggaccgggcccaagagcgactggcaacagctctgcaaaagttagaggaggcggaaaaggccgctgacgagagcgaacgtggaatgaaagtgattgaaaaccgggctatgaaggacgaggagaaaatggagctgcaggagatgcagttgaaggaggcaaagcacattgccgaagatagtgatcggaaatatgaggaagtggcaagaaagctcgtgatacttgaaggagaactggagagatctgaggaacgcgccgaagtggcagaaagcaagtgcggcgacctagaggaggaattgaagattgtaaccaataatctcaaatccctcgaggctcaggccgacaagtacagcaccaaagaggacaaatatgaggaggagataaagctcctcgaggagaagctgaaagaagctgagacacgcgccgagtttgcagagcgaagtgttgcaaagcttgagaaaaccatcgatgacctggaggacgaggtgtatgcccagaagatgaagtataaagccatttcagaagagctcgacaatgccctaaacgacattactagtctctag

SEQ ID NO: 209921 - DNA, 855 bp, synthetic construct
  misc_feature 1..855: note = Description of Artificial Sequence: Synthetic coding sequence
  source 1..855: mol_type = other DNA
atggacgccatcaagaagaagatgcagatgctgaagctggacaaggaaaatgcaattgacagagctgagcaggcagaggctgacaagaaacaggccgaagaccggtgcaaacagctcgaagaagagcagcaggcgctgcagaagaagcttaagggaactgaggatgaggttgagaaatattctgagagtgttaaggaggcccaggagaagcttgagcaggctgagaagaaagctacggacgccgaagctgacgtggccagtttgaacagacgtatccagctagtcgaagaggaacttgatcgagcccaggagagactggccaccgctttacaaaaactcgaagaggccgaaaaagctgcagacgaatcagagcgtggtatgaaggtgatagaaaatagggcgatgaaggacgaagagaagatggaattacaggagatgcaattgaaagaggccaaacatatagcagaagacagcgataggaagtacgaggaggtcgctagaaagcttgtgatactggaaggggaactagaacggagcgaggagcgagcagaagtggccgagtccagagcgcgacagcttgaagaagaattgaggactatggaccaagctctgaagtcccttatggccagtgaggaggaatattcaaccaaggaggacaaatacgaggaggagataaaactgctggaagaaaagctgaaggaggcagaaacccgggcggagtttgcagaaaggtctgtggcaaaactcgagaagacaatcgacgacctggaggagacactggctagtgctaaggaggagaacgtcgagatccaccaaacactggaccaaactttactggagctgaataatttatag

SEQ ID NO: 209922 - DNA, 969 bp, synthetic construct
  misc_feature 1..969: note = Description of Artificial Sequence: Synthetic coding sequence
  source 1..969: mol_type = other DNA
atggacgccatcaagaagaagatgcagatgctgaagctggacaaggagaacgccatagaccgtgctgagcaggctgaggccgataaaaagcaggccgaggaccgatgcaaacaacttgaggaggaacagcaagctctccagaaaaaactcaaaggaaccgaggatgaagtggaaaaatattcagaatctgtgaaggaggcgcaggaaaagcttgagcaggcggagaaaaaagccacagacgcggaggcggacgtggcctcccttaaccggagaattcagttggtcgaagaggaattggatagggcccaggagcggctcgctacagccctgcagaaattggaggaagcagagaaagccgccgatgagtctgagagaggtatgaaggtcatcgagaatcgagctatgaaggatgaggagaagatggagctgcaggaaatgcaactgaaagaggctaagcatattgccgaagactcagaccggaaatacgaagaggtagctaggaagctggtcatcctggaaggtgagttggagcgctctgaagagcgggccgaggtggcagagagcaagtgtggagacctggaggaagagttgaagatcgttacgaacaatctgaagtccctcgaagctcaggcagataaatatagcacaaaggaagataagtacgaggaggaaatcaagctgctggaggaaaagctgaaggaagccgaaactagagccgagttcgccgagcggtccgttgccaaactggagaaaacgatcgacgacctagaggagagtacatctatagcaacaacagaacattggttcacgcccgacacgctagcattgaccgatacacccagtccatgtacagagcccacacacaaaaccccatggcccactctgaagccattgtgtaccgggacaccttggctgtccctatcggattctcctttgcacgtcggcacctgtggtccaataaagccttag

SEQ ID NO: 209923 - DNA, 858 bp, synthetic construct
  misc_feature 1..858: note = Description of Artificial Sequence: Synthetic coding sequence
  source 1..858: mol_type = other DNA
atgatggaggccatcaagaagaagatgcagatgctgaagctggacaaagagaatgctctagatcgggccgagcaggccgaggccgaacagaagcaggccgaggagagatccaagcagctggaagacgagctggccgcaatgcaaaaaaagctcaagggaaccgaagacgagttggacaagtattccgaggcacttaaggatgcccaggaaaaactggagctagccgagaaaaaagccgcagacgctgaggccgaagtggcctcactaaatagacgtattcagctggtagaagaggaattggaccgagcacaagaacgtctagcaacagccctgcagaagttggaagaggcagagaaggcggccgatgagagcgagcgcggaatgaaggtcattgaaaatcgcgccctgaaagacgaagagaaaatggagcttcaggaaatccaacttaaagaggccaaacacattgctgaggaggccgatcggaagtacgaagaggttgcaaggaagctggtgatcattgagggagacctggaacgcaccgaagagagagctgagcttgcagagagccggtgccgcgagatggatgagcagattcggttgatggatcagaacctgaagtgcctcagcgccgctgaagaaaagtacagccagaaggaggacaaatatgaggaagagatcaaaattctcacagacaagcttaaggaggcagagaccagggcagagttcgcagagcgaagcgtcgctaagttagaaaagactatcgacgatttggaggataaacttaagtgtacaaaggaggagcacttatgcacccaacggatgcttgaccaaacactgctcgatttgaatgagatgtag

SEQ ID NO: 209924 - DNA, 744 bp, synthetic construct
  misc_feature 1..744: note = Description of Artificial Sequence: Synthetic coding sequence
  source 1..744: mol_type = other DNA
atggccggcatcaccaccatcgaggccgtgaagcggaagatccaggtcctgcaacagcaagccgacgatgctgaggagcgcgcagagaggctacaaagagaagttgaaggggagcgaagggccagggagcaggccgaggcagaggtggccagtttgaacagacggattcagttagtggaggaagaactcgatcgcgctcaggagaggctggctacagctctgcaaaagctcgaagaggcggagaaggctgctgacgagagtgagagaggcatgaaagtgatagagaacagggcgctaaaggacgaggagaaaatggaattacaggagatacagcttaaggaagccaagcatatcgctgaggaggcggaccgcaagtacgaggaggtggcccggaagttagtgatcattgagggcgacctcgaacgcaccgaagaacgagctgagctggcagaatccaagtgtagcgaactggaggaggagttaaagaacgtcactaacaacctgaaatctcttgaggcccaagcagagaagtacagccaaaaggaagataagtacgaagaagaaattaaaattctgacagacaagcttaaggaagctgagactcgcgccgaatttgctgaaaggtccgtggcaaaactggagaagactatcgacgatctcgaagaacgcttatattcgcagctcgagaggaatcgtttgttgagcaacgagctgaagctgaccttgcacgatctctgcgattag

SEQ ID NO: 209925 - DNA, 747 bp, synthetic construct
  misc_feature 1..747: note = Description of Artificial Sequence: Synthetic coding sequence
  source 1..747: mol_type = other DNA
atggccggcatcaccaccatcgaggccgtgaagcggaagatccaggtcttgcagcagcaggcagatgacgccgaggagcgggccgagcgcctccagagggaggttgagggggaacgtagggcaagggaacaagccgaagccgaggtggccagccttaaccgccgtatccagctggtggaggaggaactggacagagcccaggagcggctcgccacagccctgcagaagctggaagaagccgaaaaggccgctgatgaatcagaacgcgggatgaaggtgatagagaatagagcactgaaggacgaggaaaagatggaactccaggaaatccagctgaaggaggcaaagcatattgctgaggaagctgaccgtaagtacgaggaggtggcccgaaaactggtcattatcgagggagatctggaacgcaccgaagagagagctgagttggctgaatcccgttgtagagagatggatgagcagattcgattgatggaccagaacctgaaatgcctctctgccgctgaggagaaatactcccagaaggaagataaatatgaggaggaaatcaagattttgaccgacaagctgaaagaggccgagaccagagcggagtttgccgagagaagcgtggccaaactggaaaagaccatagatgatctggaggacgaactttacgcccagaaactaaagtataaggccatatctgaggagctcgaccacgcactaaacgatatgaccagcatctag

SEQ ID NO: 209926 - DNA, 747 bp, synthetic construct
  misc_feature 1..747: note = Description of Artificial Sequence: Synthetic coding sequence
  source 1..747: mol_type = other DNA
atggccggcatcaccaccatcgaggccgtgaagcggaagatccaggttcttcagcagcaggcagacgatgctgaggagagagcggagcggcttcagcgcgaggtagagggggagcgtcgcgcccgagaacaggccgaagctgaggtggctagtttaaatagacggatacaattggtcgaggaagagttggatcgggcacaggagcggttggcgacagctctccagaaactcgaggaggcagaaaaggccgctgatgaaagcgaacgcggtatgaaagtcatcgagaacagggccctgaaggacgaagagaagatggagttgcaggagattcagctgaaggaagctaagcatatcgccgaggaggcagatcgtaagtatgaggaagtggccagaaagctcgtaataatcgagggggacctagagcggactgaggaacgcgccgaactggccgaatcgaagtgctctgagctggaggaggagctgaaaaacgtgactaacaatctgaagagcctcgaagcccaggcggaaaaatactctcagaaagaagacaaatatgaggaagagattaagattctcaccgacaagttgaaggaggctgaaacaagggccgagttcgcggagcgttctgtggctaagttagagaagactattgatgacctggaagacaagctcaagtgtacgaaagaggagcacctatgcacccagcggatgctggatcagacgctgttagatttgaatgaaatgtag

SEQ ID NO: 209927 - DNA, 675 bp, synthetic construct
  misc_feature 1..675: note = Description of Artificial Sequence: Synthetic coding sequence
  source 1..675: mol_type = other DNA
atggccggcatcaccaccatcgaggccgtgaagcggaagatccaggtgctgcagcagcaggccgacgacgcagaggaaagggccgagaggctgcagcgcgaagtagaaggcgagcgcagggccagagaacagagactggccacggcgttgcagaaactcgaagaggccgagaaggcggcggatgagtccgaaaggggcatgaaggtgatcgaaaaccgtgccctcaaggacgaagagaaaatggaactccaggagatccagttgaaagaggccaagcatatagccgaggaagccgatcgcaagtatgaggaagtggccaggaagttagtgatcatcgagggggacctggaacgaactgaggaaagagcggaattggctgaaagccgctgtagagaaatggacgagcagattagactcatggatcagaacctcaagtgccttagcgccgctgaggaaaagtactcacagaaggaggataaatacgaggaagaaatcaagatactgactgacaagctcaaggaggccgagactagggccgagtttgcggagaggtctgtggcaaagctggaaaagacaatcgatgacctagaggataagctgaaatgtacgaaagaggagcacctttgcacacagcgcatgttagaccagacgctgctagatctcaatgaaatgtag

SEQ ID NO: 209928 - DNA, 858 bp, synthetic construct
  misc_feature 1..858: note = Description of Artificial Sequence: Synthetic coding sequence
  source 1..858: mol_type = other DNA
atgatggaggccatcaagaagaagatgcagatgctgaagctggacaaggagaatgctctggatcgtgcagagcaggcggaggccgagcaaaagcaggctgaggagcgatcaaagcagcttgaggacgaactggcagccatgcagaaaaagctcaaaggcactgaagatgagctcgataaatattcagaagccttgaaggacgcccaagagaagctggaattggctgaaaagaaagccgccgacgcagaggctgaggtcgcctcactgaataggagaattcaactagtcgaggaagaattagaccgggcgcaggagcgactggcgacagcactacagaagttggaggaagccgaaaaggctgcagacgagtccgagagaggtatgaaggtgatcgagaaccgggctctcaaggatgaagagaagatggaacttcaggaaattcagcttaaagaggcaaaacatattgcagaagaagctgaccgcaagtacgaggaggttgccagaaagttagtgatcatcgagggagatctggagaggactgaggagcgagccgagctcgctgagtctaagtgcagtgagctggaggaggaactgaaaaacgtgacgaataacctcaagagcctggaggctcaggcagaaaaatactcccagaaagaagataaatacgaggaggaaatcaagatacttaccgataagctgaaagaggccgaaacgcgagctgagtttgcagagagaagcgtggctaagttggagaaaacaatcgatgatctggaagacgaactctatgcccaaaaattgaagtataaggccatttccgaggagctcgaccacgcactcaacgatatgacatccatttag

SEQ ID NO: 209929 - DNA, 744 bp, synthetic construct
  misc_feature 1..744: note = Description of Artificial Sequence: Synthetic coding sequence
  source 1..744: mol_type = other DNA
atggccggcatcaccaccatcgaggccgtgaagcggaagatccaggttctccagcagcaggcggatgatgccgaagagcgagccgagcgcctgcagcgagaggtcgaaggcgaaaggagagccagagaacaggctgaggccgaagtcgcaagtctgaacagaagaatccaactcgtagaggaggaactcgaccgggcccaggaaagattggcgaccgctcttcagaagttggaggaagccgagaaggctgcagatgagtctgaaagaggcatgaaggttatcgagaatcgtgcactaaaggacgaggaaaaaatggagctgcaagagatacagctgaaggaagccaagcacattgctgaagaagcagacagaaaatatgaggaggttgcacggaaattggtcatcattgagggagacctcgaacgaaccgaggaaagagccgaactcgcggagtcacgatgtagggaaatggacgaacagattagactcatggaccaaaacctgaagtgtctgtccgcggcagaagaaaagtattctcagaaagaagataagtatgaggaagagattaaaatccttaccgataagctgaaagaggcagagaccagagcggaattcgccgagcggtccgtcgctaaattggaaaagaccatcgacgacctggaggagcggctgtacagtcagttggagaggaatcgattgctttccaacgagctaaagctcactctgcacgatctctgtgactag

SEQ ID NO: 209930 - DNA, 747 bp, synthetic construct
  misc_feature 1..747: note = Description of Artificial Sequence: Synthetic coding sequence
  source 1..747: mol_type = other DNA
atggccggcatcaccaccatcgaggccgtgaagcggaagatccaggttctgcagcagcaggccgacgatgctgaggagcgggctgaaagactgcagagagaggtcgagggagaacgcagggcaagggagcaggctgaggccgaagtcgccagcttgaatcggcggatacaattggtggaggaggagctcgatagggcgcaggagaggctcgccaccgcactccagaagctggaggaggccgaaaaagccgccgacgaaagcgagcgagggatgaaggtcatagaaaaccgcgcactgaaagacgaggagaaaatggaattacaggagatccagttgaaagaggctaagcacatcgccgaagaggctgacaggaagtatgaggaagtagcacgcaagctcgtaatcatcgaaggcgatctggaaaggacagaagagcgagcagagttggcagagtcccggtgccgagaaatggatgaacagattcggctgatggatcaaaatctgaagtgcctcagcgcagctgaggaaaagtattcccaaaaggaggacaagtatgaagaggaaatcaagatattaactgacaagctgaaagaggctgagaccagggctgagtttgcagaacgctcggtggctaaactggagaaaacgatagatgacctcgaagataagctaaaatgcacaaaggaagagcacttgtgcactcagcgtatgctggaccagacattgctggaccttaatgagatgtag

SEQ ID NO: 209931 - DNA, 228 bp, synthetic construct
  misc_feature 1..228: note = Description of Artificial Sequence: Synthetic coding sequence
  source 1..228: mol_type = other DNA
atgatggaggccatcaagaagaagatgcagatgctgaagctggacaaggagaatgcccttgaccgcgccgaacaagccgaagctgagcagaaacaggcagaggaaagaagcaagcagcttgaagatgagttagccgctatgcagaagaagctgaaaggcaccgaggacgagctggacaagtacagcgaggccttaaaagatgcccaggaaaagttagaactggcctag

SEQ ID NO: 209932 - DNA, 747 bp, synthetic construct
  misc_feature 1..747: note = Description of Artificial Sequence: Synthetic coding sequence
  source 1..747: mol_type = other DNA
atggccggcctgaacagcctggaggccgtgaagcggaagatccaggctctccaacaacaagctgacgaagcagaggatcgggcccagggcctacagcgggagctcgacggtgagcgggaaaggagagaaaaggccgagggtgatgtggccgctctgaatcgcagaattcagttagtggaagaggagctggaccgggcccaggaaagactggccacagcacttcaaaaactggaagaggctgagaaggccgctgatgaaagtgaaagggggatgaaggtcattgagaacagggcgatgaaggatgaagagaagatggaaattcaggagatgcagctcaaagaagccaaacacattgccgaggaagcggatcgaaagtatgaagaggtcgctagaaagctggtgattttagaaggagagctagagcgggccgaggagcgcgcagaggtaagcgaactgaaatgcggcgacttggaagaagagctcaaaaacgtcaccaataatctgaaatctctggaagccgcctccgagaagtactctgaaaaggaagataaatacgaggaggaaataaagctcctgtccgataaactcaaggaagccgaaacaagggcagagttcgcagaaagaaccgtggcaaaactggaaaaaaccattgatgaccttgaagagaagttggcccaggcaaaggaggagaatgtcggactccatcaaacactggaccagacacttaacgagttaaactgcatctag

SEQ ID NO: 209933 - DNA, 855 bp, synthetic construct
  misc_feature 1..855: note = Description of Artificial Sequence: Synthetic coding sequence
  source 1..855: mol_type = other DNA
atggaggccatcaagaagaagatgcagatgctgaagctggacaaggagaatgccatagatcgagccgaacaggccgaggctgataagaaggctgctgaggacaagtgtaaacaggtggaggaagaactaactcatctccaaaagaagttgaaagggacagaagacgagctggacaagtacagcgaggatctgaaggatgcccaggaaaagctggaactgacagagaagaaggcctctgacgctgaaggggatgtcgcagccctcaacagaagaattcaattagtggaagaggaactcgacagagcgcaggagaggcttgctacagctcttcagaagttggaggaggctgagaaagcggcagatgaatcagaaagagggatgaaagtaattgagaatcgtgcgatgaaagatgaggaaaaaatggagattcaggaaatgcagctgaaagaagctaaacacatcgccgaagaagctgatcgaaaatacgaagaggtggcacgcaagctggtcattcttgaaggggagttggaacgggctgaggaaagagctgaggtgtcagaactgaagtgcggggacttggaggaggagcttaaaaacgtgactaataatctgaagtccctcgaggccgctagtgagaaatatagcgaaaaggaagataagtacgaagaggagatcaaactgcttagcgacaagctaaaggaagccgagaccagggctgaattcgcagaacgtaccgtggctaaattggagaagacaatcgatgacctcgaagagaaattggcccaggcgaaggaagaaaatgtaggccttcatcagacattagatcagaccctaaacgagctgaactgcatctag

SEQ ID NO: 209934 - DNA, 855 bp, synthetic construct
  misc_feature 1..855: note = Description of Artificial Sequence: Synthetic coding sequence
  source 1..855: mol_type = other DNA
atggaggccatcaagaagaagatgcagatgctgaagctggacaaggagaacgccatagatagggccgagcaggcggaggccgataaaaaggccgctgaggataaatgtaagcaggtggaggaggagcttactcacctgcagaagaagctcaagggcacagaagatgaactcgataaatatagtgaggacctgaaggacgcacaggagaagctcgaactgaccgagaaaaaagcctctgacgctgaaggagacgtcgcggcacttaaccgccggattcagctggtggaggaggaactcgaccgagctcaggaacggcttgccaccgcactgcagaaactggaggaggctgaaaaggctgctgatgagtctgagagaggaatgaaagtaatcgaaaatcgtgcaatgaaggacgaagaaaagatggagatccaagagatgcagctcaaagaagccaaacacatagccgaagaggcagatcgcaaatatgaggaggtagcccgtaaactcgtcatcctcgagggcgagcttgagagagctgaggaacgcgccgaggttagcgaattaaaatgcggcgatttagaggaggaactgaagaatgtcactaataacttaaaatccttggaagcagcctctgagaaatatagtgagaaagaagacaagtacgaggaggaaatcaagctgctgtctgacaaactgaaggaggctgaaacgagggccgaattcgctgaacgcacagtagcaaaattagagaagactatcgatgaccttgaagagaagttggcccaggcaaaggaagaaaacgttggtctgcaccagacccttgaccagactctgaatgaattgaattgcatttag

SEQ ID NO: 209935 - DNA, 2244 bp, synthetic construct
  misc_feature 1..2244: note = Description of Artificial Sequence: Synthetic coding sequence
  source 1..2244: mol_type = other DNA
atgggccggctgaacgagcagcggctgttccagcccgacctgtgcgatgtggacttggtcctcgtcccgcagagaagcgtgtttcccgctcataagggcgtgctggctgcttattctcagttctttcattctctctttacccaaaataagcagctacagcgagtggaactgagcctggaagccctcgcaccaggagggctgcagcagattctgaatttcatctatacatctaagcttctggtgaacgccgctaatgtgcatgaagtgttgtccgccgcctccctgctccagatggcagacattgctgcctcttgtcaggagctactcgacgccagatcgttggggccaccagggcctggtacagtggcacttgcacagcccgcggcctcatgtacccctgcagcacctccttactactgcgatatcaaacaggaagctgatactccaggcctaccaaaaatctatgctcgtgaaggcccagacccatactctgtacgagtcgaagatggagctggcacagccggcgggacagtgcccgctaccatcgggcccgcccagccattctttaaagaggaaaaagagggaggggttgaagaagcaggcggccctcctgcttcgctctgtaaactggaaggtggagaagagctggaggaggagctaggcgggtccggcacatacagtcgccgcgaacagtctcagattatagtggaagttaatctcaacaatcaaacccttcacgtttccacagggcctgagggcaaaccaggcgcgggaccatcacctgccactgtcgttctgggtcgggaggatggactccaacgacactctgatgaagaggaggaggatgacgaagaggaagaggaggaggaagaggaggaggagggtggaggctccggcagggaagaggaggaggaagaagagggcgggtcccagggtgaagaggaggaggaagaagaggacgggcacagcgaacaagaggaggaagaagaggaggaagaagaagaaggtccatctgaacaggaccaggagtccagtgaagaggaggagggcgaagaaggagaagccgggggaaagcagggacctcgggggagcaggagttcaagagccgacccgccaccgcacagccacatggctactcgttctcgagaaaatgctcggagaagaggcacacctgagcccgaagaagccgggcgcagggggggcaagcggcctaagcctcctccgggcgtcgctagtgcctccgctcgtggcccacctgcaaccgacggacttggggcaaaggtgaaactggaagaaaaacaacatcacccatgccaaaagtgtccaagagtgttcaacaataggtggtatctcgagaagcatatgaacgtgacgcatagtaggatgcagatttgcgaccagtgtggcaaacgtttcttactcgagtccgagcttctgcttcatcgccaaactgactgtgagagaaatattcagtgtgttacatgtggtaaagcttttaagaaactgtggtccttacatgaacacaataagatcgtgcatggctacgcagaaaagaaatttagctgcgaaatctgtgaaaaaaagttctatactatggctcacgtgaggaaacatatggtggctcatacaaaagatatgccttttacctgcgagacatgcggtaagtcgttcaaacgtagcatgagcctaaaagtgcattcactccagcactcgggggagaaacccttccggtgcgagaattgcaacgagaggtttcagtataaataccaattgaggtctcatatgagcatccacatcggccataaacagtttatgtgccagtggtgcggaaaagacttcaacatgaagcaatactttgatgagcacatgaaaacccatactggagaaaaaccctacatatgcgagatctgtggcaaatctttcacatctcgacccaatatgaagcggcaccgccggactcacacaggcgagaaaccctatccgtgcgacgtttgtggacagcgcttccgttttagtaatatgttaaaggcccataaagaaaagtgttttcgcgtgtctcataccctggctggggacggcgtccccgctgcaccgggtttgccccctacgcaacctcaggcacacgctcttcctctgttaccagggcttccacagactttgcctccacctcctcacctgcccccaccccctccgctgttccctacaaccgccagcccaggaggtcggatgaacgctaacaactag

SEQ ID NO: 209936 - DNA, 483 bp, synthetic construct
  misc_feature 1..483: note = Description of Artificial Sequence: Synthetic coding sequence
  source 1..483: mol_type = other DNA
atgaccgaccagcaggccgaggcccggagctacctgagcgaggagatgattgcagagttcaaagcggctttcgacatgttcgatgctgatgggggaggggacatttctgtgaaggagctggggacagtgatgaggatgcttggacagaccccaactaaggaagagctagatgcaattattgaggaggtggacgaggacggatctggcaccatcgatttcgaagaatttctggttatgatggtacgacagatgaaagaagatgctaaggggaagtccgaggaagagctggcggagtgtttccgaatttttgacaggaatgccgacggctacatcgatcccgaagaactggctgagatcttccgtgctagtggagagcacgtgaccgatgaagaaattgaatccttgatgaaggatggtgacaagaacaatgatggacgtatcgacttcgatgagtttctcaaaatgatggaaggggtgcagtag

SEQ ID NO: 209937 - DNA, 438 bp, synthetic construct
  misc_feature 1..438: note = Description of Artificial Sequence: Synthetic coding sequence
  source 1..438: mol_type = other DNA
atgatcgccgagttcaaggccgccttcgacatgttcgacgccgacggaggcggtgatatctctgttaaagagcttggtaccgtcatgcggatgctgggccagactcctacaaaggaggagctggatgccataatcgaggaggttgacgaggacggaagtggaaccattgactttgaagagttcctcgtcatgatggtaaggcaaatgaaagaagatgccaaggggaaaagcgaagaagaattggccgagtgcttcagaatatttgacaggaatgccgatgggtatatcgaccctgaggaattggccgagatcttcagggccagtggggagcacgtcacagatgaagagatcgaaagccttatgaaagatggggataagaacaatgacggcaggattgacttcgatgagttcctaaaaatgatggaaggcgtacagtag

SEQ ID NO: 209938 - DNA, 564 bp, synthetic construct
  misc_feature 1..564: note = Description of Artificial Sequence: Synthetic coding sequence
  source 1..564: mol_type = other DNA
atgcccgaggtggagcggaagcccaagatcaccgccagccggaagctccttctgaagtcactgatgttggccaaagctaaagaatgctgggagcaggagcacgaggagcgtgaggctgaaaaagttaggtatctagccgaacgcattccaacactccagacccgcggtctgagcctttctgctctccaggatttgtgtcgggagcttcacgcgaaagtcgaggttgtggatgaggaaagatatgacatagaggctaagtgcctgcacaatacgcgggagattaaggacttgaagttgaaggttatggacctgagaggaaaattcaaacggccacctctgcgtcgggtgagagtgtcagccgatgcgatgctcagagccctacttggttcgaaacataaggtcagcatggaccttagggcgaacctgaagagtgtcaagaaggaagacacagagaaagagagacccgtcgaagtgggcgactggcgaaagaacgtcgaggctatgagtggaatggaaggccgcaagaagatgtttgatgccgccaaatctcctactagccagtag

SEQ ID NO: 209939 - DNA, 564 bp, synthetic construct
  misc_feature 1..564: note = Description of Artificial Sequence: Synthetic coding sequence
  source 1..564: mol_type = other DNA
atgcccgaggtgcagcggaagcccaagatcaccgccagccggaagcttcttctgaaatcgctgatgcttgccaaggcgaaggagtgctgggagcaggagcatgaggaaagagaggctgaaaaggtgaggtacctagccgagcggatccctaccctgcagacacggggacttagcctgagtgcccttcaggacctctgtcgggaactgcacgcaaaggtggaggtggtggacgaagaacgatacgacatcgaggctaaatgcctgcacaatacacgcgaaataaaagacctgaaactgaaggtcatggacttgagaggcaagtttaagcgaccaccactgagaagagtgagggtttcagccgacgccatgctccgggctttgttaggaagcaaacataaggtgagcatggatttaagggccaacctcaaatcagtgaagaaagaggacaccgagaaggagcggcctgttgaggtgggagattggcgcaagaatgtggaggccatgagtggcatggaaggacggaaaaaaatgttcgatgctgcaaaaagccccacgagccagtag

SEQ ID NO: 209940 - DNA, 564 bp, synthetic construct
  misc_feature 1..564: note = Description of Artificial Sequence: Synthetic coding sequence
  source 1..564: mol_type = other DNA
atgcccgaggtggagcggaagcccaagatcaccgccagccggaagctgcttttgaagtccctgatgttggccaaagccaaggagtgctgggaacaagaacatgaggagagagaagccgagaaagtaaggtacttggctgagcggattccaactttacagactcgcggcctatctctctctgcccttcaggacctctgccgggaactgcacgctaaagtggaggtggtggatgaggagaggtacgatatagaggctaagtgtctgcataatactagggaaatcaaggacctgaagttgaaggttatggacctccgcgggaagttcaaaagaccacctctgaggcgtgtccgtgtaagcgctgacgcaatgctcagggcacttctcggttccaagcataaagtttctatggacctgagagctaatctcaaaagtgtgaaaaaggaggataccgagaaagagcgtccagtggaggtgggcgattggagaaagaatgtggaggccatgtcagggatggaggggcgcaagaagatgttcgatgcggctaaatccccaacttcacagtag

SEQ ID NO: 209941 - DNA, 564 bp, synthetic construct
  misc_feature 1..564: note = Description of Artificial Sequence: Synthetic coding sequence
  source 1..564: mol_type = other DNA
atgcccgaggtggagcggaagcccaagatcaccgccagccggaagctcctgttaaagtctctgatgcttgctaaggcaaaagagtgttgggaacaagaacacgaggagcgggaggctgaaaaggttcggtatctggctgagaggatccctaccttgcaaacaaggggattaagcttaagcgccctgcaagatttgtgccgggaactgcatgccaaggtggaagtggttgacgaagagagatacgacattgaagccaaatgtctgcacaatacccgtgagattaaggatttgaaactgaaagttatggatctgcgcgggaaatttaagcggccccccctgaggagggtaagggttagcgcggacgcgatgttgagggcactgctcggatccaagcacaaggtcagcatggacctccgggcaaacctcaaatccgtgaagaaggaggataccgaaaaggagcgtcctgttgaagtgggtgattggcgtaagaacgtagaggcaatgtccggtatggagggtcgcaagaagatgtttgatgctgccaaatccccaacttcccaatag

SEQ ID NO: 209942 - DNA, 564 bp, synthetic construct
  misc_feature 1..564: note = Description of Artificial Sequence: Synthetic coding sequence
  source 1..564: mol_type = other DNA
atgcccgaggtgcagcggaagcccaagatcaccgccagccggaagttgctgttgaaatccctcatgttggctaaggctaaggagtgctgggaacaagaacacgaggagagggaggctgaaaaagtgcgctacctggccgaacgcatcccgactcttcagacccgcggtctgtcactgtctgctttgcaggacctgtgtcgggagctgcatgccaaggtggaggttgtcgacgaagagcgatacgatatcgaagcgaagtgtttacacaacacgcgggagattaaagatttgaaacttaaagttatggatctgagagggaagttcaaaagaccgcctctgcgtagagttcgtgtgtccgccgatgctatgctacgcgctttactcgggagcaagcacaaggtatccatggatctgcgggccaacttgaagtccgtgaagaaggaagacacagagaaggagagaccggttgaagtcggcgactggcgaaagaatgtcgaggccatgtctgggatggaaggtcgaaagaagatgttcgatgcggcgaaatcgcctacatctcaatag

SEQ ID NO: 209943 - DNA, 414 bp, synthetic construct
  misc_feature 1..414: note = Description of Artificial Sequence: Synthetic coding sequence
  source 1..414: mol_type = other DNA
atgcccgaggtggagcggaagcccaagatcaccgccagccggaagctgttgctaaagagtctgatgctcgctaaggcgaaggaatgttgggagcaggagcacgaggagcgggaggccgaaaaggtgaggtacttggcagaaaggattcccactctgcagaccagaggcttgtctctctctgcgctccaggacttatgccgggagctgcatgccaaagttgaggtggtagacgaggaaaggtatgatattgaggctaaatgcctccacaacacaagagagattaaggatcttaagttgaaggtcatggatctcaggggaaaatttaaacggccgcccttgcgccgagttagagtgagcgctgacgcaatgcttagggcgctgcttggctctaagcacaaggtgtccatggactag

SEQ ID NO: 209944 - DNA, 549 bp, synthetic construct
  misc_feature 1..549: note = Description of Artificial Sequence: Synthetic coding sequence
  source 1..549: mol_type = other DNA
atgagccagtgcaagaagcggaaccgggccatcaccgcccggcggcaacatcttaaaagtgtaatgttacagatcgcagccaccgagctcgagaaggaggagagcaggcgggaggccgagaaacaaaattatcttgccgaacactgtcccccgctccacatccctggcagcatgtccgaggtgcaagaactgtgcaaacagctgcatgcaaagatcgatgccgcggaagaagagaaatacgacatggaggttcgcgttcagaagacgagtaaagagctagaagacatgaaccagaagctttttgacttgcgggggaagtttaagagaccaccgctgcggagggtccgaatgtcagcggacgctatgcttaaagcgctgttgggatctaagcacaaagtttgcatggacctgagggccaatctaaaacaagtcaagaaggaggataccgaaaaagaaagggacctcagggacgtcggagattggagaaaaaatattgaggagaagtctggtatggagggccgtaaaaaaatgtttgaatcagagtcctag

SEQ ID NO: 209945 - DNA, 549 bp, synthetic construct
  misc_feature 1..549: note = Description of Artificial Sequence: Synthetic coding sequence
  source 1..549: mol_type = other DNA
atgggcgacgaggagaagcggaaccgggccatcaccgcccggcggcagcatcttaagtcagtgatgctccagattgctgccactgagttggaaaaagaggaaagcagacgggaggcggaaaaacaaaattacctggcagagcattgtccacctttgcacatcccgggaagtatgagcgaagtccaagagctctgtaagcagctgcacgccaaaatcgacgctgccgaagaagagaagtacgacatggaggttcgagttcagaagacctcgaaagagttggaagatatgaatcaaaagttgttcgatttgaggggtaagttcaagaggccccctctacggagagttcgaatgtctgctgatgcaatgttaaaagcgctcttggggtctaagcataaagtatgtatggatttgcgggcaaacctaaagcaggtcaagaaagaggacaccgagaaggagagggatctgcgggacgtcggcgattggagaaaaaatatagaagaaaagagcggtatggaagggagaaaaaaaatgttcgagtccgagtcatag

SEQ ID NO: 209946 - DNA, 549 bp, synthetic construct
  misc_feature 1..549: note = Description of Artificial Sequence: Synthetic coding sequence
  source 1..549: mol_type = other DNA
atgggcgacgaggagaagcggaaccgggccatcaccgcccggcggcagcatttaaaatcggtcatgctccagatcgctgctaccgagctcgaaaaggaggaaagtcgcagggaggcagagaagcaaaattacctggccgaacactgtcccccactccatattccagggagtatgtccgaggtgcaagagttgtgcaagcagttacacgctaaaatagacgctgccgaggaggagaagtatgatatggaggttcgcgttcagaagaccagcaaagaactggaagacatgaaccagaagctcttcgacctcagaggcaaattcaaaaggccccccctgaggcgggttcgtatgtctgctgacgcgatgttaaaagcactcttgggcagtaagcataaagtgtgtatggatttgagggctaatctgaaacaggtcaagaaggaggatacagagaaggaaagagacctccgtgacgtcggcgattggcggaagaatatcgaggaaaagagtggcatggagggtaggaaaaagatgtttgagagtgagtcctag

SEQ ID NO: 209947 - DNA, 549 bp, synthetic construct
  misc_feature 1..549: note = Description of Artificial Sequence: Synthetic coding sequence
  source 1..549: mol_type = other DNA
atgggcgacgaggagaagcggaaccgggccatcaccgcccggcggcagcacttaaagtcagtcatgcttcagattgcggcaacagaacttgaaaaagaggaatcccggagggaagccgagaaacagaattacctcgctgagcattgtccgccgctgcacattccaggcagtatgtcagaggtgcaagaactatgcaagcagctgcatgcaaaaatcgatgccgccgaggaggaaaaatatgacatggaggtgcgggtgcagaagacctctaaagaactagaggatatgaatcagaagttgtttgatctccggggaaagttcaaacggcctcccctgaggcgggtgagaatgagcgccgacgcgatgttgaaggctttgctgggctccaaacataaggtttgtatggacctgcgggcgaatttgaagcaggtgaaaaaagaagataccgagaaagaacgtgacctcagggacgtcggggattggcgcaaaaatatcgaagaaaaatccggcatggaaggaagaaagaagatgttcgagagcgaatcctag

SEQ ID NO: 209948 - DNA, 633 bp, synthetic construct
  misc_feature 1..633: note = Description of Artificial Sequence: Synthetic coding sequence
  source 1..633: mol_type = other DNA
atggccgacggcagcagcgacgccgcccgggagccccggcccgcccccgcccccatcagacggaggagtagcaattaccgagcttacgctaccgagccacacgctaaaaagaagagtaagatctctgcctctaggaagcttcagctcaaaactctgttgctacaaatcgctaagcaggagctggagcgagaggccgaagagcgtcggggtgagaaggggcgagcactctctacaagatgccagccactcgagctagcaggacttggatttgccgagcttcaggacctgtgcagacagcttcatgccagagtggataaagttgacgaggaacgatatgacattgaggctaaggtgacgaaaaatattactgaaatcgcagacttgactcaaaagattttcgatcttcggggaaagttcaagcgtccaacattgcgtcgagttaggatttccgccgatgcaatgatgcaggctttactgggggcaagggcaaaagaaagtctggatttgagggctcacctaaagcaggtgaaaaaggaggacacagaaaaggaaaaccgggaggtgggcgattggaggaaaaatattgacgcattatctggcatggaaggccgcaaaaaaaaatttgaatcttag

SEQ ID NO: 209949 - DNA, 837 bp, synthetic construct
  misc_feature 1..837: note = Description of Artificial Sequence: Synthetic coding sequence
  source 1..837: mol_type = other DNA
atgagcgacaccgaggagcaggagtacgaggaggagcagcccgaggaagaggctgccgaggaggaagaggaagcccctgaggagccagaaccagttgctgaacctgaggaagagcggccaaaaccctcccgcccagtcgtgccgccacttatccctcccaagattcccgagggagaacgagtagattttgacgatattcacagaaaacgaatggagaaggatctgttagagttgcaaaccctcatcgacgttcacttcgagcagcgtaaaaaggaagaggaggagctggtggctctcaaagagaggatcgaacgtcgaaggagcgagcgcgcagagcagcagaggttccgcacggaaaaggagcgcgaacggcaggcgaagttagctgaagaaaagatgcgcaaagaagaggaggaggccaagaagcgggctgaggatgacgctaaaaagaagaaagtactctctaacatgggagcgcatttcggaggatacctggttaaagctgaacagaagcggggaaagcggcagaccggccgtgagatgaaggtaagaatcttgagtgagaggaagaaacctctcgacattgattacatgggtgaggagcaactgagagccagatctgcctggctacctccatctcagccatcctgccctgcccgggagaaggcccaggagctgtccgattggattcatcaattggagtctgagaaattcgacttgatggcaaagttgaaacagcagaagtacgagataaacgtcctgtacaacaggatatcgcacgcacagaaatttaggaagggggctggcaaaggacgggtgggggggcggtggaaatag

SEQ ID NO: 209950 - DNA, 837 bp, synthetic construct
  misc_feature 1..837: note = Description of Artificial Sequence: Synthetic coding sequence
  source 1..837: mol_type = other DNA
atgagcgacaccgaggagcaggagtacgaggaggagcagcccgaggaagaggccgccgaggaggaggaggaggccccagaggaacccgagcccgtggccgagcccgaagaggaacggcctaaaccctcacgacccgtagtgccgcctcttattcctcctaaaatcccagaaggggaaagagtggactttgatgatatccacagaaagcgaatggaaaaagatctgttggaattacagactctgatcgacgtgcacttcgagcagcgtaagaaagaagaggaagaactggtagcccttaaagagcggatagaaagaagacgctccgaaagagccgaacaacagcggttcaggacagaaaaggagagagaacgccaagctaagttggctgaggagaaaatgcgtaaagaagaagaggaggccaagaagagggccgaggacgacgccaagaaaaagaaagtcttaagtaatatgggcgctcacttcggcggatatctggtgaaagccgagcagaaaaggggcaagcgacagactgggagggaaatgaaagtgcggattctcagcgaacgtaaaaaaccactggacattgactatatgggcgaggaacagctccgtgcacgttctgcctggctcccaccctcgcagcccagttgccccgctcgagaaaaagcacaagagctctcggactggatacatcagctggagtccgagaagtttgatctcatggcaaaactcaaacagcagaaatacgagatcaacgtgttgtacaaccgcatctcccacgcgcagaagtttcgtaagggggctggtaaaggaagggtcggggggcgctggaagtag

SEQ ID NO: 209951 - DNA, 756 bp, synthetic construct
  misc_feature 1..756: note = Description of Artificial Sequence: Synthetic coding sequence
  source 1..756: mol_type = other DNA
atgagcgacaccgaggagcaggagtacgaggaggagcagcccgaggaggaggcagcagaggaggaagaagaggaggaggagagacctaaaccctcgcgcccagtggtccctcctctcatcccgcccaagatcccagagggagaacgcgtcgacttcgacgatatccacagaaaaaggatggaaaaggatctgctggagctgcaaactctgatagacgtgcacttcgagcaaagaaaaaaggaagaagaggaactggtcgcattaaaggagcggatcgagagaaggcgttcggaacgcgcagagcaacagcggtttcgtaccgagaaggaacgcgagagacaagctaagttggccgaagaaaagatgcgcaaggaagaagaggaggcaaaaaaacgggctgaggatgacgccaagaagaagaaggtcctgtctaacatgggagcacacttcgggggatacctggtgaaggcagagcagaaacgcggcaaaagacagactggtagggaaatgaaggtgcggatcctgagtgaaaggaaaaagcccctcgatatagactacatgggggaggaacagctgagggagaaagcccaagagctgagtgactggatccaccagctagagtctgagaagtttgatctgatggccaaactcaagcagcagaagtacgagatcaatgtgctgtacaacagaataagtcacgcccagaaatttcgaaagggcgctggcaagggccgagttggagggcgatggaagtag

SEQ ID NO: 209952 - DNA, 522 bp, synthetic construct
  misc_feature 1..522: note = Description of Artificial Sequence: Synthetic coding sequence
  source 1..522: mol_type = other DNA
agcaaggcccagccccaggacagccagcacctgcggcacagcctggggcggacgaggatgtcggacacagaagagcaggaatatgaagaggagcagcctgaggaagaagccgccgaagaagaggaggaaggggaggtgcctgatagcgcggaagaggagcgacctaaaccctcgcgacctgtcgtgcctcccctcatcccccccaaaatcccagagggtgagagagtcgattttgacgacatccatcggaagaggatggaaaaggaccttcttgagcttcagaccctgatcgacgttcattttgagcagagaaagaaggaagaagaagagctggtggccctaaaggaaagaatcgaacggaggcgcagtgaaagagctgagcagcagaggttccgcacagagaaggagcgagaacggcaggccaagctcgcagaagagaagatgcgaaaggaggaggaggaggccaagaagagagccgaggacgatgcaaagaaaaagaaaaaaaaaaaaaaaaaaaagtag

SEQ ID NO: 209953 - DNA, 756 bp, synthetic construct
  misc_feature 1..756: note = Description of Artificial Sequence: Synthetic coding sequence
  source 1..756: mol_type = other DNA
atgagcgacaccgaggagcaggagtacgaggaggagcagcccgaggaggaagcggccgaggaagaggaggaagctcccgaagagcccgaacccgtgagaccagtggtgcctcccttgattccgcctaaaatccctgagggggagcgcgtggactttgacgacatccacagaaagagaatggagaaggatctactagagctacagacactaatagatgtccattttgaacaacgcaaaaaagaggaggaagaactggtggctttaaaggaaagaattgagagaaggcgatctgagagagcagagcagcagcggttccgcaccgagaaggaacgcgagcggcaggctaagcttgcggaggaaaaaatgcggaaggaggaggaagaggctaaaaagagggctgaggatgacgctaaaaaaaagaaggtgctaagcaatatgggagctcatttcgggggttatctggttaaagctgaacagaaaagggggaagcgccagactgggagagagatgaaggtgagaattctctcagaaaggaaaaaaccactggatatcgactatatgggagaggaacagctccgggagaaggcccaggaactctctgactggattcaccagctggaatcggaaaagttcgatctgatggcaaagcttaaacagcaaaaatatgaaattaatgttctgtacaatcgaatcagccatgctcagaagttccgcaagggtgctggcaagggccgagtcggagggcggtggaaatag

SEQ ID NO: 209954 - DNA, 579 bp, synthetic construct
  misc_feature 1..579: note = Description of Artificial Sequence: Synthetic coding sequence
  source 1..579: mol_type = other DNA
atggagaaggacctgctggagctgcagaccctgatcgacgtgcactttgagcaaaggaagaaggaggaagaggaactcgtggctctcaaagagcggatcgagaggagacggtctgagcgggctgagcagcagaggtttcgcacggagaaggagagagaacgccaggctaaactggctgaggaaaagatgaggaaagaggaggaagaggccaaaaaaagggccgaggacgacgccaagaagaagaaggtgctgtcaaatatgggagcacactttgggggttatctggttaaagccgagcagaaaaggggcaaacggcaaacggggcgcgagatgaaagtgagaatcttaagtgaacgcaagaaaccgttagacattgactacatgggtgaggagcagctccgggaaaaagcacaggagctatcagattggattcatcagctggaatcggaaaaatttgacctgatggccaagctgaagcagcagaaatacgagataaacgttttgtacaaccgcatcagtcacgcccaaaagttccgcaagggagcaggtaaagggcgcgtaggcggacgctggaagtag

SEQ ID NO: 209955 - DNA, 882 bp, synthetic construct
  misc_feature 1..882: note = Description of Artificial Sequence: Synthetic coding sequence
  source 1..882: mol_type = other DNA
atgagcgacatcgaggaggtggtggaggagtacgaggaggagcaccctgaggaggaagaagattggcgagaagacgaggatgaacaagaagaggccgccgaagaagacgccgaagccgaggcggagaccgaagagacacgggctgaagaggacgaagaggaggaagaagcgaaggaagccgaggacgggccaatggaagaatccaaacccaaaccgcgtagctttatgccgaacctggtgccgccaaagattccggatggggagagggtggactttgacgatatccatcgcaagaggatggagaaggacttaaacgaactgcaggcgttaattgaagctcacttcgagaaccggaagaaggaggaagaggaactcgtgagcctgaaggaccgcatagagcggcgacgcgctgaacgagccgaacagcaaaggattagaaacgagagggaaaaggagagacagaatcgactggccgaagagagggcccgtcgagaagaggaagagaatcggcgcaaagctgaggatgaagcccgcaaaaagaaagcactcagtaacatgatgcattttgggggctatatccaaaagcaagcccagaccgagaggaagtccggaaaacggcaaactgaacgtgaaaaaaagaagaagatattggcggagcgtagaaaggtgcttgcgatcgatcatttaaatgaagaccagctgcgggagaaggcaaaggagctctggcagtcaatctacaacctggaagcagagaagttcgatctccaggagaagttcaaacagcaaaaatacgaaattaatgtgttgcgcaaccgaatcaacgataatcagaaggtcagcaagacacgtggcaaagccaaggtcacggggcggtggaaatag

SEQ ID NO: 209956 - DNA, 600 bp, synthetic construct
  misc_feature 1..600: note = Description of Artificial Sequence: Synthetic coding sequence
  source 1..600: mol_type = other DNA
atgagcgacatcgaggaggtggtggaggagtacgaggaggagatggctgccccacagcatcaggaggaggcagccgaggaggatgcggaagcagaggccgagactgaagagacacgagcagaggacgaagaagaggaagaagccaaagaagcagaggacgggccgatggaagagtccaagcccaaacctaggtcatttatgccaaacttagttccccctaaaatacctgacggggaaagagtcgacttcgacgacattcatcggaagcggatggaaaaggatctgaacgaactgcaggcgctgatcgaggctcactttgagaatagaaagaaagaggaagaggagctggtgagcctaaaggaccggattgagaggcgcagggcagagcgcgccgaacagcagcggatccggaatgagcgcgaaaaggaaagacagaaccgtctggcggaggaacgcgctagacgtgaggaggaggaaaatagaagaaaagccgaggatgaagccaggaagaaaaaagccttgtcaaatatgatgcactttggagggtatattcaaaagcatcctcccgacagagccgagaaatgggaggaagccgactag

SEQ ID NO: 209957 - DNA, 852 bp, synthetic construct
  misc_feature 1..852: note = Description of Artificial Sequence: Synthetic coding sequence
  source 1..852: mol_type = other DNA
atgagcgacatcgaggaggtggtggaggagtacgaggaggaggccaagctggagcaagaggaggccgccgaggaggatgcagaggctgaggccgaaacagaagaaacccgggcagaagaggacgaggaggaagaagaggctaaagaggccgaggacgggccaatggaagagtctaaacctaaaccacgcagcttcatgccgaacttagtacctcctaagatacctgatggagaacgggttgatttcgatgacatccaccgcaagagaatggagaaggaccttaacgagctgcaggctctgatcgaagctcacttcgaaaatcgaaagaaggaggaagaggagttagtgtcactgaaagataggattgaacggcggcgggcagaacgagctgaacagcagcggataaggaacgaacgcgagaaagaacggcagaacaggcttgcagaggaacgggcgaggcgagaggaagaggagaaccgaaggaaggccgaagacgaagccaggaaaaaaaaagccctctcaaacatgatgcattttggcggatatatccagaagcaggcacagactgagaggaagagcggtaagcggcagaccgagagggagaagaagaaaaagatcctggcagagcgaagaaaagtgctggcaatcgaccacctgaacgaggatcagctgagggagaaagcaaaagagctgtggcagtccatctataacctcgaagcagaaaagttcgacctgcaggagaaatttaaacaacagaagtacgagatcaacgtccttcggaatcgaataaacgacaaccagaaagtgtccaaaacaaggggcaaagctaaagttactgggcgctggaaatag

SEQ ID NO: 209958 - DNA, 858 bp, synthetic construct
  misc_feature 1..858: note = Description of Artificial Sequence: Synthetic coding sequence
  source 1..858: mol_type = other DNA
atgagcgacatcgaggaggtggtggaggagtacgaggaggaggagcaggaggaagcagccgtcgaagagcaggaagaggctgctgaagaagatgccgaagctgaagccgaaaccgaggagacacgagcagaggaggatgaggaagaggaggaagccaaggaggcagaagatggcccaatggaggaaagtaaacccaagccccgtagcttcatgccaaatctggtgcccccaaagatcccagatggggagcgcgtcgacttcgacgacatacaccgaaagcgcatggaaaaggacctcaacgaactgcaagcactaattgaagcgcattttgagaaccgcaaaaaggaggaagaagagctggtcagtcttaaggacagaatcgaacggagacgagccgagcgcgccgagcagcaacgtatcaggaatgagcgcgaaaaagagagacaaaaccggcttgccgaagaacgcgctagaagagaggaggaggaaaatcgccgcaaagccgaagatgaagcacgcaagaagaaggcactcagcaacatgatgcattttggcggctacattcagaaaaccgagcggaagtccggcaaaagacagaccgagagggagaagaaaaaaaagatcttggccgagcgtaggaaggtgctggcaatcgatcacctgaatgaggatcagctccgagaaaaggccaaagaactatggcagagtatttacaatctcgaggcagagaagtttgacctgcaggaaaagttcaagcagcagaaatacgagatcaatgtgctgagaaatcggatcaacgataaccagaaagttagcaaaaccagggggaaagccaaggtgacggggcggtggaagtag

SEQ ID NO: 209959 - DNA, 867 bp, synthetic construct
  misc_feature 1..867: note = Description of Artificial Sequence: Synthetic coding sequence
  source 1..867: mol_type = other DNA
atgagcgacatcgaggaggtggtggaggagtacgaggaggaggagcaggaagaggcagccgtggaggaacaggaggaggccgctgaagaggacgcggaggccgaagcagaaactgaagagacccgcgccgaagaagacgaggaagaagaggaggcaaaggaggcggaggacggcccaatggaggaatccaagcccaaacccagatcatttatgcccaacctggtccctccaaagatccccgacggagaaagggtcgatttcgacgatatccaccgcaagagaatggaaaaggacttaaacgaattgcaggccctgattgaggcccactttgaaaacagaaagaaggaagaagaggaactcgtgtcgttgaaagatcgaatcgagaggcggcgggctgagagagcagagcagcaaaggattcggaacgaaagagaaaaggagagacaaaaccgccttgccgaggaaagggcccggagagaggaggaagagaaccgcagaaaagcagaggacgaggctaggaaaaagaaggccctctcgaatatgatgcattttggaggctatattcagaagcaagcacagaccgagagaaagtctggaaagagacagactgaaagagagaagaaaaaaaagatactagctgaacggcgtaaagtgctggccatagaccacttaaacgaggatcagttacgggaaaaggccaaggaattgtggcagtcgatttacaacctggaagcagaaaagttcgacttgcaggagaaattcaaacagcagaagtacgaaattaatgtgctgagaaatcgcattaacgacaaccagaaggtgtccaagactaggggaaaggctaaagtcaccggaaggtggaaatag

SEQ ID NO: 209960 - DNA, 867 bp, synthetic construct
  misc_feature 1..867: note = Description of Artificial Sequence: Synthetic coding sequence
  source 1..867: mol_type = other DNA
atgagcgacatcgaggaggtggtggaggagtacgaggaggaggagcaggaggaagcggccgtagaagaacaggaagaagcagccgaagaagacgccgaggccgaggctgaaaccgaggaaacgcgtgccgaggaggacgaggaagaagaagaagccaaggaggccgaggacggccccatggaagaaagtaaacccaaaccacgatcattcatgcccaaccttgtgccgccaaaaattcctgacggtgagcgtgtcgatttcgacgatatccaccgaaaaaggatggagaaggatctcaacgaactccaggccttgattgaagcgcacttcgagaaccgtaaaaaagaagaggaggaactggtctcactcaaagacagaattgaaaggcggcgggcagagcgcgccgaacagcagagaatcagaaatgagagagaaaaggagaggcagaacaggttagctgaggagagagccagacgagaggaagaagagaataggcgcaaggccgaggacgaagctcggaagaaaaaggcgctgtcaaatatgatgcacttcggagggtatatccagaagcaggcccagactgagcgaaagagcggtaagagacagacggagagagagaagaagaagaagatcctagcagagaggcgcaaggtgctcgccatcgaccacttgaacgaagaccaactgcgagagaaagcaaaagagttgtggcagtccatctataatctcgaagcggagaaatttgacctccaagaaaaatttaaacagcaaaagtacgagatcaatgttctccggaatcggatcaatgataaccagaaggtgtccaaaacacgcggtaaggcaaaggtgactgggagatggaagtag

SEQ ID NO: 209961 - DNA, 681 bp, synthetic construct
  misc_feature 1..681: note = Description of Artificial Sequence: Synthetic coding sequence
  source 1..681: mol_type = other DNA
atggaggagagcaagcccaagccccggagcttcatgcccaacctggtccctccaaagatcccggatggcgaacgggttgattttgatgacatccaccggaagaggatggaaaaagacctgaatgagctgcaggctctgattgaagcccactttgaaaataggaagaaggaagaagaggagctggttagcctaaaagatcgaatcgaaaggagacgagcagagcgcgctgagcaacaacgcattaggaatgaacgcgagaaagagcgccagaaccgcctggccgaagaacgggcgagacgtgaagaggaggagaatcggaggaaagccgaggatgaggccagaaagaaaaaggcactctccaacatgatgcactttggtggctacattcagaaaacagagcggaagagtggaaagcggcaaacagagcgggagaagaagaagaagatcttggccgagcgacgcaaggtgctggcgatcgaccatcttaatgaggatcaacttcgcgagaaagctaaagagttatggcagagtatctacaaccttgaagcagaaaagttcgacctacaggagaaattcaaacagcaaaaatacgagatcaacgtgctgcggaatcgcattaatgataaccaaaaagtgtcaaaaaccaggggcaaagcaaaagtgacagggcggtggaaatag

SEQ ID NO: 209962 - DNA, 858 bp, synthetic construct
  misc_feature 1..858: note = Description of Artificial Sequence: Synthetic coding sequence
  source 1..858: mol_type = other DNA
atgagcgacatcgaggaggtggtggaggagtacgaggaggaggagcaagaagaagctgcagtcgaagagcaggaagaggccgccgaggaagacgccgaggccgaggccgaaacagaggaaaccagggctgaggaggacgaggaggaagaggaagcaaaggaggcggaagatggaccgatggaggaatcaaagccgaaacctcggtcttttatgcccaacctcgtgcctccaaagatccccgatggagaaagagtggacttcgacgatatccaccgcaagagaatggagaaggatctcaacgagctgcaggcgttgattgaagcccacttcgaaaaccggaaaaaggaggaagaggagctggtgtccttgaaagaccgcatagagaggagaagggcagaacgagctgaacaacaacgcatacgcaatgagcgtgaaaaagaacgccaaaaccggctggcggaggagcgcgcccgacgagaagaagaggagaatagaagaaaagccgaagacgaagcccgcaagaaaaaggctctgagtaacatgatgcatttcgggggctatatccagaagaccgagaggaagagtggtaaacggcaaaccgaaagagaaaagaagaagaaaatactagcggagagaagaaaagttctggctatcgaccacttgaatgaggaccagctcagagagaaggcaaaggaactttggcagagtatatacaaccttgaggcagagaaattcgacctgcaggaaaaattcaagcagcagaaatatgaaattaacgtgcttcggaatcgcataaacgacaatcagaaagtctccaaaacacggggcaaagccaaggtgactgggcggtggaaatag

SEQ ID NO: 209963 - DNA, 876 bp, synthetic construct
  misc_feature 1..876: note = Description of Artificial Sequence: Synthetic coding sequence
  source 1..876: mol_type = other DNA
atgagcgacatcgaggaggtggtggaggagtacgaggaggagtacttagagcacgctgaagccgccgtcgaagagcaggaggaggctgcagaagaagacgctgaggcagaggcagaaactgaggagacaagggccgaagaagacgaggaagaagaggaggctaaggaagccgaagatgggcccatggaagagtcaaaacccaaaccccgctccttcatgccgaatttggtaccgccaaagatccctgatggagagcgggtggactttgatgatatccatagaaaaagaatggagaaagaccttaatgagcttcaggccctgattgaagcccattttgagaatcgaaaaaaagaagaggaagagctggtgtctctcaaagatcgcatcgaacggcggcgggcagaacgcgccgagcagcaaaggataagaaacgaacgcgagaaggagaggcaaaatcgactggccgaggagcgggcccgtcgggaggaggaggagaacagaaggaaagctgaggacgaggcacgtaaaaaaaaagcactgtcaaacatgatgcatttcggtggttacatccagaagcacaccctgcaaacagaaagaaaaagtggtaagcgccagaccgaaagagagaagaaaaagaagatcctggcagagagaagaaaagttctggctattgatcatctgaatgaagaccagcttcgagagaaagccaaggaactatggcaatcaatctacaacttggaggctgagaaattcgatcttcaagagaaatttaagcagcaaaaatatgagatcaacgttctcaggaacaggattaatgacaatcagaaggttagtaaaaccagggggaaagctaaggtgaccggcaggtggaaatag

SEQ ID NO: 209964 - DNA, 894 bp, synthetic construct
  misc_feature 1..894: note = Description of Artificial Sequence: Synthetic coding sequence
  source 1..894: mol_type = other DNA
atgagcgacatcgaggaggtggtggaggagtacgaggaggagtacttggagcatgccgaagctgccgttgaagaggaggaagactggcgcgaggacgaggatgagcaggaggaggctgccgaggaagacgcagaggctgaggcggagacagaggaaaccagagccgaggaggatgaggaggaggaagaagccaaggaggcagaggacggccctatggaagaaagtaagcctaaacccagatcttttatgccaaatctcgtaccccccaagattccagatggggagagggttgacttcgacgacattcacaggaagcgcatggagaaagatcttaacgaattacaggcattgatagaggcgcatttcgagaatagaaagaaggaagaggaggaacttgtgagcctgaaggatcggatcgagcggcggagggccgaacgtgcggagcagcagcgcatccgaaatgagagggagaaggagcgccagaaccgcctggcagaagaaagggcaagaagagaggaggaggagaatcgacggaaagctgaagatgaggcacggaaaaaaaaggcactgagtaacatgatgcatttcggcggctacatccagaaaactgagcggaagagcggaaaaagacagaccgaacgagagaagaaaaagaaaattctggcggagaggagaaaagtgctggccattgaccatttgaatgaagatcagctcagagaaaaagcaaaagaattatggcagtcgatatataacctcgaggcagagaagttcgacttacaggagaaatttaagcagcagaaatacgagattaatgtgctgcggaacagaataaacgacaatcaaaaagtgtcaaaaactcgaggtaaggccaaggtaactggacgctggaaatag

SEQ ID NO: 209965 - DNA, 867 bp, synthetic construct
  misc_feature 1..867: note = Description of Artificial Sequence: Synthetic coding sequence
  source 1..867: mol_type = other DNA
atgagcgacatcgaggaggtggtggaggagtacgaggaggaggagcaggaggaagcggcagtggaggagcaagaagaggctgctgaagaggacgccgaagctgaggccgagacagaggagaccagagcagaggaagacgaggaagaagaagaggcgaaagaagccgaagatggccccatggaagaaagcaagcccaaacctaggtctttcatgccaaacttggtcccacccaagatccccgacggtgaacgtgtcgacttcgacgatattcaccggaaaaggatggagaaggacttaaacgagctacaagcattgatcgaggcacacttcgagaacaggaagaaagaggaggaggagctggtgtcattgaaggataggattgaaagacggagagccgagcgggcagagcagcagcggatcagaaatgaacgggagaaggagcgccaaaaccggctagctgaggaacgggccagaagagaagaggaagaaaacagacgtaaggccgaggatgaggcgcggaagaagaaggccctgagcaatatgatgcactttggtggatatatccagaaacaggcgcaaacagaacggaagtccggtaaaaggcagacggagcgcgaaaagaagaagaagattctcgccgaaagacgcaaagtcctggcgatcgaccacctgaacgaggatcaactccgcgagaaggccaaagagctttggcaatccatctacaatctggaagcagaaaagttcgacctgcaggaaaaatttaaacaacagaagtacgagatcaacgtcttaaggaaccggattaatgataaccagaaggtctcaaaaacccggggcaaggccaaggtaacgggcaggtggaagtag

SEQ ID NO: 209966 - DNA, 771 bp, synthetic construct
  misc_feature 1..771: note = Description of Artificial Sequence: Synthetic coding sequence
  source 1..771: mol_type = other DNA
atgagcgacgaggaggtggagcaggtggaggagcagtacgaggaggaggaggaggcgcaggaagaagctgccgaggttcatgaggaggttcacgaacccgaagaaaagccacgccccaaattgaccgcgcccaagatccccgaaggagaaaaggtggatttcgacgatatccagaagaaaaggcaaaataaggacctcatggaactccaagctctgattgattcccacttcgaagcacgcaagaaggaggaggaggagcttgtggctctcaaggaaaggatagaaaaacgacgagctgaaagggccgaacagcagcgcatccgcgcagaaaaggaacgtgagagacagaatagacttgccgaagagaaggccaggagagaagaggaggatgctaaacggagagccgaggatgatcttaaaaagaaaaaggctctgagtagtatgggtgccaattacagctcttatttagcgaaagctgaccagaagagaggaaaaaagcagactgcgcgtgaaatgaagaaaaagattttagccgagaggaggaagcccttgaatattgaccacctcggcgaagacaaacttcgtgacaaggcaaaagagctctgggagaccctgcatcagctggaaatagataagtttgagtttggcgagaaacttaagcgacagaagtatgacattactaccctcaggagcaggattgaccaagcacagaagcactccaagaaagctggcacgccggccaaaggcaaagtcggcggccggtggaagtag

SEQ ID NO: 209967 - DNA, 777 bp, synthetic construct
  misc_feature 1..777: note = Description of Artificial Sequence: Synthetic coding sequence
  source 1..777: mol_type = other DNA
atgagcgacgaggaggtggagcaggtggaggagcagtacgaggaggaagaggaggcccaggaagaagaggaggtgcaggaagataccgccgaggaggatgcagaagaggaaaaaccgagaccaaagcttactgcacccaaaatccccgagggggagaaggtcgacttcgacgatatccagaaaaagcggcagaataaggatctgatggagcttcaggcactgatagatagccacttcgaggcgcgaaagaaggaggaggaggagctggtcgccctaaaagagagaattgagaagagaagggctgagagggctgagcaacagagaatcagagccgagaaagaaagagagagacagaaccgactcgcagaagaaaaggcccggagggaggaagaggatgctaagcgaagagcagaagatgaccttaaaaaaaagaaggctttgtccagcatgggagcgaattattcatcctatctcgccaaggccgatcaaaagagggggaaaaaacagaccgctagggaaatgaaaaagaagattctcgccgaaaggcgtaagccattaaacattgatcatctgggcgaagacaagctcagggataaggcgaaggaactgtgggaaactcttcaccagctggagatagataagttcgagttcggtgaaaaactcaaaaggcagaaatacgatatcactacccttcggagtagaatagaccaagcccaaaaacatagtaagaaagcaggaacccctgctaagggaaaagtgggcggccgctggaagtag

SEQ ID NO: 209968 - DNA, 738 bp, synthetic construct
  misc_feature 1..738: note = Description of Artificial Sequence: Synthetic coding sequence
  source 1..738: mol_type = other DNA
atgagcgacgaggaggtggagcaggtggaggagcagtacgaggaggaggaagaagcccaggaagaggaagagaagcccagacccaagctcaccgcacctaagatcccggagggagagaaagttgacttcgatgacattcagaaaaagcgccaaaataaagatctgatggagctccaagcattgatcgactcgcacttcgaagccagaaagaaggaggaggaggagcttgtggctctgaaggagagaattgagaaacgacgtgccgagagagcagagcagcaacggattcgggcagagaaagagagagagcgccagaaccggttagccgaggaaaaagcgagaagggaagaggaagacgctaagcgccgggctgaagacgatttgaagaagaaaaaggccctttccagcatgggagcaaattattcatcatacctggcaaaggctgaccagaagaggggcaaaaagcagacagcgagagagatgaagaagaagatcctggccgagagacggaagcctctgaacattgaccacctcggcgaggataagctccgagataaggctaaagagctctgggaaacactccatcaactggaaatcgacaagttcgagtttggggaaaaattgaagcgccagaagtatgacatcactacactgcgtagccggattgaccaggctcagaaacactcaaagaaagcgggcacacccgccaaaggaaaagtaggcggcagatggaaatag

SEQ ID NO: 209969 - DNA, 759 bp, synthetic construct
  misc_feature 1..759: note = Description of Artificial Sequence: Synthetic coding sequence
  source 1..759: mol_type = other DNA
atgagcgacgaggaggtggagcaggtggaggagcagtacgaggaggaagaggaagcccaggaagaggctgctgaagtgcacgaagaagaggaaaagccacgccctaagctaactgcacccaaaatcccagaaggtgagaaggttgacttcgacgatatccagaagaaaaggcagaacaaggacctgatggaattgcaagcgttgatcgattctcacttcgaagctcgaaagaaggaggaagaagagctagtcgcactcaaagaacgcattgaaaagaggcgggccgaaagagcggagcaacagcgcatcagggctgaaaaggaacgcgaacgacagaacagactcgcggaggagaaagcacgcagggaggaggaggatgcaaagagaagagcagaggacgacttaaagaagaaaaaggctctgagcagcatgggagccaattattccagctatctggccaaggccgaccagaaaagaggcaagaagcagaccgctagggagatgaagaagaagatcttggcagagcggcgcaaaccactgaatatcgatcatctcggggaggataagttacgggacaaggcaaaagaactgtgggaaaccctgcaccagctggaaatcgacaagttcgaattcggcgagaagctaaaacgccagaagtacgatatcatgaacgttcgcgccagggtgcaaatgctcgcgaagttcagtaagaaggccgggacacccgccaagggaaaggtggggggcaggtggaaatag

SEQ ID NO: 209970 - DNA, 783 bp, synthetic construct
  misc_feature 1..783: note = Description of Artificial Sequence: Synthetic coding sequence
  source 1..783: mol_type = other DNA
atgagcgacgaggaggtggagcaggtggaggagcagtacgaggaggaagaggaagcgcaggaggaggccgctgaggtccatgaggaggacaccgcagaagaggatgctgaagaggagaaaccccggccgaagctgaccgctcctaagatacctgaaggtgagaaggtggattttgacgacattcaaaaaaagaggcagaacaaagatctcatggagcttcaggctctgatagactcccatttcgaggcccggaagaaggaggaagaggagttggtggccctcaaggagagaatagagaagaggcgggccgaacgggccgaacaacaaagaatccgcgcggaaaaggagagagaaagacagaatcggctggcggaggagaaggcaagacgggaagaggaggatgccaaaagacgtgctgaagatgacttaaaaaagaaaaaggcattgtcaagcatgggcgccaactactctagttatctggcaaaggccgaccaaaaaagaggaaagaaacaaacagcacgcgagatgaagaaaaaaatattggcggagcgccgaaaacccctcaacattgaccatctgggagaagataagctcagagacaaggccaaagagctctgggaaaccttgcaccaactggagattgataaatttgagttcggtgagaaattgaaaaggcagaagtacgacatcactaccctgagatctcgcatcgaccaggctcagaagcactccaaaaaagcaggcacccctgccaaaggaaaagtgggggggcgctggaaatag

SEQ ID NO: 209971 - DNA, 753 bp, synthetic construct
  misc_feature 1..753: note = Description of Artificial Sequence: Synthetic coding sequence
  source 1..753: mol_type = other DNA
atgagcgacgaggaggtggagcaggtggaggagcagtacgaggaggaggaggaggcacaggaagaggaggaggttcaggaggaggagaagcccaggccgaagctgactgcccccaaaattcctgagggagagaaggttgatttcgatgatatacagaaaaagagacagaacaaagacctgatggagctccaggctcttatcgattcccattttgaggcaagaaaaaaggaggaagaagagctggtcgccctaaaggagcgtatcgagaagagaagagctgagcgcgccgagcagcaacggattcgcgccgagaaggaacgcgaacgccagaacaggctggccgaagaaaaggcgcggagggaagaggaagacgctaaaaggagggctgaggacgatctgaagaaaaaaaaggccttaagctcaatgggagcgaattatagctcttacttagcaaaagctgaccaaaagcgggggaaaaagcaaaccgcgagggagatgaagaagaagattctggcagaacgcagaaagcccctgaatattgaccacttgggcgaggacaaactgcgggataaagcaaaagagctgtgggaaacacttcaccagctcgaaatcgataaatttgagttcggggagaagctaaagcgccagaagtatgatatcacaactctgagatccaggatcgaccaggctcagaaacacagtaaaaaggccggcacgccggcgaaaggcaaggtgggcggacgctggaaatag

SEQ ID NO: 209972 - DNA, 786 bp, synthetic construct
  misc_feature 1..786: note = Description of Artificial Sequence: Synthetic coding sequence
  source 1..786: mol_type = other DNA
atgagcgacgaggaggtggagcaggtggaggagcagtacgaggaggaagaggaggctcaagaggaagcagcggaagtccatgaagaggggatgcgaacacaggatttcttccatgaggagaaaccacgcccgaaactcactgcaccaaaaatccccgaaggtgagaaagtggacttcgacgatatacagaagaaaaggcagaacaaagacctgatggagttgcaggcgctcatcgacagtcatttcgaggctcgtaaaaaagaggaggaagagttggtagcactgaaggaaagaattgaaaagcggagggccgagcgtgccgagcagcagcgcatcagggccgagaaggagcgggaaagacagaacagactcgcggaggaaaaggccagaagggaggaggaagatgccaagcgcagagctgaagatgaccttaaaaagaagaaagctttgtcaagcatgggagctaactactcatcctacctcgctaaggctgatcagaagagaggaaagaagcagaccgccagagagatgaaaaagaagattctggccgaacgcaggaagcccctgaacatcgaccacctgggggaggacaagctgagagataaggccaaagagctttgggaaactctccaccagcttgagatcgataaatttgaattcggggaaaagttgaagcgacaaaagtatgacattactacgcttcgcagtaggatagatcaagctcagaagcactccaaaaaggccgggacccccgccaaggggaaggtcgggggccggtggaagtag

SEQ ID NO: 209973 - DNA, 786 bp, synthetic construct
  misc_feature 1..786: note = Description of Artificial Sequence: Synthetic coding sequence
  source 1..786: mol_type = other DNA
atgagcgacgaggaggtggagcaggtggaggagcagtacgaggaggaggaggaggcacaggaagaagccgccgaagttcacgaggaggtccacgaaccagaggaggtgcaagaagaggagaagcctaggcctaagctcaccgcccctaagattccggaaggagagaaagtcgatttcgatgacattcagaagaaacgccagaacaaagatctgatggagctccaggcgctcattgactctcactttgaggccagaaaaaaagaagaggaggaactggtggccctgaaggagcgtattgaaaaaaggcgagccgaacgggcagagcaacaaaggatcagagccgagaaagaacgagagcgacagaatcgccttgcagaggaaaaagcacgtagggaggaggaagacgcgaagcgccgcgcggaggacgatcttaaaaaaaagaaggccctgagcagcatgggagcaaactattcctcttacctggcaaaggcagatcagaagcggggaaaaaagcagacagcccgcgagatgaagaagaagatcctggctgaaaggcggaaaccactcaacattgaccacctcggggaggacaaactgagggacaaagccaaggagttgtgggagaccttgcaccagctcgagatcgataagtttgaatttggagaaaaacttaagaggcagaaatacgacattaccaccctcaggtcccgaattgaccaggcccagaaacactccaaaaaggccgggacacccgccaagggcaaggttggtggacggtggaaatag

SEQ ID NO: 209974 - DNA, 753 bp, synthetic construct
  misc_feature 1..753: note = Description of Artificial Sequence: Synthetic coding sequence
  source 1..753: mol_type = other DNA
atgagcgacgaggaggtggagcaggtggaggagcagtacgaggaggaagaggaggctcaggaagaagaggaagtgcaggaggaggaaaaaccgagaccaaaactcacagcccctaagatcccagaaggagagaaagttgacttcgatgacatccaaaaaaaacggcagaataaggacctcatggaactccaggctctgattgattcgcactttgaagccagaaagaaggaagaagaggagctcgtggcattgaaagaacgaatagaaaaacggcgagcagagcgagccgagcagcaaagaatccgggcggagaaagagagagaaagacagaaccggctggctgaggagaaagccagaagggaggaggaggatgctaagaggagagctgaggatgatctgaagaaaaagaaggccttatcctctatgggagcaaactactcgtcatacctagctaaagcagatcagaagcgcggcaagaaacagactgctcgagaaatgaagaaaaagatcctggccgaacggagaaagccactgaacatagaccaccttggagaagataagctccgggataaggccaaagaactttgggaaaccttacaccagctagagattgacaaattcgaatttggcgaaaagcttaagagacaaaaatacgatattatgaatgttcgggcaagagtccagatgctggcaaaattcagcaagaaagcagggacgccggccaaaggtaaagtgggtggaagatggaaatag

SEQ ID NO: 209975 - DNA, 810 bp, synthetic construct
  misc_feature 1..810: note = Description of Artificial Sequence: Synthetic coding sequence
  source 1..810: mol_type = other DNA
atgagcgacgaggaggtggagcaggtggaggagcagtacgaggaggaggaagaagcccaggaggaggccgcagaggtgcacgaagaggtacacgagcctgaggaggttcaggaagataccgcggaagaggacgcagaggaggaaaaacctcgtcccaaactgaccgctcctaaaatccctgaaggcgagaaggtagatttcgatgatatccaaaaaaagagacaaaacaaggatcttatggagttgcaggctctgatagactcacactttgaggctagaaagaaggaggaggaggaactggtggccttaaaggagaggatcgagaaacgaagagccgagagagcggaacagcaaagaatacgggcagagaaagaacgggagcgtcagaacaggctggcagaagaaaaggcacgccgcgaggaggaagatgctaagcgccgagccgaggacgatttgaagaagaagaaagcgctgtcctccatgggcgctaactactcctcatacctggctaaggccgaccaaaagcggggcaagaagcaaactgccagggaaatgaagaaaaagattctcgccgaaagacggaaacccctgaacatcgaccacctgggcgaagataaattgcgcgacaaggcaaaggagctctgggagactctgcatcagttagaaatcgacaaattcgagttcggagagaaactcaaacgccagaagtatgacatcactaccctcaggtcccgcatcgatcaggctcagaagcactctaagaaggccggtactcccgctaagggcaaagtgggcggccggtggaaatag

SEQ ID NO: 209976 - DNA, 813 bp, synthetic construct
  misc_feature 1..813: note = Description of Artificial Sequence: Synthetic coding sequence
  source 1..813: mol_type = other DNA
atgagcgacgaggaggtggagcaggtggaggagcagtacgaggaggaagaagaggcccaggaagaagccgctgaagtccacgaagaggctcaccccggcgaggagagcgtgcgcgaagacactgccgaagaggatgccgaagaggagaaaccccgtcccaaattgactgccccaaaaatcccagaaggtgagaaagtcgattttgatgacattcagaaaaaacgccagaacaaagatctgatggagctgcaggcgctgatcgattcccactttgaggcgcggaagaaagaagaagaagagttagttgcgctgaaagagcgcatagagaagcgccgcgccgagcgcgcagagcagcagcgcatccgagcggaaaaggaaagggagagacagaatagacttgccgaggaaaaggcccgccgagaggaagaggacgccaagcgcagagcagaggacgacttgaagaaaaagaaagctctgagttccatgggggctaattatagctcgtatttggcaaaggccgatcaaaagaggggcaagaaacagaccgctagagaaatgaagaaaaaaatactggccgaaagaaggaaacctttgaatattgaccatctcggcgaagataagctgcgagacaaggctaaagagctttgggagactttacaccaactggaaatcgataagtttgagtttggggagaagcttaagagacagaagtatgatatcacaacactcaggtctaggattgaccaggcacagaaacacagcaagaaggccgggactccggccaagggcaaagtgggaggccgctggaaatag

SEQ ID NO: 209977 - DNA, 435 bp, synthetic construct
  misc_feature 1..435: note = Description of Artificial Sequence: Synthetic coding sequence
  source 1..435: mol_type = other DNA
atgagcgacgaggaggtggagcaggtggaggagcagtacgaggaggaggaagaggcacaggaggaggctgccgaggtgcacgaagaggaacgtagagctgaggatgatctgaagaagaagaaggccctcagctctatgggcgccaattatagctcctatcttgctaaggcggaccagaaaagaggtaaaaaacaaactgccagagaaatgaaaaagaagatcctggctgagagaagaaagccactcaatatcgatcacctgggtgaagacaagctgagagacaaggccaaagagctttgggagcccccccagtcctgccaggggctgcctgacagtcctgggggaggagaggctataccaggccgccctcctcggctgtgcccatgctgcctgcacccattgggtccggttaataaggccgccgagccaccctag

SEQ ID NO: 209978 - DNA, 1617 bp, synthetic construct
  misc_feature 1..1617: note = Description of Artificial Sequence: Synthetic coding sequence
  source 1..1617: mol_type = other DNA
atggaggagagcgtgaaccagatgcagcccctgaacgagaagcagatcgccaatagccaggatggctacgtgtggcaggttaccgacatgaatcggctccacagattcttatgtttcggatccgagggtggtacttactatatcaaggagcaaaagctcggcctagagaatgcagaggcgctgattagacttatcgaggacgggcgtggttgcgaagtgatccaggagattaagtctttcagccaggagggtcggacgacaaaacaggaacccatgctcttcgcgctggccatctgctcccagtgctcagatattagcacaaagcaagctgcttttaaggccgtgtccgaagtgtgcagaatccccactcacctgtttaccttcatccagtttaagaaggacttaaaggaaagtatgaagtgtggcatgtgggggcgcgcactgagaaaggccatcgcagattggtataacgagaagggcggaatggcactggcactggctgtaaccaagtacaaacaacggaacggatggagccataaagacctcttgaggctgtctcatttgaagccaagctccgagggactggccattgtcaccaaatacattaccaaagggtggaaagaggtccatgaactctacaaggagaaggcattgagcgtagaaacggaaaaattgttaaaatacctggaagctgttgagaaggtgaagcgcacccgcgacgagcttgaggtcattcacctgatcgaggagcatagacttgttagagagcacctgctcactaatcatttaaagagtaaagaagtatggaaagcactactgcaggaaatgccactgactgccctgctacgcaatttgggcaaaatgacagcaaacagcgttctggagcctgggaactcagaggtttcgctcgtgtgtgagaagctgtgcaacgagaaactgcttaagaaggcgaggattcacccatttcatatcctcatagccctggagacttataagactggacacggactccgaggaaagctcaaatggcgaccagacgaggagatcctgaaggctttggatgccgccttttacaagaccttcaaaaccgtggaacctacgggaaagcggttcttacttgccgtggacgtgtcagcttctatgaaccagcgagtattgggcagcattctaaacgcctctactgttgcggccgccatgtgtatggtggtcacacgcaccgaaaaggatagctacgtggtggccttcagtgacgagatggtgccatgccccgtcacaactgatatgaccctgcagcaggtgcttatggcgatgagtcaaatcccagcaggaggcactgattgtagtctccctatgatttgggcccagaagaccaacacaccagccgacgtgtttatcgtttttacggacaacgagacctttgcagggggagtacatcccgccatcgccctgcgcgagtataggaagaaaatggatatccccgctaaattgatcgtgtgcgggatgacgagtaacgggttcactatcgccgaccctgacgaccggggaatgttagacatgtgcggattcgatacaggggcgctggacgttattagaaacttcacacttgacatgatatag

SEQ ID NO: 209979 - DNA, 1557 bp, synthetic construct
  misc_feature 1..1557: note = Description of Artificial Sequence: Synthetic coding sequence
  source 1..1557: mol_type = other DNA
atggaggagagcgtgaaccagatgcagcccctgaacgagaagcagatcgcaaacagccaagatggatatgtgtggcaggtgacagacatgaaccggctacaccgatttctttgtttcggctcagagggtggaacgtattatatcaaggaacaaaagcttgggctcgagaacgccgaagcgttgattagacttatagaagatgggagaggctgcgaggtaattcaggaaattaaaagtttttctcaggaaggacgcacaaccaaacaggaacctatgctcttcgcgctggcaatctgttcacagtgttccgatattagcaccaaacaggctgcattcaaggctgtgagcgaagtgtgccgcattcctacacatctttttacattcatacagtttaagaaggatctaaaagaatctatgaaatgcggcatgtggggccgtgccctgcgaaaagcgatcgccgattggtacaatgaaaaaggaggaatggctcttgccctggccgtgacaaagtacaaacagaggaacggctggtcacacaaagacctgctgaggttgagccacctgaagcccagctcagagggcctggcgatcgtaacaaaatacattactaaaggatggaaagaggttcacgagctttataaggaaaaggccttgtccgtcgaaacggagaagctcctgaaatatttagaggccgtcgaaaaagtgaaaagaacacgtgacgaactggaagtcattcatctgattgaagagcaccggctcgtgagggaacatttgttgacaaatcacctgaaaagtaaggaggtgtggaaagccctcctgcaggaaatgcctctgacggccctgctgcgtaatctgggcaagatgactgctaattccgtgctggagcccggtaactcagaggtctcactggtttgtgaaaaactatgcaatgaaaagctgcttaagaaagcacgaattcatccattccacattctcattgctctggagacttataagacaggtcatggcctgcgtggaaaactcaaatggcggcctgacgaggagatcctcaaagccctcgatgctgctttttataaaaccttcaaaacggtcgagcccactggcaaacgcttcctcttggccgtggacgtctctgctagcatgaatcaacgcgtgctgggaagcatcctcaacgcttctacagtggctgctgccatgtgtatggtggtgacaagaaccgagaaagactcgtacgtcgttgcattttcggacgagatggttccctgccccgtgacaacagatatgaccctgcagcaggtcttgatggccatgtcgcagattccagctggcggcaccgactgcagcctccccatgatctgggcgcagaagaccaataccccagccgacgtcttcattgtgtttaccgacaatgagaccttcgcaggcggcgtacatcccgccatagcactacgagaatataggaaaaagatggacatacccgcaaaacttattgtgtgtggtatgacttcaaacggattcacaattgccgatcctgatgaccgggacacagtcaaatag

SEQ ID NO: 209980 - DNA, 1578 bp, synthetic construct
  misc_feature 1..1578: note = Description of Artificial Sequence: Synthetic coding sequence
  source 1..1578: mol_type = other DNA
atggaggagagcgtgaaccagatgcagcccctgaacgagaagcagatcgccaactcccaagatggatacgtttggcaggttactgacatgaaccgactccaccggtttctttgtttcgggtccgagggtgggacctactatatcaaggagcagaagctgggcctggagaacgccgaggcgctgattcgattgattgaggatgggcgcggatgcgaggttatacaggaaattaagagctttagccaggagggacgcactaccaagcaggaaccgatgctatttgcgctggctatctgcagccagtgtagcgatatttctacaaagcaagccgcttttaaggccgtgagtgaggtttgtagaatacctacccacctgttcaccttcatccagtttaaaaaggatctcaaggaaagtatgaagtgcggaatgtggggccgcgccctaaggaaggcgattgccgattggtacaacgagaaaggaggcatggctctcgccctcgcagttactaaatacaaacagcggaacggctggtcccacaaagatcttttgcgactgtcacacttaaaaccctcctcagagggacttgccatcgtgaccaaatacatcaccaaaggctggaaggaggtccacgagctttataaggaaaaagcgctatccgttgaaaccgaaaaactcctgaaatatcttgaagccgtggagaaagtcaagcgcacccgcgacgagttggaagtgattcacctgattgaagagcatagactcgttagggaacacctgctgactaatcacctgaaaagtaaagaggtgtggaaggccctgttacaggagatgcctttgaccgccttgctgcggaatctgggcaagatgacagctaactccgttttggaaccaggaaactcagaggtttcactggtgtgcgagaagctttgtaacgagaagctcctgaaaaaagccagaatccacccattccatatccttatcgctctcgaaacctacaaaacaggacatggcctgcgcggtaaacttaaatggcggcccgatgaggaaattctgaaggccctggatgcggccttttataagaccttcaagactgtcgagcccacaggaaagcggtttctcttggctgtggatgtatcagcctcgatgaatcagagggtgctaggctctatcctcaatgctagcactgtcgctgccgccatgtgcatggtggttacccggacagaaaaagactcttatgtggtcgcgttctcagacgaaatggtgccttgccccgtgacgacggatatgaccctgcagcaggtacttatggctatgtctcagattcccgccggtgggactgactgtagcctcccgatgatctgggcccagaaaacaaatacccctgcagacgttttcattgtattcacggacaacgagacgtttgctggaggcgtgcaccctgctatcgcattgcgagagtatcgtaaaaagatggatattcccgccaagcttatcgtgtgcgggatgacatcaaatggattcactatcgctgaccctgacgatagagccctgcagaacaccttgcttaacaagagtttctag

SEQ ID NO: 209981 - DNA, 1605 bp, synthetic construct
  misc_feature 1..1605: note = Description of Artificial Sequence: Synthetic coding sequence
  source 1..1605: mol_type = other DNA
atggaggagagcgtgaaccagatgcagcccctgaacgagaagcagatcgcgaacagtcaggacggttatgtctggcaggtgacagacatgaaccggctgcatcgctttctgtgctttgggtcagaaggagggacatactacatcaaggagcagaagcttggcctggagaacgcagaggccctgatccgtttgatcgaggatggcaggggatgtgaggtgattcaggaaattaagtctttttctcaggaagggagaaccactaagcaggaacctatgcttttcgctctggcaatttgcagccaatgcagcgacatctctactaaacaggccgctttcaaggcagttagcgaggtttgtagaattcccacacacctattcacctttatacaattcaaaaaggacctgaaggaaagcatgaaatgcggaatgtggggaagagctttgagaaaggccatagcggactggtataatgagaaaggcggaatggcccttgcacttgccgtcactaagtacaagcaacggaacgggtggtcacacaaggatctgctgcggctgtcacacctcaaaccatcctccgagggcctggctatcgtcactaaatatattacgaagggctggaaggaggtgcatgagctgtacaaagaaaaagctttgtcagtcgagactgaaaaacttctgaagtacctcgaagcagtcgagaaggtcaagcgcactcgagacgagctggaggtgatccaccttatagaggagcacagactcgtgcgagaacatctcttgacaaaccatcttaagagcaaggaggtttggaaggccctgctacaggagatgcccctgacagccctgctaagaaacctgggaaagatgacggccaactccgtcctcgagccgggaaacagtgaggtgagtctcgtctgcgagaagctgtgcaacgaaaagctacttaaaaaagcacgcatacaccccttccatatcctcatagctctcgaaacgtataagacaggccatggtctcagaggcaaacttaaatggcgaccagatgaggagatactcaaggcccttgacgctgcattttacaaaaccttcaaaacggtggagccaaccggaaagaggtttctcctcgccgtggatgtctcagcttctatgaatcagagagtgttggggagcattctgaatgcctctacggttgccgccgctatgtgtatggttgtcacgcgaacagagaaggactcttatgtcgtcgccttcagcgacgaaatggtgccgtgtcctgtgacaacagacatgaccctgcaacaagtcttgatggccatgagccagatacccgccggagggacggactgctctctccctatgatttgggctcagaaaactaatacacctgctgacgtgttcatagtatttacggacaatgaaacattcgctggcggtgtacacccggccatcgccctccgggagtaccgaaaaaagatggatatccctgcgaaactgatcgtctgtggaatgacgtctaacggttttacaatcgctgaccctgatgatagaggtatgctcgacatgtgcggttttgacactggagcccttgacccctgcaaaatcccttactag

SEQ ID NO: 209982 - DNA, 1617 bp, synthetic construct
  misc_feature 1..1617: note = Description of Artificial Sequence: Synthetic coding sequence
  source 1..1617: mol_type = other DNA
atggaggagagcgtgaaccagatgcagcccctgaacgagaagcagattgccaactcacaagatggatatgtttggcaggttactgacatgaatagactgcaccgattcctttgtttcggcagcgagggaggcacgtattacattaaggaacagaagcttggcctggaaaacgccgaagcccttataagactgatcgaagacgggcggggatgcgaagtgattcaggaaataaagtctttttctcaggagggccgcaccacgaagcaggaacccatgctctttgcacttgccatctgctcccagtgcagtgatatttctactaagcaagctgcattcaaagctgtgtccgaagtgtgccgcatccctacccacctatttactttcatccagttcaagaaagatttaaaggaaagcatgaaatgtgggatgtggggtagagccctgcgtaaagccatcgcagactggtataatgagaagggtgggatggcgttggccctggccgtaaccaaatataagcagaggaacggttggagccacaaggatctgctccggctgtcgcacctgaagccttctagtgagggtctggcgatcgtgacaaagtatataactaaaggctggaaagaagttcatgagctctacaaagaaaaggcactctccgtggaaaccgagaaattgctgaaatacctggaggccgttgagaaagtgaaacgcacccgcgatgagctggaggtgattcatctcattgaagagcataggctagtaagggaacacttgctgaccaatcatcttaagtccaaggaggtgtggaaggccctcctgcaggagatgccactgaccgccttgctgcgcaacctgggaaagatgactgctaattcagttttagaaccaggcaacagcgaagtttctctcgtgtgtgagaaattgtgcaacgaaaaattgctgaaaaaggcgcggattcatccttttcacatactgatcgctttggaaacctacaaaaccggacacggcctgcgaggaaagctgaagtggcgcccggatgaggagatcctgaaagccctcgatgcagccttttacaagacttttaaaacggtggagccaacggggaagagatttctactcgcagtggacgtgagcgcctccatgaaccaaagagttctcggatccattttgaacgcttccacagtcgccgcggccatgtgtatggtggtaaccagaactgagaaggattcctacgtggtggcctttagtgatgagatggttccgtgcccagtgacaaccgacatgacgctacagcaggttctgatggctatgagccagatcccagctggcggtacagactgtagcctgcctatgatttgggcccagaagaccaacacccccgccgacgtattcatagtcttcactgacaacgaaaccttcgctggaggggtgcaccctgcgatcgccctgcgagagtaccgcaaaaagatggatatccccgctaagctgatcgtttgtggcatgacgagcaatggattcaccatcgccgaccccgatgacagggggatgctagacatgtgtggcttcgacaccggagcactggatgtaatccgcaatttcactttggacatgatttag

SEQ ID NO: 209983 - DNA, 1617 bp, synthetic construct
  misc_feature 1..1617: note = Description of Artificial Sequence: Synthetic coding sequence
  source 1..1617: mol_type = other DNA
atggaggagagcgtgaaccagatgcagcccctgaacgagaagcagatcgcgaacagtcaagacggttacgtgtggcaggtgaccgatatgaatcgcctgcatagatttctgtgcttcggctccgaaggagggacgtactacatcaaggagcagaagctgggtctcgaaaacgctgaggcattgattcggcttatagaggacgggcggggatgtgaggtgattcaggaaatcaaatcctttagtcaggaaggccgcaccaccaagcaggagcccatgctatttgccctggccatttgcagccagtgctcagacatcagcaccaaacaggctgcgttcaaggccgtgtctgaagtatgcagaattcccacacaccttttcacattcattcaatttaaaaaagatttgaaagagagcatgaagtgtggtatgtggggccgagcactccgcaaggcaattgccgattggtacaacgagaagggtggtatggccctggccctcgccgttactaagtataaacaacgaaacggatggagccataaagatcttttaaggctgtcgcatctgaaacctagctctgagggcctcgcaattgtgactaagtacatcactaagggttggaaagaggtgcacgaattatacaaggagaaggccctgagcgtggaaaccgaaaagctgctgaagtacctggaagccgtggaaaaagtcaaaaggacacgcgatgaacttgaagtaattcacttaatcgaggagcaccggcttgtgcgtgagcatctgctgacaaaccatctcaagtccaaagaagtgtggaaggccctgctgcaggaaatgcctctgacggcacttctacggaatttaggcaagatgactgcaaattctgtgctagaacctgggaacagcgaggtgagcctggtctgtgaaaagctctgcaatgaaaaactcttaaagaaagccagaatccatcccttccacatcctgattgccctagagacctacaaaacagggcatgggcttcgcggcaagctgaagtggagaccagacgaggagatactgaaggctcttgatgctgctttttacaagactttcaagactgtcgagcctactgggaagcgctttctcctagctgtggacgtatccgccagtatgaatcaacgcgtgctaggttccatcctcaacgcctctactgtcgctgccgccatgtgcatggtggtcacccgcaccgagaaggactcatacgttgttgcattttcggacgagatggtcccctgcccggtgaccaccgatatgaccctccagcaagttctcatggccatgagccagattccagcgggcggtacggactgcagcttacctatgatttgggctcagaagacaaatactcccgcagacgtttttattgtgtttactgataatgagacattcgcaggcggggttcatcccgcaatcgccttgcgggaatatcgcaaaaaaatggacatacccgcgaaactcattgtgtgcggaatgacaagcaatggattcaccatcgcggaccccgacgaccgggggatgttggacatgtgcggattcgacacaggagctcttgacgtgatcaggaactttaccctggacatgatatag

SEQ ID NO: 209984 - DNA, 792 bp, synthetic construct
  misc_feature 1..792: note = Description of Artificial Sequence: Synthetic coding sequence
  source 1..792: mol_type = other DNA
atgcccctgaccgccctgctgcggaacctgggcaagatgaccgccaactcggtgctggagcctggaaacagcgaggtgagcctggtttgcgaaaagctgtgcaacgagaaactgctgaagaaggcgcgcattcaccctttccacatcctaattgccctcgaaacatataaaacgggacacgggctgagaggaaaacttaagtggcggccagacgaggagattctgaaggccttagacgcagcattttacaaaactttcaagaccgtggagcctactggaaagcgattcttattggccgtcgatgtgagtgcgagcatgaatcagcgagtattggggtccattttaaacgcttcgactgtcgcagcggccatgtgtatggtggtgacaagaactgaaaaggacagctacgtggtcgccttttctgacgagatggtcccttgtccagtgacgaccgacatgacgctgcagcaggtcttgatggcgatgtctcaaatccctgcaggaggaaccgattgctccctccctatgatttgggctcagaagacaaacacacctgctgatgtgttcattgtattcaccgacaatgaaaccttcgctgggggagtgcaccctgcgatcgccctcagagagtatagaaaaaaaatggatatcccagccaagcttatagtgtgcggcatgacttctaatggcttcacgatagctgatccggatgaccgaggtatgttggatatgtgcggcttcgacaccggagcattggacgtcatcaggaactttacccttgacatgatttag

SEQ ID NO: 209985 - DNA, 126 bp, synthetic construct
  misc_feature 1..126: note = Description of Artificial Sequence: Synthetic coding sequence
  source 1..126: mol_type = other DNA
atggaggagagcgtgaaccagatgcagcccctgaacgagaagcagatagcgaattcccaagatgggtatgtgtggcaagtaaccgacatgaatcggcttcatcgatttttgtgtttcggctcatag

SEQ ID NO: 209986 - DNA, 1050 bp, synthetic construct
  misc_feature 1..1050: note = Description of Artificial Sequence: Synthetic coding sequence
  source 1..1050: mol_type = other DNA
atggccgccagcgaggccgccgtggtgagcagccccagcctgaagaccgatacttctccagttttggagaccgctggaacagtggcggccatggctgccacacctagcgcgagagcggcagcagcagtggtggccgctgccgcgcgcaccggcagcgaggcgagagtcagcaaagccgcccttgccaccaagctgttatctctgagcggggtttttgctgtgcacaagcctaaaggtcccacatccgccgaactcttgaataggctgaaggagaagctgcttgcagaggctggaatgccttccccagagtggaccaaacggaaaaagcagacgctgaaaattggtcatggcgggactctggatagcgctgcacggggcgtgttggttgttgggattggctcaggaacgaagatgctcacatccatgctctccggatcgaagcgctacacagctatcggggagctgggtaaggccacagatacactggactctacgggacgggttaccgaggagaagccatacgataagattacgcaagaagatatcgagggtatcctgcagaagtttaccggcaatattatgcaagtcccaccgctctactccgctctgaaaaaagacggccagagactgtctaccctgatgaagagaggcgaggtcgtggaagccaagccggcccgcccagtgacagtatactccatctccttacagaagtttcagcctcccttctttacccttgacgtggaatgtggggggggcttttatatcagaagtctggtgtccgacattggcaaggaactgagcagctgcgccaatgtactggagctaactcgcaccaaacagggaccattcacactagaagaacacgcactgccagaagataaatggaccattgacgacatcgctcagtcactcgaacattgttcctcgctgttccctgctgaactcgctcttaagaaaagcaaaccagaaagcaacgagcaagtgctgagctgtgagtatataaccctgaacgagcccaagagggaggatgatgttatcaagacttgttag

SEQ ID NO: 209987 - DNA, 996 bp, synthetic construct
  misc_feature 1..996: note = Description of Artificial Sequence: Synthetic coding sequence
  source 1..996: mol_type = other DNA
atgggcagcgccggcctgagccggctgcacggcctgttcgccgtgtataagccgccaggcttaaagtggaagcacttgcgagatacagtagaattacaactgctaaagggcctgaatgcacgaaagcccccggcccctaaacagcgcgtccgctttttacttggacctatggagggctcagaggagaaggagcttacgctgaccgctacctcggttcctagtttcatcaatcacccactagtttgtggacctgccttcgcccatctcaaagtgggagtgggccatcggctagacgctcaagcgagcggtgttctagtgctgggtgtgggccacgggtgccgcctgctgaccgatatgtataatgctcatcttactaaggactacacagtacgcgggctcctcggcaaggccactgacgattttagggaggatggcaggctcgtggagaaaacaacgtatgaccatgtaacccgagagaagctggaccggatcctggcagtcatacagggcagccatcaaaaggctctcgttatgtactccaatctcgacctgaagacccaggaggcatacgaaatggcggtgcgaggactgatccgcccaatgaacaagtcccccatgctcataacagggatccggtgcctttacttcgcaccacccgagtttttgttggaggtgcaatgtatgcacgaaacacaaaaggaactcaggaagctggtgcacgagattggcctggagctcaagacgaccgccgtgtgtactcaagtgagacggacccgggatggcttctttactctcgattcagcgctcttgagaacacagtgggacttgaccaatatacaagatgccattcgggctgccacaccccaagtggccgccgagctggagaagtccttgtcaccgggacttgatacaaaacagctcccgagtcctggatggagctgggactctcaggggccgtcttccaccctcgggttggaacgcggcgccggccagtag

SEQ ID NO: 209988 - DNA, 828 bp, synthetic construct
  misc_feature 1..828: note = Description of Artificial Sequence: Synthetic coding sequence
  source 1..828: mol_type = other DNA
atggagggcagcgaggagaaggagctgaccctgaccgccaccagcgtcccctcatttattaatcaccccctggtctgcggaccagcattcgcccacttgaaagttggtgttggccataggcttgatgcacaggctagtggagtgctggtcctcggggtgggccatggatgcagactgcttaccgacatgtacaacgcacatctcaccaaagactacacagtcaggggactgctcgggaaagcgacagacgacttccgcgaggacggccgactcgtggagaagacaacctacgaccatgtcacacgcgagaagctcgaccggattctggctgttatccaaggcagccaccaaaaggcgctggtcatgtattcgaatctggacctcaaaactcaggaggcatacgagatggcagtgcgggggcttattaggcccatgaacaagagtcctatgttgattacggggattagatgcctgtacttcgcccctccagagttcctccttgaggtccagtgcatgcatgagacacagaaggaactacgaaaattggtccacgagattggacttgagttgaaaactaccgccgtgtgcacccaggtgcgccggactagggacgggttctttacactggattccgccctcctgagaactcaatgggatctcacgaacattcaggatgcgattagagctgcaaccccacaagtggccgccgagcttgagaaaagcctttcccccggacttgatactaagcaattacctagccccgggtggtcttgggatagccaaggtccaagcagcaccctggggctggaacgcggagccggccagtag

SEQ ID NO: 209989 - DNA, 1701 bp, synthetic construct
  misc_feature 1..1701: note = Description of Artificial Sequence: Synthetic coding sequence
  source 1..1701: mol_type = other DNA
atgcggcggcagtggggcagcgccatgcgggccgccgagcaggccggctgcatggtgagtgccagccgcgcgggtcagccggaagctgggccttggtcttgtagtggggtgattctgagccgctcacccggacttgtgctctgtcatgggggtatcttcgtcccgtttctgcgtgcgggcagtgaagttctgacagccgctggcgccgtgttcttgccgggggattcatgcagagatgacctgaggctgcatgtgcaatgggcccctacagccgcaggtcctggcgggggtgctgagaggggcagaccaggactgtgtacaccacagtgcgcgtcccttgaaccaggacctcccgccccatccagaggccggcctctgcagcctagactacctgctgagttattgttgctcctgtcctgcccagctttctgggcacacttcgctcggctctttggcgatgaggctgcagaacagtggagattctccagcgcggcccgagacgacgaggtgtcggaagacgaggaggctgatcagctgcgtgccttaggttggtttgcgttgctgggagtgcggctcggccaggaggaggttgaagaggaacgtggtcccgccatggccgttagtccactgggcgccgttccaaagggtgccccactgctcgtttgtggcagtccatttggtgccttttgcccagatattttcctcaacactctgtcttgcggcgtgttgtccaatgttgccggtcctctgctgctgactgacgccaggtgtctgcctggaactgagggcggcggcgtgtttacggccaggcccgctggcgctttagtggccctcgtcgtggcccctctatgctggaaggcaggcgagtgggtgggttttactcttttatgtgccgcagccccactgttcagggcggctagagatgctttacatcggctcccgcattccaccgctgccctcgctgccctactccctccagaggtgggggtcccctggggcctaccgctgcgggactccggtccattgtgggccgctgctgccgtattggtggagtgcggaacagtttggggatccggtgtggcggtcgcccctcgcttggtggtcacctgtcgtcatgttagtccgcgcgaggcagccagagtgctcgtcaggagtactacacccaagagcgtggccatatggggccgagtggtgttcgccactcaagaaacttgcccttatgacatcgctgtcgtatcactcgaagaagatctggatgacgttcctatacctgtgcccgcagaacacttccatgagggggaggccgtctctgtggttgggtttggcgtgtttggacagtcttgcggcccctccgtaacttcaggcatcctttccgccgtggttcaggtgaacggcacccccgttatgctccagaccacatgcgccgttcattcaggaagcagcggcggcccgctgtttagtaatcactccggaaatcttctcggcattattacaagcaacactcgtgataacaatactggcgctacatatccccatctgaatttttctatccctattacggtgctgcagcctgcattacagcagtatagtcagacccaggatttggggggccttcgcgagttagatcgggcggctgaaccagtcagagtggtgtggcgcctgcagcgacctctggcggaggcccctagatctaagctgtag

SEQ ID NO: 209990 - DNA, 1197 bp, synthetic construct
  misc_feature 1..1197: note = Description of Artificial Sequence: Synthetic coding sequence
  source 1..1197: mol_type = other DNA
atgcggcggcagtggggcagcgccatgcgggccgccgagcaggccggttgcatggttagcgcatctcgcgctggccaacctgaggcaggaccctggtcttgctccggcgtcattctgagtcggtctcccggtctcgttctgtgtcacggcggtatttttgtgccttttctgcgggctggaagcgaggtcctgacagccgccggcgcggtgtttctgcccggcgacagctgccgggatgacctgcgcctgcacgtccagtgggctcccaccgctgcaggtcccggcggtggggccgagaggggaaggcccggcttgtgtacccctcagtgtgcctccctcgaacccggtcccccggctccaagtcggggccggcccctccagccgcgtttaccagctgagctgcttctcttgctctcttgccccgctttctgggctcacttcgccaggttgtttggcgatgaagccgctgaacagtggagattcagcagcgccgccagagatgatgaggtttccgaggacgaggaggccgatcaattgcgagctctgggttggtttgcactcctgggagtccggctgggccaagaggaagtggaagaagagcgaggacctgctatggccgtgtccccgcttggggcagttcccaagggcgctcccctgctcgtttgcggtagcccttttggcgccttttgtcccgatatcttcctcaacaccctgagttgcggggttctgtcaaatgttgcagggccgctcctgttaaccgacgccaggtgccttcctggcacagaaggcggcggtgtgtttaccgctcggccagcgggcgctcttgtggccctcgtggtagcgcccctctgctggaaagcaggagaatgggtgggattcactctgttgtgcgccgcagccccgctgtttcgggctgcgagagacgctcttcatcggttaccacactctactgccgccctggcggccctgctgccccctgaagttggagtgccatggggactccctttgagagattcgggcccgttgtgggcggcggccgccgtcctggtagaatgtgggacagtgtggggctccggggttgcagtagcaccaaggcttgtggttacttgccgccacgtctcacctcgggaggcagcccgcgtgttggtgcgaagcacaactcctaagcacaatcaccagcagcaccctggtcagtag

SEQ ID NO: 209991 - DNA, 828 bp, synthetic construct
  misc_feature 1..828: note = Description of Artificial Sequence: Synthetic coding sequence
  source 1..828: mol_type = other DNA
atgctgaacctgctgctgctggccctgcccgtgctggccagccgggcttatgccgcgccagcaccaggacaagcgctccagagagtcggaattgtcggtggccaggaagcaccaagaagcaaatggccttggcaggtctccctcagagtgcacgggccatattggatgcatttttgtggtggtagcctgattcatccgcagtgggtgctcaccgccgcgcactgcgtgggacctgacgtgaaggatctcgcagccctccgagtacaactgcgcgagcagcacctatactatcaggaccagctgctgcccgtgtctagaataatcgtgcacccccaattttatacagcccagatcggcgccgatatcgccttgttagagcttgaggaacccgttaatgtaagctcacacgttcatacagtgacactgccccctgcgagtgagactttcccaccagggatgccatgctgggtgactgggtggggagatgtggacaatgacgaacgcctgcctcctccttttcctcttaagcaggtcaaggttcctatcatggagaatcatatctgtgatgctaaataccatctgggcgcttacactggcgacgacgtcaggatcgtccgagatgacatgctttgtgccgggaacacaagacgcgattcatgccagggagactcggggggacctctcgtatgtaaggtaaacggaacttggcttcaggccggcgtcgtgtcctggggtgagggctgtgcacagccaaacagaccaggaatatatacaagggtcacctactatctggattggatacaccattatgtgcctaagaaaccctag

SEQ ID NO: 209992 - DNA, 849 bp, synthetic construct
  misc_feature 1..849: note = Description of Artificial Sequence: Synthetic coding sequence
  source 1..849: mol_type = other DNA
atgctgctgctggccccccagatgctgaacctgctgctgctggccttgcccgtgctggcctctcgcgcatacgccgctccagcacccggccaagctctgcagagggtaggcattgtcgggggccaagaggccccacggagcaaatggccatggcaagtttctttgagagtgcatggaccatactggatgcatttctgtggtgggtcattgattcacccccagtgggtcctaacagccgcacactgcgtgggcccggacgtgaaagacctcgccgctctgagggtgcagctgcgcgagcagcacttgtattaccaggatcagttgctgccagtgtctcggatcattgtgcacccacagttctatactgctcagatcggagctgacattgctctcttggagttggaagagccggtgaacgtctcgtctcatgtccatacggtaaccctgcccccggcatcagaaacttttcctccagggatgccctgctgggtcacaggatggggagacgtggataatgatgaacgccttccaccgccctttccattgaaacaggtaaaggtacccataatggagaaccatatctgcgatgcaaagtaccacctgggcgcatacaccggtgacgatgtaaggattgtgcgggacgacatgttatgcgctgggaacacacgaagagactcatgtcagggggatagtgggggtcccctggtgtgtaaggtgaacgggacatggctgcaggccggagttgtatcttggggagaaggatgcgcacaaccaaatcgcccagggatctacaccagagtaacctattatctcgattggattcatcattatgtgcccaaaaagccctag

SEQ ID NO: 209993 - DNA, 2532 bp, synthetic construct
  misc_feature 1..2532: note = Description of Artificial Sequence: Synthetic coding sequence
  source 1..2532: mol_type = other DNA
atgtggggccggctgtggcccctgctgctgagcatcctgaccgccaccgcagtcccagggccctccctgcggaggccaagtcgcgagctggacgccactcctagaatgaccatcccctacgaagaactctctggcacacggcacttcaagggacaggcccagaactattctacactgctgctcgaagaggcttccgctcggctgttagtgggagcaagaggagcactgttcagcttaagtgccaacgatatcggcgacggcgcccacaaggaaatccactgggaagcaagtccagagatgcagtctaaatgccaccaaaagggtaaaaataatcagacagagtgctttaaccacgtccgcttcttacagcgcctcaactctacccatctatatgcctgcggtacacatgcatttcagccactatgtgccgctatcgatgccgaggcgtttacgctgcccacatcgtttgaggaaggcaaagaaaaatgcccgtacgaccccgccagaggatttactggccttattattgatggcgggttgtatactgccacacggtatgaatttagatccattcccgatatcaggagaagcaggcatccccatagtctgaggaccgaagagacacccatgcattggctgaacgatgcagaatttgtattctctgttctcgtgcgcgagagtaaagcctctgctgtcggtgacgacgacaaggtttattacttcttcactgagagggcgaccgaagaaggctcgggtagttttacccagagcagaagctcccaccgagtggccagggtcgcccgggtgtgtaagggagatctgggtggcaagaaaattcttcagaagaaatggacttcctttctaaaagcacgcctgatttgtcatattccactgtacgagaccttgagaggcgtgtgcagccttgacgccgagacgagctcacggacccatttctacgctgcctttaccctctcaacgcagtggaaaaccctggaggcctcggccatatgtagatacgacttagctgagatccaagcagtgttcgctggaccctacatggagtaccaggacggctcccgcagatggggaaggtatgagggtggggtccccgagcccagacccgggtcttgtatcacagatagtcttcgcagtcaaggatataactctagccaggacctgccgtcactggtcctggactttgttaagctacatcccctgatggcgcgacccgtggtacccacgcgcgggcgcccgctgttactcaaaaggaatatcaggtacacacacctcaccgggacccctgtgacgacccccgctggaccaacttacgatctgctctttctcggcacagccgacgggtggattcataaggccgtggtgctgggaagcggcatgcatatcatcgaagagacccaggtgttcagagagtcccagagtgttgaaaatttagtgatttctctgctccagcacagcctctatgtgggagctccctcaggtgtaatccagttgccactgtctagttgttctcgctaccgctcctgctatgattgcattctggcccgggacccctattgtggatgggacccagggacacatgcatgcgccgcagctactacaattgctaatcgctctcaagggagtcggacagccctgattcaggacatcgagagaggtaataggggctgtgagagtagtcgcgacacaggtcctcctccaccactgaaaacccggtctgtgctgcgaggtgatgacgtgcttctgccctgtgaccaacctagcaaccttgcacgggccctttggctgctaaacggttccatgggtttgagtgatggtcagggaggttacagggttggtgtggacgggctcctcgtgactgacgcacagccagagcactccggtaactacggctgttacgccgaagagaatgggctgcggactctgctcgcttcatacagccttacagtgcggccggcgactcctgcaccagcgccaaaggcccccgcaactcctggtgcccagctggctcccgacgtgcggctgttatatgtcctggccatcgctgccctgggaggcctgtgcctgattctggccagcagcttgttgtatgtggcctgtctcagggagggcaggaggggaaggagacggaagtatagcctcggtcgggccagtcgcgctggcggtagcgcggtgcaactccagacagtgagtggacaatgcccaggagaagaggatgaaggggacgacgaaggggccgggggactggaaggctcttgcttgcagattatccctggcgagggagctcccgcaccccccccacctccacccccccccccaccagctgaacttactaacggattggtggctctcccttcccgccttcgacgcatgaacggtaactcgtacgtcctgctgcgccagagtaataatggcgtccccgccggaccttgctcttttgccgaagaactctcccgtattcttgagaaacgtaagcatacccagcttgtggagcaactggacgaatcatccgtgtag

SEQ ID NO: 209994 - DNA, 708 bp, synthetic construct
  misc_feature 1..708: note = Description of Artificial Sequence: Synthetic coding sequence
  source 1..708: mol_type = other DNA
atgctgagcctgctgctgctggccctgcccgtgctggccagccccgcctacgtggcacctgccccaggccaggcgctgcagcaaaccggtatagtgggcgggcaggaggcccccagatccaaatggccttggcaggtgtccctcagagtgcgcggtccctactggatgcatttttgtggaggcagcctgattcacccacagtgggtgctgacagcagctcattgcgtcgagccggacattaaggaccttgctgcactgcgcgtacagcttcgggaacagcatctgtactaccaagatcagttattgcccgtctccaggatcatagtccatccccagttctacataatccagacaggtgccgacattgccctcttagaactggaagagcccgtgaatatttcctctcatatccatacggtaacccttcctccagcctctgaaacgttcccccccggaatgccttgttgggtcaccggatggggggatgtggataataacgtgcatttacctccgccataccctctgaaggaggttgaggttccggtcgtggaaaaccacctctgtaatgctgaataccacactggcctccacacaggtcattctttccagatcgtacgcgacgacatgctgtgcgcaggaagcgagaaccacgactcctgccagggagactctgggggccctttggtgtgcaaggtgaatggaacctag

SEQ ID NO: 209995 - DNA, 4281 bp, synthetic construct
  misc_feature 1..4281: note = Description of Artificial Sequence: Synthetic coding sequence
  source 1..4281: mol_type = other DNA
atgcacagcagcaaccccaaggtgcggagcagccccagcggcaacactcagagctccccaaaatccaagcaggaagttatggtgcggccgcccacagtgatgtcccccagcggaaatccacagctcgactccaagttctcgaaccagggtaaacaggggggctcagcctcccagtcacagccgtccccgtgcgacagtaaatccgggggacatacacctaaggcccttccaggccccggcggctctatggggttgaaaaatggtgcagggaatggcgctaaaggcaagggaaaacgggagagaagtatctccgctgactcttttgaccagcgagaccctgggactcccaacgatgattcagatataaaggaatgtaactctgccgaccatatcaaaagccaggacagccaacacaccccccacagcatgacccccagcaacgccacagcgccgaggtcctcaacgccaagtcatggccagaccaccgccactgaacctacacctgctcaaaagactccagctaaggtggtttatgtgttctccaccgaaatggccaacaaggccgcagaggcagtcctgaagggccaagttgagaccattgtgagtttccacatacagaacatttctaacaacaagacagagagatctactgcaccactcaatacccagatctccgccttgaggaatgacccaaagcccttgccccagcagccacccgcccctgctaaccaggatcagaacagttcccagaacacgcggttgcaacccacgccgcctatcccagccccagctccaaaacccgctgccccgcccagacctctcgatagggagtcccccggagtggagaataaactgatcccatcagtcgggagtcctgcttcctctacacccttgcccccagatgggactggccccaacagcacccccaataacagggccgttacgcccgtatcccagggctctaactcctcaagcgccgatcctaaggctccgccccctcctccagtctctagtggcgagccccctactcttggcgaaaatcccgacgggcttagccaagagcagctagagcaccgcgaacgaagtttacagactttgcgggatattcagcggatgctcttcccagatgagaaagaattcacaggtgcacagagcggtggacctcaacagaaccctggagtcctcgatggtccacaaaaaaaacctgagggtccaattcaggcaatgatggcccagtctcagagcctcggcaagggacctgggcccagaactgatgtcggggctcccttcggcccacagggacaccgagatgtgccgttctcacctgatgagatggtgcctccctctatgaacagtcagtctgggactattggacccgatcatttggaccacatgacaccagagcaaatagcttggctcaaattgcagcaggaattctacgaggagaagaggcgaaaacaggaacaggtagtcgtccaacagtgcagcctccaggatatgatggtccaccagcacgggcctcgtggggtagtgaggggaccacctcctccttatcagatgactccatcggagggctgggcgcccggtggaacagagcccttctctgacggcatcaacatgccacattccttgcctcctcgggggatggccccacacccaaacatgcctggaagccagatgcgtctgcccggattcgctggaatgattaactctgagatggagggacccaacgtgcccaatccagcctcaagacccggtctgtctggcgtcagctggcctgacgatgtaccaaaaattcccgacggacggaactttccgccaggccagggcatctttagcggccctggccggggtgagaggttcccaaatcctcagggcctgtccgaggaaatgtttcagcagcagctggccgagaagcagctgggcttgccgccgggaatggccatggagggtatacgtccaagcatggagatgaacagaatgatcccaggcagccagagacacatggagcccggcaacaacccgatctttcctagaatccctgtggagggtcccctctccccaagcagaggggactttcctaagggcatccccccccaaatgggccccggccgtgaattagagtttgggatggtcccgagcggcatgaagggagacgtgaatttgaacgtcaacatgggcagcaatagccagatgattccccagaaaatgagggaggccggcgccggccccgaggagatgctgaaactgcggcccgggggctctgatatgctgcccgcccaacagaagatggtacccctcccattcggagagcacccacaacaggagtatggaatgggacctaggccttttctccctatgtcacagggaccagggtctaactcaggcctccgcaatcttagagagcccatcggacccgaccagagaaccaactcgaggctctctcatatgccacccctgcccctgaatccctcgtccaacccaacatcattgaataccgctccccccgtgcagagagggcttgggagaaagccccttgacataagcgtggctggtagtcaggtgcatagccccggcatcaatcccttgaaatcacctaccatgcaccaggtccagtcaccgatgctcggttcgccttcaggtaatttgaaaagcccccagaccccaagccagctggccggtatgctcgcaggaccggccgcagcagcttcaatcaaaagcccccctgtgcttggttccgcagccgcctctccagttcatctgaaatcgcctagcctgcccgccccctcccccgggtggacatcctcgccgaagccccctctgcagtcccctggaatcccaccgaatcataaggcccctctcaccatggcctcaccggccatgctgggtaatgtagaaagtggtggaccgccacctccgactgccagccagcccgcttccgtcaacattcccggatcgctcccaagttccaccccctacaccatgccaccagaaccaacactgtcccaaaatcccctgagcatcatgatgagcaggatgagtaaattcgctatgccctcttccacacccttataccacgatgctatcaagaccgtagcttcatctgacgacgatagtccaccggcaagatctcccaatctgccatctatgaacaatatgcctgggatgggcataaacacccagaaccctagaatctccgggccgaatccagtggtgccaatgccaactctcagccctatgggcatgacccagccactgtcccattcaaatcagatgccgtcgcccaatgcagtcggccctaatattcctcctcacggcgtccccatgggtcccggccttatgtcacacaatcctatcatgggtcacggctctcaggagccacctatggttccgcagggacgtatgggattcccacaaggcttcccgccagtgcagagtccacctcaacaggtgccttttccccacaatgggccctccggcggccaaggctcattccctggagggatgggcttccccggggaaggccctctgggcaggccatcaaacctgccacagtcttccgccgacgcagcactgtgcaaaccaggtgggccaggcgggcccgacagctttaccgtactgggtaactccatgccatccgtgtttacggatccagacctgcaggaagtgattaggcctggcgctacagggataccggaattcgatttgagccgcataatccccagcgagaagccttcccagacactacagtacttccctagaggcgaagtaccaggacgcaagcagccacagggcccaggccctggtttctcacatatgcaggggatgatgggagaacaggccccacgtatgggtcttgccttaccaggcatgggcggaccaggtcctgttggtacacctgatattcctttggggaccgccccgagcatgccagggcacaatcccatgcgacctcctgcatttttgcagcaaggaatgatgggcccacaccataggatgatgagccccgctcaatccacgatgcctggacagccaaccctaatgagtaaccccgctgcagccgtgggaatgatccctgggaaagatagaggtcctgccggactgtacacacacccagggcctgtgggaagccctggaatgatgatgtctatgcagggcatgatgggaccgcaacagaacatcatgatacccccgcagatgcggccccgcggcatggctgcagatgtggggatgggcggcttctcccagggccctggaaatccagggaatatgatgttttag

SEQ ID NO: 209996 - DNA, 1221 bp, synthetic construct
  misc_feature 1..1221: note = Description of Artificial Sequence: Synthetic coding sequence
  source 1..1221: mol_type = other DNA
atgagcggctgccccttcctgggcaacaacttcggctacaccttcaagaagctccccgttgagggaagcgaggaggacaagtcccagactggcgtaaaccgcgctagtaaaggcgggctcatctatggtaattacctgcacctcgagaaggtccttaacgcacaagagttgcaaagcgaaactaagggcaataagatccatgatgaacacttgtttatcatcacacatcaggcgtatgagttatggttcaaacagattctgtgggagctggactctgtgcgagagatctttcagaatgggcatgtccgggacgagaggaacatgttgaaagtggtgtcccgaatgcacagggtgagcgtcatactcaaattgctggtgcagcagtttagtatacttgaaacaatgacagcgctggatttcaacgactttcgggagtacctatctcccgccagtggcttccagtctcttcagttccggctccttgagaacaaaatcggcgttctccaaaatatgcgagtcccatataacaggcgacattacagagacaattttaaaggagaggaaaacgaactcctactcaagtcggagcaagaaaagacactcctggagcttgttgaggcctggctggagagaaccccagggctcgaaccacatggattcaacttctgggggaagctggagaagaatattactagaggcctcgaggaagaatttattaggattcaggccaaggaggagagtgaggaaaaagaagagcaggtggcagaatttcagaagcagaaggaagtcttgttaagcctgtttgacgagaaaagacatgaacatctcctcagcaagggcgagcggcgactgagctatcgagcgctccagggcgcactcatgatatatttctaccgcgaagagccgcggtttcaggttccattccagctgctgaccagcttaatggacatcgattccctcatgaccaaatggaggtacaaccacgtctgtatggtacatcgaatgctgggctccaaagccggaaccgggggcagcagcggctaccattatctccgttccacagtgtctgacaggtacaaagtgttcgtggacctatttaatctaagcacatatctgatccctcggcactggatcccaaaaatgaatcccacgatacacaagttcctgtacacagccgagtattgtgattcttcctacttctcctctgacgagtccgattag

SEQ ID NO: 209997 - DNA, 1335 bp, synthetic construct
  misc_feature 1..1335: note = Description of Artificial Sequence: Synthetic coding sequence
  source 1..1335: mol_type = other DNA
atgatcgaggacaacaaggagaacaaggaccacagcctggagcgggggcgggcctccttaatattttcgctgaagaacgaagtaggtgggctgatcaaggctctcaagatcttccaggagaagcacgtcaacctcttacacatcgaatcgcggaagtctaaaaggagaaatagcgagtttgaaatttttgtcgactgtgacattaatagggaacagctcaatgatatattccatcttctcaagagccatacaaatgtcctctcggtaaacttgcccgataactttactctgaaagaagacgggatggagaccgttccctggttccctaagaagatcagtgacttagaccattgcgccaaccgcgtgctcatgtatggtagcgagctggacgccgaccaccctgggtttaaagacaacgtgtatcgcaaacgtcgaaaatactttgcagacctagcaatgaactataaacatggtgacccaatcccaaaggtggagttcaccgaagaagaaattaagacttgggggacggtattccaagagctcaacaaactgtacccaacccacgcatgccgggagtacctcaaaaaccttccccttctttcgaagtactgtgggtatcgggaagacaacatcccccagctcgaggacgtaagtaacttcctcaaggagcggactgggttctctatccgtcctgtcgccggctacctgagtcccagggacttcctgtctgggctcgccttccgagtttttcactgcacccagtacgttcgacattcatctgatcccttctacaccccagagcccgacacttgccatgaactactggggcatgtgcccctcctcgcggaaccgtccttcgcacaattttcccaggaaatcggcctcgcaagtcttggagccagcgaggaagccgtccagaagttagccacatgttacttctttacagtggagttcggcttatgcaaacaagatggccaattgagggtgttcggggccggcttactgtcttccatatctgaactcaaacatgctctttccgggcatgccaaggttaaacctttcgaccctaagattacgtgtaagcaggaatgcctcattacaacattccaggacgtgtatttcgtctccgagagcttcgaagatgctaaggagaagatgagggagtttacaaagacgataaagagaccttttggtgtgaaatataatccttacactagaagcatccagatcctgaaagacactaagtcaattacttctgccatgaacgaactgcagcacgacttggatgtggtgtcagatgcacttgccaaggtgagtcgcaagccttccatttag

SEQ ID NO: 209998 - DNA, 1401 bp, synthetic construct
  misc_feature 1..1401: note = Description of Artificial Sequence: Synthetic coding sequence
  source 1..1401: mol_type = other DNA
atgatcgaggacaacaaggagaacaaggaccacagcctggagcgggggcgggcctccctcatcttctccctgaaaaacgaggtgggtgggttgatcaaggcactcaaaatcttccaggagaaacatgtgaatcttctccatatcgaatcaagaaagtctaaaagaaggaatagcgaattcgaaatatttgtggattgcgatataaatcgagagcagctgaacgacatcttccacctccttaagtcccacacaaatgttttgagtgtcaatttgcccgacaacttcactctgaaggaggacggcatggaaacagtcccctggtttccgaagaagatatccgacctggaccactgtgccaatcgggtgctgatgtatgggagtgagctcgatgccgaccatcccgggtttaaggataacgtctaccgaaagagaagaaagtactttgccgatcttgctatgaattacaaacatggtgaccctattccgaaagttgagttcaccgaagaggagattaaaacatggggcactgtcttccaagaactgaataagctctaccccacccacgcatgtcgcgaatacctgaagaacctgcctctgcttagcaagtattgtggctacagggaagataatatcccacagctggaagacgtgagtaattttctcaaggagcgcaccggcttttctatccggcccgtagccggttatctgagcccacgggacttcctatccggactagcgtttagggtgttccactgcacccaatatgtccgacactcctcggaccctttctacaccccagagcctgacacttgccacgagctgctcgggcatgtaccccttttagcagaaccctccttcgcccagttctctcaggagatcggcctggccagccttggagcatctgaggaggccgttcagaaactggccacctgttacttcttcacagtcgaattcggtctgtgcaagcaagacggccagttgagggtgttcggagctggcttgctgtcttcaatctctgagctcaaacacgctttgagtggtcacgccaaggtcaagccctttgatcccaaaatcacgtgcaaacaggagtgtctcatcacaacatttcaggacgtgtacttcgtctccgaatcctttgaggacgccaaagagaaaatgcgtgagtttacaaagactataaaacgtccttttggagtgaagtacaacccttacactagaagtatacagatactcaaggataccaaaagcatcacaagtgccatgaacgagctccaacatgatctggacgttgtctctgacgcattggccaagtccttgaatgaggatgtactccaggtgtcagtatttgctctgctgttatttctgcctagcctccacggagagtgtcaccctgacacttag

SEQ ID NO: 209999 - DNA, 753 bp, synthetic construct
  misc_feature 1..753: note = Description of Artificial Sequence: Synthetic coding sequence
  source 1..753: mol_type = other DNA
atgcagcccgccatgatgatgttcagcagcaagtactgggcccggagaggcttcagcctagattctgccgtgccggaagagcatcaactcctgggtagcagcacacttaataagcctaattccggaaagaacgacgacaaaggcaataaagggtcgtctaagagagaagctgcaacagaaagcggtaagacagctgtcgtcttctccctcaagaacgaggtggggggattggtgaaggcgttaaggctcttccaggagaaacgagtcaacatggtacacatcgaatccaggaaatcccgtcgacgctctagcgaagtagaaatcttcgttgattgcgagtgcggaaaaactgaatttaacgaacttattcagctgttaaagtttcagacaacaattgtaaccctcaatccccctgagaacatctggacggaagaggaggaactggaagatgtgccctggtttccccgcaagatttccgaactggataagtgttctcatagagtcctgatgtatgggtccgagctggatgccgatcaccctggatttaaggacaacgtgtaccgccaacgccgcaagtacttcgtagatgtggccatgggctacaaatacggccctaggcttctcgccgcaattggtgactgggagttccagctgttttccgtaagctcatccctgtctagtagcagtttgtgcatgctgagcgtgcacatccttatggacgtgcggtcaatcgtcgtggctgtggacatctag

SEQ ID NO: 210000 - DNA, 1473 bp, synthetic construct
  misc_feature 1..1473: note = Description of Artificial Sequence: Synthetic coding sequence
  source 1..1473: mol_type = other DNA
atgcagcccgccatgatgatgttcagcagcaagtactgggcccggaggggcttctccctagactcagcagttcccgaggagcaccagcttctcggctccagtacactgaataagccgaactctggaaagaatgatgacaaggggaacaaggggtccagtaagcgagaggcagcaaccgaaagtggaaagacagcagtggtgttctcactgaaaaacgaggttggcggactcgtgaaagctctcagactgttccaggagaagcgggtgaacatggtgcatattgaaagccgcaagtcccgccggaggagttcggaggtggagattttcgtggactgtgaatgtggaaagactgagtttaacgaacttatccagctgctgaagtttcagactaccattgtgacactgaatccacccgagaacatctggaccgaggaggaggaactcgaggatgtaccttggtttccgagaaagatctcagaacttgacaaatgctcacatcgcgtactgatgtacggttcagaattggacgccgaccaccctggattcaaagataacgtgtaccggcagaggagaaagtattttgtggatgtagccatgggatataagtatggccagcccattcctcgggtggaatataccgaggaagagacaaagacttggggcgtcgtgtttcgcgagctgtctaaattgtatcctacacatgcttgtcgtgagtatctgaagaacttcccacttctcacaaagtattgcggatatcgtgaggataacgtaccgcagctcgaggatgtatccatgttcctaaaggaacgcagcgggttcactgtgcggcctgtagccgggtatttaagtcctagggactttttagcgggtttggcttacagagtcttccactgcactcagtatatccgccacggttccgaccccctatataccccagagcctgacacatgccacgagctgctgggccatgttccgcttcttgccgatcccaagttcgcacaattcagccaggagataggtctagcaagcctcggtgcctcggatgaggacgtgcagaagctggctacctgttacttctttacaatcgaattcggattatgtaagcaggagggccagctccgcgcatacggcgccggactgttgtcatctattggcgaactgaagcatgctcttagtgataaggcttgtgttaaggcatttgacccaaagacaacttgtctgcaggaatgccttatcacgacttttcaagaagcctattttgtctcggagtcttttgaagaggccaaggagaagatgcgcgattttgccaagtctatcacccggccattctcagtgtacttcaatccctatactcaatctattgagattttaaaggatacaaggtcaatagaaaacgtggtgcaggatctaagatctgacctcaatactgtgtgtgacgctttaaacaaaatgaatcaatacctgggaatctag

SEQ ID NO: 210001 - DNA, 525 bp, synthetic construct
  misc_feature 1..525: note = Description of Artificial Sequence: Synthetic coding sequence
  source 1..525: mol_type = other DNA
atgagcagcgccgccgccgaccactgggcctggctgctggtgctgagctttgtgtttggctgtaatgtgttacgcattctattgccgtcattttctagctttatgagccgcgtgctccagaaggatgctgagcaggaatcacaaatgcgggcagagatccaggacatgaagcaggaactgtctacggtcaatatgatggacgaatttgctcggtacgctaggctcgaacggaaaatcaacaagatgaccgacaagctgaagacccacgttaaggccaggacagcccaactagccaaaattaagtgggtaatcagcgtggctttttatgtcctgcaggccgctctgatgattagcctgatttggaagtattattctgtgccagtagcggttgtcccatccaagtggatcactccattagatagattagtggcattcccaacccgagtggccgggggtgtgggcattacctgttggatcctggtctgtaacaaagtcgtggccattgtccttcaccccttttcctag

SEQ ID NO: 210002 - DNA, 423 bp, synthetic construct
  misc_feature 1..423: note = Description of Artificial Sequence: Synthetic coding sequence
  source 1..423: mol_type = other DNA
atgagccgggtgctgcagaaggacgccgagcaggagagccagatgcgtgcagagatccaggacatgaagcaggagttgtctacagtaaatatgatggatgaattcgcacgttatgcaagactagaaagaaaaatcaacaagatgaccgataaactgaagactcacgtcaaagctcggacagcacagttagctaaaatcaaatgggtgatttccgtggccttctatgtgttacaggctgccttgatgatctctcttatctggaagtattactcagtgcccgttgcagttgtccctagcaaatggatcaccccactggatagactcgtagccttccctacgcgggtggccggcggcgtgggtatcacatgttggatactcgtttgtaacaaagtggtagccatcgtgctgcatcccttcagttag

SEQ ID NO: 210003 - DNA, 423 bp, synthetic construct
  misc_feature 1..423: note = Description of Artificial Sequence: Synthetic coding sequence
  source 1..423: mol_type = other DNA
atgagccgggtgctgcagaaggacgccgagcaggagagccagatgcgggccgagatccaggacatgaagcaggagttaagtactgttaacatgatggacgagttcgctcggtacgctcggctggagagaaagatcaataagatgaccgacaaactgaaaacccatgtcaaggcccgcactgcacaattggctaagataaaatgggtgataagtgtggcattttacgtacttcaggctgcactcatgattagcctcatctggaagtactatagcgtccctgtggccgtcgtgcctagcaaatggatcacgcctttggacagactcgtagcatttcccacccgggtggcaggcggagtaggtatcacgtgttggattctggtttgcaataaggtagtagctatagtgctgcatcctttttcctag

SEQ ID NO: 210004 - DNA, 519 bp, synthetic construct
  misc_feature 1..519: note = Description of Artificial Sequence: Synthetic coding sequence
  source 1..519: mol_type = other DNA
atgagcagcgccgccgccgaccactgggcctggctgctggtgctgagtttcgtgtttgggtgtaacgtgctcaggattctgctgccttcattcagcagtttcatgtccagagtattacaaaaggatgccgagcaggaatctcagatgagagccgaaatccaggatatgaaacaggagctgagtaccgtgaacatgatggacgagtttgctagatacgcgagactcgagaggaagataaataagatgaccgacaagctgaagacccacgtgaaggctcgcactgcccaactggcaaagatcaagtgggtgatatccgtcgcgttttatgtgctccaggccgctctcatgatatccctgatatggaaatattacagcgtgccagttgccgtcgtgccctcaaagtggattactcccttggatcgccttgtcgctttcccaacgcgtgtggctgttttctcatcaagtatatggaccagcaaatgttttagtagtccggacaaatcaattctcgagaagtag

SEQ ID NO: 210005 - DNA, 1083 bp, synthetic construct
  misc_feature 1..1083: note = Description of Artificial Sequence: Synthetic coding sequence
  source 1..1083: mol_type = other DNA
atggccctgcacagcatgcggaaggcccgggagcggtggagcttcatcagagccctccataagggtagtgccgccgcaccggcccttcaaaaggactctaagaaaagagttttctcaggaatccagcccactggcattctccatctagggaactacctgggagccattgaatcatgggtgcgcctccaggacgagtacgatagcgtgctgtatagcatagtggacctccactccattaccgtgccacaggatccggctgtactgcgacagagtattctggacatgacagcagtcctccttgcatgtggcatcaatccagaaaagtccatcctgtttcagcagtcacaagtcagcgagcacacccagctttcatggattctcagttgcatggttaggctgcccaggttgcagcacctgcaccagtggaaagccaagaccactaaacaaaagcacgatggcacagtcgggttactaacataccccgtgctgcaggctgcggacattcttctgtataagtcaacccatgtgccagtcggcgaggaccaagtacaacatatggagttagtgcaagacctggcgcagggttttaacaaaaagtacggcgaattcttcccagtgcccgagtcaatcctcacatcgatgaagaaggtgaaaagcctgagggatcccagtgccaagatgtccaagtcagacccagataagctggctactgtgaggatcaccgattcgcctgaggaaatcgttcaaaaatttaggaaagccgtgacagatttcacgagcgaagtcacctacgatccagccgggagggccggagtttcaaacatcgtggcggtgcacgccgcagtgacaggactctcagttgaggaggtcgttaggcgaagcgctggtatgaataccgcccgatacaagctcgccgtagctgacgccgttatcgagaagtttgcccccatcaaacgggagatcgagaagttgaagctggataaagatcacctggagaaggtgctacagattggcagcgcaaaagccaaggagcttgcctataccgtctgccaggaggtcaagaaactggtcggtttcctgtag

SEQ ID NO: 210006 - DNA, 663 bp, synthetic construct
  misc_feature 1..663: note = Description of Artificial Sequence: Synthetic coding sequence
  source 1..663: mol_type = other DNA
atggccctgcacagcatgcggaaggcccgggagcggtggagcttcatccgagcactccataaaggctcagccgccgcccccgccctccaaaaagactcaaaaaagcgagtatttagtggaatccagcccacaggtattctacatctaggcaattacttgggcgctatcgagtcctgggtgaggctgcaggatgaatatgacagcgtgctgtattccatcgtggatctccactccattaccgtgcctcaagatcctgcagtgttgaggcagtcgattctcgacatgactgctgtgctactcgcttgcggcatcaatcccgagaagtccatcctatttcagcagtctcaggtgagtgaacacactcagttgtcgtggattctgtcttgcatggtccgactacccagacttcagcacctccatcaatggaaggcaaagaccaccaaacagaaacatgatggaaccgtgggacttttgacttatccagtactccaagccgctgatatattgctgtataagtccacccatgtcccagtcggcgaggatcaagtacagcatatggagctggttcaggacctggcacagggcttcaacaagaagtatggggagtttttcccagttcccgaaagcatccttagcatgtgtgtcctagtattcttgacatag

SEQ ID NO: 210007 - DNA, 801 bp, synthetic construct
  misc_feature 1..801: note = Description of Artificial Sequence: Synthetic coding sequence
  source 1..801: mol_type = other DNA
atgaccgccgtgctgctggcctgcggcatcaaccccgagaagagcatcctgtttcaacaaagccaagtgtcagagcatacccagctatcctggattctatcttgtatggtcaggctgccacgcctgcagcatcttcatcaatggaaggcaaaaacgacgaaacagaagcatgacggcacagtgggactgctgacctacccggtgctgcaggcggccgacattttgctgtataaatctactcacgtacctgtgggcgaagatcaagttcagcacatggaactggtgcaggacttggctcaagggttcaataagaagtacggcgagttctttcccgtccctgagtctatcttgacatccatgaagaaggtgaagagtcttcgggatcctagtgccaaaatgagcaagtcggaccccgataagctcgccactgtgcgtatcaccgatagccctgaagaaatagtccagaagtttaggaaagctgtgactgactttacaagcgaggtgacttatgaccctgctggcagggcaggagtttcaaacattgttgcagttcacgcagccgtcacagggctctcagtggaagaagtggtacggagaagcgccggcatgaacacagcgagatataagctcgcagtggccgacgctgtgatagaaaaattcgcacctataaagagagaaatcgagaaattaaagcttgacaaagatcaccttgagaaagtgcttcagattggaagcgctaaggccaaggaattggcttacaccgtgtgccaggaggtgaagaagttggtgggattcctctag

SEQ ID NO: 210008 - DNA, 1293 bp, synthetic construct
  misc_feature 1..1293: note = Description of Artificial Sequence: Synthetic coding sequence
  source 1..1293: mol_type = other DNA
atgctggtgagcctgaagatgagctacaaggccgccgccggcgaggactataaagctgactgtcctccgggcaacccagcacccacatctaatcatgggccggacgcaaccgaagctgaggaggactttgtggatccttggaccgtgcagacctcatccgctaaaggaattgactacgacaaactgatcgtcagattcggctcttctaaaatagacaaagagctgataaaccggatcgaacgggcgacaggccaacgtccccatcatttcctccggagagggatcttcttttcacaccgcgatatgaaccaggtccttgacgcttatgagaacaaaaaacctttttacttgtacactggccggggaccgtcatccgaagccatgcacgtgggtcacctgatcccctttattttcaccaagtggctgcaggacgtctttaacgtgcccctggttatccaaatgaccgacgatgagaagtatttgtggaaggacctgaccctggatcaggcttattcttatgcagtggaaaacgcaaaggacattatcgcatgcggtttcgatataaacaaaactttcatctttagcgatctagattacatgggcatgtcttctggattctacaagaatgttgtcaaaatacagaagcacgtgacttttaatcaggtgaaaggtatattcgggtttaccgacagcgactgcatcgggaaaatctcattcccagccatccaggctgcaccctcgttttcaaattcatttccccaaatctttcgggatcgcaccgacatccagtgccttatcccatgcgcaatcgatcaagatccctacttccggatgacacgggacgtggccccacgaattggttaccctaagccagcattgcttcatagcacctttttccccgcccttcaaggggcccaaacaaagatgtccgcttcagatcccaacagttccatctttctgacggacaccgcaaagcagatcaagacgaaggtgaacaaacatgccttcagcgggggacgcgacacaatcgaggaacatcgacagtttggaggcaactgcgatgtggacgtgtcttttatgtatctgacttttttcctggaagatgatgataaactcgagcagatcagaaaggactacaccagcggcgccatgctgacaggggaacttaagaaggctctgatcgaggtgctgcagccactcatcgctgaacaccaggcgcggagaaaagaggtaacagacgagatcgtgaaggagttcatgaccccccgaaagctctcgtttgattttcagtag

SEQ ID NO: 210009 - DNA, 1416 bp, synthetic construct
  misc_feature 1..1416: note = Description of Artificial Sequence: Synthetic coding sequence
  source 1..1416: mol_type = other DNA
atgcccaacagcgagcccgccagcctgctggagctgttcaacagcatagccactcagggagagttggtaagaagtctcaaggctggcaatgccagcaaggacgagattgactccgcggtaaagatgctggtgtctttgaagatgagttataaggcagcagccggagaggactacaaggcagattgtcccccaggcaacccggctcctacgtccaaccacggtccagacgctactgaggcagaagaggactttgtggacccctggactgtacagacctcctccgctaagggtattgattacgacaaactcattgtacgctttgggtcttcaaaaatcgataaggagctgattaacagaattgaacgtgccactggacaacgaccacaccactttttgcgaagggggatcttcttctctcacagggacatgaaccaggtgttagatgcatacgagaataaaaagccattctacctgtatactgggagaggtcccagctccgaagcaatgcacgtgggacacctgattcctttcatctttacaaaatggcttcaggatgtgtttaatgttccacttgtgatacagatgacggacgacgagaagtatctatggaaggatctgactctcgatcaggcttattcctacgcggtggagaatgccaaggatatcatagcctgcggctttgacatcaacaagacattcatctttagtgacctcgattacatggggatgtcctcaggtttctataagaacgttgtaaaaatccagaaacacgtcacgttcaatcaggttaaaggtatatttggctttacggattcagattgcattgggaaaatctctttcccagccattcaggcggctcccagcttctctaacagctttccacagattttcagagacaggaccgacatccaatgtctgataccctgcgcaatcgatcaagacccatactttcgaatgaccagagacgtcgctccccgcataggctatccaaagcccgccctactgcactccacctttttcccggccttacaaggcgctcagacgaaaatgagtgcttctgacccaaatagctccattttcctcaccgatacagcaaagcagattaagacaaaggtgaataagcatgctttctccggcgggagagacacaattgaagaacatagacagttcggaggtaactgcgacgtcgacgtgagcttcatgtatttgacttttttcctcgaagacgatgacaagctggaacagattcgaaaggattacactagtggtgcgatgctgacaggagagctaaagaaggcactcatagaagttctccagcccctaatcgccgagcaccaagctagacggaaggaagtgacagatgagattgtgaaggagtttatgacaccgcgcaaactatcctttgacttccagtag

SEQ ID NO: 210010 - DNA, 1293 bp, synthetic construct
  misc_feature 1..1293: note = Description of Artificial Sequence: Synthetic coding sequence
  source 1..1293: mol_type = other DNA
atgctggtgagcctgaagatgagctacaaggccgccgccggcgaggactacaaggctgactgtccccctggaaatcccgctccaacttctaatcacggccctgatgcaacggaggccgaagaggactttgttgacccttggactgtgcagacatccagtgcgaaggggatcgattacgataaactgatagtccggtttgggagttccaagatcgataaagaactcatcaatcggattgagcgtgccactggacagaggcctcatcacttcctgagacggggaatcttttttagccaccgggatatgaatcaggtgcttgacgcatatgagaataagaagcccttttacctgtacaccgggcggggcccttcatccgaggccatgcacgtgggccatcttattcctttcatctttacaaagtggctgcaggacgtcttcaacgtgccactggtgattcagatgactgacgacgaaaagtacctatggaaggatttgactttagaccaggcctattcatacgctgttgaaaacgctaaggacattattgcatgtggattcgatatcaataaaacgtttatcttcagcgacctggactacatgggcatgtcgtcaggtttttataaaaacgtggttaaaattcagaagcacgtcaccttcaaccaggtgaagggcatcttcgggtttactgatagcgattgcattggtaagatatcttttccagcaatccaggccgctccttccttcagcaattctttcccacagatctttagagatcggaccgatattcagtgcctcatcccctgtgccatcgaccaggacccatacttcagaatgacccgggacgttgcgccccgcatcggatatcccaagcccgctctgctgcactccaccttctttccagccctccagggagcacagaccaaaatgtccgcaagtgatcccaactcttctatattcctgaccgacacagctaaacagataaaaacaaaggtgaacaagcacgccttcagcgggggccgggatacaatcgaagagcatagacagttcggcggtaattgcgacgtggacgtaagcttcatgtatctcactttcttcctggaagatgacgacaagctggagcaaattcgtaaggattacacttctggggccatgttgacaggtgagcttaaaaaggcactcatcgaagtcctgcagcccctgatcgctgagcaccaggcccgacggaaggaggtgaccgacgagatcgtgaaggaattcatgacaccccggaaattgtcatttgactttcaatag

SEQ ID NO: 210011 - DNA, 1416 bp, synthetic construct
  misc_feature 1..1416: note = Description of Artificial Sequence: Synthetic coding sequence
  source 1..1416: mol_type = other DNA
atgcccaacagcgagcccgccagcctgctggagctgttcaacagcattgctacacagggggagctggttagaagcctgaaagctgggaacgccagtaaggatgagatagacagtgccgtcaagatgctagtttccctcaaaatgtcctataaagctgccgcgggcgaggactataaagcggattgccctcccggaaatcctgccccaacaagcaaccacggcccagacgctactgaggccgaggaagacttcgttgacccttggacggtacagactagttcggctaagggaatcgattacgacaaactcatcgtgcggtttgggagcagcaagattgacaaggaactcatcaatcggatcgagcgagccactggccagcgaccgcaccatttcctgcggcgaggcatcttcttctctcacagggacatgaatcaagtcttggacgcttatgagaacaaaaaacctttctatctgtacacaggccgcggaccgagctccgaggctatgcatgtgggccaccttatacccttcatcttcactaagtggctgcaggatgtcttcaacgtgcccctcgtcattcaaatgactgatgatgagaagtacctctggaaggatctgacacttgaccaagcctattcttatgcagtggaaaatgccaaagatatcatagcatgtggcttcgatataaacaagacttttattttcagtgacctggattatatgggcatgtcatccggcttttataagaacgtcgtgaaaatacagaagcacgtgacctttaaccaggtgaaggggatatttggctttaccgattccgattgcattggcaagatttcattcccagctattcaggctgctccttccttttccaacagtttccctcagatcttccgagaccggactgacatccagtgtctgattccttgcgctattgatcaggacccatattttagaatgacaagggatgttgcccctcgaataggttatccgaagcccgcgcttctgcactctacgtttttccctgccctgcagggagctcagaccaagatgagtgcgtccgatcccaattcttcgatcttcttgacggatacagctaagcaaatcaaaactaaggtcaacaagcacgccttttccgggggccgcgacacaatcgaggagcatagacaatttggaggcaactgtgacgtggacgtatcgtttatgtacctgacattttttcttgaggatgacgacaagctggagcagatccggaaagattacacaagcggagcaatgctgactggcgaattaaagaaggccctgattgaggttctccaacctttgatagctgagcaccaagctagaaggaaggaggtcaccgacgagatcgttaaggagtttatgacgcctagaaaactttcattcgatttccaatag

SEQ ID NO: 210012 - DNA, 684 bp, synthetic construct
  misc_feature 1..684: note = Description of Artificial Sequence: Synthetic coding sequence
  source 1..684: mol_type = other DNA
atgctggtgagcctgaagatgagctacaaggccgccgccggcgaggactacaaggctgactgccctcctggtaatcccgcccctacatccaaccacgggcctgacgctaccgaggcagaggaggatttcgtggacccatggacagtgcagacttcatcagccaagggtatcgactacgataaactgattgtcagatttggctctagcaagatcgacaaggagcttatcaatagaatagagagagccaccggccagagacctcatcatttccttaggagggggattttttttagccatagagatatgaaccaagtgcttgacgcgtatgagaacaagaagccgttttacctatatactggtagggggccttcatcagaagccatgcatgttggtcaccttattccgtttatttttaccaagtggcttcaagatgtgttcaacgttcccctagtcatccagatgaccgatgacgagaagtatctgtggaaagacttgaccctggaccaggcatactcatatgccgtcgaaaacgctaaggatattattgcctgcggcttcgatatcaataagacattcatcttcagcgacctggactatatgggcatgagcagcgggttctacaaaaatgtcgttaaaattcagaaacacgtaacgtttaatcaagtcaagggcattttcggatag

SEQ ID NO: 210013 - DNA, 324 bp, synthetic construct
  misc_feature 1..324: note = Description of Artificial Sequence: Synthetic coding sequence
  source 1..324: mol_type = other DNA
atgcccaacagcgagcccgccagcctgctggagctgttcaacagcattgccacacaaggcgagctagtgcgatcactgaaggcgggaaatgcatcaaaagacgagattgactcagctgttaagatgctggtgtcgcttaagatgtcatataaggccgcggcaggcgaagactataaggccgactgcccacctggaaatcccgccccaacatctaatcatggtcctgacgcaacggaagctgaagaggactttgtcgacccatggaccgtgcaaactagctctgccaagggcatcgattacgataagctgatagttaggttttag

SEQ ID NO: 210014 - DNA, 453 bp, synthetic construct
  misc_feature 1..453: note = Description of Artificial Sequence: Synthetic coding sequence
  source 1..453: mol_type = other DNA
atgcccaacagcgagcccgccagcctgctggagctgttcaacagcattgccactcagggggaactggttcgctcactgaaggcgggcaatgccagtaaggacgaaatagatagcgcggtcaagatgttggtgtccctcaagatgagttacaaggctgccgctggcgaggattacaaggccgactgcccccctggcaacccagcgcccacttcgaaccatggccccgatgccactgaagctgaagaagactttgttgacccatggacggtgcaaaccagtagtgccaaggggatcgactatgacaagctgattgtccgctttggaagttccaaaattgacaaggaactcattaaccgtatcgagcgcgctactgggcagaggccacaccattttctccggagaggaattttttttagccatcgcgatatgaatcaggtgctggacgcctactag

SEQ ID NO: 210015 - DNA, 294 bp, synthetic construct
  misc_feature 1..294: note = Description of Artificial Sequence: Synthetic coding sequence
  source 1..294: mol_type = other DNA
atgcccaacagcgagcccgccagcctgctggagctgttcaacagcatcgcaacacagggtgaattggttaggagcctcaaagcagggaacgcttccaaagatgagatcgattccgccgtaaaaatgctcgtcagcctcaagatgagctacaaggctgcagccggagaagattacaaggctgattgccctccaggtaaccccgccccgacctccaatcacggaccagacgccaccgaggcagaggaggacttcgtcgacccatggacagtacagacatcctctgctaagggctag

SEQ ID NO: 210016 - DNA, 81 bp, synthetic construct
  misc_feature 1..81: note = Description of Artificial Sequence: Synthetic coding sequence
  source 1..81: mol_type = other DNA
atgcccaacagcgagcccgccagcctgctggagctgttcaacagcattgccacccaaggtgagctcgtgcgctccctctag

SEQ ID NO: 210017 - DNA, 318 bp, synthetic construct
  misc_feature 1..318: note = Description of Artificial Sequence: Synthetic coding sequence
  source 1..318: mol_type = other DNA
atgcccaacagcgagcccgccagcctgctggagctgttcaacagcatcgcgactcagggtgaactcgtacgctccttaaaagcagggaacgcatcaaaggacgaaattgattccgctgtcaaaatgttggtgagcctaaaaatgtcgtataaggcagccgccggagaggactataaagctgattgcccccctggcaaccccgcgccaacctccaatcacggccctgacgccacagaggctgaagaagacttcgtcgatccatggaccgtccagacgtcctccgccaaggggatcgactatgataaactcattgtctag

SEQ ID NO: 210018 - DNA, 102 bp, synthetic construct
  misc_feature 1..102: note = Description of Artificial Sequence: Synthetic coding sequence
  source 1..102: mol_type = other DNA
atgcccaacagcgagcccgccagcctgctggagctgttcaacagcatcgcaacccagggggagctggtgaggagcctgaaggctggaaacgcgagtaagtag

SEQ ID NO: 210019 - DNA, 207 bp, synthetic construct
  misc_feature 1..207: note = Description of Artificial Sequence: Synthetic coding sequence
  source 1..207: mol_type = other DNA
atgcccaacagcgagcccgccagcctgctggagctgttcaacagcattgccacccagggggaactcgtgcgatccctgaaggcgggcaatgcatccaaggatgagattgattcagcggttaagatgctggtgagcctgaagatgtcatacaaggctgctgcaggtgaggattacaaagccgactgcccgcctggaaaccccgcatag

SEQ ID NO: 210020 - DNA, 375 bp, synthetic construct
  misc_feature 1..375: note = Description of Artificial Sequence: Synthetic coding sequence
  source 1..375: mol_type = other DNA
atgcccaacagcgagcccgccagcctgctggagctgttcaacagcatcgcgactcaaggcgagttggtgaggtcactgaaagccggcaatgcctccaaggatgaaatcgattccgctgtcaaaatgctggtaagtcttaaaatgtcttataaagcagcggccggtgaagactataaggcagattgccccccaggcaatccggccccaacctctaaccatggtcccgatgcaacggaagcggaagaggactttgttgatccgtggacagtccaaacgtccagcgctaagggaatcgattatgataagttgattgtaagattcggttccagcaagatagacaaagagctaatcaaccggatcgagagagccacatag

SEQ ID NO: 210021 - DNA, 261 bp, synthetic construct
  misc_feature 1..261: note = Description of Artificial Sequence: Synthetic coding sequence
  source 1..261: mol_type = other DNA
atgcccaacagcgagcccgccagcctgctggagctgttcaacagcatcgccacgcagggagagctagtgcgcagtctcaaggccggcaacgcgagcaaggacgagatcgatagcgcggtgaaaatgctggtttctctcaagatgagttataaggccgccgccggggaggactataaagcagactgtccccccgggaatccggcccccacctctaatcacggcccagatgctacggaggccgaggaggacttcgtggattag

SEQ ID NO: 210022 - DNA, 168 bp, synthetic construct
  misc_feature 1..168: note = Description of Artificial Sequence: Synthetic coding sequence
  source 1..168: mol_type = other DNA
atgcccaacagcgagcccgccagcctgctggagctgttcaacagcattgctacccagggggagctggtgcgatccctcaaggccggcaatgctagcaaggatgaaatagatagcgccgtgaaaatgctggtgtcgctaaaaatgtcctataaggccgccgcaggctag

SEQ ID NO: 210023 - DNA, 192 bp, synthetic construct
  misc_feature 1..192: note = Description of Artificial Sequence: Synthetic coding sequence
  source 1..192: mol_type = other DNA
atgcccaacagcgagcccgccagcctgctggagctgttcaacagcattgccacccagggcgagttagtgcgatccctgaaagcgggtaacgcaagcaaggacgagattgatagtgccgtaaagatgctagtttcgctaaagatgagctacaaagctgcagccggagaagactacaaggcggactgtccctag

SEQ ID NO: 210024 - DNA, 213 bp, synthetic construct
  misc_feature 1..213: note = Description of Artificial Sequence: Synthetic coding sequence
  source 1..213: mol_type = other DNA
atgcccaacagcgagcccgccagcctgctggagctgttcaacagcatcgccacacagggggaactggtcagaagcctgaaggctggaaatgccagcaaggatgagattgactcagcagtgaaaatgttggtaagcctgaagatgtcctataaagccgccgccggagaagattacaaggctgactgtccacctggaaatcctgcacctacgtag

SEQ ID NO: 210025 - DNA, 177 bp, synthetic construct
  misc_feature 1..177: note = Description of Artificial Sequence: Synthetic coding sequence
  source 1..177: mol_type = other DNA
atgcccaacagcgagcccgccagcctgctggagctgttcaacagcatcgctacccagggagagctggtgcggtcactgaaggctggaaacgcctctaaggacgaaattgacagcgccgtgaagatgcttgtctctctgaagatgagctataaggcagccgctggggaggattactag

SEQ ID NO: 210026 - DNA, 423 bp, synthetic construct
  misc_feature 1..423: note = Description of Artificial Sequence: Synthetic coding sequence
  source 1..423: mol_type = other DNA
atgctggtgagcctgaagatgagctacaaggccgccgccggcgaggattataaggctgactgtccccccggaaatcccgcccccactagcaatcacgggcctgatgctaccgaagctgaggaggactttgtggacccttggacagttcagaccagcagcgccaaaggaatcgactacgacaaactcatagttcggttcggaagttctaaaatcgacaaagagctgataaaccgaatcgaaagagccaccggacagcgcccacatcactttctgcggcgtggaatatttttctcacacagagatatgaaccaggtgctcgacgcctacgaaaacaagaaacccttttatctgtacactggtcgcggaccatcaagtgaagccatgcacgtggggcatctcatacctttcatctttaccaagtag

SEQ ID NO: 210027 - DNA, 462 bp, synthetic construct
  misc_feature 1..462: note = Description of Artificial Sequence: Synthetic coding sequence
  source 1..462: mol_type = other DNA
atgctggtgagcctgaagatgagctacaaggccgccgccggcgaggactataaggctgattgccctcccggcaatcccgctccaaccagcaaccatggtccggacgctaccgaagctgaagaagatttcgtcgatccttggaccgtgcagacatcttccgccaaggggatcgattacgacaaactgatagttaggttcggttcctcaaagattgataaggagctcatcaacaggatcgagcgcgcgaccggccagcgacctcaccattttctgaggcgcggaatttttttctctcatagggatatgaaccaggtactggacgcctatgaaaacaagaaacctttttatttgtatactggccgtggcccatcatccgaagcaatgcatgtgggccatctgatcccattcatcttcactaagtggctgcaagatgtgttcaatgtcccactagttatccagtag

SEQ ID NO: 210028 - DNA, 675 bp, synthetic construct
  misc_feature 1..675: note = Description of Artificial Sequence: Synthetic coding sequence
  source 1..675: mol_type = other DNA
atgctggtgagcctgaagatgagctacaaggccgccgccggcgaggattataaggccgattgtccacccggcaacccagcgcctacatctaaccatggccccgatgccaccgaagctgaagaggattttgtagatccctggacggtgcagaccagttccgccaagggcatcgattacgataaactaattgtgaggttcggctcctctaaaattgacaaagagctgataaatcgcattgagagggccaccgggcaacgcccacaccacttccttaggcgaggcatctttttctcccacagggacatgaaccaggtcttagacgcctacgagaataaaaagcccttctatctctatacaggacgaggcccttccagcgaagccatgcacgtggggcatctgattccatttattttcactaagtggctgcaggatgtgttcaatgtgcctctcgttatccagatgaccgacgatgaaaagtatctgtggaaagacctgacccttgatcaagcctacagctacgcagtcgagaatgcgaaagacatcatcgcctgcggctttgacataaataaaacattcatcttctccgaccttgattatatgggaatgtctagcggcttctacaaaaacgtggtgaaaatccaaaagcatgtcacattcaatcaggtgaaaggatag

SEQ ID NO: 210029 - DNA, 1293 bp, synthetic construct
  misc_feature 1..1293: note = Description of Artificial Sequence: Synthetic coding sequence
  source 1..1293: mol_type = other DNA
atgctggtgagcctgaagatgagctacaaggccgccgccggcgaggactacaaagctgactgcccacccggtaaccccgccccaacaagtaatcatggacccgatgccaccgaagccgaagaggatttcgtcgatccctggactgtacagaccagttctgcaaagggtattgattatgacaaactgattgttcgttttggttcttctaaaattgataaggagcttatcaaccgtatagagagagctaccggtcagaggccacaccactttctccggcgcggtattttctttagtcatcgggatatgaatcaggttttggatgcctatgaaaataagaagcccttctacctatatactggcagggggccatcttctgaagcgatgcatgttggccacctaattccctttatttttactaaatggctgcaggacgtttttaatgtgccgctggtcatacaaatgactgatgacgaaaagtatctctggaaagatctgacattggatcaggcttactcttacgcagttgaaaacgccaaagatattatcgcatgcggattcgacatcaacaaaacatttatttttagtgatttggactacatgggtatgtcaagtgggttttacaagaatgttgtgaaaatccagaaacacgtgacctttaatcaggtgaaaggaatctttggctttactgactcggactgtatcggaaaaatctcctttcctgccattcaggccgcaccttcttttagcaacagctttccacagattttcagagatcggaccgacatccaatgtttaattccatgcgccattgatcaggacccttacttccgtatgactcgggacgttgctccgaggatcggatatcccaagcccgccctgcttcactctactttcttccccgctttgcagggcgcacaaacaaagatgtctgcctcagaccccaattctagcatttttttaacagacaccgcgaaacagatcaaaactaaggtgaataagcacgccttctccggtgggagggatacaattgaggaacatagacagtttggcggtaactgcgatgtcgacgtgagcttcatgtatctcacatttttcctggaagatgatgacaaattagagcagatccggaaggactacaccagcggagccatgttaacaggggagctcaaaaaggcactgattgaggtgctgcaacccttgattgctgaacaccaagcccgtagaaaggaggtcaccgacgaaattgtgaaagagttcatgacccctaggaaactgagtttcgactttcagtag

SEQ ID NO: 210030 - DNA, 345 bp, synthetic construct
  misc_feature 1..345: note = Description of Artificial Sequence: Synthetic coding sequence
  source 1..345: mol_type = other DNA
atgcccaacagcgagcccgccagcctgctggagctgttcaacagcattgccacacaaggagagctggttcggtcactcaaagccggaaatgcatctaaagacgaaattgattccgcggttaaaatgttggtgtctttgaagatgagctataaagccgcagcaggcgaggattataaagctgattgccccccgggcaaccctgctcctacgtctaatcacgggcccgacgccacggaggcggaggaggactttgtggatccatggaccgtccaaaccagcagtgctaagggcatcgactacgacaagctgatcgtgcgctttggctcctccaagattgacaagtag

SEQ ID NO: 210031 - DNA, 177 bp, synthetic construct
  misc_feature 1..177: note = Description of Artificial Sequence: Synthetic coding sequence
  source 1..177: mol_type = other DNA
atgcccaacagcgagcccgccagcctgctggagctgttcaacagcatcgcaacccagggagagttagtaagatcccttaaagcagggaacgctagcaaggacgaaatagattccgcagtgaagatgttagtgtcactaaaaatgtcttataaggccgccgctggcgaagattactag

SEQ ID NO: 210032 - DNA, 459 bp, synthetic construct
  misc_feature 1..459: note = Description of Artificial Sequence: Synthetic coding sequence
  source 1..459: mol_type = other DNA
atgcccaacagcgagcccgccagcctgctggagctgttcaacagcatagcgactcaaggtgaactagttagatccctgaaggctggtaatgcatccaaagacgaaatcgactctgccgtaaagatgcttgtgtcactgaagatgagttacaaagccgccgcaggtgaagactacaaggcggattgtccaccggggaatcctgctcccacttccaatcacgggcctgatgctacagaagcagaggaggacttcgtggacccatggaccgtacagacctcttcagcaaaggggatcgactacgataagttgattgtccggtttggttccagcaagattgacaaggagctgattaatagaattgagcgcgccacagggcagagaccccatcatttccttcgtcgggggatctttttctctcatcgggatatgaatcaggtcttggatgcttacgaaaattag

SEQ ID NO: 210033 - DNA, 1416 bp, synthetic construct
  misc_feature 1..1416: note = Description of Artificial Sequence: Synthetic coding sequence
  source 1..1416: mol_type = other DNA
atgcccaacagcgagcccgccagcctgctggagctgttcaacagcatcgccacccaaggggagcttgtcaggagcctcaaagcaggaaacgcaagcaaagacgaaattgactccgccgtaaaaatgctggtgtccctcaagatgtcatacaaggccgctgccggcgaagactataaggctgactgccctcccggtaaccccgccccaacttccaatcacggcccggacgccactgaggccgaggaggattttgttgacccttggaccgttcagacctcgagcgctaaaggaatcgattacgataaactaatagtgcgctttggttcatcaaaaattgacaaggaactgattaatcgaatagaaagggccacaggacagaggccacatcactttctgcgtagaggaatctttttttctcatcgggatatgaaccaggtgctcgacgcatatgaaaataagaagcccttttatctctacacaggccgcgggccgtctagcgaggctatgcatgtgggccacttgatccctttcatctttaccaagtggcttcaagacgtctttaatgtccctcttgtgattcagatgaccgatgacgaaaagtatctttggaaggatctgaccctggatcaggcctatagttatgcagtcgagaacgcaaaggatatcattgcttgcggctttgacataaacaagacttttatcttcagcgatctcgactacatgggcatgagctctggattttacaaaaatgtagttaagatccaaaaacacgtgaccttcaatcaggtaaagggtattttcgggttcacagactcagattgtatcggtaagatcagcttcccagccattcaggccgcgcctagcttctctaactcctttccacagatattcagagatagaaccgatattcagtgcctgatcccatgcgccatcgatcaagacccttatttcaggatgacccgggatgtggcccccagaatcggttacccaaagccagctctgctgcacagcacattttttccggctctgcagggggcacaaactaaaatgagcgctagcgaccctaattcatcgatcttccttactgatacagctaagcaaattaaaactaaggtaaacaaacatgctttctccggtggtcgagacacaattgaagagcatcgtcagtttggaggaaattgcgatgtggatgtttctttcatgtacctcaccttctttctggaggacgatgataaactggagcagatcagaaaggattacacctctggagcaatgttgacaggcgaactgaagaaagctcttatcgaggtgctccagccacttatcgcagagcatcaagccaggcggaaagaggtgacagacgagatcgtgaaagagttcatgacaccccgaaagctatccttcgattttcagtag

SEQ ID NO: 210034 - DNA, 465 bp, synthetic construct
  misc_feature 1..465: note = Description of Artificial Sequence: Synthetic coding sequence
  source 1..465: mol_type = other DNA
atgctggtgagcctgaagatgagctacaaggccgccgccggcgaggattacaaagcagactgcccccctggaaatccagcacctactagcaaccatggtcctgatgccaccgaagccgaagaggactttgtcgacccctggacggtccagacctcctcggctaaaggcatcgattacgacaaactaatcgtccggttcgggtcctctaagatagataaggaactgatcaaccggatcgagagagcaacgggacagcgccctcatcatttcctcaggaggggcatcttcttttcccaccgcgacatgaatcaggtcctggatgcctatgaaaataagaagcctttctatctgtatacaggaagagggcctagcagcgaagcaatgcacgtcggccatttgattccattcatattcacaaaatggctacaagatgtgtttaacgtgcccctggtcattcagatgtag

SEQ ID NO: 210035 - DNA, 639 bp, synthetic construct
  misc_feature 1..639: note = Description of Artificial Sequence: Synthetic coding sequence
  source 1..639: mol_type = other DNA
atgcccaacagcgagcccgccagcctgctggagctgttcaacagcatcgccacccagggcgaactggtgagaagtttgaaggccggaaatgcatcgaaggatgagatcgactcagctgttaagatgctggttagtctcaagatgagctacaaggccgcagcaggggaggactacaaggcggactgccccccgggaaatccggctccaacgagtaaccacggccccgatgccactgaggctgaggaggactttgtcgatccttggacagtgcaaacctcgagcgccaagggaatcgattatgacaagctgatcgtccggttcggatcatcgaagatcgataaagaactgataaatcgaattgagcgcgccactgggcagagaccccatcattttttaagaagggggatattcttttctcatagggacatgaaccaagtcttggacgcatacgaaaacaaaaaaccgttttacctgtatacagggcgcgggcccagttccgaggccatgcatgttggacatctgatccccttcatctttaccaagtggttgcaggacgtgttcaatgtacctcttgtgatacagatgactgatgacgaaaaatatctttggaaggacctgacactggaccaggcctattag

SEQ ID NO: 210036 - DNA, 1041 bp, synthetic construct
  misc_feature 1..1041: note = Description of Artificial Sequence: Synthetic coding sequence
  source 1..1041: mol_type = other DNA
atgagcctgctgcggagcctgcgggtgttcctggtggcccggaccggaagctaccccgccgggagtctcctccggcagagcccacaaccaagacatacattctatgctggcccacgcctgagcgcgtctgcctcttcaaaggagttgctgatgaagctacgtcgaaagactggttactccttcgtgaattgcaagaaagccttggaaacatgtggcggcgaccttaagcaggcagagatttggctgcacaaagaagcccagaaggagggatggagtaaggccgcaaagctgcaggggcgtaagacaaaagaggggttgattggactgctgcaggagggtaataccacagtgctcgtggaggtgaactgtgaaaccgattttgtttccagaaatctgaagtttcagttgctggtgcagcaggtggctttgggcacgatgatgcattgtcagaccctgaaggatcagccctctgcctactcaaaagttcagtggctgacacctgttaatttggcactgtgggaggccgaagccggaggctctttagaaggatttctaaatagcagcgagctgagcgggctccccgcagggccagaccgggaaggtagcctcaaggaccaacttgcactagcgatcggcaaattgggggaaaacatgattctgaagagagctgcatgggtgaaagtccctagtggtttctacgtgggtagctacgtgcacggggccatgcagtccccatctctacacaaactggtcctcggcaagtatggggcgttggtcatttgcgaaacgtctgagcaaaagacaaatctggaagatgtcgggagacggttgggccagcatgtggtgggtatggccccgctaagtgtagggagcctggatgacgagccagggggcgaggccgaaactaagatgttgtcacagccctacttactggacccgtctattactctgggacagtacgtccaacctcagggggtgtccgttgtcgactttgtgaggtttgagtgcggtgagggagaagaggccgccgaaaccgagtag

SEQ ID NO: 210037 - DNA, 858 bp, synthetic construct
  misc_feature 1..858: note = Description of Artificial Sequence: Synthetic coding sequence
  source 1..858: mol_type = other DNA
atggtgtactgcaccaccacctgggccatctggaactgccagctgctcttgggctataaaccattgcagaatgtgactggcctgaacactgtcggatcctgcaataccgttgccgagatttggttacacaaagaagcccagaaggagggttggtccaaggcggccaaactgcagggtcgcaagacgaaggagggcctgatcggattactgcaggaggggaacactaccgtgctggttgaagtgaactgcgagacagattttgtgtctagaaatctgaaattccagctcttagtgcagcaggttgctctcgggaccatgatgcattgtcagactctgaaggaccaaccttcggcctatagtaaggggttcctgaatagttccgaactgagcggactgcccgctggtccggatagagaagggagcttgaaggatcaactggcactcgccatcgggaaacttggagagaatatgattttaaagagagccgcatgggttaaagttccttcaggcttctacgtaggctcttatgtccatggcgctatgcagtccccttcactgcataaactggtcctgggcaaatacggtgccctggttatctgtgagacctcagagcagaagacaaaccttgaggacgtcggccgcaggttaggccagcacgtagttggaatggctcctctgtccgtgggttcattggacgacgagccaggcggagaagctgagaccaaaatgctctctcaaccctatttactcgacccatctatcaccctcggacagtatgttcaaccccagggagtgagtgtagtggatttcgttcgctttgaatgcggagagggcgaggaagccgccgagacagaatag

SEQ ID NO: 210038 - DNA, 978 bp, synthetic construct
  misc_feature 1..978: note = Description of Artificial Sequence: Synthetic coding sequence
  source 1..978: mol_type = other DNA
atgagcctgctgcggagcctgcgggtgttcctggtggcccggaccggatcttacccagccggctcattgttacgccagtccccccagccccggcatacgttttacgctggtccgagactgtcggctagtgccagctccaaggagctgctcatgaaactgagaagaaaaaccgggtattcatttgtgaactgcaagaaagctttagaaacttgcggtggcgacctgaagcaggcagagatttggcttcataaggaagctcagaaagaggggtggagcaaagcagcaaaactccaaggtagaaagacaaaagaaggtctgatcggtctgctccaagaggggaacacgactgtcctggtggaagttaattgcgaaaccgacttcgtaagcagaaacctgaaattccaactgctggtgcagcaggttgctctgggaacaatgatgcactgccagaccttgaaggatcagccgagcgcgtattctaaaggcttcctgaacagttctgaactcagcgggctccctgctgggcccgaccgggagggctccctgaaagaccagttggctctggccattggtaagctcggcgagaacatgatactcaaaagggccgcatgggtgaaagtcccaagtgggttttatgtcggatcttatgtgcatggcgcgatgcagtccccttcacttcacaagctggttctcggcaagtacggagcactcgtgatatgcgagacttctgagcagaagacaaacctcgaagacgttgggagaagactcgggcagcatgtggtgggaatggctccactcagcgtgggatcactggacgacgagcccgggggcgaggctgaaactaagatgctatctcagccttacctgttagaccctagcatcacccttggtcaatacgtgcagccacaaggtgtgtccgtcgtcgacttcgtcaggtttgagtgtggcgagggggaggaggccgctgagaccgaatag

SEQ ID NO: 210039 - DNA, 504 bp, synthetic construct
  misc_feature 1..504: note = Description of Artificial Sequence: Synthetic coding sequence
  source 1..504: mol_type = other DNA
atgagcctgctgcggagcctgcgggtgttcctggtggcccggaccggctcctaccccgccggaagtctgttgcggcagtctccacaaccaagacatacattttatgcaggccctcggctgtccgcatcagcatcttcaaaagagctgcttatgaagctcaggagaaagaccgggtacagcttcgtgaattgcaagaaggccttagaaacgtgcgggggagacttaaaacaggcggagatttggttgcacaaggaggctcagaaagagggctggtctaaagccgcaaagctgcagggacgcaagacaaaagagggacttataggattgctccaggagggtaacacaactgtgttggtggaagtcaattgcgaaactgatttcgtgtcgagaaacctcaagttccagttattagttcagcaggtcgccctggggaccatgatgcattgtcaaacactgaaggaccagcctagtgcttattcgaaggagaactgggagaaaacctag

SEQ ID NO: 210040 - DNA, 648 bp, synthetic construct
  misc_feature 1..648: note = Description of Artificial Sequence: Synthetic coding sequence
  source 1..648: mol_type = other DNA
atgagcctgctgcggagcctgcgggtgttcctggtggcccggaccggtagttatcccgcaggtagcttgcttcgacagtcaccgcaacccaggcatacattttacgctggtcctagactgtccgcctccgcttcaagtaaggagctgttgatgaagctcaggagaaagacagggtattctttcgttaactgcaagaaggctctggagacttgcgggggcgacttgaaacaggctgagatttggctgcataaggaagcacagaaggagggatggagcaaagccgccaagttacaagggaggaagactaaggagggcctcattggcctgctgcaggaaggcaataccactgtcttggttgaggtcaattgtgagaccgattttgtgagtcgaaatctgaagttccagctgctggtgcagcaggtggccctggggacaatgatgcattgtcagactttgaaagaccagccatcggcctattccaagggctttctcaattcctccgagctttctggcttgcctgctgggcctgatagagaagggtccctgaaggaccagctggcactggcaatcggtttaccatttcagatcggggccgtgagtgaactgcagttgcctgagtccaactttctgcagaacacctccagctag

SEQ ID NO: 210041 - DNA, 435 bp, synthetic construct
  misc_feature 1..435: note = Description of Artificial Sequence: Synthetic coding sequence
  source 1..435: mol_type = other DNA
atgaagagccagtggtgccggcccgtggccatggacctgggcgtgtaccaactcagacattttagtatttctttcttatcatctcttctaggcacggaaaacgcatcagttaggttagacaatagcagcagtggcgcctcggttgttgcgattgacaataaaatcgaacaggctatggatttggttaagtctcatctgatgtacgccgtgagggaggaggtagaggtccttaaagagcaaataaaggagctaatcgaaaaaaactcccagctggagcaggagaataatttgcttaaaacgcttgctagcccagaacagcttgcccagttccaggctcaactccaaactggttctccacccgccacgacgcagccccagggaacgacgcagccgcccgctcaacctgcatcccagggatccgggcctaccgcttag

SEQ ID NO: 210042 - DNA, 3222 bp, synthetic construct
  misc_feature 1..3222: note = Description of Artificial Sequence: Synthetic coding sequence
  source 1..3222: mol_type = other DNA
atgcaccagccccccgagagcaccgccgccgccgccgccgccgccgatatctctgcccgcaagatggcacaccctgccatgttcccacgccgcggcagcggtagcggatccgccagcgcactgaacgcagctggcaccggcgtcggctcaaatgcgacctcatctgaggacttcccccccccaagccttctgcagcctccaccccccgcagcctcatccacgagtgggccacagcccccacctccccagagcctaaacctcctatcacaggcacagttgcaggcccagcctctcgcccccgggggaacacaaatgaagaagaagtccggatttcaaattacttcagtgactcctgcccagatatctgcttccattagctccaataattcaattgccgaagacacagagtcatatgatgacttggacgagagccacactgaggatctttctagtagtgagattctggacgtgtcgctgagccgggctactgacctcggggaaccagagcggtctagttcagaagagacacttaataatttccaggaggcagaaaccccaggagccgtttcacccaatcaacctcatttaccgcagccgcatctaccccacctgccccagcagaacgtggtgatcaacggaaatgcccacccacatcacttacatcaccaccatcagatccaccacggacaccacctgcagcacgggcaccaccacccctctcacgtggcagtcgcatcagcctccataaccgggggacctccttcctcccctgtaagccgaaaactgagcaccacaggcagttccgacagcattaccccagtcgcgcctaccagcgcggtgtctagctctggctctcccgctagtgtgatgacaaacatgcgagccccatccactacaggcggaataggtattaactcagtgaccggtacttctaccgtgaacaatgttaatataacagcagtgggatccttcaatcccaatgttacctctagtatgcttgggaatgttaatatatccacgtccaacatcccaagtgctgcaggtgtctcagtgggaccaggcgtgacgtctggagtaaatgtcaatatcctttccgggatgggcaacggaaccattagcagctctgctgccgtgtcctcagtccccaatgctgccgctggaatgaccggaggttccgtatcctctcagcagcagcagccaacagtgaacaccagtcggttcagagtggtgaagctagattcctcaagcgagccttttaaaaaagggagatggacgtgcactgaattttacgagaaggaaaacgccgtacccgctactgagggtgtactgataaacaaagtggtggagaccgttaagcagaacccgatcgaggttacttccgaacgcgaatccacatctggctcaagtgtttcgagctctgtctcaaccctgtcccactacacagaaagcgtagggtccggcgagatgggcgcacccactgtggtggtccagcagcaacagcagcagcagcagcaacaacagcaacagccggccctgcagggggtgacattacaacagatggattttggctcgacaggcccacagagcatccccgctgtgtctatccctcaatcaattagccagtcacagatttcccaggtacagttacagtcccaggagctgagttaccaacaaaagcagggattgcagccagtgcctctacaggccaccatgagcgccgccactgggatccagccaagtcccgttaatgtcgttggggtgacctcagcactcgggcaacagccatctatttcttctctcgcacagccgcagctgccatacagccaggcagccccccccgtgcagacacctttgcccggcgcacctccaccacagcagctacaatacgggcaacagcagccaatggtcagcacccagatggcgcctgggcatgtgaaatccgttactcagaatcccgccagcgaatacgttcagcagcaaccgattcttcagactgcaatgtctagtggtcagccatctagcgccggcgtgggggctggaaccacggtgatcccagtcgcacagccccagggcatccagttgcctgtgcagcctacggctgtgcccgctcagccggcaggggcttctgtacagcctgtgggtcaggcacccgcagccgtaagtgcagtgcctaccggcagccagatcgccaacataggccaacaggctaacattccgacagcagtgcagcagccgtcaacccaggttccacctagtgttattcagcagggagcccccccgagttcccaggtcgtgccacctgcccagactgggattatccatcagggtgtgcagacaagcgcccctagcctgcctcagcagctggtgattgcttctcagtcgtctttactgacagtcccacctcagccccagggagtcgaacccgtagcccagggcatagtcagccaacagttaccagcagtctcaagtctgccaagcgccagctccattagcgtgacatctcaggtcagcagtaccggaccctccggaatgccttccgcccccaccaacctcgtgcctcctcaaaacatcgcgcagactccagctacgcaaaacggaaaccttgtgcagagtgtgagccagccccctctgattgccacaaacaccaaccttcctcttgcccaacagataccactaagttccacccaattctctgctcaatctttggcccaggctatcggcagccaaattgaagatgcccggagggcagcagagccgagtttggtcggactgcctcagaccatcagcggagactccggaggcatgtcagcagttagcgacggctccagcagctctctggccgctagcgccagtttatttcctctaaaagtcctgcctctgacaacacccttggtggatggcgaggacgagtcaagttctggggctagcgtcgtagcaattgataataaaattgagcaagccatggatcttgtgaaaagtcatctgatgtacgcagtgcgcgaggaggtggaagtcctgaaggagcagataaaagaactgattgagaagaactctcagctggagcaggagaacaacctcctcaagacactagctagccctgagcaattagcgcagttccaggcacaactccagaccggatctcctccagcaacgacacaaccccaggggacaacgcagccaccagcccagcccgcttcccaggggtctggcccaactgcctag

SEQ ID NO: 210043 - DNA, 126 bp, synthetic construct
  misc_feature 1..126: note = Description of Artificial Sequence: Synthetic coding sequence
  source 1..126: mol_type = other DNA
atgaagagccagtggtgccggcccgtggccatggacctgggcgtgtaccagctccgccacttctccatatcattcctgtcatcgctgctcggcaccgagaacgcgtctgtacgcctggacaactag

SEQ ID NO: 210044 - DNA, 429 bp, synthetic construct
  misc_feature 1..429: note = Description of Artificial Sequence: Synthetic coding sequence
  source 1..429: mol_type = other DNA
atgcaccagccccccgagagcaccgccgccgccgccgccgccgccgacattagtgcacgaaagatggcacaccctgctatgtttcctaggcgagggagcggcagcggtagtgcctcggctctcaatgccgccgggactggcgtggggagcaacgcaacgtcttccgaggacttcccaccaccgtcccttctccaaccacccccccctgccgcctcatccacctctggacctcagcctcccccaccacagtcacttaacctactctcacaagctcagttacaggcccagccactcgcccccgggggcactcagatgaagaaaaagtccgggtttcaaatcacctcagtaacacctgcacagatatccgcctccatttcatcaaataacagtatcgccgaagataccgaaagctatgatgacctggactag

SEQ ID NO: 210045 - DNA, 1713 bp, synthetic construct
  misc_feature 1..1713: note = Description of Artificial Sequence: Synthetic coding sequence
  source 1..1713: mol_type = other DNA
atgcaccagccccccgagagcaccgccgccgccgccgccgccgccgatattagtgctagaaagatggcccacccagccatgttccctagacgaggctccggatccgggagtgccagcgctctgaacgcggcaggtacaggagtgggctctaacgccaccagctccgaagacttcccgcctcccagcctactgcagcctcccccgcccgcggcaagttcgacttcagggccacagccacccccacctcagtcactgaacttgctttctcaggcccaactacaggcgcaacccctcgctcctggcgggacccagatgaaaaagaagtccggcttccagattacctcagtgactcccgctcagatatcagcctctatctcgagtaataacagcatcgcagaggatactgagtcatatgacgacctcgatgagagtcacactgaggatctgtcttcatccgagattctcgacgtgagcctcagtagggcaaccgacctaggcgaaccagaacggagcagcagcgaagagacgctcaataactttcaagaggccgagacacctggcgccgtgagtccgaaccagcctcatctcccacagccccacctcccccacctgccacagcagaatgttgtgattaacggaaatgcccaccctcatcacttgcaccaccatcatcagattcatcatggccaccacctgcagcacggtcatcaccacccttctcacgtcgctgtggccagtgccagtataactggtggacctccgagtagtccagtgtcgaggaaactgtctactactgggagcagtgattcaattacacccgtggccccaacaagcgccgtctcatcatccgggagtcctgcttccgtcatgaccaacatgagagcccctagcacgaccgggggtataggcattaactcggtgaccggaaccagtacagtgaacaatgtcaatataacggcagtgggcagtttcaatcccaatgtgacttctagtatgttggggaatgttaatatcagtacatcaaatattccctccgcagctggggtgtctgttggcccaggggtgactagcggggtaaacgtcaacattttatcggggatgggcaatgggaccatcagctctagcgcagctgtaagctcagtacctaatgcagccgccggaatgaccggcggctccgtgtcttcacaacagcagcagcccacggtcaatacctcccgttttagggtcgtcaagttggactctagctccgaaccattcaagaaggggcgctggacttgcacagaattttacgaaaaagagaacgcggtgcccgccaccgaaggggtgcttattaataaggtggtggaaaccgtgaagcagaaccccattgaggttacgagtgagcgtgaatccaccagtggatctagcgtgtcatccagcgtgtccacactgtcacattacaccgagtccgtgggatctggtgagatgggagctcctacagtagtcgttcagcagcagcagcagcagcagcagcaacagcaacaacagcctgccttacagggggtgactttacagcagatggactttggcagtacaggaccacaatcaatcccggccgtgtctatccctcaaagcatcagccagagccagatctcacaggtccagcttcagtcccaggaactgagctatctgaccatgaaggtggtcctactcattgtgtacctgtgtatgtag

SEQ ID NO: 210046 - DNA, 603 bp, synthetic construct
  misc_feature 1..603: note = Description of Artificial Sequence: Synthetic coding sequence
  source 1..603: mol_type = other DNA
atggcccagagcaagctggactgccggagccccgtgggcctggactgctgcaactgttgcctggacctggcccatcgatccggtctacaacgcgggagttccggcgaaaataataatcctggctcccccaccgtttcaaatttccggcagttgcaggagaagcttgtgttcgagaaccttaacaccgacaaactgaattcgatcatgaggcaggactccctggaacccgtcctgcgcgatccatgctacctgataaacgaggggatatgtaatcggaatattgaccagactatgctgtctattctgctttttttccattccgcctccggagcttctgtggttgcaattgacaataaaatcgagcaggcaatggatttggttaagaatcacttgatgtatgcggtaagggaagaggtcgaaattctcaaagaacagatccgagaactcgtggagaaaaattctcaactggagagagagaacacacttctaaaaactctggcctctccagagcagctcgaaaaattccagtcttgtctgtccccagaggaaccggcccctgaatccccccaagtgccagaagctcctggcgggtccgccgtgtag

SEQ ID NO: 210047 - DNA, 333 bp, synthetic construct
  misc_feature 1..333: note = Description of Artificial Sequence: Synthetic coding sequence
  source 1..333: mol_type = other DNA
atggccttccagcccccctacagcagcagcctgttccggaagcgggataatgcatctggcgcctccgtggtcgcaatagacaacaaaatcgaacaggcaatggacctggtgaagaaccatttgatgtatgccgtacgggaggaagtcgagatattaaaagagcaaattagagagttagttgagaaaaatagtcagttggaaagagagaatacgttgctcaaaactttagcctcacctgagcaactagagaagttccagagctgcctaagcccagaagagcctgccccggagtctccgcaagtgcccgaggccccaggcgggagtgccgtctag

SEQ ID NO: 210048 - DNA, 603 bp, synthetic construct
  misc_feature 1..603: note = Description of Artificial Sequence: Synthetic coding sequence
  source 1..603: mol_type = other DNA
atggcccagagcaagctggactgccggagccccgtgggcctggactgctgcaactgttgcttggacctggcacaccggagcggactccagcgaggctcctccggggagaacaataatccaggctcacccaccgtttcgaattttcgccagcttcaggagaagctggtttttgaaaatttaaacactgataagctgaatagtatcatgaggcaggactctctggagccagtgctgcgtgacccttgctatcttattaatgaggggatatgcaaccgtaacatagatcagacaatgttgagcatactgctctttttccacagtgcctccggagcctcagtggtagcgatcgataataagattgaacaagctatggacctcgttaagaaccatttaatgtatgccgtccgggaggaagtcgagatcctgaaggaacagattagggagctggtcgaaaagaattcacagctggaaagggaaaacacgttactgaagactttggcctccccagagcagttggaaaaattccagtcctgtctgagcccggaagagcccgctccagaatcaccacaggttccagaggctccaggcggctcagcagtttag

SEQ ID NO: 210049 - DNA, 603 bp, synthetic construct
  misc_feature 1..603: note = Description of Artificial Sequence: Synthetic coding sequence
  source 1..603: mol_type = other DNA
atggcccagagcaagctggactgccggagccccgtgggcctggactgctgcaactgttgcttggatcttgcacacaggtccggacttcagcgaggcagtagtggcgaaaataacaacccaggttcacctacagtctccaactttaggcagcttcaggaaaaactcgtgttcgagaacctgaacaccgacaagctgaactccattatgagacaggattcactggagcctgttttgcgcgacccttgctatttgatcaatgagggcatctgtaatagaaatatcgaccagactatgttaagtattctgttattctttcacagcgccagtggcgccagcgttgtggctattgacaacaaaattgagcaggctatggacctggtgaagaatcacctcatgtatgccgtgcgtgaagaagtcgagatcctgaaagagcagatacgggaactcgtggagaaaaattcacagttggagcgcgagaacaccctactgaagactttagctagcccagaacaactggagaagttccagtcttgcctgagcccggaggagcccgccccggagtctccgcaggtgcctgaggctcctgggggatctgctgtttag

SEQ ID NO: 210050 - DNA, 234 bp, synthetic construct
  misc_feature 1..234: note = Description of Artificial Sequence: Synthetic coding sequence
  source 1..234: mol_type = other DNA
atggacctggtgaagaaccacctgatgtacgccgtgcgggaggaggtggaaatcctaaaagagcagattagggaactggttgaaaaaaatagtcagctggaacgggagaatacgctcttgaagaccctagcatcccccgagcagctagaaaaattccagtcctgcctaagccccgaagagcctgcgcctgagtctccgcaggttccggaagcacctggcggcagcgctgtctag

SEQ ID NO: 210051 - DNA, 405 bp, synthetic construct
  misc_feature 1..405: note = Description of Artificial Sequence: Synthetic coding sequence
  source 1..405: mol_type = other DNA
atgaacaccgagatgtaccagacccccatggaggtggccgtgtaccaactgcataacttctcgattagtttcttctcatccctgctgggaggtgacgtcgtcagtgtcaaactggataattccgccagtggggcctccgtagtggccatcgacaacaaaattgaacaggcgatggacttagtgaaaaaccatctgatgtacgctgtcagggaggaggtcgaaattttgaaggagcagattcgggaacttgtcgagaagaactcccaactggaacgtgagaacacactgctgaagaccctggccagtcccgaacagctggagaagttccagtcgtgtctgagtcccgaggaacccgccccagaatctccgcaagttcccgaagcccccggcggatcagcggtctag

SEQ ID NO: 210052 - DNA, 540 bp, synthetic construct
  misc_feature 1..540: note = Description of Artificial Sequence: Synthetic coding sequence
  source 1..540: mol_type = other DNA
atggcccagagcaagctggactgccggagccccgtgggcctggactgttgcaactgctgcctagatctggcgcaccgcagtggcctgcagagaggatccagcggagagaacaataatccaggttcacccacggtctccaacttcaggcaggactccctggaaccggtactccgcgacccatgctacctgatcaacgagggaatttgcaacaggaatattgaccagaccatgctaagcatcttgttattcttccacagcgcatcaggggcgagcgtggttgcaatcgacaataaaatagagcaggcgatggaccttgtgaagaaccatttaatgtatgctgtgagagaggaagtggaaattcttaaggaacagatccgagagctggtcgagaagaattcgcagctcgagagagaaaataccttgctgaaaactctggcgtcccccgagcaactagaaaagttccagtcctgtcttagccccgaggagccagctcccgaatcaccacaagtccctgaggcgcctggcggatcagctgtgtag

SEQ ID NO: 210053 - DNA, 372 bp, synthetic construct
  misc_feature 1..372: note = Description of Artificial Sequence: Synthetic coding sequence
  source 1..372: mol_type = other DNA
atggcccagagcaagctggactgccggagccccgtgggcctggactgctgcaactgttgcctggacctggctcacaggtcaggtctgcagagaggctcatccggggaaaataacaatcccggcagtccaactgtctctaactttcgccagttgcaggagaagcttgtttttgagaacctgaacaccgataagctcaactcaatcatgagacaggactccctcgaacctgtcttgcgggacccttgttatctgataaatgagggcatctgcaacaggaacattgaccagaccatgctgagtatcttgctgttcttccactctgcctctggagcctccgtggtggctattgataacaaaatcgagcaggcttag

SEQ ID NO: 210054 - DNA, 78 bp, synthetic construct
  misc_feature 1..78: note = Description of Artificial Sequence: Synthetic coding sequence
  source 1..78: mol_type = other DNA
atggacctggtgaagaaccacctgatgtacgccgtgcgggaggaggtggagatactcaaagagcagatacgggaatag

SEQ ID NO: 210055 - DNA, 351 bp, synthetic construct
  misc_feature 1..351: note = Description of Artificial Sequence: Synthetic coding sequence
  source 1..351: mol_type = other DNA
atggcccagagcaagctggactgccggagccccgtgggcctggactgctgcaactgctgcctggacttggcgcaccgctccgggttgcaacggggaagtagtggggagaacaataatcccggatcccccacggtatctaattttaggcagctgcaggagaaactggtgtttgaaaacctcaatacagataaactgaacagtatcatgcggcaagattctcttgagcctgttctcagggatccctgttacttgatcaacgaaggcatatgtaatcgcaatatagaccaaacgatgctttcaatacttctgttcttccattcagccagtggcgcatcagtggtcgcaatctag

SEQ ID NO: 210056 - DNA, 177 bp, synthetic construct
  misc_feature 1..177: note = Description of Artificial Sequence: Synthetic coding sequence
  source 1..177: mol_type = other DNA
atggcccagagcaagctggactgccggagccccgtgggcctggactgttgtaactgctgcttggacctcgctcatcgatccgggctgcagcggggtagtagcggagagaacaataaccctggaagcccgactgtctccaactttcgacagctacaggagaagctcgtttttgagtag

SEQ ID NO: 210057 - DNA, 255 bp, synthetic construct
  misc_feature 1..255: note = Description of Artificial Sequence: Synthetic coding sequence
  source 1..255: mol_type = other DNA
atggcccagagcaagctggactgccggagccccgtgggcctggactgttgtaattgctgcttggatttagctcaccgttctggactgcagcgaggctcctccggagagaataacaatcccggaagccccactgttagcaactttcggcagctgcaagaaaaactagtatttgaaaacctgaataccgacaagttaaacagtataatgagacaagactcattagagcctgtgttgagagacccttgttacctatag

SEQ ID NO: 210058 - DNA, 603 bp, synthetic construct
  misc_feature 1..603: note = Description of Artificial Sequence: Synthetic coding sequence
  source 1..603: mol_type = other DNA
atggcccagagcaagctggactgccggagccccgtgggcctggactgctgcaattgctgcctggatctggcacacagatcggggctgcagcgcggatcatctggggaaaacaacaatcctggctcaccaacagtatcgaattttcgccaactccaagaaaagctcgtgttcgagaatctgaacactgataagttgaacagtataatgaggcaggactctctggagcccgttctcagggatccctgctatctcattaatgaaggcatttgtaatcgaaatatcgaccagaccatgctatccatcctgctgttttttcacagcgcgtccggagcctctgttgtggccatagacaataagatcgaacaggccatggatttggtaaagaaccatctcatgtatgcagtgcgggaagaggtagagattctgaaagagcagatccgggagctcgttgagaagaacagtcagttagagagggaaaacacccttttgaagacacttgcttcacctgaacagttagaaaaattccaatcttgtttatctccagaggaacctgcccccgagtcgcctcaggtgccagaagcacctggtggatcagctgtgtag

SEQ ID NO: 210059 - DNA, 303 bp, synthetic construct
  misc_feature 1..303: note = Description of Artificial Sequence: Synthetic coding sequence
  source 1..303: mol_type = other DNA
atggcccagagcaagctggactgccggagccccgtgggcctggactgctgtaactgttgcctggacctcgcccatcggtctggccttcaacgtggctctagcggcgagaataataaccccgggtccccaactgtatccaacttccgccagctgcaggagaagctggtctttgaaaacttgaacactgacaaacttaacagcattatgcgtcaggattcactggagcccgtgcttagggacccctgctacctgattaacgaaggcatctgcaataggaacatcgatcagacaatgcttagctag

SEQ ID NO: 210060 - DNA, 360 bp, synthetic construct
  misc_feature 1..360: note = Description of Artificial Sequence: Synthetic coding sequence
  source 1..360: mol_type = other DNA
atggcccagagcaagctggactgccggagccccgtgggcctggactgctgtaactgctgccttgatttggcccatcggagcggactgcagcggggatcatccggggagaacaataatcccgggtctcctactgttagcaacttcagacagcttcaggaaaagctggtgttcgaaaatctgaatacagataagctcaattcgatcatgcgccaggacagccttgaacctgtgctccgagacccgtgctaccttataaacgaaggtatctgcaacaggaatatcgaccagaccatgctaagcattctgttattctttcatagcgccagcggggcctccgttgttgctattgataacaagtag

SEQ ID NO: 210061 - DNA, 399 bp, synthetic construct
  misc_feature 1..399: note = Description of Artificial Sequence: Synthetic coding sequence
  source 1..399: mol_type = other DNA
atgcggcaggacagcctggagcccgtgctgcgggacccctgctacctcatcaacgaaggtatttgcaacaggaatattgatcagactatgctgtctatcctgcttttcttccatagtgcctccggggcctcagtggtggctatcgacaacaaaatcgaacaagcgatggacctcgttaagaatcacctgatgtacgccgtacgtgaagaagtcgaaatccttaaggaacaaatacgggagctggtcgagaaaaatagccagctcgagcgggaaaacacgctgctgaagaccctggcttccccagagcagctcgaaaagtttcagtcatgtctctcgcccgaagagcctgcgcctgaaagcccacaggttccagaagcacccggaggctctgccgtgtag

SEQ ID NO: 210062 - DNA, 375 bp, synthetic construct
  misc_feature 1..375: note = Description of Artificial Sequence: Synthetic coding sequence
  source 1..375: mol_type = other DNA
atggcccagagcaagctggactgccggagccccgtgggcctggactgctgtaattgttgccttgacctagcccaccggagcggactgcagcggggatccagcggggagaacaacaaccctgggagtcctactgtgtctaattttcgacaactgcaggaaaagctggtctttgagaacctgaatacagataagcttaacagtattatgcggcaggacagtctggaacctgtgctaagagacccgtgctacttgatcaacgaaggtatttgcaacaggaatatcgaccagaccatgttgagtatactgctgtttttccactccgcgagcggcgcctcggtcgtagccattgacaataagattgagcaggcaatgtag

SEQ ID NO: 210063 - DNA, 1188 bp, synthetic construct
  misc_feature 1..1188: note = Description of Artificial Sequence: Synthetic coding sequence
  source 1..1188: mol_type = other DNA
atgagcggcggcaagaagaagagcagcttccagatcaccagcgtgacaacagattatgagggcccaggatcgcccggggccagtgacccccctacgcctcagcccccgaccggaccccctcctagactccctaatggtgagcccagtccagacccagggggaaagggcaccccgaggaatggatctccacctcccggtgcgcctagttcccggttccgggtagtgaagcttcctcatgggctaggtgagccttatagaaggggcagatggacatgcgtggacgtctacgagagagacctggagcctcacagcttcggcggacttctggaggggataagaggcgcctccgggggagccggcgggcgttcactcgacagccgcttggagttggcttccctgggactaggggccccaacccccccctctggcctgtcacaggggcccacgtcctggttgcgacctccccccacctcccccggaccccaggcccggagctttactggaggactggggcagctcgtcgtcccgtctaaggccaaagccgagaaacctccgctctcagcgtcctctccccagcagcgcccacctgagcctgaaactggtgagtctgctggtactagcagagctgctacacctctcccaagcctgcgggtggaggccgaagcaggaggctccggcgcccgtactcctccgctctctcgtcggaaggccgttgatatgaggctgagaatggagttaggagctcccgaggagatgggtcaggtccctccacttgatagccggccctcctcccctgccctgtatttcacgcatgacgcctccctggttcacaagtcgccggacccctttggcgccgtggcagcgcagaagttctctttggcacattcgatgctggccatcagcgggcaccttgacagcgatgatgatagtgggagtgggtcattggtcggaatcgataacaagatcgaacaggctatggatctggtcaaatcccacttgatgtttgctgtgagggaggaggtggaagtccttaaggagcagatccgggagctggcagagaggaacgcagccctggagcaggaaaacggactgcttagggcgttggctagtcctgagcagttagcccaactccccagctccggagtgccacgcctcgggccccccgccccaaacggtccatccgtgtag

SEQ ID NO: 210064 - DNA, 1314 bp, synthetic construct
  misc_feature 1..1314: note = Description of Artificial Sequence: Synthetic coding sequence
  source 1..1314: mol_type = other DNA
atgagcggcctggacggcgtgaagcggaccacccccctgcagacccattccattatcatcagcgatcaagtgccctctgatcaagacgctcaccaatatctgcgactgcgagatcagagcgaagctacccaagtgatggctgaacccggggagggtggtagcgaaacagtcgctctcccaccccctccacctagcgaagaaggaggcgtacctcaagatgcggccggtcgaggagggacccctcaaatccgtgtggtcggcggacgtgggcacgtggctatcaaggcaggccaggaggaaggccaacccccggctgagggcttggcagctgcgagcgtggtcatggctgccgatcggagcctgaagaaaggagtacaagggggggaaaaagcccttgagatttgcggggcccagcgctccgcctccgagctgactgcaggagccgaggcagaagccgaggaggtcaagactggtaagtgcgccactgtgtccgccgccgttgccgagcgcgagtccgctgaggtagttaaggagggattggcagagaaagaagttatggaagaacagatggaggtggaggagcagccaccggagggagaggagattgaagtcgcagaagaagatcgtttggaggaggaagcccgcgaggaggaggggccctggccattgcacgaggctttgcgcatggatccgctggaagccatccaactggagctggatactgtgaacgcccaagccgacagagcattccagcagctcgagcacaaattcggcagaatgcggagacactatctggaaagacgtaactacattattcagaatattcctggcttttggatgaccgcgttccgcaaccacccgcagttgtctgcgatgatacgtggacaggacgcggagatgctgcggtatataacaaacctggaagtgaaagagctgcgccatccaagaactggctgcaaattcaagtttttctttaggcggaacccctatttcaggaataagttgatcgtcaaagagtacgaggttcgctcctctgggagggtcgtgagtctgtcaactcccattatttggaggaggggtcacgaaccccagtctttcatcagaaggaaccaggatcttatttgctcattttttacttggttctcagatcacagcctgccagaaagtgataagattgcagagataatcaaggaggacctgtggcccaaccctttacagtattatctgctgcgcgagggggtgaggagggccaggaggcggcctttgcgagaacctgttgagataccgagaccgttcggatttcagtctggctag

SEQ ID NO: 210065 - DNA, 522 bp, synthetic construct
  misc_feature 1..522: note = Description of Artificial Sequence: Synthetic coding sequence
  source 1..522: mol_type = other DNA
atgagcggcctggacggcgtgaagcggaccacccccctgcagacccatagtattataattagcgatcaggttcccagtgatcaggacgctcatcaatatttgcgcctccgggaccaatccgaggcgacacaggtaatggctgaacccggagaaggagggtctgagaccgtcgcactgcctccacctcccccgagcgaggaaggaggagtgccacaggatgctgcaggccgaggaggcactccccagattcgtgtggtggggggaaggggacatgtcgcaatcaaggctggccaggaagagggtcaaccacccgccgaggggctggccgcagcttctgtcgttatggccgccgacaggtcccttaaaaaaggggtgcagggaggcgaaaaagccttagaaatctgcggagctcaaaggagcgccagcgagctgacagctggcgccgaggctgaagctgaggaagtcaaaaccggcaaatgcgccaccgtgtccgccgcggtggcaaaaatgcagaggtgttag

SEQ ID NO: 210066 - DNA, 2082 bp, synthetic construct
  misc_feature 1..2082: note = Description of Artificial Sequence: Synthetic coding sequence
  source 1..2082: mol_type = other DNA
atggaccggcccgacgagggcccccccgccaagacccggcggctgtcttcgagcgagtcaccacagagggaccctccgccgccaccgccacccccgcccctgctgcgactgcccctgccacctccacagcagcgccctcgtcttcaggaagagaccgaagcagcacaggtcctggcagacatgcgaggggtgggactcggtccggctctgcccccccctcctccttacgttatcctggaggagggagggatacgcgcttactttacactcggcgcagagtgccctggttgggactctacaatcgagtcaggctacggagaggctccgccaccgactgaatcactggaagccctcccaacaccagaggcgtccggggggtcccttgaaattgatttccaagtggtgcagagtagcagctttggcggtgagggtgccctagagacatgttccgcggtcggatgggcaccccagaggctcgtggatcctaagagcaaagaagaggccatcatcattgttgaggacgaggatgaggacgagcgggaatccatgcgatcatctcgccggcgccgccgcaggaggcgcagaaagcagaggaaagttaagcgcgagtccagagagcgcaatgcagaaaggatggagagcattctgcaggctctcgaagatatacagctggacctggaagccgtcaacatcaaggccggaaaagcgttcctcagactcaaacggaagtttattcagatgagacggcccttccttgaacggagagacttgataattcagcacatccccgggttctgggttaaggctttcctcaaccatcctagaatttccatattgataaaccggagggacgaagacatatttcggtatctgacaaatttgcaggttcaggacttgagacatatctctatgggctataagatgaaactttactttcagactaacccatacttcacaaacatggtgatcgttaaggagtttcagcgcaacagatcaggaagactggtgagccattcaacccctatccgttggcaccgagggcaagaacctcaagctcgcagacacggcaatcaggacgcaagtcactctttctttagctggttcagcaaccacagtctgcccgaggctgatcgaattgctgaaataattaagaacgatctgtgggtgaaccccctgaggtactacctgcgggaacgaggaagccgcattaaaagaaaaaaacaagagatgaagaaacgcaaaactcgaggcagatgcgaagtggtcatcatggaggacgctcctgactattacgccgttgaggacattttcagcgaaataagtgacatcgatgagacaatacacgacattaagatcagcgacttcatggaaacaactgactactttgaaacaacagataatgaaattaccgacattaacgagaatatttgcgattctgagaaccctgaccacaacgaggttcccaataacgagaccacagacaataacgaaagcgccgacgaccatgaaaccactgacaataacgagtctgccgacgacaacaacgaaaatccagaggacaataataagaacacggacgacaatgaagagaaccccaataataatgagaacacctatggaaataacttcttcaagggcggcttctggggctcccatggcaacaatcaggactcatcagactcggacaacgaagcagacgaagctagcgacgatgaagataacgatggtaacgagggcgataatgaaggaagcgatgatgatggaaacgagggtgataatgaagggtcagacgacgatgaccgcgacatcgagtattacgaaaaagtaatagaggacttcgacaaagatcaggcagactacgaggacgtgatcgaaattatcagtgatgagagtgtggaggaagagggcatcgaggagggcatacagcaggatgaggatatttatgaagaagggaattacgaagaggagggctccgaagatgtctgggaggagggagaggatagcgacgattccgatcttgaggatgtgctgcaggtccctaacgggtgggctaacccagggaagagaggcaaaaccggatag

SEQ ID NO: 210067 - DNA, 1062 bp, synthetic construct
  misc_feature 1..1062: note = Description of Artificial Sequence: Synthetic coding sequence
  source 1..1062: mol_type = other DNA
atgccctggcccctgctgctgctgctggccgtgagcggcgcccagaccacacgcccctgttttcccgggtgccaatgcgaagtcgagaccttcggtctattcgactcttttagcctgacgcgagtggactgctctggcctgggacctcacattatgcctgtgcccatccctctcgacacagcgcacttagacctatcttcaaaccgactcgaaatggtgaacgaatccgtgctggctgggccaggctataccacgctggccggactcgacctgtcccacaatcttcttacctctatttcccctaccgcattcagcaggcttcggtaccttgagagtctggacctcagccacaacgggcttactgccctgcctgcagagtctttcacctcatcccccttatccgatgtcaatctgtcccataatcagcttcgggaggtgtccgtgagcgcttttacaacccacagccaggggagggcgcttcatgtagatctgtctcacaatctcattcaccgactggtaccacatcccactcgagcaggactgccggcaccaactatacagtccttaaatctggcatggaacagactccacgcagtccctaacctccgcgatctgcctctccgatacctttcccttgatggaaacccattggctgtgatcggccctggcgcctttgcagggctgggggggctcacgcacctatcacttgcttctctacagagactacccgaactagcaccatctggattcagagagctgccaggcctccaggtactggatctctctggcaatcctaagctgaactgggctggagctgaggtcttctctggactctcctctctccaagagcttgatctgagcggaacaaacctggtgcctttgcccgaggcactcctgctacaccttccggcactccagtccgtgtccgtcggtcaagatgtccggtgtagaagacttgtgagggaaggcacctatccacggagacccggatcatctccaaaagtggcactccattgcgtagatacacgggacagtgccgctaggggaccaacaattctgtag

SEQ ID NO: 210068 - DNA, 966 bp, synthetic construct
  misc_feature 1..966: note = Description of Artificial Sequence: Synthetic coding sequence
  source 1..966: mol_type = other DNA
atgccctggcccctgctgctgctgctggccgtgagcggcgcccagacaacgaggccctgttttcccggctgtcaatgtgaagtagagactttcgggctgtttgattcattcagtctcacacgtgtcgactgttctgggcttggcccgcatattatgcctgtccctatacctctggacactgcccacctagatctatcctccaacaggctggaaatggtaaacgagtctgtcctcgcagggcctggttacaccactctggccggtctcgacctttcacataatttattgacaagctcacctcttagtgacgtgaacttgtctcataatcagctcagagaggtttccgtcagtgcgttcactacccatagccaaggccgggcacttcatgtcgatttgtcccacaacctaatccataggcttgttccccaccccactcgtgcaggcttaccggcacctacaatccagtctttaaacctagcctggaacaggcttcatgcagtacccaatctaagggatctcccgttgcggtatctgtccctcgacgggaatcctcttgcagtgattggtccaggggcatttgcgggattaggtgggctgactcacctgtctctggccagcctgcagcgactgcctgaactcgccccctctggctttagggaactgccgggattgcaggtgctggatctgtccggaaaccccaagttgaactgggccggagccgaggtttttagcgggttgtccagcctgcaggagctggatctctctggaacgaatcttgtgcctctgcccgaagcactgctgcttcacctgccagctctgcagtcagtgtccgtgggccaggatgtgcggtgtaggcggttggttcgcgagggtacctaccccagaagacccggcagcagtcctaaggttgctttgcactgcgtcgacactagggactcagccgcaagaggccccaccatactgtag

SEQ ID NO: 210069 - DNA, 318 bp, synthetic construct
  misc_feature 1..318: note = Description of Artificial Sequence: Synthetic coding sequence
  source 1..318: mol_type = other DNA
atgccctggcccctgctgctgctgctggccgtgagcggcgcccagacaaccaggccttgcttcccagggtgtcaatgcgaagttgaaacttttggtttgttcgacagctttagcctgactcgcgtggactgctccgggctgggcccacacatcatgcctgttcccattcccctggataccgcccaccttgacctgagctcaaaccgtctggaaatggtcaacgaaagtgtactggctggaccaggctatacaactctggccgggctcgacctatctcacaatcttttgacatccatctcccctaccgccttctcctag

SEQ ID NO: 210070 - DNA, 1062 bp, synthetic construct
  misc_feature 1..1062: note = Description of Artificial Sequence: Synthetic coding sequence
  source 1..1062: mol_type = other DNA
atgccctggcccctgctgctgctgctggccgtgagcggcgcccagactacccgcccttgtttccccgggtgccagtgcgaggtcgaaactttcggcctgttcgattctttttcgctgaccagggtagactgcagtggcttaggtccgcacataatgccagtgcccatcccgctcgataccgcccatttagatttgtcgagcaaccgtctggaaatggtcaatgaaagcgtgctcgcggggcctggctataccacactagcaggtcttgatttgtctcacaatctactgacgagcattagccctactgctttctccagactgagatatctcgaatctttagatctgtcccacaacgggttaacagccctgcccgctgaatccttcacctctagtcccctatccgatgtgaacctgagccacaaccagcttagggaagtgagcgtgtcagcatttactactcattcccaggggcgtgccctgcatgtggatctgtcccacaatctgatccacaggctagtgccgcatccaacccgggctgggctgcccgccccaaccattcagtccctgaatctcgcctggaatcgtcttcatgctgttcccaatctgcgggatctgcccctcaggtatttgagtttagatggaaatcctctggccgtgataggccccggtgcgttcgccgggctgggaggactgactcacctgagccttgccagccttcagagactacctgagctggccccgagcggtttccgcgaactgccaggcctccaagttttggatttgagtggtaatccgaagctgaattgggcaggcgcagaggtgttcagtgggctgagttccctgcaggagctagacttgtctgggaccaacctcgtgcccctccccgaggctttattgctgcatttacctgctctgcaaagcgtgtctgttggccaggacgttcggtgcagacggctggtcagggagggaacatacccaagaaggcctggaagtagtcctaaagttgcactgcactgcgtggacactagagactcagccgcgaggggtccaaccatcctctag

SEQ ID NO: 210071 - DNA, 453 bp, synthetic construct
  misc_feature 1..453: note = Description of Artificial Sequence: Synthetic coding sequence
  source 1..453: mol_type = other DNA
atgccctggcccctgctgctgctgctggccgtgagcggcgcccagacgacccgaccatgctttcctggatgtcagtgtgaagtagaaaccttcggcttgttcgactcctttagccttacgcgtgtggactgcagtggacttggtccccacatcatgccggttcccattcccctggacaccgcacatctggacctgagtagcaacaggctggagatggtgaacgagtcagtgctggctggcccagggtatacaactttagccgggctggacctatcgcacaacctgctaacatcgatttcccctactgcatttagcagacttcgctacctcgaatcattggacctgagccataacggtctgactgcacttccagcagaatcttttaccagtagccccttatcagacgtaaacctgtcccataatcagcttcgcgaggtcagtgttagcgcatag

SEQ ID NO: 210072 - DNA, 2574 bp, synthetic construct
  misc_feature 1..2574: note = Description of Artificial Sequence: Synthetic coding sequence
  source 1..2574: mol_type = other DNA
atggagagcgaggacctgagcggccgggagctgaccatcgacagcataatgaacaaggtgcgagacatcaagaataaatttaagaatgaggatcttacagacgaactgagtctgaataaaatttctgcagataccactgacaattcaggcacggtgaaccagatcatgatgatggctaacaaccctgaggattggcttagtctgctcttgaaactcgagaagaatagcgtaccactgtcagacgcgctgctgaataaactgattggacggtactctcaggccatcgaggctttgccccccgacaagtacggccagaacgaaagcttcgcccgcattcaagtgcggttcgctgagctgaaagctatacaagaaccggacgacgccagggattatttccagatggcccgggctaattgtaagaaattcgcatttgtgcatatcagttttgctcagttcgaactgtcccagggcaatgttaagaagagcaagcagctgctgcagaaggccgtggagcggggcgccgtccctctcgagatgctcgagattgcacttcgtaatctcaacttacaaaagaagcaactgctgtctgaggaagaaaaaaagaacttgtcagccagcactgtattgacagcccaggaaagctttagtggaagcctcgggcatctgcaaaaccggaacaatagctgtgattctcgcggacagacaacaaaggctcggtttttgtatggagaaaatatgccaccccaagatgcagagattgggtaccgcaattcactgcgtcagacaaataaaactaagcaatcttgcccctttgggcgcgtaccagtgaacctgttaaatagtccagactgtgatgtcaaaacggatgattctgtggtgccctgctttatgaagaggcagacctctaggagcgaatgcagggatttggtcgtcccgggatcaaagccgtcaggaaatgactcatgtgaacttcgcaatctgaaatccgtgcagaatagccacttcaaagaacccctggtctccgatgagaagtcctctgaactgataattactgactccatcactctgaaaaataaaactgaatcttcccttctggctaaattagaagaaaccaaagagtaccaggagcccgaagtgcctgaaagcaaccagaagcaatggcagtcaaaacgcaagtcagagtgtatcaatcaaaacccagccgctagcagtaaccattggcagattccagaacttgcaaggaaagtgaacacagagcagaagcacactacattcgagcagcctgtgttttccgtctccaaacagtcccctcccatatctacctccaagtggttcgatcctaagagtatctgcaagaccccgtcatccaacacactggatgactatatgagttgcttcaggactcccgtggtgaagaacgacttcccgcctgcctgtcagctgtccactccttacggccaaccagcatgctttcagcagcagcagcaccagattctggccacccctttgcaaaatctgcaggtgcttgccagctcttcggccaacgaatgtattagcgtgaagggccggatttattcaatcctgaaacaaataggttctggcggtagcagcaaggtgtttcaggtattgaacgagaagaagcaaatctacgccatcaaatacgtgaacttggaggaagctgataatcagaccctggactcgtatcgaaacgaaatcgcatatctgaataagctccagcaacatagtgataaaataattaggctgtatgactacgaaattaccgatcagtacatctacatggttatggaatgtggcaacattgatctgaatagctggctgaaaaaaaaaaagtctattgatccgtgggagcgaaagagttattggaaaaatatgctcgaagctgttcacactatccatcaacatggcattgtccactctgacttgaaacccgcaaactttctaatcgttgacggaatgcttaaacttattgacttcggcatcgccaatcaaatgcagccagatacaacgagtgttgtaaaggactcacaagtgggtactgtgaactatatgcctccagaagcgattaaagacatgtcctcatccagggaaaatggcaagtctaaaagcaaaatctctcctaaatcagatgtgtggagcctgggttgcatcttgtactatatgacgtatggcaagaccccattccagcagatcatcaatcaaatctccaaactgcacgctatcatcgaccccaaccacgagatcgagttcccagacatccccgagaaagatctccaagacgttctgaagtgctgccttaagcgtgatcctaaacagcgaatttctatcccagagttactggctcacccttatgtgcagatccagacccacccggtgaatcagatggccaaagggacaacagaagagatgaagtacgtgctcgggcagcttgtgggcctcaactcccccaatagcattctcaaggcagccaagacactttacgagcactattcaggtggggaaagccataatagttcttcctcgaaaaccttcgagaaaaagcgaggtaagaaatag

SEQ ID NO: 210073 - DNA, 420 bp, synthetic construct
  misc_feature 1..420: note = Description of Artificial Sequence: Synthetic coding sequence
  source 1..420: mol_type = other DNA
atggagagcgaggacctgagcggccgggagctgaccatcgacagcatcatgaacaaagtccgcgatattaaaaacaagttcaagaacgaagatctgacagacgagctttcactgaacaaaattagcgccgataccaccgataactctggtactgtcaaccagattatgatgatggcaaataatccagaagattggctctctctgctgctcaagctggaaaagaacagcgtccccctttcagacgcattactgaacaaactgatcggccgttatagtcaagcgatcgaagcactgcctcccgacaaatatggccagaatgaatccttcgccaggatccaggtcagatttgccgaactgaaagcaatccaggagccagatgatgcccgggattatttccagatggctcgcgccaattgttag

SEQ ID NO: 210074 - DNA, 531 bp, synthetic construct
  misc_feature 1..531: note = Description of Artificial Sequence: Synthetic coding sequence
  source 1..531: mol_type = other DNA
atggagagcgaggacctgagcggccgggagctgaccatcgacagcataatgaacaaggtgcgggacatcaagaacaagtttaagaatgaggacctgacagatgagctgagcttaaataagatcagtgctgacactacagataattccggaaccgtgaatcaaattatgatgatggctaacaatccagaggattggctgtctctcctgctgaaactggaaaaaaattcagttccactctcggatgctctgttaaataagctcatcgggaggtactcccaggccattgaagccctaccgcccgataaatatggccagaatgagagttttgccagaatccaggtgcgttttgctgagctgaaggctattcaggaacccgacgatgccagggattactttcagatggcacgcgccaattgtaagaaattcgcctttgtccacatctcctttgctcaatttgagctcagccagggaaacgtaaagaagtctaagcagctgctccaaaaggccgtggaacggggcgccgtgccgtag

SEQ ID NO: 210075 - DNA, 453 bp, synthetic construct
  misc_feature 1..453: note = Description of Artificial Sequence: Synthetic coding sequence
  source 1..453: mol_type = other DNA
atggagagcgaggacctgagcggccgggagctgaccatcgacagcatcatgaacaaggtgagagacatcaagaataagttcaagaacgaggacctcacagatgagttgagtttgaacaaaatcagtgctgacacgacagacaattccggcaccgtgaaccagattatgatgatggctaataatccagaggactggctgtcactgctgctgaaactcgagaagaactccgtgccgcttagtgacgcgctgctcaataaactgattggcaggtactctcaagcgatagaggcactcccacctgacaaatatggccagaatgagagttttgcaaggatccaggtgcgattcgccgagctcaaagccatccaagaaccagacgacgcacgtgactacttccaaatggcacgtgccaactgtaagaagtttgccttcgttcacatctcattcgcatag

SEQ ID NO: 210076 - DNA, 492 bp, synthetic construct
  misc_feature 1..492: note = Description of Artificial Sequence: Synthetic coding sequence
  source 1..492: mol_type = other DNA
atggccgagggcggcggccagaaccaccacgaggtggtgaagttcatggacgtttatcagcggtcatactgccatccgattgagactttagtcgatatttttcaggagtatcctgatgagatagagtatattttcaaaccatcatgcgtccccctgatgcgatgcggtggctgttgtaacgacgagggcctcgagtgtgtacctactgaagagtcgaacattactatgcagatcatgcgaatcaaaccacaccagggtcagcatatcggcgaaatgtcatttttgcagcacaacaaatgcgagtgccgtcctaagaaggacagagcccggcaggaaaatccttgcgggccatgctctgagaggcgcaaacatttgtttgtgcaggatccccagacatgtaaatgctcctgcaagaacactgactctaggtgcaaggcacgccagttagagcttaatgaacgtacatgcagatgtgacaagccaagacgctag

SEQ ID NO: 210077 - DNA, 1368 bp, synthetic construct
  misc_feature 1..1368: note = Description of Artificial Sequence: Synthetic coding sequence
  source 1..1368: mol_type = other DNA
atgaccaccatggccgccgccaccctgctgcgggccaccccccacttctcgggacttgccgccggaagaacctttctcctgcagggcctgttacgcctactcaaggcccccgccctcccgctcctttgccgcggccttgcggtggaggccaagaagacatatgtgagagataagccccatgttaatgtcggaacaattgggcacgtggatcatggtaaaactacattgacggcagccatcactaagatcctggctgaggggggtggggccaagttcaagaaatacgaggagatcgacaacgcgcctgaggaacgtgcacggggaatcacgatcaacgctgcgcacgtggaatacagtacggccgctcggcactacgcgcatactgactgtccggggcatgccgactatgttaaaaacatgataacgggcaccgcccccttagacggttgcatcctggtcgtggccgctaatgatggcccaatgcctcaaactcgcgaacatctgcttttagccagacaaatcggagtcgagcacgtggtggtttacgttaacaaggccgatgctgtgcaggattccgagatggtcgagctcgtggagttagaaatccgggagctgttgaccgaattcggttataagggagaggagacacctgtgatagtgggctcagctctgtgtgcgcttgaggggagggaccctgaactagggctgaaatctgtccagaaattgcttgatgctgtcgatacctatatccctgtacccgcaagagacctagagaagccatttctgctgcccgttgaagctgtatattcagtgcccggcagaggcaccgtggttaccggaactctcgagcgcggtattctgaaaaagggtgatgagtgtgaactactggggcactcaaaaaacattcggacagttgtgaccgggatcgaaatgttccacaaatctctggaacgagctgaggccggcgataatttaggcgccttagtgagagggctgaagcgagaagacctcagacgcgggcttgttatggtgaagcccgggtccataaaacctcatcagaaggttgaggctcaggtctacatcctctccaaagaggaggggggaagacacaaaccatttgtgtctcattttatgccggtgatgttttctctaacttgggatatggcctgtcgcatcatcttaccacctgaaaaagagctggccatgcccggggaagacttgaaattcaacctgattctgcgccaaccaatgattctcgaaaaggggcagaggttcaccctgcgcgatggcaataggacaatcggtactgggctggtgacaaacaccctcgccatgaccgaagaggaaaagaacatcaagtggggatag

SEQ ID NO: 210078 - DNA, 1611 bp, synthetic construct
  misc_feature 1..1611: note = Description of Artificial Sequence: Synthetic coding sequence
  source 1..1611: mol_type = other DNA
atggccacccccgacgccggcctgcccggcgccgagggcgtggagcccgctccttgggcccagctcgaagcccccgctcgcctgctactgcaggctttacaggctggccctgagggggcgcgtcgggggttaggggtacttcgcgctctgggttcccgcgggtgggaaccgttcgactggggaagactgctggaagcactatgtagggaggaaccagtcgtgcagggaccagatggcagactcgagcttaaaccacttctgttaagactgcctagaatatgtcaaaggaaccttatgagcctgctcatggcggtgcgtcccagtttacccgagtccggcttgttgagcgtgcttcagatagcgcagcaggatctcgccccggatcccgatgcctggttacgggctttgggcgagctgctgcgtcgtgatctcggggtgggaactagtatggaaggtgcctctccactatccgagaggtgccaacgacaattgcagagcctttgccgcggcctcggtttaggtgggcgccggctgaagtccccacaggcgccagaccctgaggaagaggagaaccgggactcacagcagcctggaaagcgcagaaaagactcggaggaagaggctgcctctcctgaaggtaagagggttcctaagcggctgcgttgctgggaggaggaggaagaccatgagaaggagaggcctgaacataaatcactagaatcactggcagacggtggctccgcgagtcccattaaggatcagcctgtgatggcagtcaaaaccggagaagacggctcaaatctggacgatgccaagggactcgcagagtccctggaactcccgaaagccattcaggaccagctgcccagattgcagcagctcctgaaaactcttgaggaggggctagagggactggaggacgcaccacctgtggaattacagttacttcatgaatgcagcccaagccagatggacctcctatgcgcccagttgcagctgccccaactgtccgacttgggcttactccgcctgtgtacctggctactagccctttctcctgatctcagcctgagcaatgcgaccgtactgacccggagcctgtttctcggacgcattctaagcttgacctcttcagctagccggctgctgaccaccgcactgaccagtttctgtgcaaaatacacctatcctgtttgttcagccctcctcgatcccgtgcttcaggccccgggcactggacccgcacagacagagcttctgtgttgcctggtcaaaatggaaagtctggagcccgatgcacaggtccttatgctggggcaaattcttgagcttccctggaaggaagagacttttcttgtcctgcagagtctacttgaaaggcaggtggaaatgacccccgaaaaattctccgtattaatggaaaagctctgtaagaaaggccttgcagctaccacttcaatggcctatgcaaaactgatgcttactgtgatgaccaagtatcaggcgaacataacagaaactcaaagactaggcctggccatggccctggagcccaatacgactttcctccggaaatcattaaaagcagccctcaagcacctcgggccttag

SEQ ID NO: 210079 - DNA, 1470 bp, synthetic construct
  misc_feature 1..1470: note = Description of Artificial Sequence: Synthetic coding sequence
  source 1..1470: mol_type = other DNA
atgcccctgcgggacgagaccctgcgggaggtgtgggccagcgacagtgggcacgaggaggagagtttgtctcctgaagcacctcgcaggcccaagcagcggcccgctccagcccagagattgaggaagaagaggacagaggccccggaatcaccgtgccctacagggtcaaagccccgcaagcccggcgaagaagaagaggaggaggaagacgaagaagacgaggaggaggaggccgaggaaaagaaggaaaagattcttctgccacccaagaagcccttgcgagagaagtcctctgctgatttaaaagagcgtagagccaaggcccagggacccagaggtgatctgggcagcccagatcctccacccaaaccattacgggttagaaacaaggaggccccggcgggagagggcaccaagatgcgcaaaacgaaaaagaagggcagcggagaggctgataaggaccccagcggtagtcccgcttccgctcgcaagtcaccggcagcgatgttcctggttggggagggcagtcccgacaagaaggccctgaaaaaaaagggaaccccgaagggggccaggaaggaggaggaggaggaggaggaagcagcgactgtcatcaaaaagtctaaccagaaaggaaaggccaaaggtaaaggtaagaaaaaagccaaagaagaaagggctcctagtcctcccgtggaagtggatgaaccaagagaattcgtgttacgcccagcaccccaaggtaggacggtaaggtgtcgactcacccgtgataaaaagggaatggaccggggaatgtacccctcatactttctgcaccttgacaccgaaaagaaagttttcttgcttgcaggacggaaacgtaagcgctcaaaaaccgccaactatcttatttcaatcgaccctacaaacctttcacgagggggagaaaactttattggaaagctgaggtccaacttgcttggaaacagatttacagtattcgataatggacagaacccccagagaggttacagcaccaatgtggcttccctgaggcaagagctcgcagccgtgatttatgagaccaatgtgctgggctttaggggccctcggcggatgactgtgatcatccccggaatgtcggcggaaaacgaaagagttcccattcgccctcgcaacgcttctgacggtttgctggtccggtggcagaacaagacattggaatcattgatagaattacataacaagcctcctgtgtggaacgatgactctggatcttatacacttaatttccaaggacgtgtgacgcaagccagcgtaaagaatttccagatagtgcacgccgacgaccctgattacatcgttttacaatttggcagggtggctgaggacgcctttactcttgactaccggtaccctctctgtgcgcttcaggccttcgcgattgctctgtcatccttcgacggtaagctggcatgtgaatag

SEQ ID NO: 210080 - DNA, 561 bp, synthetic construct
  misc_feature 1..561: note = Description of Artificial Sequence: Synthetic coding sequence
  source 1..561: mol_type = other DNA
atgcccctgcgggacgagaccctgcgggaggtgtgggccagcgactcaggacacgaggaagagtccctttctcccgaagctcctcgaagacccaagcagagacccgcccccgcccagcgtctccggaagaagagaaccgaagctcctgagtctccttgtccaaccggtagcaagccaagaaagccaggtgaggaagaagaagaggaggaagacgaagaggatgaggaggaggaggcagaagaaaagaaggagaaaatactcttgccaccaaaaaaacccttgagagagaaatcatctgccgacctgaaagagagaagagccaaggcccaggggccccgcggggacttgggttccccggaccctccccccaaaccgttacgggtcaggaataaggaagcaccagctggtgagggcaccaagatgcgcaagacgaagaagaaaggtagtggagaagcagacaaggatccaagcggctcaccagcctccgccagaaaatcccccgccgccatgtttcttgtgggtgaaggtagccctgacaaaaaagcactgaagaaaaagtag

SEQ ID NO: 210081 - DNA, 3033 bp, synthetic construct
  misc_feature 1..3033: note = Description of Artificial Sequence: Synthetic coding sequence
  source 1..3033: mol_type = other DNA
atgggcgcctacgcccgggccagcggcgtgtgcgcccggggctgcttagactccgcgggaccatggaccatgagtagagcactgcgacctcccctacctcctctatgtttctttcttctccttctcgccgcggctggtgctcgggccggcgggtacgagacatgcccgaccgtgcagcctaatatgctgaatgtacacctgctcccacatacccacgacgacgtgggatggctcaaaaccgttgaccaatacttctatggcatcaagaacgatatccaacacgctggtgtccaatacattctcgattctgtgatctcggccttgctggccgaccctacacgcaggttcatctacgtggaaatcgccttcttctcccggtggtggcaccaacagacgaatgccacgcaggaggtggtgcgggatctcgtgcgacagggccggttggagtttgccaacggaggttgggtcatgaatgacgaagccgcaactcactacggcgccatcgtcgaccagatgactctgggcctgagattcctggaagacacatttgggaacgatggcagaccaagggtagcatggcatatcgaccctttcggtcatagtagagaacaagcatcactcttcgctcagatgggttttgatggttttttcttcggccgcttggactatcaggacaagtgggttcgcatgcagaaattggaaatggagcaagtatggagagcctcaacctcattgaaacccccgactgctgacctgtttaccggcgtcttgccaaacggttataacccaccacgtaacctttgctgggacgtcctgtgtgtcgaccaacctctcgtagaagatcctcggtcaccggaatacaatgccaaagagcttgtggactacttcctgaacgtggccactgcccaaggacggtactacaggactaaccatactgtgatgactatgggtagcgatttccagtacgagaacgcaaacatgtggttcaaaaacctggacaagctgatccggctcgtcaatgctcaggccaaagggtcctctgtccacgttctgtatagtacccccgcttgctacttatgggaactgaataaggcgaacctgacttggtcagttaagcacgatgactttttcccttatgccgacggcccgcaccagttctggactggctacttcagtagcaggcccgcgcttaagcggtatgagagactgagttataactttttacaagtctgtaaccaactcgaggccttggtcggattggccgccaatgtcggaccttacggaagtggtgattccgcacccctgaatgaggccatggccgttcttcagcaccacgacgcggtgtccgggacgtccaggcagcatgtggcaaatgattacgcgcgccaactggcagccggctgggggccttgtgaggtcttattatccaacgcactggctagacttaggggcttcaaggatcacttcactttctgtcaacagcttaatatctcaatatgtcctttgtctcagaccgccgctcgcttccaggtgatcgtgtataatcctctaggacgtaaggtcaattggatggtacgactccctgtgagcgaaggagtgtttgttgtgaaagatcccaacggccggaccgtgccgtccgatgtagtgatttttccttcctctgactcgcaggcccatccccccgagctcctgtttagtgcctccttgcccgccttagggtttagtacctacagtgtcgcccaggtcccaagatggaagcctcaggctagggccccacaacccattccacgacggtcctggagcccagccctgactatagaaaatgaacatatccgggctacgttcgaccctgacaccggcctactgatggagattatgaacatgaaccaacaactgctgctgcctgtacgacaaacgttcttctggtataacgcctcaatcggagataatgaaagtgaccaggctagtggcgcttacatttttcgccccaatcaacaaaaacctctgcctgtgtctcggtgggcccaaatacacctggtcaaaactccattggtgcaggaggtgcaccaaaatttctccgcctggtgtagtcaggtggtcagattgtaccctggccagcggcacctggagctggaatggtccgtcgggcccataccagtcggggatacgtggggcaaggaggtgatctccaggttcgacaccccactggaaacaaaaggccggttctacaccgactccaacggaagagagatcctggaacgccggcgagactaccgcccgacctggaagcttaatcaaacagaaccagtcgccggaaattattacccagttaatacacgaatatacatcacagatgggaatatgcagctcacagttttgaccgaccgcagtcagggggggtctagcctgcgtgacggtagcctcgaactgatggttcacagaagactgttaaaggacgacgggagaggggtcagcgagccacttatggaaaatggatcaggggcatgggtgaggggccgccacctagttttgctggacacagcacaggctgcagccgctggccataggctgctcgccgaacaggaggtgcttgcaccacaggtggttttagctccaggcggcggcgctgcatacaatctgggggccccacctcggactcagtttagcggactgcggcgagacctcccccctagtgtacacctcctgacgcttgcaagctggggaccagagatggtgcttttgcgactcgaacatcagtttgctgtcggtgaggattcaggcaggaatttgtcagcccccgtgaccctgaacctgcgggacctgttcagcacgtttaccattaccaggctgcaagagaccactttggtggcgaaccagctccgggaggccgcctcgcgcctaaagtggacaaccaatactgggccgacgcctcatcagaccccgtatcagctggaccccgcgaacatcacattggaaccaatggagataaggacatttttagcgagcgttcagtggaaggaagtggatggatag

SEQ ID NO: 210082 - DNA, 1158 bp, synthetic construct
  misc_feature 1..1158: note = Description of Artificial Sequence: Synthetic coding sequence
  source 1..1158: mol_type = other DNA
atgcacgtgtgcgtgtgcgtgtgcgtgtgcgtgtacatgcccgtgtgcgtcgacgcctgtatgtgttgcgaggccggtagacccgccttccgatcttttttattttcactatgttccgacctcggcgccgtcattagtttacttctgtggggccggcagttgtttgccttgtatagcggtaatgatgtcactgatatctccgacgatcgcttccccaagccaccagaaatcgccaacggctatgtggaacacctgttccgctaccagtgcaaaaactactaccgactgcgaacagagggagatggcgtgtacacactgaatgacaagaagcaatggatcaacaaggcagtgggagataagctgccagagtgcgaagccgtgtgcgggaagccaaaaaaccctgccaatcctgtgcagagaatcttgggcgggcaccttgatgccaagggatccttcccatggcaggccaaaatggttagccatcataatctgaccactggggccactctcataaatgaacagtggctgcttactacagctaaaaatcttttcttgaaccactccgaaaacgctaccgccaaagacattgctccgacactaaccctgtatgtgggcaaaaagcagctggtagagatcgagaaggtggttctgcaccccaactaccaccaagtagatatcggcttgattaagttgaaacagaaggtgctcgtgaacgagagggtcatgccaatttgcttgccttccaagaattatgctgaagtgggcagagtcggatatgtgagcggctgggggcagtcagataactttaagctcaccgatcatctcaagtatgtaatgttacccgtggcagaccagtacgactgtataactcattatgagggctctacctgccccaagtggaaggcacctaagtcgcccgtcggagtgcaacctatcctgaatgagcatactttttgcgtagggatgtcaaagtaccaagaggacacttgctatggcgacgcgggttcagcattcgcagtccacgatctcgaagaagacacttggtacgctgctggcatactatcgtttgataaatcatgtgcagtggccgagtacggagtctacgtgaaggtcaccagcatccagcattgggtccagaagactattgccgagaactag

SEQ ID NO: 210083 - DNA, 1329 bp, synthetic construct
  misc_feature 1..1329: note = Description of Artificial Sequence: Synthetic coding sequence
  source 1..1329: mol_type = other DNA
atggaggccagccggtgccggctgagccccagcggcgacagcgtgttccacgaagaaatgatgaagatgaggcaggccaaattggactatcagcgcctgctattggagaaacgccaaaggaaaaaacgtttggaaccatttatggtacagcccaatcctgaggctcggttgcggcgggccaagcctcgggctagtgatgagcagactccgctggttaattgccatacaccccactcaaatgtcattttacatggcatcgacggccctgctgcggtgctgaaaccagatgaggtacatgcaccctcagtaagtagctccgtagtggaagaagatgccgagaacacagttgacactgcaagtaagcccggactgcaggaacgccttcagaaacacgatatttcagagtctgtgaatttcgacgaggaaacagatggcatcagccaatcggcttgcctggagagacctaactccgcctctagtcaaaacagtacagacactggtacaagcggatccgcaacggccgcacagcctgccgataacttgttgggggatatcgacgatttggaggatttcgtatattctcccgccccccagggagtgacagtgcggtgccggattatcagagataagagaggcatggatcgaggcctgtttccaacctattatatgtatctggaaaaagaagaaaaccaaaagattttcctcctggcagcccgcaagaggaaaaaatccaagaccgcaaactacctgatcagcattgatccagtcgacctgagcagggagggggagagttatgtaggcaagttacggagtaacttaatgggaacaaaatttaccgtgtatgacaggggcatctgtcctatgaaaggcagagggttagtgggagcagcccatacccgccaggagcttgctgcaataagttacgagaccaatgtgttgggattcaagggaccaaggaagatgagtgtcatcattcctgggatgaccctcaaccacaaacagatcccctaccagccacagaacaatcatgacagcttgctttctagatggcaaaatagaaccatggagaacttggtcgaactgcacaataaagcacccgtctggaacagcgatacacaatcctacgtccttaacttccgaggaagagtaactcaggctagtgtcaagaatttccagatagtgcacaagaacgatcctgactacatcgtgatgcagttcgggcgggttgcggacgacgtgttcactctcgactacaattacccactgtgtgctgtgcaggccttcggaatcggtctatctagcttcgactccaaactggcttgcgagtag

SEQ ID NO: 210084 - DNA, 513 bp, synthetic construct
  misc_feature 1..513: note = Description of Artificial Sequence: Synthetic coding sequence
  source 1..513: mol_type = other DNA
atgatgaagatgcggcaggccaagctggactaccagcggctgctgttggagaaaaggcagcgcaagaagagacttgagccctttatggtgcaacccaatccggaggccaggctgcgtagagctaaaccacgcgcatcagacgaacagacacccttagtcaactgtcatacaccccacagtaatgtgatcctccatggcattgatggaccagcggcagtcctgaaacccgacgaggtgcacgctccgtcggtgtccagctctgtggtggaagaggacgcagagaacactgtcgatacagccagcaaacctgggctgcaggaaagattgcagaaacacgatatttccgaatctgtgaactttgatgaagagacggatggaatttctcagtctgcttgcctcgagcgcccaaattccgcttcatcacaaaattccacgttctcgtcattttgtcagaaaaccgaagacacagggtatcgccacttccggttttgttattgcagacccacttcttag

SEQ ID NO: 210085 - DNA, 801 bp, synthetic construct
  misc_feature 1..801: note = Description of Artificial Sequence: Synthetic coding sequence
  source 1..801: mol_type = other DNA
atgctgaagaccccctggatcctgctgcccagccaggacttccggtccgtttctaagagcatggatacaggcacatccgggagtgccaccgccgctcagcccgctgataacctccttggagatattgatgatctggaggacttcgtatatagccccgcacctcaaggcgtgaccgtcaggtgccgcatcattcgagacaagagggggatggatcgcgggttgttcccgacctactacatgtatcttgagaaggaggagaatcagaaaatttttctgctggcagcgcgcaagagaaaaaagtctaagaccgcaaattacctaatctcaatcgatccagttgacctgtcccgcgaaggagagtcctacgtgggcaaactccggtctaatctcatgggcactaaatttacagtatatgatagaggaatctgcccaatgaaggggagaggcttggttggcgctgcccatacacggcaggaactggctgcgatcagctataatcacgatagcctcctctctagatggcagaaccgcacaatggaaaacctggtggaactgcataataaggctcccgtttggaattctgatacccaatcctacgtcctgaacttccgggggcgcgtcacacaggccagcgtcaaaaatttccaaatcgttcacaagaatgatcccgactacatagtgatgcagtttggacgcgtcgccgatgatgttttcactctggactacaattaccctctctgtgcagtgcaggcctttgggatcgggctctcttcctttgacagcaagctggcctgtgagtag

SEQ ID NO: 210086 - DNA, 1506 bp, synthetic construct
  misc_feature 1..1506: note = Description of Artificial Sequence: Synthetic coding sequence
  source 1..1506: mol_type = other DNA
atggaggccagccggtgccggctgagccccagcggcgacagcgtgttccacgaagaaatgatgaagatgcgccaagccaaactggactaccagcgactgctcctcgagaagagacagcggaaaaagaggctggagccctttatggtccagccaaatcctgaggccaggctgcggagagccaaaccaagggctagtgatgagcagacacctttagtcaattgtcacacccctcactcaaacgtcatcctccacgggattgacggccccgccgcagtgcttaagcccgatgaggtgcacgccccaagcgtcagcagttcagtggtggaggaggatgccgagaacacagtggatactgcaagcaagcccggtctccaggaaaggctccagaagcatgatatttctgaatccgtgaacttcgatgaagagaccgacgggatctcccaaagcgcttgcctggaaaggcctaattctgcctcatctcagaactctacggacactggcacctccggtagtgcaacggctgcgcagcccgccgataatttgctaggagacattgacgatttggaagacttcgtatacagccccgcaccacagggggtgactgtccgctgccgtatcatacgcgataagcggggcatggacagagggctgtttccaacctattatatgtacctggagaaggaggaaaaccagaagatcttcctgctcgctgcacgcaaaagaaagaagtcaaagacagcaaattaccttatttctattgacccagtggatctgtcacgggagggcgaatcatacgtcggtaaactgaggagtaacctgatgggaacaaagttcactgtatatgaccgggggatctgcccaatgaagggccgagggctggtgggggctgctcatactaggcaggaacttgcggccatctcttacgaaacaaatgtgctcgggttcaaaggtccaaggaagatgtccgtgatcatcccaggcatgactctgaaccacaaacagattccataccagccccagaataatcatgattcactgttatctcggtggcagaataggacaatggagaacctggtggagctgcataacaaagctcccgtatggaattccgacacccaatcctacgttctgaactttcgcggccgggtcacacaggccagtgtgaagaactttcagatcgtccataaaaacgatcccgactacattgttatgcagttcgggcgggttgccgatgatgtgttcaccttggactataactatcctctctgcgccgtgcaagccttcggcattggtctctcttcttttgacaagtgtattcaaactctgcgaatgcaggagctgtgtgaactgcaccgacagcaccactcagccgcaagcctggttcacaggacagtatgccagcggtgggtgggacatccgtggcgcctactacctcagacctcccttctgtggaccgacctgagtccaccccctgtggtgcccgcacctcatcagatctccatgtag

SEQ ID NO: 210087 - DNA, 1269 bp, synthetic construct
  misc_feature 1..1269: note = Description of Artificial Sequence: Synthetic coding sequence
  source 1..1269: mol_type = other DNA
atggccctgagcgacgagcccgccgccggcggccccgaggaggaggcagaagatgagacgctagcctttggcgcggcacttgaggctttcggtgagtctgcagagacgagagctctgctcggaagactacgcgaggtgcatgggggaggcgccgagcgcgaggtggccctagagcgcttcagggagtggatgatgaaccttttgctagacattgttcaagaccagacatcccccgctagcctggtgcatctcgctttcaagtttttatacattattaccaaagtgcggggttacaaaacatttcttagattattcccccatgaggtggctgatgtggaaccagtgctggacctggtgacaatccagaacccaaaggaccacgaagcctgggaaacaaggtacatgcttctcttatggctatccgttacttgcctcattccctttgacttttcccgactcgatggcaatttgcttacccagccaggccaagcgaggatgtccataatggatcggatcctccagatagctgagtcttatttgattgtttccgacaaggcacgcgatgctgccgcagtcttggtaagcaggttcatcacaaggccggacgttaagcagagtaagatggccgagtttctagactggagtctgtgtaacctggcccgaagttcctttcagacaatgcagggcgtgatcactatggatggcacactgcaggctctggcccagatcttcaaacacggcaaacgggaagattgtttaccatacgcggcaacagtcctgcggtgtttagacggatgtaggcttcctgaaagtaatcagactctgctgagaaagttaggcgtcaagcttgttcaacgcctagggctcacctttctcaaacctaaggtggccgcttggaggtaccagcgcggttgccgaagtttagctgccaatctccagctcctgactcaggggcaatctgagcagaagcccctcatacttacggaggatgacgacgaggacgatgacgtgccagaaggtgtggagcgggtgattgaacagcttctggtgggtctgaaagacaaggatacagtagtgcgatggagcgcagccaaggggatcggacgtatggctgggcgactgccaagggctctggctgacgatgtggtgggctccgtgttggattgctttagtttccaagaaacagacaaagcctggcacgggggctgtctcgcactcgcagagctgggcaggcgcgggctgctactcccgtctagattggtggactag

SEQ ID NO: 210088 - DNA, 2997 bp, synthetic construct
  misc_feature 1..2997: note = Description of Artificial Sequence: Synthetic coding sequence
  source 1..2997: mol_type = other DNA
atggacggcaccctgcaggccctggcccagatcttcaagcacggcaaacgcgaggattgtctgccctatgctgcaacggtgctaaggtgtcttgatggctgtaggctgcccgagagcaaccagactctgcttagaaagcttggtgtcaagcttgttcagcgactcggtctgacatttctgaagcccaaggtcgccgcttggcggtatcaaagggggtgtcggagcctcgccgcgaacttgcagctgctgacacaggggcagtctgaacagaagcccctcatcctgaccgaggacgatgacgaggacgacgacgtccctgagggcgtagagagggtcatcgagcagttgttggtggggctgaaagacaaggatacggtcgtcaggtggtctgccgccaaaggaattgggcggatggcggggaggctgccacgtgcgcttgcagacgatgttgtaggctctgtcctcgattgtttctcctttcaagaaacagacaaagcgtggcacgggggatgccttgcactcgcggaactcggtagaaggggactcttgctgcctagtaggctcgtggatgtcgtagcagtgatcctgaaagctctgacttacgatgagaaacgcggcgcttgttccgtgggaacaaacgtgcgggatgccgcctgttacgtctgctgggccttcgctcgtgcatacgagcctcaagagctcaaacctttcgtgaccgccatcagcagtgccctggtgattgccgccgtgttcgatcgtgatataaattgtagacgggctgcatctgcagcatttcaagaaaatgtcggacgccaagggacctttccacatggcatcgatatcctgacgacagccgattatttcgccgttggcaatcggtctaactgttttctggttatctccgtattcatagccgggtttcctgaatatacccagcctatgatcgatcacttggtgacaatgaagatctcgcactgggatggtgttattagagaattagccgcccgcgccctgcataatctggcccaacaagcccccgagttttccgctacccaggtgttccctagactcctatccatgaccctctcccctgacctccacatgagacatggatcaatcctcgcctgcgcggaagtggcttatgctctttacaaactggccgcccaggagaaccgaccagtgaccgaccatctcgatgagcaggccgtgcaggggctaaagcagattcatcagcagctctacgaccggcagctgtatcggggcttaggcggacaactgatgaggcaagcagtttgcgtcctgattgagaagctctccctcagcaaaatgccctttcggggtgataccgtcattgatggctggcaatggctgattaatgacacactgagacacctccatttgattagcagtcatagcagacagcaaatgaaggatgccgcggtttctgctctagccgcactctgctctgagtattacatgaaggagcccggggaggcagacccagccatccaggaggagttgatcacacagtacctagccgagcttcgtaaccccgaagaaatgaccagatgtggcttttctctagccctgggtgctctaccgggcttcctgctcaaaggacgcctccaacaggtgctaaccggtcttcgggctgtcacccacacttccccggaagacgtgtcctttgccgaaagccggcgtgatggcctgaaggccattgccaggatatgccaaacagtcggggtgaaagcgggagcgcctgacgaggcagtgtgcggggagaacgtgtcacagatttattgtgcgctactgggatgcatggatgactacacaaccgattcccgcggggatgtgggtacatgggtaagaaaggccgccatgacctctttaatggatctgaccctgctgctcgcccgaagccagcccgaactgatagaagcccacacctgtgaacggatcatgtgctgtgttgcccaacaggccagcgaaaaaatcgaccggttccgtgctcatgcggcttcagtgtttttgactttgctgcattttgactccccgcctataccacatgttccacatcgcggggagcttgaaaaactttttcccagatccgacgtcgcgagtgtgaattggtctgcaccgtcccaggctttccctagaattactcagttacttggattgccaacctatcgctaccacgtcctgcttggcctggtcgtgtctctcggcggcctaacagagagtaccatcagacactctacccaatcattatttgaatacatgaagggcattcagtctgacccccaagccctcggctctttctccggtaccttactgcagatctttgaggacaatctcctcaacgagagagtgagcgtccctttgctcaaaacattagaccatgtccttacacatgggtgcttcgatatttttaccactgaggaggaccacccttttgccgtcaagctactggccctctgtaagaaggaaatcaagaattctaaggacattcagaaactcctttccggtattgcagttgactttccctctgccacactggtgtgcgtcggcacagtgcagatgtacgcccatacccatctgcggttaggggcacccggcccgcactgcgctcatggctccgctttgcctaggttttgtgagatggtgcagttcccaggggatgtccgccggcaggcgctgctacagctgtgccttctactatgccaccgttttcccctgatcaggaaaactactgctagccaggtctacgagaccctgctgacctatagtgacgtcgtcggagcggatgtgttggacgaggtggtgactgtgttaagcgacacagcatgggacgcggagctggctgtagtcagagagcagagaaaccggttgtgcgatctcctcggtgttccaccatcatggtgccccacctggtgcctattaaaacctgtactggagccaatccctcatccctgcctggttcgaatgagttgcagttag

SEQ ID NO: 210089 - DNA, 3579 bp, synthetic construct
  misc_feature 1..3579: note = Description of Artificial Sequence: Synthetic coding sequence
  source 1..3579: mol_type = other DNA
atggccctgagcgacgagcccgccgccggcggccccgaggaggaggccgaagacgaaacattagctttcggggccgcactggaggccttcggcgaatctgccgagactcgtgctttgttgggaaggctccgcgaggttcatggcggaggtgccgagagggaagtagccctggagaggttcagagtcataatggataaataccaggagcagccccacctacttgaccctcacctggagtggatgatgaacttgcttctggacatcgtccaggaccaaactagccctgcctctctggtccacctggccttcaagtttctgtacatcattactaaggtgcggggatataaaacatttcttcggctcttcccacatgaggtagcagatgtcgagccagtgttggatctggtgacaatccagaatccgaaggaccacgaggcctgggagacacggtatatgctgctgctgtggttatctgttacctgcctgattccgttcgacttctcacgtctggatggcaatttactgacgcagccagggcaggccagaatgagcatcatggacagaattttgcagatagctgagtcatacctgatcgtgagcgacaaggctagagacgcagcggccgtgctcgtgtccagattcatcactcggccagacgtaaagcagagcaagatggcagagtttttggactggtccctgtgcaacctcgctcgatcatcttttcagacaatgcagggtgtgatcaccatggatgggactttgcaggccctcgcgcagatattcaagcacggaaagagagaagactgtctgccgtatgctgctacggtcctccgctgtctagatggatgtagacttcccgagtccaaccagaccctgctccggaagctgggagttaaactggtgcagcggctggggctgactttcctgaagcctaaggtggccgcctggcgctatcaaagaggatgccgctctttggcagctaacttgcagcttctgacccagggccagtccgaacaaaaacctcttattctgactgaagatgatgatgaggacgacgacgtccctgagggcgtggaacgcgttatcgaacagcttttagttgggttgaaagacaaggataccgtcgtaaggtggagtgcggctaaaggcattggcaggatggcgggcaggctgcccagagctctcgcggacgacgttgtgggatcagtactggattgtttcagttttcaggaaacagataaagcttggcacggcggatgtttggcactcgccgaattaggtaggcggggactgctccttccttcccggctggtcgatgttgtggctgtgatcctgaaggcgctcacctatgatgagaaacggggtgcctgctccgtgggtactaacgtgcgggacgccgcgtgctacgtttgttgggcttttgcacgtgcttacgagccacaggaactgaaaccatttgttaccgcaattagcagcgcactggtgatcgctgcagtgttcgaccgcgacattaactgtcgaagagcggcctctgcagcctttcaggaaaatgtgggacggcaagggacatttcctcacgggatcgacatactgacgaccgccgattatttcgcggttgggaaccgatctaattgttttttggttattagcgtctttatagccggctttcctgaatacactcagcctatgattgatcatctcgtgaccatgaaaataagccactgggacggagtaattagggaactggcggctagagcattgcacaatctggcacagcaggcccccgagttcagtgcaacacaggtgttcccccgcttgttgagcatgaccctgagtcctgatctgcatatgcggcatggctctatcttggcttgcgccgaggtggcatacgccctctataagttggccgcgcaagaaaatcgcccagtgactgatcatctggacgagcaagcagtccaagggctgaagcaaattcaccaacagctttacgatcgacagctctaccggggacttggaggccagctgatgcgacaggctgtctgtgtgctcatcgagaagctgagtctgagcaagatgccctttcgcggggataccgtcattgacggttggcaatggctgatcaacgacacccttcgtcacctgcaccttatcagctcacacagcagacaacagatgaaggacgccgccgttagcgccctcgctgccctgtgctcagagtattatatgaaggaaccaggcgaggcagatcccgcaattcaagaagaactgatcactcagtacctggccgagctccggaaccctgaggagatgactcgatgcggattctcactcgcactaggcgccctgccggggttcctgttgaaaggtagattgcagcaagtgctgactggacttcgagccgtgactcatacgtctccggaggatgtttctttcgctgaatccagacgcgacgggctaaaggccatagcgaggatttgccagacagttggagttaaggccggggcacctgacgaggcggtctgtggagaaaatgtctcccagatttattgcgccctgctggggtgtatggatgattacaccacagactccaggggtgacgtcgggacttgggtccggaaggcagctatgacaagtctgatggatctgacattgctcctggcacggtcgcaaccagagctgattgaggcccacacctgcgagcgcattatgtgttgcgtagcacagcaggcgtctgagaaaattgatcgcttcagagcccacgccgcttccgtgttcctgacactgttgcacttcgactctccacctatcccacacgtgcctcatcggggcgagctcgaaaaactctttccaaggagtgacgtggcgtccgtgaactggagcgccccatcacaggccttcccaaggattacccagcttctgggcttgcccacataccggtaccacgtgctgctggggcttgttgtcagcctgggggggctgacggagtccacaatccgccacagcacacagtcgctctttgaatacatgaagggtatacagtccgacccccaggctctcggctccttcagtggcacactattgcagatctttgaagataacctcctaaatgagagagtgtcagtcccactgctaaagaccctggaccacgtgctgacgcatgggtgttttgacatatttacaaccgaagaggatcacccattcgctgtcaaactgctagcgttgtgcaagaaggaaattaagaactcgaaggatatacaaaaattgctctctggcatcgcggttttctgcgagatggtgcagttccctggtgacgttagacggcaggcacttcttcagctgtgtctgctcctgtgtcaccggtttcccttgatcagaaaaactactgcaagccaggtgtatgagacccttctcacctacagcgacgttgtcggtgctgacgtgctggacgaagtggtcacagtgttatccgacaccgcctgggatgccgagcttgccgtggtaagggagcagaggaaccgcctctgcgatctgctcggtgtgcctcggcctcagctggtgccccagcccggtgcttgctag

SEQ ID NO: 210090 - DNA, 936 bp, synthetic construct
  misc_feature 1..936: note = Description of Artificial Sequence: Synthetic coding sequence
  source 1..936: mol_type = other DNA
atggccggccggctgccccgggccctggccgacgacgtggtgggctccgttctggattgtttctcctttcaagagactgataaggcttggcatggaggatgtctcgcactggcggagctgggtcgacgcggactgctgctgccgagccgtctggtggacgtggtagccgtgatcctgaaggcccttacgtacgatgaaaaacgaggggcctgttccgtcgggaccaacgttagggatgccgcttgttatgtgtgttgggcgttcgccagagcatacgagccacaggaactgaagccgttcgtgactgcaatcagctcagctctggtgattgccgctgtgttcgatagggatattaactgtaggcgcgccgcctcagccgccttccaggagaacgttggacggcaggggacgttcccccacggcattgacatcctgactacagccgattatttcgccgtcgggaataggtctaattgctttctcgttatctcagtctttatcgccggctttcctgaatatactcagcctatgatcgaccatctggtgaccatgaaaatctcacactgggacggcgtgataagagagctggctgctagggcgctgcataacctggctcaacaagccccagaattttctgctactcaggtttttcctcgcttgctgagcatgacactttcccctgacctccatatgcggcacggttctatcctagcttgtgctgaagtcgcttacgcgctgtataaattagctgcgcaggaaaatagacctgtcacagatcacctggacgagcaggccgttcagggcttgaaacagatacatcaacagccttgcatctgttcctggggactgatgtcaccagaatcgaaagcagaattctgcgtatgcgtgtgccgcataagcctcgggaggcagtgtgtccatttgtccggactctag

SEQ ID NO: 210091 - DNA, 2253 bp, synthetic construct
  misc_feature 1..2253: note = Description of Artificial Sequence: Synthetic coding sequence
  source 1..2253: mol_type = other DNA
atggccctgagcgacgagcccgccgccggcggccccgaggaggaggctgaggatgagactttggcgtttggtgccgccctcgaagccttcggtgagagcgctgaaacaagggctctgctcggtaggctgagagaggtgcatggtggcggcgccgaacgggaggtcgccttggagagatttcgtgttatcatggacaaataccaagaacagcctcacttactagaccctcacttggagtggatgatgaatttgctgctggacatagtgcaggatcagacgtccccagcctcactggtccaccttgccttcaaatttctctatatcatcaccaaagtacggggttacaaaactttcctacgactctttccacacgaagtcgcagatgtggagccggtgctggatcttgttacgattcaaaacccaaaagaccacgaggcctgggaaacccgatacatgctcttgctgtggctttcagtaacatgtcttattccattcgacttttcccgtctagatgggaacttacttactcagcctggccaggctcgtatgtccattatggaccggatcttgcagatcgcagagtcttacctgattgtctccgataaagcccgagacgcagcggccgtgctagtgtcaagatttattacgagaccggatgttaaacagtctaagatggctgaattcctagattggtcactctgtaatctggcacggagctcttttcagacaatgcaaggagtcatcacaatggacggaaccctacaggcattagcccagatctttaaacatggtaagagagaagactgcttgccgtatgcagcaactgtgctgcgttgcctcgacgggtgtagactgccagagagtaatcaaacattactgcgaaagctgggggttaaactggttcaacgcctgggcctcactttcctgaagccaaaagtcgccgcctggcgatatcagcgtggatgtcgatcccttgcggctaacctccagttactgacgcagggacaaagtgagcaaaagcctttaatccttacggaagatgatgacgaggatgatgatgtcccagagggggtggagagggttatcgaacaacttttggtggggctgaaagataaggacaccgttgttcgctggtcggctgcaaaaggcattggaaggatggccggaaggcttcctcgagctttggctgacgatgtcgtgggctccgtcctagactgcttctcatttcaggagaccgataaagcctggcatggaggatgcctggccctggctgaactcggcaggcggggccttctcctgcccagccggttggtggacgtcgtcgccgttatcctcaaagcactgacctacgatgaaaaacgcggggcttgctcagttggcacaaacgtccgcgacgcagcatgttatgtctgctgggcttttgcgcgggcttacgagcctcaggagctaaagccctttgtgacggcaattagctctgcccttgtgatcgcagcagtgtttgaccgcgatataaattgccggcgcgccgcttccgccgccttccaggaaaacgtcggtcgtcaagggacgtttccacacggcattgacattttgacaaccgctgattattttgcagtcggtaatcggagcaattgttttctggtgatcagcgtgttcattgccggttttcccgagtacacccagccaatgattgaccacctggtgactatgaagataagtcactgggacggcgtgattagagagcttgcagcccgggctctgcataacctcgctcaacaggctcccgagttcagcgcaacacaggtctttccccggctgctgagtatgacactgtcgcctgacttacacatgcgacatggctcaatcttggcctgtgccgaggtggcctacgctctctacaaattggcagcgcaagagaatagaccggtgactgatcacctcgacgagcaggcagttcagggattgaaacagatccaccaacaactgtacgaccgccagctgtatcgcgggcttgggggacagctcatgcgtcaagccgtttgtgtcctcattgagaaactttccttgtcaaagatgccgttcagaggtgatacggtgatcgatggctggcagtggctgatcaacgattctctgtggctcttggtgggcctgggtcggccctcccgcttacctagtgaacggccagcacccgccgggagtcaccggtttaagtcttcatacccacattttccacggggaagaaagttttgttag

SEQ ID NO: 210092 - DNA, 555 bp, synthetic construct
  misc_feature 1..555: note = Description of Artificial Sequence: Synthetic coding sequence
  source 1..555: mol_type = other DNA
atgaagggcatccagagcgacccccaggccctgggcagcttcagcgggaccctgttacagatattcgaggacaacctcctcaacgagcgtgtgagtgtgcctctgctgaagacactggaccatgtcctcacccatgggtgttttgacatcttcactacagaggaagaccacccctttgcggtgaagcttttggccctttgtaagaaagagataaaaaattctaaggatattcagaagttactgtcaggtatcgccgtgttttgcgagatggtgcaattcccaggagatgtgaggcgacaagccctgttgcaactgtgtctccttctctgccatagattccccttgatcaggaaaactacagcgtctcaggtgtacgagacacttctgacttactcagatgtggtgggggctgatgtgctggatgaggtcgtgactgtactgagcgatactgcttgggacgccgagttggccgtggtccgggagcagcggaacagattgtgcgatctgttgggagtgccaaggcctcagctggtgccacagccgggtgcttgttag

SEQ ID NO: 210093 - DNA, 1584 bp, synthetic construct
  misc_feature 1..1584: note = Description of Artificial Sequence: Synthetic coding sequence
  source 1..1584: mol_type = other DNA
atgagcgacaccctgaccgccgacgtgatcggccggcgggtggaggtgaatggcgagcacgctaccgtgcgtttcgctggcgtcgttccacccgtggcagggccctggctcggtgtcgaatgggataatcccgagagaggcaaacacgacgggtcgcacgaaggtacagtgtatttcaaatgtcgtcaccctactggtgggtcattcatccggcccaacaaggtgaatttcggaactgatttcctgacggctatcaagaatcgatacgtcctcgaggatggaccagaagaagaccggaaggagcagatcgttaccatcgggaataaacctgtcgaaacaatcggctttgacagcatcatgaagcaacagtcccagttatctaaactgcaagaggtgtccctccggaattgtgcagtgtcttgtgcaggtgagaaggggggcgtagctgaagcatgcccaaacattcgaaaggtagacctgagcaagaatctcctgagcagctgggacgaagtgatacacatagcagatcagctgcgtcacctcgaagtactgaacgtgtccgaaaataagctaaagtttcctagtggttccgtgctgacaggcactctctctgttctaaaagttctggttctcaaccagactggaatcacatgggctgaagtattgagatgcgttgccggctgccctggtctggaagagctttacctcgaaagcaataacatctttatatctgagcgtccaactgacgtgttgcagaccgtcaagttactggacctctccagcaaccagctcatcgatgagaaccagctttatttgatcgcacatctcccaagactcgagcagctgatcctcagtgataccggcattagcagtctgcacttccctgatgctggtatcggttgcaagacttcaatgttcccctctcttaaatatttggtggtcaacgataatcagattagccaatggtcctttttcaatgagctcgagaaattacccagcctcagggcactgagttgtctcagaaatcctttaacaaaagaggataaggaagccgaaaccgcacggttgctgatcatcgcctccatcggacagctgaagacactgaataagtgcgaaattctgcctgaggaacgtaggcgggccgagctggactatagaaaagcttttgggaatgagtggaagcaagcaggaggccataaagaccccgagaagaataggctcagcgaagagtttctcactgcacacccacgctaccagtttctatgccttaagtacggggcgccagaggactgggagcttaagacccaacagccactcatgttaaaaaatcagctgctgacgctcaagatcaaatatccccatcagttggaccagaaagtcctcgaaaaacaactgcccgggagtatgaccatacagaaggtgaagggtcttctgagtcggctcctgaaggtccctgtgtcagatctgcttttatcatatgagtctcctaaaaaaccggggagggagattgaactggagaacgacctgaagagcctccagttctacagcgtggagaacggggattgcctcctagtcagatggtag

SEQ ID NO: 210094 - DNA, 1584 bp, synthetic construct
  misc_feature 1..1584: note = Description of Artificial Sequence: Synthetic coding sequence
  source 1..1584: mol_type = other DNA
atgagcgacaccctgaccgccgacgtgatcggccggcgggtggaggtgaacggtgaacacgctaccgtgcggttcgctggcgtggtaccacctgtggccggaccatggctgggcgtcgaatgggacaaccccgaacggggtaagcatgacgggtctcacgaggggactgtttacttcaaatgcaggcaccccaccggagggagtttcattcggcccaataaagtgaatttcgggactgactttctcaccgccattaagaaccgatatgttctggaggacgggcctgaagaggaccgtaaagaacagattgtgacgattggcaacaaaccagtggaaaccattggattcgatagtatcatgaagcagcagtcccagctcagtaagcttcaggaggtgtccctcagaaactgtgctgtaagctgtgcaggtgagaaagggggagtggccgaggcttgcccgaacattcggaaggtcgacctgtccaagaatttgttgagcagttgggatgaggtcatacacatagccgatcaacttcgacacttggaagtgctgaatgtgagcgaaaacaagttaaaattcccctctggttctgtgctgacaggaactctgagtgtgctcaaggttctcgtgctcaaccagacgggaatcacatgggccgaggtgttacgctgtgtggctggctgcccaggtctcgaggagctctacctagagtctaataacatcttcatctctgaaagacccaccgacgtgctgcagaccgtgaaactcctggacctgtcttcgaatcagctcattgacgaaaaccagctctatttgattgctcatttaccccgcttggagcagctcatcctctcagacacggggataagctctttgcacttccctgatgctggcataggctgcaagacttccatgttccccagtttgaagtatcttgtggtcaacgataaccaaataagtcagtggtctttcttcaacgagctggagaaactgccgtcactaagagccttgtcctgcctgcgcaatcctctgaccaaagaggataaggaagcagagaccgctaggttgctcatcatcgcctctataggccaactgaaaacactgaacaagtgcgaaattctccccgaggagcggcgccgggccgaactcgactatcggaaggcctttggcaacgaatggaaacaggcgggcggtcataaggatcccgagaagaacaggctctcagaggagttcttaactgcacatccccgctatcaattcctgtgccttaaatatggagccccagaggactgggagctaaagactcagcagcccctgatgctgaaaaaccagctgcttaccctcaaaattaaatacccccatcagctggatcagaaagtactggaaaagcagctgccaggatcgatgaccatccagaaggtgaagggcctgttaagcagactgctcaaggtccctgtttctgacctactgctcagctatgaatcccccaagaaacctggacgtgagattgagctcgaaaatgatttaaagtcgttgcaattttactccgtggaaaacggggactgcctgcttgtgaggtggtag

SEQ ID NO: 210095 - DNA, 1737 bp, synthetic construct
  misc_feature 1..1737: note = Description of Artificial Sequence: Synthetic coding sequence
  source 1..1737: mol_type = other DNA
atgagcgacaccctgaccgccgacgtgatcggccggcgggtggaggttaacggggaacacgcaacagtccgattcgctggcgtagtgcccccagtcgccggaccctggttaggcgtggagtgggacaaccctgaacggggaaagcacgatggaagtcatgagggcactgtttattttaaatgcagacatcctaccggtgggtcctttatcaggcctaacaaagtcaattttgggactgattttctgacagctatcaaaaaccggtacgtgttggaggatggtccggaggaagacaggaaagaacagattgtgaccataggaaataaacccgtagaaaccattgggttcgactctatcatgaagcagcagagtcagctgagcaagttacaggaagtgtctctgaggaactgtgccgtgtcttgtgctggggagaaagggggcgtagcagaggcttgtcccaatatccgcaaggtggacctgtcgaagaacttattgtcatcttgggatgaagtgatccacatagcggatcagttgcggcatttggaggtgctgaacgtgtccgagaacaagttgaaattcccctcaggtagcgtgctgacaggcactctctccgttttgaaagtgttggttcttaaccagaccggcatcacttgggccgaggcgcatgctcagtgtggcgggtctagacatggccttgacatgcaaaaggacgcctcaaagttcgtcgacttgtgtgtgctacagaagtgtagcacatccaattgcatcatcagcgccaaagaccacacctctatgcggatgaatgtagcaaaggtgctgcgctgcgtggctggctgcccaggcctggaggagctgtatctcgaaagcaacaacatattcatcagtgagcgccctaccgacgttttgcagactgtaaagctgctggaccttagcagtaaccagctaatcgacgagaaccaactctacctaattgctcatctgcccaggctagaacaactgatcttgagcgacaccggtatctcatcgctgcacttccccgacgccggcatcggctgcaagacatccatgtttccgtctctgaagtatctggtcgtgaatgacaatcagattagccagtggtcattctttaacgaactcgagaagctcccatcactgcgggccctcagttgcctccgcaatcctttaacaaaggaagacaaggaggcagagacagctaggctcctcataatcgcaagcatcgggcagcttaagaccctgaacaaatgcgagattctacctgaggaaagacggagagcagaattggattaccgcaaggccttcggcaacgagtggaagcaggcggggggacataaggaccctgagaagaatcgactgtctgaagagttccttacagcgcaccccaggtatcagtttttgtgtctcaaatatggtgctccggaagattgggagttaaaaacacagcagcccttgatgcttaagaatcagctcttaaccttgaaaatcaagtatccccaccagctggaccaaaaggtgcttgagaagcagctgccaggcagcatgacaattcagaaagtcaagggcctcttaagtcggttgctcaaggtgcctgtgtcggatcttctgctgagctatgagtcacccaagaaacccggccgagaaatagaactggaaaatgatttaaagagcctgcaattttactctgtggagaatggagattgcctccttgttagatggtag

SEQ ID NO: 210096 - DNA, 2001 bp, synthetic construct
  misc_feature 1..2001: note = Description of Artificial Sequence: Synthetic coding sequence
  source 1..2001: mol_type = other DNA
atgatccacgagctgctgctggccctgagcggctaccccggcagcatttttacatggaataagagatctggattacaggtttctcaggacttcccattcctccaccccagcgaaacctctgttctgaacagactgtgtagattgggcactgattatatacgctttacagagttcatcgaacagtacaccgggcacgtgcaacaacaagaccaccatccctcccagcaggggcagggaggactgcacggaatttacttacgtgcattctgcaccggcttggattctgtcctccagccctatcggcaggcactgttggaccttgagcaggaattcctgggcgatccccacttatcgatctcacacgtgaattattttcttgatcaatttcagttgctgttcccttcagtgatggtcgtggtggagcagatcaaatcccagaaaatccatggttgtcagatattagaaaccgtgtacaagcacagctgcggcggcctcccaccagtgcgatcagcgcttgaaaaaatcctggccgtttgtcatggcgtgatgtacaagcagctgtctgcctggatgctgcacggcctgctccttgatcaacacgaggaattttttataaagcagggaccttcctcaggcaacgtctctgctcagcccgaagaggacgaggaggaccttgggatcggcgggctgaccgggaaacagctcagggagttgcaggaccttcggctgattgaagaggaaaatatgcttgcaccttctttaaagcaattctcgctaagggtggagatcctgccctcttatattcctgtccgggtggccgagaagattttattcgtgggtgagagtgtccagatgtttgagaatcagaacgtcaacttgactaggaagggctctattcttaagaatcaggaggataccttcgccgcagaactacaccgacttaagcagcagcctcttttcagcctggtcgactttgagcaggtcgttgatcggatcagaagtacagttgcagaacatctatggaaactcatggttgaggagtctgatcttttaggccagctaaagatcattaaggatttttacctgcttgggcgaggggagctatttcaggcttttattgatacagcacagcacatgctgaagacccctccgaccgccgtgactgaacacgacgtcaatgtagcctttcagcaatcagctcacaaggtccttctcgatgatgataacctccttcctctgctccacttaaccatcgagtatcacggcaaagaacataaagatgccacccaggcccgggaaggcccctctagggaaacctccccaagggaggcacccgcctcggggtgggcagctcttggcctttcttacaaagtacagtggcctttgcatattctattcacaccggcggtcctggagaagtacaacgttgtctttaagtacttactgagtgtcagacgggtccaggccgagctccagcactgttgggctttacaaatgcagaggaagcatcttaaatccaatcagacggacgctatcaagtggcgcttgagaaatcatatggcgtttctagtggataatctgcaatactacttgcaggtggatgttctggaatctcaatttagtcaactacttcatcagattaattcaacacgggattttgaatctatccgacttgcccatgaccacttcttgagtaatcttctcgcccagagctttatcctcctgaaacccgtgtttcactgcctgaatgaaattcttgacttatgtcactcattttgcagccttgtgtctcagaacctgggtccgctcgatgagagaggcgccgcacaactctcaatcctggtgaagggattttcccgacagtcaagcctgctattcaagatactttcttccgtgcgaaaccatcagattaattccgatcttgcgcagctcctgctccgactagattacaacaaatattatactcaagctggcggcactctcggttcattcgggatgtag

SEQ ID NO: 210097 - DNA, 660 bp, synthetic construct
  misc_feature 1..660: note = Description of Artificial Sequence: Synthetic coding sequence
  source 1..660: mol_type = other DNA
atggccgacaaggccaagcccgccaaggccgccaaccggaccccccctaagtcacccggggatccatctaaggaccgagctgccaagagactaagtcttgaatcagaaggtgccggtgaaggggccgcagcctcccctgaactatctgctctcgaagaggcctttaggcggtttgctgtccacggagacgcgcgggccactgggagagagatgcacgggaagaactggtccaaactgtgtaaagactgccaagttattgacggccgtaacgtgacagtgaccgacgtggacattgtcttctcaaagattaagggcaagtcatgtcgcaccatcactttcgagcagtttcaagaggctctcgaagagctggcaaagaaaaggtttaaggacaagtcctctgaggaggccgtgagggaggtgcacagactcattgagggtaaggcgccgattatcagtggagtcactaaagccataagctcccccacggtcagtcggctgaccgatactaccaagttcactggctcgcacaaagagcgatttgacccgagcggcaaaggcaagggaaaggctgggagggttgatcttgtcgacgagtccggatatgtttccggctataaacatgccggcacctatgatcagaaggtgcagggcggtaaatag

SEQ ID NO: 210098 - DNA, 1071 bp, synthetic construct
  misc_feature 1..1071: note = Description of Artificial Sequence: Synthetic coding sequence
  source 1..1071: mol_type = other DNA
atgagcaagctgtggcggcggggcagcaccagcggcgccatggaggctcccgagcccggggaagccctggaactgtctctcgctggcgcacatggtcatggcgtgcataaaaaaaagcacaaaaaacacaagaagaagcacaagaaaaagcaccaccaagaggaagatgcgggacctactcagccctccccggccaaaccccagctgaagttgaaaatcaagctgggcgggcaggtgctgggaactaagagtgtgcctactttcacagtaatccccgaagggccacgtagtccgagccctctcatggtggtggacaacgaggaggagcccatggaaggcgtgcctctggagcagtatagggcttggctggacgaagacagcaacctcagccccagtccactgcgagacctgtcaggcgggctcggcgggcaggaagaggaggaggagcagaggtggttagatgcacttgagaagggcgagcttgacgacaacggtgatctcaagaaggagattaatgagagactcctaaccgcacgacaacgagctctgttgcaaaaagcgcgatctcagccctcgccaatgctcccgctccccgtagctgagggatgccctcctcctgctctaaccgaggaaatgttgctgaaacgagaggaacgagctcggaaacgcaggttgcaggcggctcgcagagctgaggaacataaaaaccagactatcgagcgactcaccaaaaccgctgccacgtccgggaggggtggtcgcggcggggcaaggggggagcgaagaggggggagggccgcagcccctgccccaatggtgcgctactgctctggagcccagggttctaccctgtcattccctcccggcgtgccagcgcccacagcggttagtcaacgcccgagcccttccggacccccaccccgctgctcagtgccgggctgcccacacccaaggcggtacgcatgctcgagaacaggtcaggcgctgtgctcactgcaatgttatcgtatcaatcttcagatgagattgggagggcctgaaggccctggatcaccactcctggccacatag

SEQ ID NO: 210099 - DNA, 1272 bp, synthetic construct
  misc_feature 1..1272: note = Description of Artificial Sequence: Synthetic coding sequence
  source 1..1272: mol_type = other DNA
atggccggcaaggtgaagtgggtgaccgacatcgagaagagcgtgctgataaataattttgagaaacgggggtgggtacaggttaccgagaatgaagactggaatttctactggatgagtgtccagaccatccgaaacgtgttttccgttgaggccgggtatcgactgtccgacgatcaaatagtgaatcacttcccaaaccactatgagctgacccgaaaagacttgatggtgaagaacatcaaaaggtacagaaaagagctcgaaaaagaaggcagccctctggccgagaaagacgaaaacgggaaatatttatacctcgacttcgtaccggtgacctacatgctacctgcggactacaatctgttcgtagaggaatttcggaaaagccctagttctacctggatcatgaagccctgcggtaaagcccaaggtaagggcatctttctgatcaacaaactttctcagatcaagaagtggtcgcgcgattctaagaccagtagtttcgtgagtcaaagcaataaagaggcgtatgtgatttctctttatattaacaaccccctcctcattggcggacgcaagtttgatttgcgtctatatgtgttggtgtctacctatcgcccccttaggtgctatatgtataagctgggattttgcagattttgtactgttaagtatactccgtccacatcagagctggataacatgtttgtacacttaaccaatgtcgcgatacagaagcacggagaggattacaaccacatccacggtggaaagtggacggtgtctaacctgcgcctgtacctcgagtccactcgtggcaaagaggtgacaagtaagctgtttgatgaaatccattggatcatcgtgcaatcactcaaagctgtggcaccagtcatgaataatgataaacactgttttgaatgctacggctacgatatcattatagacgacaaactgaagccctggttgatagaggtcaacgcctcaccatctctgacctcttcaacagctaacgaccgaatccttaagtacaacctcatcaacgatacattgaacattgccgtgcccaatggagaaataccagattgcaagtggaataagtcacctcctaaggaggtactgggaaactacgagatcctgtatgatgaggaactcgcacagggggacggcgccgaccgggagctgagaagcaggcagggacagtccctgggccctagggctgggaggagcagagatagcggcagggcagtcctcacaacgtggaaatag

SEQ ID NO: 210100 - DNA, 1185 bp, synthetic construct
  misc_feature 1..1185: note = Description of Artificial Sequence: Synthetic coding sequence
  source 1..1185: mol_type = other DNA
atggccggcaaggtgaagtgggtgaccgacatcgagaagagcgtgttaatcaacaactttgagaagaggggctgggtccaagttactgagaatgaggactggaatttctactggatgtctgttcagaccatccggaatgtgttcagtgtggaggctggctaccggctctcagatgaccagatcgtgaaccacttccccaatcattatgaactgacccggaaagacctcatggttaagaacattaaacggtacaggaaggaactcgagaaggagggcagccctcttgcggaaaaagacgagaatggcaagtacctatatctggatttcgtgcccgttacttacatgctaccagccgattataatctgtttgtagaggaattccgcaagtcgccaagttcaacctggataatgaagccgtgcggcaaagcacaggggaaggggattttcttaattaacaaactgagccagatcaagaaatggtcccgagattccaaaaccagttcatttgtaagtcagtccaataaggaggcctacgttatttccctctatataaacaaccccctgctcattggcgggcgtaagttcgacctcagactctatgtactggtctccacatacaggcctctccggtgttacatgtacaagttgggattctgcagattctgcacggtcaagtacacccccagcacaagtgaattagataacatgtttgtgcatcttacaaatgtcgcaatccagaaacacggggaggattacaaccatattcatggtggtaaatggaccgtgagcaacctgaggctttacctggagtctacacggggcaaggaggtgacatcaaagctgttcgacgaaattcactggattatagttcagtcccttaaagcagtggctgtgaatgcgagtccctctctcacttccagtaccgccaacgataggatcctcaagtataatctgattaacgacacattaaacatcgcagtaccaaatggtgaaattcccgactgtaagtggaacaagtcacctccgaaggaagttctgggcaactacgagatcctgtatgatgaggagctagcacaaggagacggcgcagatagggagctccggagccgacagggccagtccctcgggcctagagctgggcgctccagggactcagggcgggcagtccttactacttggaaatag

SEQ ID NO: 210101 - DNA, 180 bp, synthetic construct
  misc_feature 1..180: note = Description of Artificial Sequence: Synthetic coding sequence
  source 1..180: mol_type = other DNA
atggccggcaaggtgaagtgggtgaccgacatcgagaagagcgtgctgatcaacaatttcgagaaacggggttgggtgcaggtgactgaaaacgaggactggaatttctactggctgctggacctcccagagttcagatatcggtcttgccttaatgagtttcctgatttcagggtctag

SEQ ID NO: 210102 - DNA, 1068 bp, synthetic construct
  misc_feature 1..1068: note = Description of Artificial Sequence: Synthetic coding sequence
  source 1..1068: mol_type = other DNA
atgccccaccagcccaccatcctgctgaacaccgtgagcgccagcgcatccccatgtttgcaccccggagcccaaaacatccctagtcccacgggcttgcctaggtgtaggtcaggttctcacacaattggcccctttagtagctttcagagtgcagctcatatctactcccaaaagctgtccagaccaagcagcgctaaggccgccggaagttgctacctgaataagcatcattcgggcatcgccaaaacgcagaaagagggtgaggacgcaagtttatattcaaagcgatataaccaatcgatggtgaccgcagagcttcagcgactagcagaaaagcaggccgcccggcagtatagccccagctctcacataaacctcctgacccagcaagtcacaaatttgaacctcgccacaggaataattaacaggtcgagcgcctctgccccacctaccctccgaccaattatcagtccaagtgggccaacttggagcacacagagtgacccacaggcccccgaaaatcacagcagtagtccaggttctcgcagcttacaaactgggggctttgcgtgggagggggaggtggagaacaatgtctactcgcaggctaccggcgtggtgccccagcacaagtatcatcccacagctggatcgtatcagctgcaatttgccctgcagcagttggagcaacaaaagcttcaatcccgccagctactggatcagtctcgggctagacatcaggccatttttggcagtcagacccttcccaattctaatctgtggaccatgaataatggagctgggtgcagaatttcttccgccacagcaagcgggcagaagccgaccaccctgcctcagaaagtcgttccccccccaagctcttgcgcctccctggtgcctaaaccaccccccaaccatgagcaggtgttgcggagagctacaagccagaaggcctcaaagggcagttcagccgagggacagttgaacggtttgcagtcctccctcaatcctgctgcctttgtccccatcactagttcgacagtgaactctcataccgccctgtag

SEQ ID NO: 210103 - DNA, 3846 bp, synthetic construct
  misc_feature 1..3846: note = Description of Artificial Sequence: Synthetic coding sequence
  source 1..3846: mol_type = other DNA
atgcccatcgtgatggcccgggacctggaggagaccgccagcagctcagaggatgaagaagtaatctcccaggaagaccacccctgcattatgtggaccgggggctgccgcaggatccccgtactggtctttcatgccgatgccattcttaccaaagataacaacattcgcgtcattggggagagataccacctttcctataaaattgtgcggaccgattcaaggttggtgaggtcgatccttactgcccacggttttcacgaggtccatcctagctctaccgattataatctgatgtggactggtagccatctgaaaccattcctgctacggaccctttctgaggcccaaaaagtgaatcatttcccgcggtcctatgaacttacacgcaaggatagactgtataagaacattattaggatgcagcacacccacggcttcaaagcttttcatattctgcctcaaacgttccttctgcccgccgagtacgccgagttctgtaatagttattctaaggatagggggccttggatcgtaaagcctgtggccagcagcaggggccggggcgtgtacttaatcaacaacccaaatcagatctctttggaggaaaatatcttggtatctcgatacattaacaaccctctgcttattgatgatttcaagttcgatgtccggttgtatgtgctggtgacctcctatgatccactggttatctatctttatgaggaaggactggcccgatttgcaaccgttcggtacgaccagggcgctaagaatatccgaaatcagttcatgcatctgacaaactatagtgtcaataagaaatctggcgactatgtttcatgtgacgaccctgaagtcgaagattatggtaacaagtggagcatgtccgctatgttacgctatctaaagcaggaaggacgggacacgactgcccttatggcccatgttgaggatttgattatcaagaccatcattagcgcagaactggccatcgctaccgcctgcaaaacctttgttcctcataggagttcctgcttcgagttgtacgggttcgacgtcttgatcgacagtaccttgaaaccttggctgcttgaagtaaatctgagcccctcactcgcatgcgacgcccccctggatctgaaaatcaaggcaagcatgatctctgatatgttcaccgtggtcgggttcgtgtgccaagaccccgcccagcgcgcgtctacacggcccatttaccccaccttcgagtccagcaggcgaaacccgttccagaaaccccagaggtgccggcccctgagcgcctcagacgccgaaatgaagaacctggtcggatctgctagggaaaaaggaccagggaaactaggaggttccgtgttaggcctatccatggaagagattaaggtcctccgtcgggtcaaggaggagaacgaccgacggggcggattcattagaatcttcccgaccagcgaaacatgggaaatttacggctcatatctcgagcacaagacctccatgaattatatgctggccactaggcttttccaggatcgcatgacggccgatggtgcccctgagctgaagatcgagtcactgaattctaaagcaaagctgcacgcggctttgtatgagcgtaagctgttgagtctggaggtccgaaaacgccgaagacgctcttctagactgcgtgctatgcggccaaagtatcccgtgattacacaaccagccgagatgaacgtcaagaccgagactgagtctgaggaagaggaagaagtggctctggataatgaggatgaggaacaggaagcctcccaagaagagtctgctgggttcctgagagagaatcaagcaaaatacacccccagcttaaccgcactcgtggagaatactcctaaggaaaactcaatgaaagtgagggaatggaacaacaaagggggccactgttgtaagctggagactcaagaattggagcccaagtttaacttaatgcaaattctccaagacaatgggaaccttagcaagatgcaggctagaatcgcttttagcgcctacttgcaacacgttcagatccgactcatgaaggacagtggagggcagacgttttccgcgtcttgggcagccaaggaagacgaacagatggagttggtggtgcgttttttaaagcgtgcttcaaacaacctgcagcacagtctcagaatggtgctgccctcacgacgcttagcattgctggaacggcggcggattctggcccaccaacttggagattttatcattgtgtacaacaaggaaacggagcaaatggccgagaaaaaaagcaagaaaaaggtagaagaagaggaggaggatggagttaatatggagaattttcaggagttcattagacaggcatctgaggcggagctggaggaggttctgactttttatacccagaagaataaatccgccagcgtgttcctcggcacgcactccaaaatttctaaaaataataacaactactcagactcaggcgccaaaggcgaccacccggagactataatggaggaggtgaagataaagccacctaaacagcagcagaccaccgaaattcacagcgacaaactctcaaggtttacaacctccgccgaaaaagaagccaaactagtgtacagcaatagttcttctgggcccaccgccaccctgcagaaaattcccaatactcacctgagctctgtgaccacctccgatctctcacccggaccgtgccaccactccagcctgtcccagattccgtccgccataccgagtatgccacaccaacccacgatacttctcaacaccgtttcagcaagcgcatccccttgcctccaccccggtgctcagaatataccctcccccaccgggctcccgcggtgcaggagcgggtcacacaccattggccccttcagctcattccagtcagccgctcacatctattcccagaagctctccaggccttcctctgccaaagccggtagctgttacctcaataaacatcactctgggattgctaaaacacagaaggagggcgaggacgccagtttgtactcaaaacgttataaccaaagtatggtgaccgccgaactgcagcggttggcagagaagcaggccgcgcggcagtattcacccagcagccatattaacctgctgacccagcaagtgactaaccttaatctcgccacagggatcatcaaccgcagtagtgctagcgcacctccaacactcagaccaatcatcagccctagcggacccacatggtccacacaatcggaccctcaggcacctgagaatcattccagcagcccgggctccaggtcactacagactggcggattcgcatgggaaggggaagttgaaaacaatgtgtattcccaagcaaccggcgtggtacctcagcataaataccacccaactgcaggtagctatcagctgcagtttgccctccaacagctggagcaacagaagttgcaaagccgccagctgcttgaccaatcccgggccagacatcaagctattttcggcagccaaaccctgcctaactccaacctgtggactatgaacaatggggccgggtgccgcatttcttctgctaccgcgtccggccagaagcctactacactgccccagaaggtcgtgcctccccctagcagttgtgcgtcactggtgccgaagcccccaccaaatcacgagcaggtacttcgccgcgcaacatctcagaaggccagcaaaggttctagtgcggagggacagctgaatgggttgcagagctctcttaacccggcagcatttgtcccaatcacatcatcgacagacccagcacataccaagatatag

SEQ ID NO: 210104 - DNA, 2454 bp, synthetic construct
  misc_feature 1..2454: note = Description of Artificial Sequence: Synthetic coding sequence
  source 1..2454: mol_type = other DNA
atgaaggagatcaaggtgctgcggcgggtgaaggaggagaacgaccgccgaggcggattcatcaggattttccctacgtctgaaacctgggaaatttacggatcctacctcgagcataaaacatcaatgaactacatgctggcaacccgcctcttccaggacagggggaaccctagacgcagcctgctgacagggcggaccagaatgacagccgatggtgctcctgaactgaagatagaatcactgaattctaaggcgaaattgcatgcagccctgtatgagagaaagttgctcagtttggaagttcgaaagcggcgccgacgcagctccaggcttcgcgcgatgcgtcccaagtatcccgtcattactcagcccgccgaaatgaatgtgaagaccgagaccgaaagcgaggaagaagaggaggtcgccctggataacgaggacgaagagcaggaagcatcccaggaagagtctgccgggtttctgcgggagaaccaggccaagtatactcccagcctgacagctctagtggagaatactccgaaggagaatagtatgaaagtacgcgagtggaacaacaagggcggtcattgctgtaagctggagactcaggaactggagcccaagtttaatctcatgcagattttacaggataacgggaacctctctaagatgcaggcccgcatcgcattttccgcatacctgcagcacgtgcagatccggctgatgaaggacagtggcggacagacattttcggcaagctgggccgcaaaggaagacgagcaaatggaattagtagtgcggttcttgaagagagcaagtaacaatttacagcatagtttgaggatggtgttgccatccaggagattagcacttctggaaagaaggaggatactggcacaccagttgggcgattttatcattgtgtataataaagagaccgaacagatggccgagaaaaagtctaagaaaaaggtggaggaggaggaggaggacggcgtgaatatggaaaatttccaggagttcattaggcaagcatctgaggcggaactggaagaggtcctcaccttttatacacagaaaaacaagagcgccagcgtctttctggggacccacagcaagatcagtaaaaacaacaataattattctgactctggtgcaaaaggtgaccaccccgagacaattatggaggaagttaagatcaaacctcctaagcagcaacagacaaccgagattcacagcgacaagttatcccgctttactactagcgccgagaaagaagcgaagctggtctattcaaattctagctctggacccactgctacacttcaaaagatccccaatactcacctgtcttcagtgacgacgtctgacctctcacctgggccatgccatcattcttcgttgtcacagattccctcggcaattcccagcatgccacaccaacctactattcttctcaacaccgtgagtgctagcgcttcaccatgcctccatccaggcgctcagaatatccccagtccaaccggccttcctcgctgcaggtctgggagccacactattggaccgttttcttcattccagagcgcagcacacatatattcccagaagctgtctcgcccatcatcagccaaggctgggtcctgctacttaaacaagcaccattcaggcattgccaaaacacaaaaagagggggaagacgcgagtctctacagtaaacggtataatcagtcaatggtaaccgcagaacttcagcggctggctgagaaacaggccgcaaggcagtattcaccttctagccatattaacctccttacacaacaggtcacaaatctcaaccttgcaaccggaattattaatagatccagcgctagcgcaccgcctactttgcggcctattatcagtccttcaggacctacttggtccactcagagcgacccccaggcccccgagaaccactccagcagccccggaagtaggtcgttgcagaccggcggatttgcctgggaaggcgaagtcgaaaataacgtgtactcccaggctaccggcgtggtacctcagcataagtaccacccaactgctgggagttatcaacttcaatttgccctccaacagcttgagcaacagaaactgcagtctaggcagctgcttgatcaatcacgtgccagacatcaagccatattcggatcccagaccctcccaaacagtaacctctggacaatgaacaatggcgctggctgcagaatttcttctgccactgcttcaggccagaaaccaacaacattaccgcaaaaagtcgtgcccccacctagtagttgtgcctcgttggttccaaagcctcctccaaatcacgagcaagtattaaggagggcaactagtcagaaggcctccaacactagatttcggtcaagcttccagaattatctgtggtatttcttccaagccgtgtcctag

SEQ ID NO: 210105 - DNA, 2337 bp, synthetic construct
  misc_feature 1..2337: note = Description of Artificial Sequence: Synthetic coding sequence
  source 1..2337: mol_type = other DNA
atggcccacgtggaggacctgatcatcaagaccatcatcagcgccgaactggccatcgccacagcatgcaagacctttgttcctcaccgctctagctgctttgagctctacgggttcgacgtgctcattgactcaactctcaaaccctggcttttagaggtgaatttaagcccatctttagcctgcgatgcaccattggatcttaagatcaaggcctctatgattagtgatatgttcacggtggtgggcttcgtgtgccaggacccagcccaaagggctagcacccggccaatctaccctaccttcgagagctctcgacgaaatcctttccagaaaccccaacggtgcaggccactcagcgcatctgatgcggagatgaaaaacttagtgggttcagcacgagagaaggggccagggaagctgggaggaagcgtcctgggactgtcaatggaggagattaaggtgctcaggcgagtaaaggaggagaacgaccgacggggcggattcattagaatctttcctactagcgaaacttgggagatctatggttcgtaccttgaacacaaaacaagtatgaactacatgttggcaacaaggctattccaagatcggatgactgctgacggcgccccagagctaaaaattgaaagtctgaatagtaaagccaaactccacgccgccctctatgaaagaaaactcctgtctctcgaagtaagaaagagacggcggcggtcaagtcgccttagggccatgcgaccaaaatatcccgtgataactcagcccgcagaaatgaatgtgaagaccgagaccgaatctgaagaggaggaagaagtggcattagacaacgaagacgaggaacaagaggcatcccaggaggagtctgccggattcctcagggagaatcaggccaaatatacgccaagcctaaccgcgttggtggaaaacacgcctaaggaaaacagcatgaaagtgcgagaatggaataacaagggtggtcattgctgcaaactggagactcaggagctggaaccaaagttcaatctgatgcaaattctccaggacaacggcaatctctctaaaatgcaggctcggattgccttcagcgcctacctgcagcatgtgcaaatcaggctcatgaaggacagcgggggacagacgttcagcgctagctgggcggcaaaggaagatgagcagatggaactggtagtgcggttcctcaagcgcgctagtaacaatttgcagcattcattgcggatggtcctgccctccagacggctggctttgctcgagaggagacgtatcttggctcatcaattgggtgactttattatcgtctacaacaaggagactgaacagatggccgagaaaaagtctaagaagaaggtggaggaagaggaagaggatggggtgaatatggaaaactttcaggaattcatccggcaggcgtccgaagctgaactcgaggaagttctgactttctacacccagaagaataaaagcgcttcagtctttttgggaactcacagcaagatttcaaaaaataacaataactatagcgactcaggcgcgaagggggatcatcctgagacgattatggaggaggtaaaaatcaagcctccgaaacagcagcagaccaccgagatccacagcgacaagctgtctcgctttacaacttccgccgagaaggaagctaagttggtatactccaacagcagttcaggccctacagctaccctacagaaaatccccaatactcacctgtcctcggtgacaactagtgatctgtcccccggtccctgccaccactcaagcctgtctcagataccctccgcaatcccaagtatgccccatcaaccaaccatcttgctcaacaccgtttccgcctctgcctctccatgcctgcaccctggcgcccagaacattccctcacccacggggctcccaaggtgtcgcagcggatcgcacacaattggaccctttagttctttccagtctgccgcgcacatctacagtcaaaaattatctcgcccgtcttccgcaaaggctggttcatgctacctcaacaaacatcactccgggatagcaaagactcagaaggaaggcgaggatgcgagcctctacagtaagaggtacaatcagtctatggtgacggccgagttacagcgtctcgctgaaaaacaggccgctcgccagtattccccttcgagccataccgacccctggaaatatgaccgctccatccgcatgtgctcaccgttgaatattctcgaacccgaatttaaaaaataccttatgggcatctattcaccgcactcatctaaaaagaagaagaaatag

SEQ ID NO: 210106 - DNA, 1755 bp, synthetic construct
  misc_feature 1..1755: note = Description of Artificial Sequence: Synthetic coding sequence
  source 1..1755: mol_type = other DNA
atgcggatcggcacccccaccgccggccccggccccagcgccgtgatggagggctgcttaggggtcgctgagcttcgcaagctttctaccttttcagcgtaccttgaagaccattcatacaatgtcgagcagatctggcgagatattgaggacgtgataatcaaaactttaatctccgcacacccgattatccggcataactatcacacctgttttcccaatcacactctgaatagtgcatgcttcgaaattcttggttttgatattctactggatcataagctcaaaccatggttgctcgaggtgaatcacagtccgtcttttagcactgactcacgccttgacaaggaggtcaaggatggactgctgtatgacactctggtcctgattaatttagaaagttgcgataagaagaaagttctggaagaagaacggcagagaggacagttcctgcagcagtgttgttcacgggagatgagaattgaggaggcaaagggttttagggctgtacagcttaagaaaactgagacttatgagaaggagaactgtggcggttttcgactcatctacccttcacttaactcggagaagtacgaaaagttctttcaggataacaactccctgttccagaacacagtcgcatcaagggcccgggaggagtacgcgcgacagcttattcaggagctgcggttgaagcgcgagaagaagccctttcagatgaagaagaaggtagaaatgcagggagaatccgccggagaacaggtgcgaaaaaagggaatgagagggtggcagcaaaagcagcaacagaaggacaaagcagcaacacaagcttccaagcagtacattcaacccctgactctggtgtcatacacccctgatcttctcctctctgtgcgcggagagcggaagaatgagaccgactccagcctgaatcaggaggcccccactgaagaggctagttctgtctttcccaagctgacaagcgcgaagccattcagttccttgcccgacctgcgaaacatcaacttatcctccagcaagctggagcctagcaagcctaattttagcattaaagaggcaaagtccgccagtgccgtgaatgttttcacaggaactgttcatctgacttccgtggagacaacccccgaatctacaacccagctctcaatttcacccaagtcccctcccactctggctgtgactgcatcttcagaatacagcggtcctgagactgatcgcgtggtgtcctttaagtgcaaaaaacagcagacacctccacaccttacccagaagaaaatgctgaagagcttcttacccactaagagcaaaagtttctgggaaagtccaaacacaaattggacattgcttaaatcagatatgaataagccccatcttatctccgaactgctgaccaaactgcagctgagcggtaagctctcctttttcccggcccattacaatcccaaactaggcatgaataacttgagtcaaaatccaagtctacctggagaatgtcattctagaagtgatagctccggagagaagaggcaactggacgttagctccctcttactccagagtcctcaatcatataatgtcaccctgagagatctcctggtgatcgctacccctgcacaactcgacccgagaccttgccggagccacgcaagtgctatgcgtgacccatgcatgcaggaccaggaggcgtacagtcattgcctcatcagtggacagaagggttgtgagcgctcctag

SEQ ID NO: 210107 - DNA, 2532 bp, synthetic construct
  misc_feature 1..2532: note = Description of Artificial Sequence: Synthetic coding sequence
  source 1..2532: mol_type = other DNA
atgccccagtgccccaccctggagagccaggagggcgagaacagcgaggaaaaaggagactcttccaaggaagacccaaaggagacagtggctctggcattcgtgcgtgagaatccgggcgctcagaacggcttacagaacgcacaacagcaaggtaagaagaaacgaaagaagaagcgcctcgtaatcaacttgtccagttgtcgctatgagagtgtgcgtagagccgctcagcagtacggatttagggaaggaggagaagatgacgactggactctctactggactgactatagcgtgtccctagagcgggtaatggaaatgaaatcgtaccagaagatcaatcacttccctggaatgtctgaaatctgccgcaaggatttgcttgccaggaatatgagcagaatgctaaaaatgttcccaaaggactttagatttttcccccggacctggtgtctgccggccgattggggagatctgcaaacatatagtcgtagtcggaaaaataagacctatatttgcaaaccggattcggggtgtcaaggtaaaggcatatttatcacccggaccgtgaaagagatcaaaccaggggaggacatgatctgtcaactgtacatctcaaaacccttcataattgatgggttcaaatttgacctgcgaatctacgttttggtgacttcatgcgatcccctaagaattttcgtttataacgaaggtttagctaggtttgctacaaccagctattcacggccatgcaccgacaatctggatgatatatgcatgcacctcaccaactactccatcaataagcattcatcaaatttcagccgcgacgcgcactccggtagcaagcgaaagctgtctacctttagcgcctacttggaagaccactcctacaacgtggaacagatatggcgcgatatcgaggatgtcatcatcaagaccctcatctctgctcaccccatcattcgccacaattaccatacctgtttccctaaccacaccctgaattctgcttgcttcgagatactgggatttgatatcctattggaccacaaactcaaaccctggctattagaggttaatcatagcccctccttttctacagatagcagactcgataaagaggttaaagacgggttattgtatgatacacttgtactgataaaccttgagagttgcgataagaaaaaggtgctcgaggaggaaagacaacggggccagtttctgcagcagtgctgttcacgggaaatgcgcattgaagaggcaaagggattccgagccgtccagctgaaaaaaaccgaaacgtatgaaaaggaaaactgcggcgggttcaggctgatctacccttctctcaattccgagaagtatgaaaagttcttccaggataacaactccctcttccagaatacggtggcctccagagctagagaggaatatgctaggcagcttattcaggagctgcgtctgaagcgggaaaaaaagccatttcagatgaagaaaaaagtggaaatgcaaggcgaatccgccggagagcaggtgaggaaaaaggggatgcgaggctggcagcagaaacagcaacagaaagataaggcagccactcaggccagcaaacagtacatccagcctctaactctggtgtcatatactccagacctattgctgtcagttcgtggtgagagaaaaaacgagacagactcaagcctgaatcaggaggcaccaacagaagaggccagttctgtgtttcctaaattaaccagcgccaagccatttagctcactccccgatctccggaatatcaaccttagtagctctaaacttgaaccatcaaagcctaatttctccataaaggaggcaaagagcgccagcgcggtcaatgtttttactggaactgttcatttgacaagtgttgaaacgacacctgaaagtaccacacaactctctatttcgccaaaaagcccgccaacactggctgttacagcaagtagcgagtactctggaccagagaccgatcgggttgttagctttaagtgcaagaaacagcagacaccaccccatcttacacagaagaaaatgctgaaaagtttcctccccactaaatccaagagcttttgggagtcgcccaacaccaactggacgttgcttaagtccgacatgaataagccccaccttatctcagagctacttactaaactgcagctcagcggaaagttaagtttctttcctgcccattataaccccaaactgggaatgaacaacctgagccagaatccctctctgccgggcgagtgtcattctagatccgattccagtggagagaagaggcagcttgatgtcagttccttactcttgcagtcaccacagtcttacaacgtgacccttcgggacctccttgtaatagccacgccggctcaactggaccctcgtccttgtcgctcccacgcatctgcgatgcgggacccttgcatgcaggaccaggaggcttacagccattgtctcatctcgggtcagaaggggtgtgagagaagttag

SEQ ID NO: 210108 - DNA, 558 bp, synthetic construct
  misc_feature 1..558: note = Description of Artificial Sequence: Synthetic coding sequence
  source 1..558: mol_type = other DNA
cagcccatgggcgccctgctgctgcaccccagccggcggggccccgccggagtggttgcctcttggactagcagccccgctggcagggatggtggggtggggattgcaggtgcctggtacttccctagggcatcttcacaagcaagagaaatgccccagtgtccgacactggagtctcaagaaggagaaaacagcgaggaaaagggggattcttccaaggaagacccaaaggaaacggtggcactggcatttgtgcgggaaaatcctggggcccagaatggtctgcagaacgcccaacagcagggaaaaaaaaagcgcaagaagaagagaatgccacttaagaactcgagaaagaggcggttcccttgcttcaagaaagctctgatctgtcctggtaacttggtgcgtctgcaatatgattccaccatcctcacataccaggaccccacagcggcatgcgcatttcagttcctgtttaacatttccccttgcctggctcctttcagattgatcgacgaagggaagctggttcattttctgatacactcttttccctag

SEQ ID NO: 210109 - DNA, 1710 bp, synthetic construct
  misc_feature 1..1710: note = Description of Artificial Sequence: Synthetic coding sequence
  source 1..1710: mol_type = other DNA
atggagggctgcctgggcgtggccgagctgcggaagctgagcaccttcagcgcctatttagaagaccattcgtacaatgtcgagcagatatggcgtgacatcgaggatgtgatcatcaagacgcttatctccgcccaccccattatccggcacaattatcacacctgctttcccaatcatacactcaactctgcgtgttttgagatcctggggtttgatattctcttggatcacaagctgaaaccctggctgttggaggtcaaccattctcctagtttcagcacagacagccgattagataaggaggtgaaggatggactgctatatgacacgcttgtgctcattaatttggagtcctgcgataagaaaaaggtgctcgaagaggagagacaaagaggccagttcctgcaacagtgttgcagcagggaaatgaggatcgaggaggccaagggctttagggccgttcaactgaagaagactgagacgtatgagaaggagaactgcggcggattcagacttatctacccttcccttaactccgaaaaatatgaaaaattcttccaggataacaactcgctctttcagaacaccgtagctagtagagctcgggaggaatacgcacgacagctgatccaggagctgaggcttaagcgagagaagaaaccattccagatgaaaaaaaaagtggaaatgcagggtgaatcggccggtgaacaggtgcgaaaaaagggtatgaggggttggcaacagaaacagcaacagaaggacaaggccgcgacacaggcgtctaagcaatacatacaacctctgactctggtgagctataccccagacctgctactgagcgttagaggcgagcgaaaaaatgagacagattcttctcttaatcaggaggcacctaccgaagaggctagctcagtatttcctaaactaaccagtgccaagcccttctcttcgcttcccgacctgaggaacatcaatctaagctcatcaaagctcgagccttcaaaaccaaattttagtattaaggaagccaagagcgcatctgccgtcaatgtgtttacgggaaccgtccacctcaccagcgtggaaaccacaccagagtctacaacgcagttatccatctcacccaagtcacccccaactctggctgtgaccgcaagtagtgaatattccggtccagaaactgacagggtggtgagctttaagtgcaagaagcagcagactccgccccatctgacacagaagaaaatgctaaagagctttttgccaaccaagtctaaaagtttttgggagtccccaaacaccaactggactctactgaagtctgacatgaataagccccatctgatttcggagcttctgacaaagttgcagctctccgggaaactctctttttttcctgcccattacaaccccaagctggggatgaacaacctgtcccagaacccgtccctgcccggggaatgtcactctagaagtgactcctcaggcgagaaaagacagctagacgtgtcttcattgctactgcagagtccccaatcttataacgtgactctcagggatctgcttgtgatcgctacccccgctcagttagatccccggccatgtcgcagccacgcctctgctatgagggacccttgtatgcaggaccaagaagcctactctcactgtctcatctctgggcagaagggctgtgagcggtcatag

SEQ ID NO: 210110 - DNA, 2676 bp, synthetic construct
  misc_feature 1..2676: note = Description of Artificial Sequence: Synthetic coding sequence
  source 1..2676: mol_type = other DNA
atgggcgccctgctgctgcaccccagccggcggggccccgccggcgtagtcgcatcttggacgagctcccccgcaggtagggacgggggcgttggaattgccggggcctggtacttccccagggccagcagtcaagcaagggagatgccgcaatgtccaaccttagagagtcaggaaggcgagaactccgaggaaaaaggcgacagttctaaagaagatccaaaagaaaccgtggccctcgcctttgtgagagagaatccaggtgctcagaacggcctgcagaacgcacagcagcagggaaaaaagaaaaggaaaaagaaacgattggtgatcaatcttagttcctgccgctacgaatccgtgcggcgcgccgcccagcagtacgggtttcgcgagggcggggaagacgacgattggaccctgtactggaccgactactctgtatccctagagcgggtgatggagatgaagagctaccaaaaaatcaaccacttcccaggaatgagcgaaatatgccgaaaagacctcttggcccgtaacatgtcacggatgctaaagatgtttcccaaagacttccgttttttccccaggacgtggtgtctccccgctgattggggcgatctgcagacttactctcggtcccgcaagaataagacttatatttgcaagcccgattcaggttgtcaaggcaaggggatctttatcacccgtaccgtgaaggaaatcaaacccggggaggatatgatatgccagttatatatctcaaagcccttcattatcgatggatttaagttcgatcttaggatctatgttctcgtgacttcctgtgaccccctgagaatttttgtatataacgaaggtctggcgaggttcgcaaccacatcatacagccgtccatgtactgacaacttggatgacatctgcatgcatcttacaaactactctattaacaaacactccagtaacttcagcagggatgctcacagtggctccaagcgcaagctgagtaccttttctgcttatttggaagaccatagctataacgtggagcagatctggagggacattgaagacgtgatcattaaaactctgatctcagcccatcctataatcagacacaactaccatacttgttttccaaatcacacattgaattctgcatgttttgagatcctgggcttcgacattcttcttgatcataagttaaagccctggctacttgaagtgaaccactccccttcatttagcaccgatagtagactagataaggaggttaaagacggtctgttgtatgatactctggttcttattaatttggaatcctgcgataagaagaaggtgctggaagaagagcggcagcgtggacagttcctgcaacagtgctgttctagagagatgaggattgaggaagcgaagggatttcgagctgtgcaactcaaaaagacagagacttacgagaaggaaaactgcggcggatttaggctcatctaccctagcctcaactccgagaagtacgagaagttcttccaggataataacagccttttccaaaataccgttgcctcgagagccagggaagagtatgccagacagttaattcaggaacttcgactaaagcgggaaaaaaaacccttccagatgaagaaaaaggtggaaatgcagggagagtcagcgggcgaacaggtgcgcaagaaagggatgcggggctggcaacagaaacagcagcaaaaagacaaagccgctactcaggcctccaaacaatacattcagcccctgaccctggttagctatactccagacttactgctgtcagtacggggtgagcgtaaaaacgagaccgactccagcttgaaccaggaagctccaactgaggaggcgtcttccgtcttccctaaactgacaagcgccaagcctttctccagcctccccgacctgagaaacataaacctttctagttccaagctagaaccctctaaacctaatttttccattaaggaagctaagtcagcgagcgcggtcaacgtgttcacagggacagtgcacttgacgtctgtggagaccacccccgagtctaccacacagctttccatttctcccaagagccccccaactctagcggtcaccgctagttccgagtactccggcccagagacagacagagttgtgagttttaaatgcaaaaaacagcagaccccgccacatttgacacaaaagaaaatgctgaagagttttctgcccacaaaatccaagtctttctgggagtcgccgaatactaactggacactattaaagagcgatatgaacaagccgcacctgatcagcgagctcttaactaaactccagctcagcgggaaactgtcgttcttccctgcacactataacccaaagttaggcatgaacaatctgtcccagaacccctctctccccggggagtgtcatagtagatctgactccagcggcgagaaacggcaactggacgtgtcctcgctgctcctgcagtcccctcagagttacaatgtaaccctgagggacctattggtgatcgccactcctgctcagctcgacccaagaccctgcaggagtcatgccagtgcaatgcgagatccttgcatgcaagaccaagaagcttatagccactgcctcatcagcggccaaaaagggtgtgaacggagctag

SEQ ID NO: 210111 - DNA, 306 bp, synthetic construct
  misc_feature 1..306: note = Description of Artificial Sequence: Synthetic coding sequence
  source 1..306: mol_type = other DNA
atgccccagtgccccaccctggagagccaggagggcgagaacagcgaggaaaagggggattcttcgaaagaggatcctaaggagacagtggccctggccttcgtacgagaaaatcccggcgcccagaatgggctgcagaatgcccaacaacaaggtaagaagaagcgaaaaaaaaagaggctggtcataaacctgtccagttgtagatacgagagtgtgagacgcgcagcccagcagtacgggttcagggagggcggggaggacgacgattggacgctgtattggaccgattacagtgtctcttag

SEQ ID NO: 210112 - DNA, 1356 bp, synthetic construct
  misc_feature 1..1356: note = Description of Artificial Sequence: Synthetic coding sequence
  source 1..1356: mol_type = other DNA
atgcgggagtgcatcagcatccacgtgggccaggccggcgtgcagatcgggaacgcttgttgggagttgtactgcctagaacacggcatccagcctgacggccaaatgccctccgataaaacaatcggcggcggcgacgactcatttaatacctttttctctgagacgggggcggggaagcatgtgccacgggccgtatttgttgatctggagcccactgtaatcgacgaggtgcgaacaggcacctatagacagctctttcatcctgagcagctcattacaggcaaagaggacgccgctaataactacgcaagaggacactatacaatcggtaaggagatcatcgatctggttctcgatcgcattcggaagttggccgatcagtgtactggtctccaaggcttcctggtattccattccttcggcgggggtacaggatctgggttcacttcacttttgatggaacgtctgagtgtggattatgggaaaaagtccaagttggaattttctatttaccctgcgcctcaagtgtctacagcagtggtcgaaccctacaatagcattttgaccacgcacaccaccttggagcacagtgactgcgccttcatggtggataatgaagccatctacgacatttgccgcaggaacctcgacatcgaacgccctacgtatactaacctgaatcggctcattggacagatcgtcagtagcattactgctagcctcaggtttgacggcgccttgaatgttgaccttaccgagttccagaccaatcttgtcccatatcctagaattcacttcccgctcgctacttatgcacctgtcatcagcgccgaaaaagcctaccacgaacaactcagtgtggctgaaatcacaaatgcatgctttgaacctgcaaatcagatggtcaaatgtgacccaaggcacggcaagtacatggcctgctgcctgttgtacaggggagatgtggttcctaaggatgtcaatgccgctatcgcgaccatcaaaaccaagagaaccatccagtttgttgattggtgcccgacgggcttcaaggtgggcatcaattaccagcctcccactgtcgtcccgggcggagacctcgcaaaggtccagcgcgctgtgtgcatgctgtccaacaccaccgccattgcagaagcatgggctcggttagaccataagtttgatctgatgtatgcaaagcgggcgtttgtgcactggtatgtgggggaagggatggaggagggagagttctccgaagcacgcgaagacatggcggccttagagaaagactacgaggaagtgggggtggattccgtcgagggcgagggtgaagaagaaggcgaggaatactag

SEQ ID NO: 210113 - DNA, 1356 bp, synthetic construct
  misc_feature 1..1356: note = Description of Artificial Sequence: Synthetic coding sequence
  source 1..1356: mol_type = other DNA
atgcgggagtgcatcagcatccacgtgggccaggccggcgtgcagatcgggaacgcttgttgggaattgtattgcctggagcatgggatccagccggatggtcagatgccaagcgacaaaactattggcggcggggatgacagctttaacaccttttttagcgagaccggggcgggcaagcacgttccacgcgccgtgtttgtggatctcgaaccaactgtgatcgatgaggtgcggacgggcacttaccgacaattgttccatcccgaacaattgatcaccggaaaagaggatgccgcgaataactacgccagggggcattacactatcggaaaggagatcatagacctggtccttgatcgcatcagaaagttggccgatcagtgtactggactgcaggggttcctcgttttccattccttcggaggcggcactggcagtggctttacctccctgcttatggagcggctcagtgtggactatggtaaaaagtccaagctggagttttctatatatcctgcaccacaggtatcgacagctgttgtggaaccctacaatagtatccttacaacacatacaacactggagcacagtgattgcgcatttatggttgataatgaagccatatacgatatctgtagacgcaatttggacatcgaacgccccacttacacaaatctgaaccggctgattgggcagatcgtgagctctattaccgcatctctgagattcgatggcgccctgaatgtggatctgactgagttccaaaccaatttggtcccgtatcctagaattcacttccccttggccacatatgctccggtcatctccgctgagaaagcctaccatgaacagttgtccgtggctgaaattacaaacgcatgttttgagccagctaatcaaatggtgaagtgcgatccacgccacggcaagtacatggcctgctgcctactctacagaggggatgtggtgccgaaagacgtcaacgctgccatcgctacgatcaagactaagaggactatacagttcgtggactggtgccctaccggatttaaggttgggattaattatcagcctcctaccgttgttcctggtggagacctggccaaagttcagcgcgccgtatgcatgctgagcaatacaactgccatagcagaagcctgggcacgtttggaccacaaatttgatctgatgtacgccaagcgagctttcgtccactggtatgttggcgagggcatggaagaaggcgaatttagtgaagcgagagaagacatggccgctcttgaaaaggattacgaagaggttggcgtggatagtgtagagggcgagggcgaagaagagggggaggagtattag

SEQ ID NO: 210114 - DNA, 1152 bp, synthetic construct
  misc_feature 1..1152: note = Description of Artificial Sequence: Synthetic coding sequence
  source 1..1152: mol_type = other DNA
atgatcgacctggagcccaccgtggtggacgaggtgcgggccggcacctatagacagttgtttcaccctgaacagttgatcacaggcaaagaagacgctgctaataactatgccagaggacattacactgtggggaaggaaagcattgacctggtgctcgacaggatcaggaagcttactgatgcctgctccggactacagggcttcttaatcttccactcatttgggggcggtacagggtctggattcacaagccttctaatggaaagactgtccctggactatggtaaaaagagcaagctcgaatttgcaatataccctgctccacaggtgtctacggccgtggtcgagccttataactccattttgaccacgcacacaaccttagaacactccgactgtgctttcatggttgacaacgaggccatttatgatatctgcaggcggaaccttgacattgagcgccccacatatacgaacctgaacagattgatctcacagatagtctcaagtattacagctagcctccgattcgatggagctctgaacgtggacctgaccgaatttcaaacaaatctcgtcccctacccacgaatccacttcccgttggtgacctatgctcctattatctccgccgagaaggcgtatcacgaacagctgtccgtggcagagatcacatcttcctgttttgaaccgaacagccaaatggtcaagtgtgatcctcgccacggtaagtatatggcttgttgcatgctgtaccgtggtgacgttgtgcctaaggacgtgaacgtcgctatcgctgcaatcaagaccaaaagaacaattcagttcgtagactggtgtcccactgggttcaaggttgggattaactaccagccacctacggtggtccccggaggcgacctggctaaggtgcagcgggcggtgtgcatgctgtctaataccaccgctattgccgaagcatgggcccgcctagaccacaagtttgatctgatgtacgccaaaagagcgttcgtgcactggtacgtgggcgaagggatggaggaaggtgagtttagcgaggctcgggaagacctcgccgcactcgaaaaagactatgaagaagtcggcacagatagttttgaagaagaaaatgagggcgaggagttctag

SEQ ID NO: 210115 - DNA, 1350 bp, synthetic construct
  misc_feature 1..1350: note = Description of Artificial Sequence: Synthetic coding sequence
  source 1..1350: mol_type = other DNA
atgcgggagtgcatcagcgtgcacgtgggccaggccggcgtgcagatcggtaacgcctgttgggagctgttttgcctggagcacggaatccaggccgacggcaccttcgacgcccaagcatcaaaaataaatgacgacgacagctttaccacattcttcagcgaaaccggcaatggaaaacacgtgcctcgggcagttatgattgatctggaacccaccgtggtagatgaggtaagagctgggacctacaggcagctgtttcatccagagcagctgatcacaggcaaggaagatgccgccaataactatgcacgcgggcactataccgtaggcaaggagtcaatcgacctagttctggaccggattcggaaactaacagacgcttgctctggcctgcagggctttttgatcttccacagttttggaggaggcaccgggtccgggttcaccagcttactcatggaacgattgagccttgactacggtaagaagagcaagttggagttcgccatttaccccgctccccaggtgtctaccgcagttgtcgagccctacaactccatccttacgacacacactaccctagagcactctgactgtgccttcatggtggataatgaagccatctacgatatctgccgacgcaatcttgatatcgagcgacccacttacacgaatctcaatcgactgatttcccaaattgttagctctattacagcctcactaaggtttgatggtgcactgaatgtggacctgactgaattccaaacaaatcttgtgccttacccacgcattcactttcctctggtgacttatgcccccattattagcgccgaaaaagcttaccatgagcagttatcggttgctgagattacctcttcctgttttgaaccgaatagccagatggtgaagtgtgaccctcgccacggcaagtatatggcctgctgtatgctgtatcgcggcgacgtggtgccaaaggatgtgaacgtcgcaattgccgccataaaaacaaaaaggacaattcagtttgtggactggtgcccaaccggattcaaagtggggataaattaccagccccccactgttgtaccaggcggggacctggctaaagtccagagggctgtgtgtatgttatcaaacactactgctattgccgaggcctgggcgcgtttagatcacaaattcgaccttatgtatgctaagagagcatttgttcactggtacgtgggtgaaggcatggaagaaggggagttttcagaggccagagaggatctggcagccctcgaaaaggactacgaagaggtgggcactgattcattcgaggaggagaatgagggcgaagagttctag

SEQ ID NO: 210116 - DNA, 912 bp, synthetic construct
  misc_feature 1..912: note = Description of Artificial Sequence: Synthetic coding sequence
  source 1..912: mol_type = other DNA
atggcccggcggggccccggctggcggcccctgctgctgctggtgcttctcgccggagcagcccaggggggactgtacttcagaagggggcagacctgctacaggccactgaggggcgatggccttgcaccactgggacggtcaacttacccacgaccgcacgaatacctctcacctgccgatctgcccaagtcctgggactggcggaatgttgacggggtgaattacgcctccatcacaagaaaccagcacattccacagtactgtgggagctgctgggcacatgcctctacaagcgctatggccgacagaataaacatcaaaaggaagggtgcctggcctagcacgctcctgtctgtgcagaatgttatcgactgtggtaatgctgggtcctgtgagggcggcaatgacctcagcgtgtgggattatgctcatcagcacggaattccggacgagacctgtaacaactaccaggctaaggatcaggaatgcgataagttcaatcagtgtggcacatgtaatgaattcaaggagtgccatgccattaggaactacacgctttggagagtaggggactacggcagcctgagcggccgggaaaaaatgatggcagaaatctacgcaaacgggccaattagctgcgggatcatggccaccgagcgacttgccaactacacaggaggcatctacgctgagtatcaggacacaacctatatcaatcatgtagtcagcgtagccgggtgggggatctctgacggcactgaatactggatcgtgaggaatagctggggagaaccctggggagagaggggctggttacgcatagtcactagtacttataaggacggaaaaggtgcccggtacaatctggcgattgaggagcattgcacctttggcgaccctatagtgtag

SEQ ID NO: 210117 - DNA, 1338 bp, synthetic construct
  misc_feature 1..1338: note = Description of Artificial Sequence: Synthetic coding sequence
  source 1..1338: mol_type = other DNA
atgcgggagatcgtgcacatccaggccggccagtgcggcaaccagatcggagccaaattttgggaggtaattagcgatgagcatggcatcgaccctacaggctcctatcacggcgacagcgatcttcagctggaacgaattaatgtgtattacaacgaggccaccgggaacaagtacgttccacgggcaattctcgtcgatctcgagcctgggactatggattctgtgaggagcggccccttcggacagatcttccgcccagacaattttgtgtttggtcagtccggtgccggcaacaactgggcaaagggtcattataccgagggcgctgagctggttgacagtgtcctggacgtggttagaaaagaaagtgaatcatgtgattgtttacagggattccagctcacgcatagtctagggggggggacaggatcaggaatgggtaccctgctcatctcgaaaatccgcgaagagtatcccgatcgaattatgaacaccttttctgtcatgccttcgcccaaggtaagcgatacagtcgtggagccgtacaatgccactctgagtgtacatcagctcgtagagaacacagacgagacctactgcatagacaacgaggccctctacgatatttgcttcagaaccttgaaactgacgaccccaacgtacggcgatttgaatcacctcgtaagcgccacaatgtcaggcgtgaccacttgcctaagattcccaggccaactgaacgccgacttacggaaattagccgtcaatatggtaccctttcctagactccacttcttcatgcctggttttgcccccctgacctccagaggatcccagcagtatcgcgccttgactgtcccagaattgacccagcagatgtttgactcaaagaatatgatggcagcttgcgatccccgccatggcaggtatttgacagtcgcagccatattcaggggtagaatgtctatgaaagaagtggacgagcaaatgctgaacgtgcaaaacaagaactcttcctattttgtcgagtggatccctaacaacgttaagacggctgtgtgtgacattccgccccgtgggctgaagatgagtgctaccttcatcggcaacagcacggcaatccaagagctgttcaagcggataagtgaacaatttactgctatgttccgacgcaaagcctttcttcattggtatacaggtgagggtatggatgagatggaattcaccgaagctgaatcaaatatgaatgacctcgtgtcagaatatcaacagtaccaggatgccacagcagatgagcaaggagaatttgaagaggaggaaggcgaggatgaggcgtag

SEQ ID NO: 210118 - DNA, 1353 bp, synthetic construct
  misc_feature 1..1353: note = Description of Artificial Sequence: Synthetic coding sequence
  source 1..1353: mol_type = other DNA
atgcgggagatcgtgcacatccaggccggccagtgcggcaaccagatcggcgctaagttctgggaggttattagcgatgaacacggcattgatccctccggtaactacgtcggggactccgatttgcaactggaaaggatctcagtgtattacaacgaggcctcttcgcacaagtacgtaccccgagccattctcgttgacctcgaaccaggaactatggacagtgttcgctccggggcgttcggacacctgtttaggccagacaacttcattttcggacaatccggggccggaaataattgggccaaggggcactataccgagggcgcagaactggtggactcagtgctcgacgtggttcgcaaggagtgcgagaactgcgattgtctgcaggggttccagttaacccactctctgggagggggaactggttccggcatgggaaccctgctcatctcgaaggtgcgtgaggaataccctgacagaattatgaacaccttctccgtggtcccctctccgaaggtgtccgataccgtcgtggagccatacaatgcgacgttgtcgatccaccagctggtggaaaatacagatgaaacctattgtatcgacaatgaggccttgtatgatatctgttttcgaacccttaagctagcaacaccaacatacggcgatctaaaccatctggtgtcggcaacaatgtcaggggtcacaaccagcctgaggttccccggccagttaaatgctgatctcaggaagttagctgtgaatatggtgccttttccacggctgcatttcttcatgcctggcttcgcaccactcacggccaggggctctcagcagtaccgggccctgacggtacccgagctaacacaacagatgtttgatgccaaaaatatgatggctgcatgcgacccaaggcacggaagatacctaacagtcgcgactgtcttccgcggacgtatgtccatgaaggaggtggacgaacagatgcttgcgatccagtccaagaacagctcttactttgtggagtggatcccgaacaacgtcaaggtggccgtctgcgatatcccacccagaggattgaaaatgtcctcaacatttatcggcaactctaccgccattcaagagctgttcaagcgaatttctgagcaatttaccgctatgtttagaaggaaggccttcctgcactggtacactggcgaaggtatggatgaaatggagtttacagaggcagagtccaatatgaatgacttggtgtcggagtatcagcagtatcaggatgccacagcagaagaggaaggagagatgtacgaagatgacgaagaagagagcgaggcacaaggaccaaagtag

SEQ ID NO: 210119 - DNA, 1137 bp, synthetic construct
  misc_feature 1..1137: note = Description of Artificial Sequence: Synthetic coding sequence
  source 1..1137: mol_type = other DNA
atggacagcgtgcggagcggcgccttcggccacctgttccggcccgataactttatcttcggccaaagcggggctggcaacaattgggctaagggtcactacactgaaggggccgaactagtggatagtgtgctagacgttgtgcgtaaggaatgtgagaactgtgactgcctgcagggattccagctgacccactccctgggagggggtactggatctggcatggggaccctactgatcagcaaggtcagggaagagtacccagacaggattatgaacactttttcagtcgtcccgtctcccaaggtttccgacaccgtggtcgagccatacaacgccactctgtccatacaccagctagttgagaacacagatgaaacctattgcatcgataacgaggcattatatgatatctgttttagaaccctaaagctggcaactcccacatacggcgaccttaaccacctcgtttctgccacaatgagcggtgttacaaccagcctgcgatttccaggacaactcaacgccgacctgcggaaactggcagttaacatggtcccattccctaggctgcatttcttcatgcctggcttcgcgccgctcacagctcggggatcgcagcagtatagggccctaacggttccggaactaacacagcaaatgttcgacgcaaaaaacatgatggcggcatgcgacccccggcatggtcgatacttgacagtggccaccgtgtttcgcggacgcatgagcatgaaggaggtagacgagcagatgttggccattcagtctaaaaactcctcctacttcgtcgaatggattccaaacaatgtaaaggtagccgtttgtgacatacctcctcggggccttaaaatgtcctccacctttataggaaattccacagcaattcaggaactttttaaaaggatttccgagcagtttacggcaatgtttcgcaggaaggcatttctgcattggtataccggggaggggatggacgagatggaatttaccgaggctgaaagcaatatgaatgatcttgtgtcagagtaccagcagtaccaagacgctactgccgaggaggagggagagatgtacgaggacgacgaagaagagagtgaagcccaaggcccgaagtag

SEQ ID NO: 210120 - DNA, 1335 bp, synthetic construct
  misc_feature 1..1335: note = Description of Artificial Sequence: Synthetic coding sequence
  source 1..1335: mol_type = other DNA
atgcgggagatcgtgcacatccaggccggccagtgcggcaaccagatcggggcgaagttctgggaggtgatttcggatgaacacggaatcgacccgacgggaacctatcatggggattccgacctgcagctggatcgtatctccgtgtattataacgaagccactggtggaaaatatgtgccaagagccattctggttgaccttgagccagggacgatggatagcgtgcggtcaggaccgtttgggcagatctttcgcccagacaacttcgtttttggccagtcaggggccgggaataattgggccaagggacattataccgagggcgccgagttagtggactccgttctcgacgtggtgcgaaaagaggctgagagctgcgattgcttgcaaggcttccagcttacacattccctggggggtgggactggaagcggaatgggtaccctcttaatctccaagatacgtgaagagtaccccgacagaattatgaatacatttagcgtggtgccttcacccaaagtctcagataccgtcgtcgagccctacaacgcgactctctctgtgcaccaactggtggagaacaccgacgagacctattgtatagacaatgaggcactgtacgatatttgctttcggacactgaaactgactaccccaacttatggcgatctgaatcacctggtctctgccacgatgtcaggtgttactacttgtctaaggttcccaggtcagctgaacgcagatctgcgtaaacttgccgtaaatatggtcccattccctcgcctgcatttctttatgcctggatttgcccctctgacatctcggggcagccagcaataccgagccctcaccgtgcctgagctgacacagcaggtatttgacgctaaaaatatgatggccgcctgtgaccctcggcacggccgttacctcactgtggcagccgttttccgcggccgcatgtccatgaaagaagttgacgagcagatgctaaatgttcagaacaaaaattccagttactttgtggagtggatcccgaataacgtgaagactgccgtgtgcgacattccacctcggggactgaagatggccgtgactttcattgggaatagcactgcaatccaagaactgtttaagcggataagtgagcaattcaccgccatgtttcgtaggaaagctttcctccattggtatacaggggagggcatggatgagatggagttcaccgaggccgaaagtaacatgaatgatctggtgagtgagtaccagcagtaccaggacgcaacagctgaagaagaggaagacttcggagaggaggcagaggaggaagcgtag

SEQ ID NO: 210121 - DNA, 1119 bp, synthetic construct
  misc_feature 1..1119: note = Description of Artificial Sequence: Synthetic coding sequence
  source 1..1119: mol_type = other DNA
atggacagcgtgcggagcggccccttcggccagatcttccggcccgacaattttgttttcgggcagtcaggcgcgggaaacaactgggcaaaaggacactacacagagggtgcggaactggtggattccgtgcttgacgtggttaggaaagaagcagaatcttgtgactgcctgcaaggtttccagctcacacattcactcggcgggggaactgggagcggcatgggaactctcttgatttcaaagatccgggaggagtatccagatagaatcatgaatacattctcagtggttcctagccccaaagtgtctgacaccgttgtggaaccctacaacgcgaccctgtcggttcaccaactggttgaaaacactgacgaaacctactgcattgacaatgaggccctctatgatatctgcttccgtacgctgaagctaaccacccctacttatggtgatcttaaccacttggtaagcgctaccatgagtggtgtcacaacctgcctgcggttcccaggccagttgaacgccgatttaagaaagctggccgtcaatatggtcccctttcctaggctccacttcttcatgccaggattcgccccgctcacatcacgggggtctcagcaatatagagcgctcaccgttccggagctaacgcaacaggtgttcgatgccaagaatatgatggcggcttgcgatccccggcacggccgctatctcactgtcgcagctgtctttcgcggaaggatgagcatgaaagaggtggacgaacagatgctgaacgtccagaacaagaacagctcttacttcgtcgagtggattcctaataatgtcaaaaccgccgtctgcgatattccaccccgcgggttgaagatggccgtcacattcatcgggaactctacagctatacaagaactgtttaagcggatttctgaacagtttactgctatgttcagacggaaggccttccttcactggtacaccggcgaagggatggacgaaatggagttcacagaagcagaatctaacatgaacgatcttgtatccgagtaccagcagtatcaggacgcaaccgccgaggaggaggaagacttcggagaagaagccgaagaagaggcctag

SEQ ID NO: 210122 - DNA, 1335 bp, synthetic construct
  misc_feature 1..1335: note = Description of Artificial Sequence: Synthetic coding sequence
  source 1..1335: mol_type = other DNA
atgcgggagatcgtgcacatccaggccggccagtgcggcaaccagattggtgcaaaattctgggaagtgataagtgacgagcatggcatcgacccaaccggtacttaccatggcgactcagatttgcagttggaccgaatttctgtctattacaacgaagctactggtggtaagtatgttcccagagcaattctggtagacctcgagccaggtactatggacagtgtgcggagcgggcctttcggccagatctttagacctgacaacttcgtgtttgggcagtcgggggcaggcaataactgggcgaaggggcattacactgagggcgctgagctggtggacagcgttcttgacgtggtgagaaaagaggcagaaagttgtgactgtctccaggggtttcaactgacccacagcctgggtggaggcaccggatcaggcatggggaccctgctcatttccaagattagagaagaatatccagaccgcatcatgaacacattttcggtggttcccagcccgaaagtctctgacactgtggtggagccttataatgcaacactgtctgtgcatcagctcgtcgagaatacagacgaaacctattgcatcgataacgaggccctgtatgacatatgctttcgaacccttaaattgaccacacccacatacggggacctgaaccaccttgtctcggctaccatgtcaggagtcacaacctgcttgagatttccagggcagctgaacgcagacttaagaaaattagcggtgaacatggttcccttcccgaggctgcatttctttatgccaggattcgccccgttgacatcaagaggcagtcaacagtacagagctctgacggttcctgagctgactcagcaagtcttcgacgccaaaaacatgatggccgcgtgtgatccgagacatggcaggtacctcacggtggccgcagtgttccgcgggcggatgtcgatgaaagaagtggatgagcaaatgctgaatgtgcaaaataagaattcctcatactttgtcgaatggatccctaacaatgtgaagaccgccgtctgtgatatccctccccgcggacttaaaatggccgtgactttcattggtaactctactgctattcaggagttattcaagcggatttccgaacagttcacagcaatgtttagacgcaaggcattcctacactggtatacaggggaggggatggacgaaatggagttcacagaagctgaatcaaatatgaacgacttagtctccgagtaccagcaataccaagacgcaactgcagaagaggaggaggactttggtgaagaggctgaggaggaagcctag

SEQ ID NO: 210123 - DNA, 1119 bp, synthetic construct
  misc_feature 1..1119: note = Description of Artificial Sequence: Synthetic coding sequence
  source 1..1119: mol_type = other DNA
atggacagcgtgcggagcggccccttcggccagatcttccggcccgacaactttgtgttcggccagagcggagcgggcaacaattgggcgaaggggcattatactgagggcgccgagcttgtggactcagtcctggacgtggttcgaaaggaggccgagtcgtgcgactgcctacagggcttccagttgacccacagcctgggtgggggaaccggaagcggcatgggtacactactgatttccaaaatcagagaggagtacccagatcgtataatgaatacattttccgtcgtaccttcccctaaggtgagcgatacagtagtggagccgtacaacgcaaccttgtcagtccaccagctagttgaaaatactgacgagacgtactgtatagataacgaggcactctatgacatctgtttccgaacgctcaaactgaccacaccgacctatggggacctgaatcatcttgtaagcgctactatgtcaggagttaccacatgtctgcggttccccggacagctgaatgccgatcttcgcaagctggccgtcaatatggttcccttcccccggctgcacttcttcatgcctggcttcgcccctctgactagccgggggagccagcagtatcgcgcactgacagtccctgagctgacacagcaagtgtttgacgcaaagaatatgatggctgcatgtgatcccaggcatggtcgctatctgactgtggcagcggtctttcgaggaaggatgtctatgaaagaggtggatgagcagatgctgaatgtgcagaacaagaattcctcgtatttcgttgagtggatacccaacaacgtcaaaaccgcagtgtgtgatatcccaccccggggactcaaaatggcagtgacatttatcggcaactctaccgccatccaggagttgttcaaacgtataagtgaacagtttaccgccatgtttagaaggaaagcctttctgcattggtatacaggtgaggggatggatgagatggagtttactgaagctgagtctaatatgaatgatctcgtgagcgagtaccagcaatatcaggatgccacggccgaagaggaagaagactttggtgaggaagccgaggaagaggcctag

SEQ ID NO: 210124 - DNA, 1281 bp, synthetic construct
  misc_feature 1..1281: note = Description of Artificial Sequence: Synthetic coding sequence
  source 1..1281: mol_type = other DNA
atgttctgggaggtgatcagcgacgagcacggcatcgaccccaccggcacctaccatggggattcagatctgcaactggacagaatctctgtttactataatgaggccaccggcggcaagtacgtccccagagccatcttggttgatctggagcctggcacaatggatagcgtccgcagtggcccttttggtcagattttccgaccggacaacttcgtgtttggccagtccggcgccggaaataattgggccaaggggcattacacagagggggctgaactcgtcgactccgtactggacgtcgtgcgcaaggaagccgagtcttgtgactgcctccagggtttccagctaacccattcgctggggggtggtacagggagcggaatgggcactctgctgatttccaagatccgagaggagtaccctgatcgtatcatgaacaccttcagcgtagtgcctagtcccaaagtgagcgacacagtggtggaaccgtataacgccaccctgtcggtccaccaactggtagagaacaccgacgagacttactgcattgataatgaagccttatatgacatttgctttcgaacactgaaactaaccacacctacgtacggcgacctgaaccatttagtgtccgcgaccatgagcggagtgaccacgtgtctgaggttcccagggcagctgaacgcagacctgcgaaagctggcagtcaacatggtgccattcccccggctccatttctttatgccaggctttgctccgctcactagtaggggctcccagcagtatcgagcactgacagtgccagagctgacccaacaggtgtttgatgctaagaatatgatggccgcctgcgacccgagacacggacggtatttaactgtggcggcagtctttcgcgggcggatgtctatgaaggaagtagatgaacaaatgctgaatgttcagaataagaattcctcatatttcgtcgagtggattccaaataacgtaaaaacggccgtgtgtgacatccctccaaggggtctgaaaatggccgtcactttcattgggaattccacagctatccaggaactgttcaaacggatctccgaacagttcaccgctatgtttcgaagaaaggctttcctccactggtacaccggggagggcatggacgaaatggaattcactgaagccgaaagcaacatgaacgacctcgtgagcgagtaccaacagtaccaggatgccactgcagaagaggaggaagatttcggcgaggaagctgaagaagaagcttag

SEQ ID NO: 210125 - DNA, 1119 bp, synthetic construct
  misc_feature 1..1119: note = Description of Artificial Sequence: Synthetic coding sequence
  source 1..1119: mol_type = other DNA
atggacagcgtgcggagcggccccttcggccagatcttccggcccgataatttcgtctttggccaatcaggcgccggcaataattgggcaaaggggcactataccgagggagcagagctggtggattctgtgttggacgtggtacgcaaggaggcagagagttgcgattgcctgcagggatttcaattgactcacagtctgggagggggcactggatcaggcatgggcaccctgctcattagcaagatacgcgaggagtatcctgaccgaatcatgaacactttctctgttgtgcccagccccaaagttagcgacaccgtggtcgaaccctacaacgccacactgtctgtgcaccagctcgttgagaacactgacgagacgtactgcatagacaatgaagctctgtatgatatctgtttccgcaccctgaaactgacaaccccaacttatggcgacttaaaccacttggtgagtgccaccatgtctggcgtcactacatgtcttcggtttcctggacagctgaatgctgacttgcgaaagcttgcagtgaacatggtgcctttcccaaggcttcactttttcatgccagggttcgcaccgttaacttcaaggggatcccagcagtatagggctttaactgtcccagaactaacccagcaggtgttcgacgctaagaatatgatggctgcctgtgacccgaggcacggccggtatcttacagtggcggccgtgttccggggtaggatgtcgatgaaggaggtcgatgaacaaatgcttaatgtgcagaataaaaactcctcctactttgtggagtggatcccaaacaacgtgaaaacagccgtctgtgatatccctcctcggggcctaaaaatggcagtcacgttcatcggcaatagtacagccattcaggaactgtttaagagaatttctgaacagttcacagcaatgtttcggagaaaggcctttctgcattggtacactggagagggaatggatgagatggaattcactgaggctgaaagcaatatgaacgacctggtgtctgaatatcagcaataccaggacgctacagccgaggaggaagaggatttcggagaagaggccgaggaggaagcctag

SEQ ID NO: 210126 - DNA, 1119 bp, synthetic construct
  misc_feature 1..1119: note = Description of Artificial Sequence: Synthetic coding sequence
  source 1..1119: mol_type = other DNA
atggacagcgtgcggagcggccccttcggccagatcttccggcccgataactttgtgttcggacaatctggagctgggaacaattgggctaaaggtcactatacggagggtgctgagctggtagactccgttctggacgtcgtgcgcaaggaggcagaaagctgcgactgcctccagggatttcagctgactcattctttaggagggggaacgggtagcggcatgggaaccctgttgattagtaagatccgtgaagagtatcccgataggataatgaacactttctctgtcgtacctagccccaaagtaagcgacacagtggtggagccatataatgcgaccctttccgtgcaccagttggtagagaacacagacgagacttattgtattgataacgaggcattatacgacatctgctttcggactctcaaactgacgactcccacttatggggacctgaaccacctggtgtccgccacaatgtccggtgtgacgacatgcctacggtttccgggacagctgaatgctgacctcaggaaactggccgtaaacatggtcccatttccacgactccacttttttatgcctggtttcgccccactgactagtagggggtcgcaacagtaccgtgccctgactgtgcctgagctgacccagcaggtgttcgatgcaaagaatatgatggccgcatgtgatccccgacacggccgatatctgacagtcgcagcggtgtttcgaggccggatgtccatgaaagaagtggatgaacagatgctgaatgtgcagaacaagaattcgtcatacttcgttgagtggataccgaacaacgtgaaaaccgccgtgtgcgatatacctcctagggggctgaaaatggccgtcacgttcataggaaactccactgccatacaggagttatttaaaagaattagcgagcaattcacagccatgttccgacgcaaagccttcctgcattggtacaccggggagggcatggacgagatggaatttacggaggctgaaagcaatatgaatgacctagtcagcgaataccagcagtaccaggatgcaactgcagaagaggaagaggattttggcgaggaagccgaagaggaagcctag

SEQ ID NO: 210127 - DNA, 1281 bp, synthetic construct
  misc_feature 1..1281: note = Description of Artificial Sequence: Synthetic coding sequence
  source 1..1281: mol_type = other DNA
atgttctgggaggtgatcagcgacgagcacggcatcgaccccaccggaacatatcacggcgattccgacctccagctcgatcgaatcagcgtgtactacaacgaggcaacaggcggcaaatacgtacctagggccatactggtggatctcgaacctggcactatggattccgttagaagcggcccatttggacagatattccggcccgataatttcgtgtttggccagagcggcgcaggaaataactgggccaaagggcactatactgagggtgctgaactcgtggacagcgtgttggatgttgtacggaaggaagcagagtcatgcgactgtctgcaggggtttcagttaacccactcactgggaggcgggaccggtagtgggatggggacattgttgatttcaaagatacgcgaggagtaccccgataggatcatgaacacattctccgtggtcccctcaccaaaggtcagtgataccgtggtcgaaccgtacaacgcaaccctgagcgtgcatcagttggtggagaatactgatgagacatattgtatcgacaatgaggccctctacgatatctgttttcggactttaaagctgacaactcccacatacggcgacttaaatcacttggtaagtgcaacaatgtccggcgtaaccacctgtctgcgcttccctggacagctgaacgctgacctccggaagttagccgtgaatatggtcccctttcctcggttacacttttttatgccagggtttgcccctctgacctctcggggctcccagcaataccgtgctcttacagtcccagaattgacccagcaagtattcgatgcgaaaaatatgatggcagcctgtgacccccggcacgggcggtacttgaccgtggcggcggtctttcgcgggagaatgtccatgaaagaagtggatgagcaaatgctgaacgtgcagaacaagaattcgagctattttgtggagtggatccccaacaacgtcaaaacggctgtgtgcgacatcccaccgcgtggactgaaaatggccgttacattcattggcaattccaccgccatccaggagctgtttaagaggatctctgaacagtttacagcaatgttcaggagaaaagcattcttgcattggtataccggcgaagggatggacgagatggaattcaccgaggccgagtctaacatgaatgacttggtatctgaataccagcaataccaggatgcaaccgccgaagaggaggaggacttcggagaagaagccgaagaagaagcttag

SEQ ID NO: 210128 - DNA, 1281 bp, synthetic construct
  misc_feature 1..1281: note = Description of Artificial Sequence: Synthetic coding sequence
  source 1..1281: mol_type = other DNA
atgttctgggaggtgatcagcgacgagcacggcatcgaccccaccggaacttaccatggagactcagacctacagttagacaggataagtgtttattataatgaagccacaggaggcaaatatgttccccgcgcaattcttgtggacctggaaccaggcaccatggattccgtgagatctggtccttttgggcagattttcagaccagacaactttgtttttggtcagagcggcgcaggtaacaactgggctaaagggcactacactgaaggcgctgagttggtggactcagttctcgatgtggtgcgcaaagaggcggaatcttgcgactgcctgcagggttttcagctgacgcactccctcggaggggggactggatctgggatgggcactctgctgatcagcaaaataagggaggaatacccggatcgaatcatgaatacattctccgtcgtgcctagtcctaaggtgtctgatacggttgtggagccttacaacgccactctgtcagtgcaccaactggtcgagaatacggatgagacttactgcatcgacaatgaggccttgtatgatatatgtttccggactctgaagcttaccacccctacgtatggtgacttgaaccaccttgtctccgccaccatgtctggcgttacaacatgcctcagattccccggccaattgaatgctgacctgagaaagctcgccgtcaatatggtcccttttccccggctgcacttcttcatgccaggtttcgcgcctctgactagtcgtggctcccagcagtacagggctctaaccgtgcctgagcttacccagcaagtgtttgatgctaagaatatgatggccgcctgtgacccacgccacggaagatatcttactgtggcagccgtctttaggggccgaatgtctatgaaagaagtggacgaacaaatgttgaacgtgcagaataagaattccagctactttgtggagtggattcccaacaacgtcaagacggcagtgtgcgacatccctcccagaggcctgaagatggccgtgacctttatcggaaactctaccgcgatccaggagttattcaagagaatcagcgaacagtttactgctatgttcagacggaaagcttttttgcactggtacacaggggaagggatggacgagatggaattcacagaagctgagagcaacatgaatgacctagtcagcgagtatcagcagtatcaagacgccaccgcggaggaggaggaagactttggggaggaggctgaggaagaagcttag

SEQ ID NO: 210129 - DNA, 1119 bp, synthetic construct
  misc_feature 1..1119: note = Description of Artificial Sequence: Synthetic coding sequence
  source 1..1119: mol_type = other DNA
atggacagcgtgcggagcggccccttcggccagatcttccggcccgacaacttcgtttttggccagagcggtgctggaaacaattgggctaagggacattacaccgaaggagctgaattggtcgatagcgtcctggacgtcgtgcgtaaagaggcagagtcttgtgattgcctccagggctttcagctcacccactcattgggcggtggaactggcagcggtatgggcacactgttgatcagcaagatccgggaggagtaccccgataggataatgaatacctttagtgtggtgcccagccctaaagtgtccgatactgtagttgaaccctataacgcaacactcagtgtgcaccagctggtagagaacacagatgaaacatattgtattgataacgaagccctttacgatatctgttttcggacacttaaactcacaacgcccacttatggggatctcaaccacttagttagcgccactatgagcggcgttacaacatgtctgaggtttcccggccagttgaatgctgacctgaggaagcttgcagtcaatatggttcccttcccaaggctccacttctttatgccaggattcgcgcctctgacttccagagggagccagcaatatagggcgctgaccgtgcccgaactgacccagcaggtcttcgatgctaagaatatgatggctgcatgcgatccccgtcacggtcggtacctcacagtggccgccgtctttagggggaggatgtcaatgaaggaggttgatgagcagatgctcaacgtacagaacaagaactcaagctacttcgtagaatggataccaaataacgtcaaaacagccgtctgtgacattccccccaggggcttgaaaatggcagtaacattcataggcaacagcacagctattcaggagctcttcaaacgcatttccgagcagtttaccgccatgttccggcgcaaggcctttctccactggtatactggcgagggaatggacgagatggagttcactgaggcagagtccaatatgaacgacctggtcagtgaataccagcagtaccaggacgccacagcggaggaagaggaagatttcggagaggaagccgaggaggaggcctag

SEQ ID NO: 210130 - DNA, 1281 bp, synthetic construct
  misc_feature 1..1281: note = Description of Artificial Sequence: Synthetic coding sequence
  source 1..1281: mol_type = other DNA
atgttctgggaggtgatcagcgacgagcacggcatcgaccccaccggcacatatcatggcgattcggacctccagttggaccgcatttctgtttattataatgaggccacgggagggaagtacgttcctagagctatcttggtggacctcgagcctggaaccatggactctgtgcgctctggcccattcggacagatcttccggccagacaatttcgtttttggccagagtggcgcagggaacaattgggcaaaaggccattataccgaaggagccgagctggtagattccgtcttagacgtcgtgcggaaagaggctgaatcctgcgattgtctccagggatttcagcttactcactccttgggtggtgggactggcagcggcatgggtacactcctcatctctaagatccgcgaagagtatcctgatagaattatgaacacatttagcgtagtcccaagccctaaggtgtcagacactgtggtggagccctataacgctaccttgagcgtacatcagctggtggagaacacggatgaaacgtactgcattgataacgaggcactctacgatatctgcttccgaaccctgaaactcaccacccctacgtatggagacctgaaccatctggttagtgccacgatgtctggcgtgacaacctgtctgagattcccgggccaactcaacgcagacttgaggaagcttgccgtcaatatggtgcctttcccccgattgcacttcttcatgcccggatttgctccccttactagccggggctcccagcagtatcgcgctctgaccgtacctgagctgacgcagcaagtgtttgatgctaagaatatgatggcagcctgcgatccacgacacgggcgatacctgactgtcgctgcggtgtttcgcggtcggatgtccatgaaagaggtcgatgagcaaatgttaaatgtgcagaataagaatagcagctactttgtggagtggattccaaataatgtgaaaacggcagtttgcgacatccctcctcgaggccttaagatggccgtgacttttattggtaactccaccgctatacaggaattgtttaagcgaatatccgaacagtttacggctatgtttcgacgaaaggccttcctccactggtatactggggagggcatggatgagatggaattcactgaggcagagtcaaacatgaacgaccttgtatccgaataccagcaatatcaggatgccaccgcagaggaagaagaagactttggcgaggaggctgaggaggaagcttag

SEQ ID NO: 210131 - DNA, 1335 bp, synthetic construct
  misc_feature 1..1335: note = Description of Artificial Sequence: Synthetic coding sequence
  source 1..1335: mol_type = other DNA
atgcgggagatcgtgcacatccaggccggccagtgcggcaaccagatcggggcaaaattttgggaagtgatctctgacgaacatggcatcgatccgactggaacctatcatggggatagcgatctgcagctggatagaatcagtgtttattataatgaggccaccggtggcaagtacgtgcctcgagcaatcctcgtggacctggaacctgggactatggactctgtccgcagcgggccctttggccagattttcagacccgataactttgtatttgggcagtcgggggccgggaataattgggcaaagggacattataccgagggcgctgagttggtcgacagcgtgctcgatgtggtcaggaaggaggccgaatcttgcgactgtctacaaggattccagctgacccactcgctcggaggtggaaccgggagtggcatgggcactcttcttatctcgaaaattcgcgaagagtatcccgatcggatcatgaacacttttagcgtggtgccatctccaaaagtcagtgataccgtagtcgaaccatataacgccacactgagcgtgcaccaactggtggagaataccgatgagacatattgcatcgacaatgaggcactgtatgacatatgcttccgtacattgaaattgactacacccacttatggagatctgaaccacctggtatctgctacgatgagtggcgttacgacctgcctgcggttccccggtcagctcaacgctgatttgcggaaactggcggtaaacatggtgccatttccccgactgcactttttcatgcccggattcgccccgttgacctcaaggggctcccagcaatacagagccttaacggttcccgagctgacccagcaagtgttcgatgctaaaaatatgatggcggcctgtgacccacgtcatggacgctatcttacagttgccgctgtgtttcgcggacgcatgtcaatgaaagaggtggatgaacaaatgttgaatgtgcagaacaaaaatagcagctattttgttgagtggataccaaacaatgtgaagaccgcggtgtgcgacatcccacccagaggcctcaagatggccgtgaccttcatcgggaattccaccgccattcaagagcttttcaaaagaatctcagagcaattcacagccatgttccgtcgcaaagcatttctgcactggtacacaggcgagggtatggacgagatggagtttacagaggctgagtctaatatgaacgacctggtcagtgaataccaacagtatcaggacgctaccgccgaagaggaagaagacttcggggaagaagctgaagaagaggcttag

SEQ ID NO: 210132 - DNA, 1281 bp, synthetic construct
  misc_feature 1..1281: note = Description of Artificial Sequence: Synthetic coding sequence
  source 1..1281: mol_type = other DNA
atgttctgggaggtgatcagcgacgagcacggcatcgaccccaccggcacctatcacggcgatagcgacctgcaacttgatagaatcagtgtgtattacaacgaagccaccggggggaagtatgttcccagagctatcttggtggacctcgagccggggaccatggacagcgtaagatctgggccatttggccagatctttcgccccgacaatttcgtcttcggacaaagtggggcaggtaataattgggccaaaggtcattatactgaaggcgcagagttggtcgacagtgtcctggacgtggtccgaaaagaagccgagtcctgtgactgcctgcaggggtttcagctgactcacagccttggcggagggacgggaagcgggatgggtactctgttaatcagcaaaattcgcgaggagtaccccgatcggataatgaataccttctccgtagtgccttccccaaaagttagcgataccgtggtggagccttacaatgctacattatccgtacatcagctggtggaaaatacagatgagacatattgcattgataatgaggcactctacgacatctgctttcgcacactgaagctcacgactcccacctatggagaccttaaccatctggtttcagctacgatgagcggggtgaccacgtgtctgagatttcccggacagctcaatgccgacctgagaaaactcgcagtgaatatggtgccatttccgcgcctacatttctttatgcctggcttcgcgccgctgacttccaggggcagccagcagtaccgcgccctgacagtgccagaacttacacaacaggtgtttgatgccaagaacatgatggctgcgtgcgatccacgccacggtcgatacctcacagtcgctgctgtttttaggggacgcatgtccatgaaggaggttgacgagcagatgctgaatgtccaaaacaaaaattcctcttactttgttgagtggattcccaataatgttaagacagccgtgtgcgatattccacctcggggcttgaagatggccgttacctttatcggaaatagcacagctattcaggaactctttaagcgaattagtgaacaattcaccgccatgttccggcgcaaggctttcctgcactggtacacgggcgaggggatggatgagatggagttcacggaagctgagtccaatatgaatgatctggtctctgagtaccagcaataccaggatgccaccgccgaagaagaagaagacttcggtgaggaagctgaggaagaggcctag

SEQ ID NO: 210133 - DNA, 1119 bp, synthetic construct
  misc_feature 1..1119: note = Description of Artificial Sequence: Synthetic coding sequence
  source 1..1119: mol_type = other DNA
atggacagcgtgcggagcggccccttcggccagatcttccggcccgataactttgtgtttggtcagtcaggagccggtaataattgggctaaaggccattatactgagggcgccgaattagttgacagtgtgctggatgtagtcagaaaagaggcggagagctgcgattgtctgcaaggattccaactcacccattctctgggaggcggtacaggaagcgggatggggactctgctcattagtaagattcgcgaagaatatccagataggattatgaacacattttccgtggtcccttctcctaaagtgtcagataccgtagtcgaaccctataacgctacgttatccgtccaccagcttgtagaaaataccgatgagacttactgcatcgacaacgaagccctgtatgacatttgctttcgaactctgaaactgacaaccccgacgtatggcgatctcaatcacttggtctcggctactatgtccggagtgactacctgcttaagattccccggccagcttaacgctgatttacggaagttggcagtaaacatggtcccatttccaaggctgcatttcttcatgccgggcttcgccccactgaccagcaggggttctcagcagtacagggcactgactgtgcctgaattgacacaacaggttttcgacgcaaagaacatgatggccgcgtgcgacccaagacatggccgctacctgaccgtcgctgctgtgtttaggggtagaatgagcatgaaggaagtggatgaacagatgctgaacgtgcaaaacaaaaatagttcttacttcgtcgaatggattccgaataatgtgaaaaccgcagtgtgtgacattccaccacgcggactaaagatggcagtaacctttattggcaatagcaccgctattcaagagttattcaagagaatcagcgaacaattcactgcgatgttccgtaggaaagcctttctacattggtacactggggagggcatggacgaaatggaattcactgaggctgagagtaacatgaacgacctcgtgtctgagtatcagcaatatcaggatgcaaccgctgaggaagaggaagactttggtgaggaggccgaggaggaggcatag

SEQ ID NO: 210134 - DNA, 1335 bp, synthetic construct
  misc_feature 1..1335: note = Description of Artificial Sequence: Synthetic coding sequence
  source 1..1335: mol_type = other DNA
atgcgggagatcgtgcacatccaggccggccagtgcggcaaccagattggagccaaattctgggaggtgatttcagatgaacacggcattgatccaacagggacatatcatggggattccgaccttcaactggatcgcatttccgtctattataatgaagctaccggcggcaaatatgttcctagggccatcctggtcgacctggaacctggaaccatggactccgtcagaagcggccccttcggacagattttccggccggataattttgtgtttggccaatcaggcgccggaaataactgggcaaaaggtcattatacagagggggcggaactggtggattcagtcctggacgtggtccgtaaggaagctgaatcctgtgactgtctccaggggtttcaactcacccactcactcggaggtggcacagggtcagggatgggtacacttctgatctctaagatccgtgaagagtaccctgatcgaattatgaataccttttccgttgtcccatcccccaaggtgtccgacacagtcgttgagccatacaatgctaccctgtccgtacatcaactggtggagaataccgatgagacatattgtatcgataatgaagctctctatgatatctgttttcgtacgttgaaacttactaccccgacctacggtgacctgaaccacctagtctcggctacaatgtcaggagttacaacatgtttgaggtttccgggccaactcaacgctgacttgagaaaactcgctgtgaatatggtgccatttcccagactccacttcttcatgcctggattcgcaccattaacttctcgcggatcccaacagtatcgggcactcaccgtgcccgaacttactcagcaggtcttcgatgcgaaaaacatgatggccgcgtgcgatcctaggcatgggcggtatctgactgtggcagctgtcttccgcggccgcatgagcatgaaagaggtggacgagcagatgctaaacgtgcagaacaaaaactcgagctatttcgtggaatggatccctaataacgtgaagaccgcggtgtgtgacattcccccacgaggtctgaagatggccgttacatttatcggtaactctaccgccatccaagagctcttcaagaggatctcggaacagttcaccgcgatgttcaggcgtaaagccttcctgcattggtataccggcgagggcatggacgaaatggagtttaccgaagccgaatcaaacatgaatgaccttgtatctgagtaccagcagtaccaagatgctaccgccgaggaggaagaagattttggggaggaggctgaggaggaagcctag

SEQ ID NO: 210135 - DNA, 1335 bp, synthetic construct
  misc_feature 1..1335: note = Description of Artificial Sequence: Synthetic coding sequence
  source 1..1335: mol_type = other DNA
atgcgggagatcgtgcacatccaggccggccagtgcggcaaccagattggcgcaaagttctgggaggtgatctcagacgaacacggtatagacccgactgggacttatcacggagatagcgatctgcagctcgatagaattagcgtgtactataacgaggccacgggagggaaatacgtgccccgcgccatcctggttgacttagagcccggcacgatggattctgttcgctcaggaccatttggtcaaatcttcaggcctgacaattttgtgtttggtcagtcaggcgcaggcaacaactgggcgaagggtcactacactgagggtgcagaacttgtggatagcgtcctggatgtcgtgagaaaggaggcagaaagctgtgactgcctgcagggcttccagctgacacacagcttaggcggtgggaccggatccggtatgggcaccctcttaatatctaagattcgcgaggaatatcccgatagaattatgaacacgttcagtgtcgtgccctcacctaaggtttccgatactgtggttgagccttataatgctacgctgagcgtccatcagctagttgaaaacacagatgagacatattgtatcgataacgaggcgctgtacgatatttgtttccgcaccctgaagctcactacccccacatatggagacctgaaccacttggtttcagccactatgagcggtgtgacaacctgcctgcggttccctggacagctgaatgcggacttgcggaagctggcggtcaacatggtgccctttccacggctgcactttttcatgcctgggttcgctcccttaacttcgagagggagccagcagtacagagctctgaccgttcctgaattgacgcaacaggtttttgacgctaagaacatgatggctgcctgcgatccaaggcatggcagatacttaactgtggctgcagtcttccggggtcggatgtctatgaaagaggtggatgaacagatgctgaatgtccagaacaagaatagcagctactttgtggaatggatcccaaataacgtaaaaactgcagtgtgcgacattcctcccaggggactgaagatggcagttacgtttatcgggaatagcacagcgatccaagagctttttaagaggatttcagagcagtttactgcaatgtttcgtaggaaggcctttctgcactggtacacaggcgaaggaatggatgaaatggagttcactgaggctgagagtaacatgaacgatcttgtgagtgagtaccagcagtatcaagatgcaactgccgaggaagaggaggatttcggggaggaggccgaagaggaggcgtag

SEQ ID NO: 210136 - DNA, 1335 bp, synthetic construct
  misc_feature 1..1335: note = Description of Artificial Sequence: Synthetic coding sequence
  source 1..1335: mol_type = other DNA
atgcgggagatcgtgcacatccaggccggccagtgcggcaaccagatcggcgcgaagttttgggaggtgatctcggacgagcacggaattgaccctacaggaacctaccacggcgactcagatttgcagctcgatcgaatttctgtctactacaacgaagccaccgggggcaagtacgtaccaagggccatacttgtcgacctggagcccggaacgatggatagcgtccgctccggcccatttggacaaatatttcggcctgacaattttgtctttgggcagtctggagcaggcaataactgggctaaaggccattacaccgagggggcagaattggttgatagcgttctggacgtggttcggaaggaagccgagagctgcgactgtctgcagggatttcagctgacccactcattggggggcggcaccggatctggcatgggaacactgttaattagtaagattcgcgaagaataccccgaccggatcatgaataccttttcagtggttccttcccccaaagtgtcggacaccgtcgttgagccttacaacgctacactgtccgtacatcagctcgtggaaaacacagacgaaacttactgtatcgacaatgaggctctctacgatatctgcttcaggacgctgaagcttactacccccacatacggagacttgaatcacctggtcagtgcaacaatgtccggagtcacaacctgcctccggttcccgggccaactgaatgccgatctgcgcaagctggctgtaaatatggtccctttcccacggttgcatttcttcatgcccggcttcgcaccgctaacatctcgggggagccaacaatatcgtgcactcacggtacctgagctgactcagcaggtttttgatgcaaagaatatgatggctgcctgtgacccacgccacgggcgctatctgacagttgcagctgtgtttagaggccgcatgagcatgaaggaggtggacgagcaaatgttaaacgtgcagaacaagaactcatcctactttgttgaatggattccaaacaacgtcaagacagcagtctgcgatatccctccaaggggcctgaagatggccgtcacgttcatagggaatagtaccgctattcaggagttattcaagaggatatccgaacaattcacagctatgtttaggagaaaggcctttctccactggtacactggggaagggatggatgagatggaatttacggaagccgaaagcaatatgaacgacctggtcagcgagtatcagcaataccaggatgccactgctgaggaggaggaagattttggcgaagaggccgaggaggaagcgtag

SEQ ID NO: 210137 - DNA, 1062 bp, synthetic construct
  misc_feature 1..1062: note = Description of Artificial Sequence: Synthetic coding sequence
  source 1..1062: mol_type = other DNA
atgcgggagatcgtgcacatccaggccggccagtgcggcaaccagatcggggccaagttctgggaggttattagcgatgagcacggaatcgaccctactgggacttatcacggggacagcgacctgcagctgacccacagcctcggcggtggcaccggttcaggcatggggacactcctgatcagtaagatccgtgaggaataccccgatagaattatgaatacattttcagttgtaccaagtcctaaggtctcagacacggtggtagaaccatataacgccactcttagtgtacatcaactcgttgaaaatacagacgaaacgtattgcatcgacaatgaggcactctacgacatttgttttaggacacttaaactcactacacccacttacggagatctcaatcatttggtttcagcaaccatgagcggagtgacgacatgcctgaggtttccgggacagttaaatgccgatcttcggaagttagccgtgaacatggtacctttccctcgattacatttcttcatgcctgggtttgctccccttacatctcgtgggagtcagcagtacagggccctgaccgtgcctgaattgactcagcaggtcttcgacgcaaagaacatgatggctgcctgcgaccctcggcatggccggtacctaaccgtcgccgccgtttttagaggtcgcatgtccatgaaggaggtggatgaacaaatgctcaacgtgcaaaacaagaatagttcctacttcgttgaatggataccaaacaatgtgaagacagccgtctgcgatattcccccgagggggttgaaaatggcggttacctttattggcaatagcacagcaatacaggagctttttaagcggatctctgagcagtttactgccatgttccggagaaaagctttccttcattggtacacgggggagggcatggatgaaatggagtttaccgaagcagaatccaacatgaacgacctcgtttcagagtatcagcagtaccaggatgccacagcagaggaagaggaggatttcggagaggaggctgaagaagaagcttag

SEQ ID NO: 210138 - DNA, 1281 bp, synthetic construct
  misc_feature 1..1281: note = Description of Artificial Sequence: Synthetic coding sequence
  source 1..1281: mol_type = other DNA
atgttctgggaggtgatcagcgacgagcacggcatcgaccccaccgggacctaccatggcgattctgacctgcagctagatcggatctccgtgtactacaacgaagccaccggcggaaaatatgtacccagggccatactggttgatctggagcccgggaccatggacagcgtcaggagcggacctttcggtcagatcttcagaccagacaattttgtttttggtcagagcggggctggcaataattgggctaagggccactatactgagggtgcggagttggtagattctgtgctggatgtggtccgtaaggaggcagagtcctgtgactgccttcaaggatttcagctgactcattcccttgggggggggacaggctccggcatgggcacactgctgatcagcaagatcagagaggaatatccggacaggattatgaataccttttctgtggtcccctcccccaaagtttcagacaccgtcgtggaaccctataatgcgaccttatctgtacaccagctcgtggaaaacactgatgagacatattgtatcgataatgaggccctgtatgacatctgctttcggacactcaaactgaccacccccacatacggggacctgaaccatcttgtgagcgccaccatgtctggcgtcacgacatgccttagattccccggacagctgaacgccgatttacgtaagctcgctgtgaatatggtgccattccctcggttacactttttcatgccaggcttcgcaccactgacctcacgagggtcacagcagtaccgggccttaactgttcccgaacttacacaacaggtattcgatgcgaagaacatgatggcagcctgcgacccacggcacggacgttatttgaccgtggcagctgtctttcggggtcggatgtccatgaaggaggtagatgaacaaatgcttaacgttcagaataagaactcttcctactttgtggagtggattccgaacaacgtgaagactgcagtatgcgacattcctcctcggggtcttaaaatggccgtgacctttataggaaactctaccgccatccaggaactgtttaaaaggatcagtgaacaatttactgcgatgtttagaaggaaggctttcctgcattggtacaccggggagggcatggatgaaatggaattcaccgaggctgaaagcaatatgaatgacctggtgagcgagtaccaacagtatcaggacgccactgctgaggaggaagaggatttcggcgaagaagccgaagaggaagcatag

SEQ ID NO: 210139 - DNA, 1119 bp, synthetic construct
  misc_feature 1..1119: note = Description of Artificial Sequence: Synthetic coding sequence
  source 1..1119: mol_type = other DNA
atggacagcgtgcggagcggccccttcggccagatcttccggcccgacaacttcgtgttcggtcagtcaggagcaggtaataactgggcaaagggtcattatacagaaggagccgagctagtggatagtgtgctcgacgtagtaaggaaagaggctgagtcctgcgattgcctgcagggcttccagctcactcatagtctgggtggagggaccgggtcgggaatgggtacgctactgatttccaagatccgtgaggagtatcccgatcgaataatgaacacattcagcgttgttccatcccctaaggtttcggataccgtcgtggaaccgtataatgcgacgctgtcggtgcaccagctagtcgaaaacacagatgaaacatactgtatcgacaacgaggctttatacgacatatgcttcagaacactgaaattgacaaccccaacctatggggacctcaaccatctggtgtctgcaactatgtctggtgtgactacctgcctgagatttccaggacagctgaacgcagatcttaggaagctggcagtgaacatggtccctttcccacggctgcatttctttatgcctggattcgcacctttaacgagtcgaggctcacaacagtatagggccctgaccgtgccagaattgacccaacaggtgttcgacgcaaaaaatatgatggcagcctgcgaccccagacacggccgctatctgaccgtggcagccgtttttaggggccgaatgtcaatgaaagaggtggatgagcagatgctgaatgtccagaataagaactcctcatattttgtcgagtggatcccaaacaacgtgaaaacagcagtctgtgatatccctccaagaggcctgaaaatggccgtcacatttatcgggaacagtaccgctattcaggagctgtttaagcggatctcagaacagtttaccgcgatgtttcggagaaaggcatttctgcattggtacacgggcgaggggatggatgagatggagttcacggaggctgaatcaaacatgaacgacctcgtgtcagagtatcagcagtaccaggacgctaccgccgaggaagaagaagacttcggagaggaggctgaagaggaggcatag

SEQ ID NO: 210140 - DNA, 1281 bp, synthetic construct
  misc_feature 1..1281: note = Description of Artificial Sequence: Synthetic coding sequence
  source 1..1281: mol_type = other DNA
atgttctgggaggtgatcagcgacgagcacggcatcgaccccaccggcacttatcatggggactctgatctccagttggacaggattagcgtgtattacaacgaggccaccggcggcaagtacgtgccacgggctatcctcgtcgatctggaacccggaactatggatagcgtccggtcgggacctttcggccagatatttagaccggacaatttcgtgttcgggcagtctggagccggaaacaactgggcaaaaggccattacaccgagggagcagagttggtcgactctgtgttagacgtcgtcagaaaggaggccgagtcttgtgattgtcttcagggtttccagctaactcatagcctcggtggaggcactggtagcggcatgggcaccctgctcatctctaaaattcgtgaagagtatcctgacagaatcatgaataccttttcagttgtgccaagcccaaaggtatctgatactgtggtggaaccttataacgctacactatccgtacatcagctggtggagaacacagatgagacgtattgcatcgataacgaggctctgtacgacatctgtttcaggactctaaaactgactacccccacctacggggacctgaaccacttagtctctgccactatgtccggtgttactacatgtctgcgatttcctgggcagctgaacgctgacctgcgcaagctcgcagtgaacatggtaccatttcctagattgcactttttcatgcccggcttcgcacctctgacctccagaggctcacagcagtaccgtgcactcacggttcccgagctcacccagcaggtgtttgatgctaagaatatgatggcggcgtgtgacccacgacacgggagatatctcaccgtcgccgctgtattccgcgggaggatgtctatgaaagaagtggacgagcagatgctgaatgttcagaataaaaactcctcatacttcgtggagtggatccccaacaatgttaagaccgcagtctgcgacattccaccacgaggcctcaaaatggcagttaccttcataggaaattccaccgcaatccaggagctgttcaaacggatcagcgagcagtttaccgccatgtttcgtaggaaggcattccttcattggtatactggagagggcatggacgagatggagtttaccgaggccgagtccaatatgaacgacctggtctctgagtaccagcagtaccaggacgcaacagccgaggaggaagaagacttcggtgaagaagcagaggaggaggcatag

SEQ ID NO: 210141 - DNA, 1281 bp, synthetic construct
  misc_feature 1..1281: note = Description of Artificial Sequence: Synthetic coding sequence
  source 1..1281: mol_type = other DNA
atgttctgggaggtgatcagcgacgagcacggcatcgaccccaccggaacctatcatggggactccgatctgcagcttgatagaatttcagtatactataacgaggcgaccgggggcaaatacgtacctcgtgcaattttggtggacttagaaccgggcacaatggactccgtcaggtctggccccttcggccaaattttccgccccgacaactttgtcttcggccagtcaggagccggaaacaactgggctaaaggccactatacagagggggcggaacttgttgactcagtcctcgacgtagtgagaaaagaagccgaatcttgtgattgcctccaaggtttccaactgactcactcactcggcggcggcaccgggtctggaatgggaacgctgctcatttctaaaatccgtgaggagtaccccgaccggattatgaacaccttcagtgtcgtgccgtctcctaaagtgagcgacaccgtggtggagccctataacgcaacgctctccgtgcatcagctggtggagaacactgacgagacctactgcatcgacaacgaggcactctatgatatttgcttccggacgctgaaactgacgacgcctacctacggggacctcaaccacctggtgtccgcaactatgagtggggtgactacttgtctgcggtttccaggtcaacttaacgccgatctgcggaaattggcggtcaacatggtgcccttcccgcggttgcatttttttatgcctggatttgcacctctgacgtcgagagggtctcagcaatacagggcactcacggtcccggagctgacgcaacaggtgtttgatgctaagaatatgatggccgcctgcgacccccggcatggaagatatttgaccgtcgctgcagtattcaggggtagaatgtcaatgaaagaagttgacgagcagatgttgaacgtccaaaataaaaactctagctactttgttgagtggatccctaacaacgtcaagacagccgtgtgtgacattcctccgcgggggcttaagatggccgtcaccttcattggaaattcaaccgcaattcaggagctgtttaagcgcatttcagagcaatttacagcaatgtttagacgaaaagcgttccttcactggtatacaggagagggcatggacgaaatggagtttacagaggctgagtccaacatgaacgatctggtgtccgagtatcagcagtatcaggatgccaccgctgaggaggaggaagacttcggagaagaggcagaggaggaagcatag

SEQ ID NO: 210142 - DNA, 1119 bp, synthetic construct
  misc_feature 1..1119: note = Description of Artificial Sequence: Synthetic coding sequence
  source 1..1119: mol_type = other DNA
atggacagcgtgcggagcggccccttcggccagatcttccggcccgacaacttcgtgtttggccaatcaggcgccggcaataattgggcgaagggacactacacagagggcgccgagttggtggattctgtgctggatgttgtgaggaaggaagccgaatcttgtgactgcctgcagggattccaattgacacacagcctggggggtgggacagggagtggtatgggcacccttctgatcagcaagattagagaggagtatcccgacagaatcatgaatacattttcagtggttccttcacccaaggtaagcgacaccgtggttgagccttataacgcaaccttgagcgtgcaccagctggtggagaatacggatgaaacatattgtatcgataacgaggcactctacgacatctgctttcgaaccttgaaactcaccaccccaacatacggcgatctgaatcacttggtcagcgccacgatgtccggcgtgacaacatgcctccgttttccaggccagcttaacgcagatctgaggaagcttgctgtaaatatggtgcctttcccaaggttacacttttttatgccgggcttcgcaccactcacgagccgggggtctcagcagtaccgggccctgacggtgcccgaactaacacagcaagttttcgacgctaagaatatgatggctgcctgtgatccacgtcacggacgatatctgacagtggccgctgtctttagggggaggatgtccatgaaagaagtggacgagcaaatgctgaacgtccagaataagaactcctcctatttcgtagagtggatcccaaacaacgtcaagaccgccgtatgtgatatacccccacggggcctgaaaatggcagtgacctttatcgggaacagcaccgccattcaggagctatttaaaagaataagcgaacagtttactgcgatgtttcgtaggaaagctttcctccattggtacaccggggaaggaatggatgaaatggagttcacagaagcagaatctaacatgaatgatttagtatcagaataccagcaatatcaggacgccacagcagaagaagaggaggactttggggaggaagctgaggaggaggcttag

SEQ ID NO: 210143 - DNA, 1335 bp, synthetic construct
  misc_feature 1..1335: note = Description of Artificial Sequence: Synthetic coding sequence
  source 1..1335: mol_type = other DNA
atgcgggagatcgtgcacatccaggccggccagtgcggcaaccagattggggccaagttttgggaggtaatcagcgatgaacatgggattgatccgaccggcacctaccacggtgatagtgacctccaacttgacaggatctcagtttattataatgaggccaccggtggtaagtatgtgccaagagctatcctcgttgacctagagcccggtacaatggactccgtcaggtcagggccttttggtcagatctttagaccagacaacttcgttttcggccagtctggggcaggcaataactgggccaagggccactatactgaaggagccgagttggtggacagtgtgctggacgtcgttcgcaaggaagctgagtcgtgtgactgtcttcaggggttccagctgactcactccctcgggggcggcaccggatcaggcatggggaccctcctcatctcaaagattagggaagaatatcccgaccgaattatgaacacctttagcgtggtgccctcccccaaagttagcgacaccgtggttgagccttacaatgccacactgtctgtgcaccagctcgtggagaacacagatgagacctactgtattgacaatgaagccctctacgatatctgtttcagaacactgaaactgaccacccctacttatggagaccttaaccacctcgtttccgccaccatgtcaggtgttacaacatgtttgaggttcccagggcagctcaacgcggaccttaggaaactggcagttaatatggtgccgtttcccaggctgcactttttcatgcccgggttcgctcccctgaccagtcggggtagccagcaataccgggcattaactgtgcctgaattgacgcagcaagtcttcgacgccaagaatatgatggctgcctgcgatcccaggcacgggcggtaccttacggtggcggccgtatttaggggtagaatgtctatgaaggaagtggacgagcagatgttgaatgtccaaaataaaaacagctcctacttcgtcgaatggattcctaataacgtgaaaactgcagtctgcgacatcccccctaggggcctcaaaatggccgtgacattcatcggtaattctacagcaattcaggaattgtttaaaaggatatctgaacagttcaccgcaatgttccggcggaaagcattcctgcactggtataccggggagggaatggacgagatggagtttacagaggcagagagtaacatgaatgatctggtaagtgaataccagcagtaccaggacgctaccgcagaggaagaagaagactttggcgaagaagcagaagaggaggcctag

SEQ ID NO: 210144 - DNA, 732 bp, synthetic construct
  misc_feature 1..732: note = Description of Artificial Sequence: Synthetic coding sequence
  source 1..732: mol_type = other DNA
atgcgggagatcgtgcacatccaggccggccagtgcggcaaccagattggcgctaagttctgggaagtgatctcagatgagcatgggattgaccccactgggacgtaccacggtgacagcgacttacagctggatcgcatatctgtgtactacaacgaagctacaggaggcaagtacgtgcctagggcaatcttggtggatctggagccaggcacaatggactctgtcagaagcggtcctttcggtcagatctttagacctgataattttgtgttcggccagagcggggcgggcaacaattgggctaaaggacactacaccgagggtgctgaacttgttgattccgttctcgatgtggttagaaaggaagaggttgatgagcagatgctgaacgtgcagaataaaaatagcagctacttcgtggaatggatacctaacaacgtgaaaaccgctgtctgcgatatccctcctcgggggttgaaaatggctgtgacatttatagggaactctacagccattcaggagctctttaagaggatctcggaacaattcacggctatgttccgacggaaggcatttctccattggtacactggagagggtatggatgaaatggaattcaccgaggctgagtcaaacatgaatgacctggtcagcgagtatcagcaataccaagacgcaaccgcagaagaggaagaagattttggagaagaagccgaggaggaggcgtag

SEQ ID NO: 210145 - DNA, 1119 bp, synthetic construct
  misc_feature 1..1119: note = Description of Artificial Sequence: Synthetic coding sequence
  source 1..1119: mol_type = other DNA
atggacagcgtgcggagcggccccttcggccagatcttccggcccgataattttgtttttgggcagagcggagcagggaataattgggctaaaggacattataccgaaggcgcagaacttgtggactccgtgcttgacgtggtgcgaaaggaagccgagtcttgcgactgtttacagggattccagcttacccactcattggggggaggaactggcagcggaatgggaactctattgattagtaagattagggaggagtaccctgacaggataatgaatacgttttccgtggtgcccagccctaaagtgtccgacactgttgtggagccctacaatgctacattatccgtgcaccagttagtagagaacacagacgagacttattgtatagacaatgaggcgctatatgacatttgttttaggacacttaagctgacaaccccgacctacggtgacctgaatcatttggtgtctgcaacgatgtcaggagtaacaacgtgtttgagattccctggccagctcaacgccgaccttcgcaagctagccgtgaatatggtgccttttcctcggcttcactttttcatgcctggattcgcccctctgacctccaggggtagccagcagtatcgagcactgacagtgcccgagctgactcagcaggtcttcgacgcaaagaatatgatggctgcatgtgaccccagacacggccggtacctgacagtagctgcggtgttccgcggcagaatgtcaatgaaagaggttgacgaacagatgctgaacgtacagaacaaaaactcttcttactttgttgagtggataccaaacaatgttaagacggcggtgtgcgacatcccacccaggggcctcaaaatggcagttacctttattggcaactctacagccatccaggagctatttaaaaggatcagcgagcagtttaccgctatgttccgccggaaggccttccttcattggtacactggagaggggatggacgaaatggagttcacggaggctgagtctaacatgaatgatctggtgtctgagtaccagcaatatcaggatgccaccgcagaggaagaggaggacttcggggaggaggccgaggaggaagcgtag

SEQ ID NO: 210146 - DNA, 1119 bp, synthetic construct
  misc_feature 1..1119: note = Description of Artificial Sequence: Synthetic coding sequence
  source 1..1119: mol_type = other DNA
atggacagcgtgcggagcggccccttcggccagatcttccggcccgataactttgtgttcgggcagtctggggccggtaacaactgggcaaaaggtcactacaccgagggagccgaactcgttgattccgttctcgacgtggtgaggaaagaagccgaaagctgcgactgcctccaggggttccagcttacccattccttgggaggaggaaccggaagcgggatgggcaccctgttaataagcaaaattcgggaagagtacccagacagaatcatgaacaccttcagcgtcgtcccctctcctaaagtcagtgatactgttgtggagccatacaacgctactttgtccgtgcatcagctagttgaaaatacagatgaaacatattgcatcgacaatgaagcgttatatgatatatgcttcaggacgctgaagcttaccaccccaacctatggtgacttgaaccacttagtgtccgctaccatgagcggggtcacaacgtgcctgagatttcctggccagctgaatgccgacctgaggaagctggccgtcaacatggtccctttccccagactgcattttttcatgcccggcttcgctcctctgaccagccgcgggtcccagcaatatagagccctgacagttccggagctgacgcagcaggtatttgatgccaagaatatgatggccgcttgcgatccgagacatggtagatacctcaccgtggccgctgtttttaggggtcgcatgagcatgaaggaagtggatgagcagatgctgaatgtgcagaacaaaaactcctcctattttgtagagtggatcccgaacaatgtgaaaacagctgtttgcgacatccccccccggggtctgaagatggccgtaacgtttatcggaaactccaccgctatccaggaactcttcaaacgcatttctgaacagttcacggctatgtttcgacggaaagcctttctccattggtacacgggcgagggtatggacgagatggaatttactgaagcagagtctaatatgaacgatttggtgagcgaatatcagcagtaccaggatgctacagcagaggaggaggaagattttggcgaagaggctgaggaggaagcttag

SEQ ID NO: 210147 - DNA, 1335 bp, synthetic construct
  misc_feature 1..1335: note = Description of Artificial Sequence: Synthetic coding sequence
  source 1..1335: mol_type = other DNA
atgcgggagatcgtgcacatccaggccggccagtgcggcaaccagattggagccaagttctgggaagtgatcagcgacgagcacgggatcgaccccacgggcacctatcatggggattcagatctgcagctcgacaggatctccgtttattacaacgaagccacaggaggtaagtatgttccccgagctatacttgtggacctggaacccgggacaatggattccgtccgttcgggtccgttcggccagatctttagaccagacaacttcgtatttggccagtccggcgccggcaataactgggccaaggggcactacacagaaggcgcggaactggtggactcagtgctggatgtggtgcgcaaggaggcggagtcttgcgattgccttcagggcttccaactcacccactctcttggggggggtacaggatcgggaatgggcacactgttgattagtaaaatccgggaagagtacccggaccgaatcatgaacaccttttcagtagttccttccccaaaggtctccgacaccgtggtggaaccctataacgccaccctctctgtgcaccagcttgtcgaaaataccgacgagacctactgtattgacaatgaagctctctacgatatatgcttccgaaccctcaaactcactacccctacctacggtgacttaaatcacctcgtatccgcaaccatgtcgggcgttaccacctgtttacggttcccaggtcagctaaacgctgatttacggaagctggcagtaaatatggtgcctttccccaggttacacttctttatgcccgggttcgcccccctgacatcccgcggatctcaacaatatagggccctgacggtgcctgagctgacccagcaggtcttcgatgcaaaaaatatgatggctgcttgtgatcctaggcacgggcgatatctcacagttgcggctgtatttcgtggacggatgagcatgaaagaagtggacgaacagatgttgaatgtgcagaataaaaacagctcgtactttgttgagtggattcccaataacgttaagacagccgtctgtgatataccaccgcgcggtctaaaaatggccgttacatttatcgggaatagcaccgccatccaggagttgttcaaaagaatatctgagcagtttacagccatgttcagacggaaagcattcttgcattggtacaccggtgagggtatggacgagatggagtttaccgaggctgaatctaatatgaacgacttggtttcagagtaccaacagtatcaggatgcaacagctgaggaagaggaagactttggcgaggaggcggaagaggaagcatag

SEQ ID NO: 210148 - DNA, 1119 bp, synthetic construct
  misc_feature 1..1119: note = Description of Artificial Sequence: Synthetic coding sequence
  source 1..1119: mol_type = other DNA
atggacagcgtgcggagcggccccttcggccagatcttccggcccgacaacttcgtctttggccaatctggtgccggaaataactgggctaagggtcactatactgagggagcggaattagtcgactcagtgctggatgtggtgcggaaggaagccgagtcttgtgattgcctccagggatttcagctaacccatagtctcggaggaggcactggatcagggatgggaaccctcctgatcagcaaaattcgcgaggagtatcccgaccggatcatgaacactttcagcgtcgtgccaagccccaaggtgtccgataccgttgttgaaccatataacgccaccttaagcgtacatcagctggtcgagaataccgatgaaacctactgtatcgataacgaagctctgtacgatatttgtttccggacgttgaagctaaccaccccgacatatggcgatctcaaccacctagtgagtgcgaccatgtcaggcgtcaccacctgcttacgttttcccggacagctgaacgcggacctgagaaaacttgcagtgaacatggttcccttcccaagattgcacttcttcatgcctggtttcgcccccttgacttcacgggggtcccagcaataccgggcattgaccgtgcctgagctaactcagcaggtgttcgacgccaaaaatatgatggctgcctgcgacccacgtcacggacgctatctgaccgtggcagcggtgtttagaggaagaatgtcgatgaaggaggttgacgagcagatgttaaacgtgcagaacaagaactcgtcatacttcgtggagtggatccccaacaacgtgaagacagctgtttgcgatataccacctcgggggttaaagatggccgtcaccttcatcggaaatagcactgccattcaggagttattcaagagaatcagcgagcagttcaccgccatgttccgccgcaaagccttcctgcactggtataccggcgagggcatggatgaaatggagttcacggaagcagagtcgaacatgaacgatctcgtgagtgaatatcaacagtaccaggatgctactgctgaagaagaggaagactttggcgaggaggctgaggaggaggcctag

SEQ ID NO: 210149 - DNA, 1119 bp, synthetic construct
  misc_feature 1..1119: note = Description of Artificial Sequence: Synthetic coding sequence
  source 1..1119: mol_type = other DNA
atggacagcgtgcggagcggccccttcggccagatcttccggcccgacaatttcgtgtttggccagtcgggcgctgggaataattgggcaaaagggcactatacagagggagctgaacttgtcgattccgtgctcgacgtcgtgagaaaagaggccgagagctgtgattgcctgcagggtttccagcttacccacagtctgggaggagggaccggatctggtatgggtactctgttaatttctaaaatcagggaggagtatcctgacaggattatgaataccttttctgttgttccgtccccaaaggtaagcgataccgtggtagagccttacaatgcaactctttcggtccaccaactcgttgagaatacagacgagacatactgcatcgataatgaggctctatatgacatttgctttcggactttgaagctgactacgcctacatatggcgacttgaatcaccttgtgtctgctacaatgtctggggtgacaacctgcctgagatttcctggacagttgaatgccgaccttaggaaactggctgttaacatggtgccattccctcgcttgcatttcttcatgcctggattcgcccctctgacttcccgagggtctcaacagtacagggctttgacagtgccagaattgacacagcaggtgttcgacgccaaaaacatgatggccgcatgtgacccccggcatggcaggtatctgacagtggccgcagtctttaggggtagaatgtctatgaaggaagtggatgagcagatgctgaacgtccagaacaaaaactcctcctacttcgtggagtggattccaaataacgtgaaaacagccgtgtgcgatatccctccccgcggcctgaagatggcagtgactttcatcgggaacagtaccgccatccaggagctctttaagagaatttcagagcaatttacagccatgtttcgtcgaaaagccttcctgcactggtataccggggaaggcatggatgaaatggagtttactgaggctgagtccaacatgaacgatctggtctccgaatatcaacagtaccaggatgccaccgcggaagaggaggaagacttcggcgaagaggcagaagaagaagcatag

SEQ ID NO: 210150 - DNA, 1119 bp, synthetic construct
  misc_feature 1..1119: note = Description of Artificial Sequence: Synthetic coding sequence
  source 1..1119: mol_type = other DNA
atggacagcgtgcggagcggccccttcggccagatcttccggcccgacaacttcgtctttggtcaatccggcgcaggaaataactgggccaaaggacactataccgaaggagcagagctcgtagacagcgtgctggacgtcgttcggaaggaagccgagtcttgtgattgcctgcagggctttcagctcacccatagccttggcggcggtacagggagcggcatgggtaccctgctaatctccaaaatacgggaggagtatcccgacaggatcatgaatacctttagtgtcgtgccaagccccaaggtatctgacacagtggtagaaccctacaatgcaactctttccgtgcaccagctggtggaaaacacggacgagacctattgtatcgacaacgaagcactgtacgatatctgttttaggactctcaagctcacaacgccaacttatggcgacctgaaccacctggtgagcgccactatgtccggcgtgacgacctgtctcagatttccgggccagctcaacgcggacttgagaaagctcgccgtaaatatggttccatttcctaggctgcacttcttcatgcctgggttcgcgccactcacttcacgcggctctcagcaataccgggcacttacagtcccagagctgactcagcaagtctttgatgcgaaaaacatgatggcggcctgtgatccccggcacgggcgatatctcaccgtggccgcggtctttagaggccgaatgagtatgaaagaggtcgacgagcagatgcttaacgtgcagaacaagaactcctcttatttcgtagagtggatccccaataatgtgaagactgccgtgtgtgacatcccaccgcgaggattaaagatggctgtgacatttatcgggaattctacagctatacaggaactgtttaaacgcatttccgagcaattcaccgccatgtttcgacggaaagctttccttcattggtatactggagaaggcatggacgagatggagtttacggaagctgagtcaaatatgaacgatctcgttagtgaatatcaacagtatcaggatgcaaccgccgaggaggaggaggattttggggaggaggctgaagaggaggcctag

SEQ ID NO: 210151 - DNA, 1119 bp, synthetic construct
  misc_feature 1..1119: note = Description of Artificial Sequence: Synthetic coding sequence
  source 1..1119: mol_type = other DNA
atggacagcgtgcggagcggccccttcggccagatcttccggcccgacaacttcgtctttgggcagtctggcgcagggaacaattgggcaaagggtcattacacagagggggctgaactggttgactcggtactagacgtagtgcggaaagaggcagagagctgcgactgcctgcagggatttcagctcacacacagccttggggggggaactggctccggcatggggacactcctgataagcaagatccgtgaagaatacccagatagaatcatgaacaccttcagcgtggtcccgagcccaaaggtgagcgacaccgtggtggaaccatataatgcgaccctgagcgtgcatcaactcgtagaaaacaccgacgaaacatactgtattgacaacgaagcattgtatgatatctgttttaggactctcaagctcacaacccctacatatggggatctcaaccatctggtatcagccactatgtctggggtgacgacttgcctccggttccccggacagttgaacgccgacctgcggaaactggcagtcaacatggtgccttttccacggcttcacttttttatgcccgggtttgccccgctcacttctcgcggtagccagcaatatagggccctgaccgtgcctgagcttactcagcaagtcttcgacgccaagaacatgatggctgcatgcgatccccgacatggtcgatacctgactgttgccgcagtgtttaggggtcggatgtccatgaaggaggtggatgagcagatgttgaacgtccagaacaagaatagcagctactttgtggagtggattcccaataacgtcaagactgctgtttgcgacatccctccccgtgggctgaaaatggccgttaccttcatcggaaactccacagcaattcaagagctttttaaaaggataagcgagcaattcactgcgatgttccgccgcaaagcctttctccattggtacacaggcgaggggatggatgaaatggagttcacagaagcagaaagcaatatgaatgacttggtatcggagtatcaacagtatcaagacgccacagctgaagaggaggaagattttggtgaggaggcagaagaggaagcatag

SEQ ID NO: 210152 - DNA, 1119 bp, synthetic construct
  misc_feature 1..1119: note = Description of Artificial Sequence: Synthetic coding sequence
  source 1..1119: mol_type = other DNA
atggacagcgtgcggagcggccccttcggccagatcttccggcccgataacttcgtgttcggacagtcaggcgcagggaacaattgggccaagggtcactataccgaaggggccgaattggtggacagtgtcctggatgtggtccgcaaggaggcagagtcttgcgattgccttcaaggtttccagctgacacactcactaggaggaggcacaggaagcggcatggggaccctacttatatccaagatccgggaggagtatcctgaccggattatgaatacattcagcgtggtcccatcacctaaggtcagcgatacagtagtcgaaccctataacgccacactcagtgtccatcagctcgtcgaaaacacggatgagacctactgtattgataacgaggcactctatgatatatgcttccggaccctgaaactgacgacccccacctatggcgatctcaaccacctggtaagtgccacaatgtctggagtgactacatgcctccggtttcccgggcagctgaatgctgatcttcggaagctggctgttaacatggtacctttccccaggctgcacttctttatgcccggctttgcgcccctcacatctcggggatctcagcagtacagggcattgactgttccggagctgacccaacaggtctttgatgccaagaatatgatggctgcctgcgatccaagacacggccgctatctgaccgtcgccgccgtctttagaggtcggatgtccatgaaggaagtagatgagcagatgctaaatgtgcagaataagaactccagctacttcgtcgaatggattcctaacaatgttaaaactgcggtgtgcgatatccctcctagggggttgaagatggcggtcaccttcatcggaaactcaactgctatacaggagcttttcaagcgaattagtgagcagttcactgccatgtttaggaggaaggcatttctgcactggtacacaggtgagggaatggatgaaatggagttcacagaagctgaatccaacatgaacgatttggttagcgagtaccagcagtaccaggatgcaaccgcagaggaggaggaggactttggcgaagaggctgaagaagaggcgtag

SEQ ID NO: 210153 - DNA, 1119 bp, synthetic construct
  misc_feature 1..1119: note = Description of Artificial Sequence: Synthetic coding sequence
  source 1..1119: mol_type = other DNA
atggacagcgtgcggagcggccccttcggccagatcttccggcccgataactttgttttcgggcagagtggagctggcaacaattgggcaaaaggccactacactgaaggcgccgaactggtggactcagttctggacgtggtccgaaaagaggccgagtcatgtgattgcctacagggttttcagctgacacattctctggggggcggtaccggtagcggcatggggacacttctcatttctaagattagagaggaatatccagataggattatgaataccttctccgtcgtgccgagccccaaggtctcagacaccgttgtcgagccttacaatgcaacgctgtccgtgcatcagctcgttgaaaacacagatgagacctactgcatcgataacgaagcgctgtacgacatctgtttccggacgttgaagctgaccacccctacctacggcgatctcaatcacctggtgagcgccaccatgtctggcgtgactacatgcctaagatttcctggccagcttaacgcagaccttcgtaagcttgccgtcaatatggtgccattcccccgccttcacttcttcatgccggggtttgcccccctgacatccagagggtcacaacagtaccgcgcattgacggtcccagaacttacccagcaggtgttcgacgccaaaaatatgatggctgcttgcgacccccgccatggccggtatctgaccgtcgcagctgtgttccggggacgcatgtctatgaaggaggtggacgagcaaatgctgaatgtacagaacaaaaattcttcgtacttcgtggagtggattccaaacaacgtcaagaccgctgtgtgtgacattccaccgagaggtctgaaaatggctgttacctttatcgggaacagcaccgcaatccaggaactgttcaaaagaatcagcgagcagttcacagcgatgtttagacgtaaagctttcctgcattggtacaccggcgaaggcatggacgaaatggaatttaccgaggcagagtccaatatgaacgaccttgtctccgagtaccagcagtaccaggacgctaccgctgaggaggaagaggactttggggaggaagctgaggaggaagcatag

SEQ ID NO: 210154 - DNA, 624 bp, synthetic construct
  misc_feature 1..624: note = Description of Artificial Sequence: Synthetic coding sequence
  source 1..624: mol_type = other DNA
atgggcaccctgctgatcagcaagatccgggaggagtaccccgacaggatcatgaacacattctcagtcgtgccaagtccgaaggtgagtgacactgtggtcgagccatacaacgcaacattgtctgtgcaccagctcgtcgagaataccgatgaaacgtactgcatcgataatgaggccctctatgatatttgttttcggacccttaaactgaccaccccaacctacggagatctaaatcacctcgtgagcgcaactatgtcaggcgtgactacctgcctacgtttccccgggcagcttaacgcagaccttaggaagctagctgtgaatatggtgcccttcccacgcttgcacttcttcatgcccggctttgctcctttaactagtaggggaagccagcaataccgagctctgaccgtgcccgaattgactcagcaggtgtttgacgcaaagaacatgatggctgcatgtgacccaaggcacggacggtatctgacagtcgccgcggtcttcagaggcaggatgtccatgaaggaagtcgacgagcagatgttgaatgtccagaataagaattcatcctactttgtggagtggcctcagcagtgtcaggactcccgcctctag

SEQ ID NO: 210155 - DNA, 1248 bp, synthetic construct
  misc_feature 1..1248: note = Description of Artificial Sequence: Synthetic coding sequence
  source 1..1248: mol_type = other DNA
atgcgggagatcgtgcacatccaggccggccagtgcggcaaccagattggggccaaattttgggaagtgatttctgacgagcacgggatcgaccctacagggacctaccacggggacagtgacctgcaactggaccgcatctcagtgtattacaatgaagcgactggcgggaaatatgttcctcgagccatactggtggacctggagcccgggaccatggacagtgtccgcagcgggccatttggccagatcttccgccccgacaacttcgtctttggtcagtcaggggccgggaataactgtctgcagggtttccagctgacgcactctctcgggggaggaaccggatcaggcatgggcaccttacttatcagcaagattagggaggaataccccgataggataatgaacactttttctgtcgtccccagccctaaagtctcggacactgtcgtggagccttataacgctacactgtccgtccaccagctggtggagaacaccgacgagacctactgcattgacaacgaagctttgtatgacatatgtttcaggacactgaaactgacaaccccaacgtacggcgatctgaaccatctggtttccgccactatgagcggcgtgactacttgtttgcgtttcccaggtcagcttaacgccgatctgaggaagctggcggttaatatggtgcctttccctcggctgcattttttcatgcctggcttcgccccgctgactagccggggcagccagcagtatcgggccctgacggtacctgaactgacacagcaggtcttcgatgccaagaacatgatggctgcttgcgacccacggcatggaaggtatttgacagtggcggccgtgttcaggggcagaatgagcatgaaggaagtggatgagcagatgcttaacgtgcagaataagaactcctcttatttcgtggaatggatccccaacaatgtcaagacagccgtctgtgatattcccccgagaggcctcaagatggccgtgaccttcattggaaattccactgctatacaggagctgttcaaaagaatcagcgaacagtttactgcaatgttccgcaggaaagcatttttgcactggtacacaggtgaagggatggacgagatggagtttacagaggccgaaagcaacatgaacgacctggtgtcagaatatcaacagtatcaggacgccacggcggaagaagaagaggacttcggggaggaagccgaagaggagtag

SEQ ID NO: 210156 - DNA, 1062 bp, synthetic construct
  misc_feature 1..1062: note = Description of Artificial Sequence: Synthetic coding sequence
  source 1..1062: mol_type = other DNA
atgcgggagatcgtgcacatccaggccggccagtgcggcaaccagattggcgcaaaattctgggaggtcataagcgatgagcatggaattgatccaacagggacttaccacggggacagcgatctacagcttacacacagtctcgggggaggaacaggcagtggaatgggtacattgttaatctccaaaattcgcgaggagtaccccgatagaattatgaatactttttccgtggtcccatcaccaaaagtaagcgacaccgtcgttgagccttataacgcaaccctttccgtccatcaactcgtggagaacacagacgagacttactgtattgataacgaggcactatacgacatctgtttcagaacactgaagttaaccactcccacttacggcgacctgaaccatctcgtctcagctactatgtctggtgtgactacctgtctccgattccccggacaactgaacgccgatttgcgtaaattggcagttaacatggtaccgtttcctaggcttcacttttttatgcccggatttgcgccactaacaagccgggggtcgcagcagtatcgagcactcaccgtgcccgagctgacccaacaggtctttgacgctaagaacatgatggcagcatgtgaccccaggcacggacgttacctcactgttgcagctgtgttcaggggcaggatgtctatgaaggaggttgacgagcagatgttgaacgtccagaacaaaaattctagttattttgttgaatggattcccaataatgtgaagaccgcagtgtgtgacatccctccaaggggcctcaagatggccgtgacctttattggcaactctactgctatccaggaactcttcaaaagaatttctgaacaatttaccgccatgttcaggcgaaaagcgtttctacattggtatacgggcgaagggatggatgagatggaattcacggaggccgaatctaacatgaacgatcttgttagcgaataccagcagtaccaagacgccaccgcagaggaggaggaggattttggtgaggaggctgaagaagaggcctag

SEQ ID NO: 210157 - DNA, 1062 bp, synthetic construct
  misc_feature 1..1062: note = Description of Artificial Sequence: Synthetic coding sequence
  source 1..1062: mol_type = other DNA
atgcgggagatcgtgcacatccaggccggccagtgcggcaaccagatcggggcgaaattctgggaggtgatctcggatgagcatggaatagatcctacgggaacttatcatggtgattccgatctccaattgactcactcgttaggcggggggacaggatccgggatgggcactctcctgatatcaaaaatacgggaggaataccccgaccggataatgaacaccttctccgtcgtccccagccctaaagtttccgacacagtcgtcgagccctataacgccacgctaagcgtgcaccaactcgtggagaacacagacgagacttactgcatcgacaacgaagccctctacgacatttgcttcagaacgttgaagcttactacacctacgtacggcgatctcaatcacctagtcagtgccacaatgagcggcgttactacctgtctgcggttccctggccagctaaacgctgacctgcggaagctggcagtgaacatggtgccttttccccgtctccatttttttatgccgggctttgccccgcttacctcacgggggagccagcagtaccgggccctgacggtgcccgagctcacccaacaagtgttcgacgcaaaaaatatgatggcagcctgtgatccaagacatggcaggtacttaaccgtcgccgcagtgtttcgggggcgcatgtctatgaaagaggtagacgaacagatgctaaacgtgcaaaacaagaactcgtcatattttgttgagtggattccgaacaatgttaaaaccgcggtgtgcgacatcccccctcggggcctcaaaatggctgtcacgttcattgggaactccactgccatccaggagctattcaagcggatttctgaacagttcacagctatgttccggcggaaagctttcctgcattggtatacgggcgaggggatggacgagatggaattcactgaggccgaatccaacatgaatgatttggtcagtgaatatcaacaataccaagacgccaccgctgaggaagaggaggactttggggaggaggccgaggaggaggcctag

SEQ ID NO: 210158 - DNA, 1308 bp, synthetic construct
  misc_feature 1..1308: note = Description of Artificial Sequence: Synthetic coding sequence
  source 1..1308: mol_type = other DNA
atgcgggagatcgtgcacatccaggccggccagtgcggcaaccagataggagccaagttttgggaggtcatatcagacgaacacggtattgatcctacaggcacctaccacggtgacagcgacctgcaattagaccggatctccgtctattataatgaagccacaggcggcaagtatgtgcctagagccatcttggtggatctggaaccggggaccatggactccgtgaggagtggaccattcggtcaaatctttcgccctgacaacttcgtcttcggtcagtcaggggctgggaacaactgggccaaagggcactatactgaaggcgctgaactagtggacagtgtattggatgtggtgaggaaggaggccgagtcgtgcgattgtttgcagggatttcagctcacacactccctcgggggcggtacaggctcaggaatggggaccctgctcatttcaaaaatccgggaggagtatcccgacagaatcatgaatacttttagcgtcgtcccctctcctaaggtttctgatactgtggtcgagccctataacgccaccctcagcgtacaccaactggtagagaatacagatgaaacctactgtattgacaacgaagccctttacgatatctgtttccgaacactgaagttgactacccccacttacggggaccttaaccacttagtgtctgctacgatgtccggcgtaaccacctgcctaaggtttcccgggcaactgaacgcggacctgagaaaactggcagtgaatatggtcccattccccaggctgcacttcttcatgccgggtttcgctcccttgacatcaagaggcagccagcagtatcgggcactcaccgtgccggaacttacccagcaagttttcgacgcgaaaaatatgatggctgcttgcgatccacggcacggccgctacctgacggtggctgcagtgtttcggggaaggatgagtatgaaagaggtcgatgaacaaatgttgaacgttcagaacaaaaattcgtcttactttgtggaatggattcccaacaatgtcaaaacagcagtgtgcgatatccctcctaggggcctaaagatggcagtgacctttataggaaattccaccgccatacaagaactgttcaagaggatctccgaacaatttacagccatgtttcggcgcaaagccttcctgcactggtatacgggggaggggatggacgaaatggaatttacggaggctgagtcgaatatgaacgatttggtttccgaatatcagcagtaccaagatgcaaccgcagaaggcggagggctgtag

SEQ ID NO: 210159 - DNA, 1308 bp, synthetic construct
  misc_feature 1..1308: note = Description of Artificial Sequence: Synthetic coding sequence
  source 1..1308: mol_type = other DNA
atgcgggagatcgtgcacatccaggccggccagtgcggcaaccagatcggggcaaagttctgggaggtgatatccgacgagcacggtattgaccccactggaacttatcacggggatagcgatttacaactcgatcgcatcagcgtgtattataatgaggcaaccggcggcaagtatgtcccaagggctatcttagtggacctggagcccggtactatggactcagtgcgctccggaccttttggccagatttttcggccagacaatttcgtttttgggcaaagcggagctggcaacaactgggctaaggggcattataccgaaggtgctgaactcgtagattcagtgcttgacgtggtgaggaaagaggcggaatcttgtgattgtctgcagggtttccagctcactcattccctggggggcggcaccggtagtggcatgggtactttgctgatttctaagatacgagaggagtatcccgaccgaatcatgaacacattttcagttgttccgagtccaaaggttagtgatacagtggtggagccctataacgcaactttgtcagtgcaccagctggttgagaacaccgatgaaacatactgcatcgataatgaagccctttacgatatctgttttcggactttgaagctgaccacgccaacatacggagacctcaaccacttggtaagcgctaccatgagcggagttaccacttgccttcggtttcctgggcagttgaatgcagacttgcgcaagctggctgtgaacatggttcccttcccaaggctgcacttttttatgcccggattcgcaccgctgacctcccgcggttcgcagcaataccgggccctcacagtacctgagctgacacagcaagtcttcgatgcgaagaacatgatggcagcatgtgaccccagacatggccgttatctcaccgtcgctgctgttttcagaggccgaatgtcgatgaaggaggtcgatgagcaaatgctgaatgtgcagaataaaaattcctcctactttgtcgagtggatacctaataatgtcaaaactgcggtgtgcgacatccctccgcggggcctcaaaatggccgtaacgtttatcgggaacagtaccgcgatccaggaactctttaagaggataagcgagcagtttactgcaatgtttcgcaggaaagccttcctacactggtacacgggcgaaggtatggacgagatggaatttactgaggctgaatcgaatatgaacgaccttgtgagtgagtatcagcagtaccaggatgcaacagctgagggcggggggttatag

SEQ ID NO: 210160 - DNA, 1308 bp, synthetic construct
  misc_feature 1..1308: note = Description of Artificial Sequence: Synthetic coding sequence
  source 1..1308: mol_type = other DNA
atgcgggagatcgtgcacatccaggccggccagtgcggcaaccagattggcgctaaattttgggaggtgatttcagacgagcatgggattgatcccacgggcacataccatggcgactctgacctgcaattggacaggattagcgtttattataacgaggccacaggcggcaagtacgtgccaagggctatccttgtggacctcgagcctggaaccatggacagtgtgaggtcaggacctttcggtcagatcttcaggcccgataatttcgtgttcggacaatctggggccggaaacaactgggccaagggccattatactgagggtgcggagttggtggacagcgttttagatgtggtaaggaaggaggccgagtcctgtgattgtcttcaaggtttccaactcacacacagcctgggcgggggaacaggatcaggcatgggaactttgttgattagtaagatcagagaagagtacccagaccgcattatgaatacatttagcgtggtgccatcccccaaggtgtccgacacagtagtggaaccatataatgccacgctcagcgtgcaccagttggtagagaacaccgacgaaacctactgtatcgacaatgaggccctgtacgatatttgcttcaggactttgaaacttacgacccccacatatggggatttgaatcacctcgtgagtgcgaccatgagtggcgtcactacctgtttgcggttcccggggcagttaaacgctgatcttcgaaagttggctgttaacatggtgcccttcccacgcctgcatttctttatgcccggatttgctcccctgactagtcggggctcccaacagtacagagccttgacggtacccgagttaacacagcaagtcttcgacgccaaaaacatgatggcagcctgcgaccccagacacggacgctaccttacagttgctgcggtgttccgggggaggatgagtatgaaagaggttgacgaacagatgctgaatgtgcaaaacaagaactccagctattttgtcgaatggatcccaaacaatgtcaaaaccgccgtgtgcgacatccctccgcgcggactaaagatggccgttacttttattggaaactcaactgcaatccaagagctgttcaagaggatcagtgagcagttcaccgctatgttcagacggaaagcattcctgcactggtacaccggggaaggtatggacgagatggagttcaccgaggccgagagtaatatgaatgacctcgtaagtgagtaccagcagtaccaggacgcgaccgctgagggcggaggcttgtag

SEQ ID NO: 210161 - DNA, 1248 bp, synthetic construct
  misc_feature 1..1248: note = Description of Artificial Sequence: Synthetic coding sequence
  source 1..1248: mol_type = other DNA
atgcgggagatcgtgcacatccaggccggccagtgcggcaaccagattggcgctaagttttgggaagttatttcggatgagcatgggatcgatcccacaggcacataccacggggattccgatctacaactggatcgcatttcagtctactataacgaggctaccggaggtaagtacgtgccacgggctatcttggtggacctggagcctggcacgatggatagcgtgcggtccgggccgttcggccaaatctttaggccggataacttcgtattcggacagtcgggcgccggaaacaattgcctgcagggctttcagctcacccattcactaggcggaggcactggatcgggaatgggtactctgttaatttcaaagatccgggaggaataccctgatcgcataatgaatacattctctgtcgtcccctcaccaaaagtgagcgatacagtagtggaaccgtacaatgccacactttccgttcaccagttggtggagaataccgatgagacctactgtattgacaacgaggccctgtatgatatatgtttccgcacactgaaacttactacaccaacctacggagacctgaatcacctggtctctgccacgatgagcggcgtgacaacctgcctgaggttcccgggccaactcaatgccgacctgaggaaactggccgtcaatatggtccccttcccccgcctgcacttcttcatgcctggcttcgcaccccttacgtcaagagggtcccagcagtaccgggcattgacagtgcctgagctgacacagcaggtgttcgatgccaaaaacatgatggcagcctgcgatccccgacacggccgttatctaaccgtcgccgctgtctttcgaggcaggatgagtatgaaggaagttgacgagcagatgctcaacgttcagaacaagaactcatcatacttcgtggagtggatcccgaataatgtcaagactgctgtctgcgatataccacccagaggacttaaaatggctgtgactttcatcggtaatagtacagcaatccaagagctctttaagcggatttctgaacagttcacagcaatgtttcgaaggaaagcttttttgcattggtacaccggagaggggatggacgaaatggagttcactgaagcagagagtaatatgaacgacctggtgtcggaatatcagcagtaccaagacgctaccgcagaagaagaggaagatttcggcgaggaagccgaagaagaatag

SEQ ID NO: 210162 - DNA, 1248 bp, synthetic construct
  misc_feature 1..1248: note = Description of Artificial Sequence: Synthetic coding sequence
  source 1..1248: mol_type = other DNA
atgcgggagatcgtgcacatccaggccggccagtgcggcaaccagatcggagctaagttttgggaggtgatctctgatgagcacgggatcgaccctactggcacataccatggcgatagcgaccttcagctcgatcgcatttccgtttattataacgaggcaaccggaggcaaatacgtgcctcgcgctattttggttgatcttgaacctggcacgatggattcggtgaggagtgggccttttggacagatctttagacctgacaacttcgtttttggccagtccggtgctggaaacaactgcctgcagggattccagctgactcactctctgggaggtgggaccggctctggtatgggaaccctgctcatatcaaagatccgagaagagtaccccgacaggataatgaacacattctccgtggttcctagccccaaggtcagtgatacagtggtggaaccttacaatgctacgctgagcgttcatcagcttgtggagaacaccgacgagacttactgcattgataatgaggccctgtacgatatttgttttcgcacactcaaactgactactcccacttacggtgatcttaaccacctagtgagcgccaccatgtctggggtgacaacctgcctaagatttccgggccaactgaacgccgatctcaggaaattagctgtgaacatggtgcctttcccccggctgcatttcttcatgcccggttttgcgccccttacaagcagaggtagccagcagtatcgggcactgacggtgccggagctgactcagcaggtgtttgacgccaaaaatatgatggccgcttgcgacccacgacacgggaggtacctcaccgttgctgcggtgttccggggcagaatgagtatgaaagaggtagacgagcagatgttaaatgtacagaacaagaatagttcatatttcgtagagtggatccctaacaacgtaaagaccgccgtttgcgacattcccccgcggggtctgaagatggccgtgactttcatcgggaattcaactgccatccaggagctgtttaaacgtatttctgaacagttcactgctatgttccgtcgcaaggcatttcttcactggtataccggcgagggcatggacgagatggagtttaccgaagcagaatccaacatgaacgatctggtcagtgagtaccagcagtaccaggatgctaccgctgaagaggaagaagactttggagaggaggccgaggaagagtag

SEQ ID NO: 210163 - DNA, 1248 bp, synthetic construct
  misc_feature 1..1248: note = Description of Artificial Sequence: Synthetic coding sequence
  source 1..1248: mol_type = other DNA
atgcgggagatcgtgcacatccaggccggccagtgcggcaaccagataggcgccaagttttgggaggtcatatcagacgaacatggaatagaccccacaggtacctatcacggcgattctgacttacagctcgaccggattagcgtgtattataacgaagccactggaggcaaatatgtacctagggcaattctggttgatctcgagccagggaccatggattcagtacgcagtgggccttttgggcaaatcttcagaccagataatttcgtattcgggcagtctggggctggcaacaattgcttacaggggttccaattaactcatagcctgggcggcgggaccggttcaggaatgggtactctgcttatctccaagatccgcgaggagtatccagatagaataatgaacacctttagcgtggtgccttcccccaaagtctctgataccgtggtcgagccttataacgctacactatcagtgcaccagctcgtggagaatactgatgagacctactgtatcgataacgaggcgttgtatgacatctgctttcgaacactgaagctgaccacccccacatatggggatcttaatcacctggtgtccgccaccatgtcaggggtgactacgtgtctcagatttccgggccaactgaatgcagacctgagaaaattagccgtgaacatggtcccgtttccaaggctgcactttttcatgccagggttcgcccctctaacatctagaggcagtcagcagtaccgggcattgaccgtacccgagttaacccagcaggtattcgacgccaagaacatgatggccgcttgcgaccctagacacgggaggtacttaaccgttgcagccgtgtttcgcgggaggatgtccatgaaggaagtcgacgaacaaatgttgaacgtgcaaaataaaaacagcagctacttcgtggagtggatccctaataatgtgaagaccgccgtctgcgatatacctcctcggggcctgaagatggcggtgaccttcattgggaactctaccgcaatccaggaactttttaagcggattagcgaacaatttacagccatgtttagacgcaaggcctttctgcactggtataccggcgaagggatggatgagatggagtttacagaggctgagagcaacatgaatgacctggttagcgagtatcagcagtatcaggacgcgaccgccgaggaagaggaagacttcggggaagaagcagaggaggagtag

SEQ ID NO: 210164 - DNA, 1308 bp, synthetic construct
  misc_feature 1..1308: note = Description of Artificial Sequence: Synthetic coding sequence
  source 1..1308: mol_type = other DNA
atgcgggagatcgtgcacatccaggccggccagtgcggcaaccagattggagcaaaattctgggaggttatatcagatgagcacgggattgaccccaccggcacttatcacggtgattcagacctgcagctagatcgaattagcgtttattacaacgaggctaccggaggaaaatacgtgcctagagcgatccttgtcgacctggaaccaggcaccatggactcagtgcgcagcgggccctttgggcagatttttagacccgataattttgtgttcggtcaatctggagcgggcaacaactgggcgaaagggcattatacagaaggggcggaactggtggattccgtcctggatgtcgtgcggaaggaagcagagtcttgcgattgcctccagggctttcagctcacgcacagtttggggggagggacgggatctggcatgggcacattgttaatatccaagatcagagaggaatatcccgatcggatcatgaacaccttctctgtggtcccttcacccaaggtgtcggatacagtggtcgaaccttacaatgctaccttgagcgtacatcagctggtagaaaatacggatgaaacctactgcatcgataatgaggccctctatgatatttgcttccggaccctgaaactcaccactccaacttatggcgatcttaatcacttggtcagcgcaacgatgtctggggttacaacctgtctccggttcccaggtcagctgaacgccgacttgcgtaaactagcagtaaacatggtgccgtttccacggctgcacttcttcatgccaggctttgctccacttacctcacggggcagccagcagtaccgggccctgaccgtgcctgagttgactcagcaggtattcgatgcgaaaaatatgatggccgcatgcgatccccgccacggtcggtatctgacggttgctgccgtttttaggggaagaatgtctatgaaagaggtagacgagcaaatgttgaatgtccagaataagaactcctcttacttcgtcgaatggatacccaataatgttaagacagctgtatgtgacatcccaccacggggcctaaagatggcggtgacctttattggcaactcaaccgccatccaggagctctttaagcgcatcagcgaacagttcactgccatgttcaggagaaaggcttttcttcactggtacacgggtgaggggatggacgagatggagttcaccgaggcagagtcaaacatgaatgatcttgtgagcgaataccagcaatatcaggacgcaactgccgaggggggtggactttag

SEQ ID NO: 210165 - DNA, 1308 bp, synthetic construct
  misc_feature 1..1308: note = Description of Artificial Sequence: Synthetic coding sequence
  source 1..1308: mol_type = other DNA
atgcgggagatcgtgcacatccaggccggccagtgcggcaaccagatcggagccaaattttgggaggtcatctctgatgagcacggtattgatcctacagggacctaccatggcgattctgatctgcagctcgataggataagtgtctattataatgaggcaaccggaggcaagtatgtgccaagagcgatcttagtggaccttgaacctgggacaatggatagcgtccgaagcggcccatttgggcaaatctttcgccctgacaatttcgtgtttggtcaaagcggggccgggaacaactgggctaaaggtcactacacagagggggctgagcttgtcgatagtgtgctggacgtcgtccggaaggaagcagagagctgtgactgcctgcagggattccagctcactcacagcctgggagggggcacagggagtgggatgggaaccctgctgatctctaaaatccgagaagagtatcccgatcggattatgaatacgttctctgtggtgccatctccgaaagttagtgatacagtcgtggaaccttataacgctacccttagcgtgcaccagctggttgaaaatacggacgagacatactgcattgataacgaagctctgtacgacatctgtttccggacgctaaagctgacgacccccacttacggagatttgaatcacctggtgtcagccactatgagcggggtgaccacctgtttacggttccctggccaactgaatgctgacctgaggaaactggcggtgaacatggtgccgtttcctaggctgcattttttcatgcccggatttgcccctctcaccagccgcggatcacagcaatatcgcgcccttactgtgccagagctaacccaacaggtcttcgacgcaaagaatatgatggccgcctgtgatccccgtcatggaagataccttaccgtggccgccgtatttcggggcagaatgagcatgaaggaggtcgacgaacaaatgctaaatgtgcagaacaaaaactctagctattttgtggagtggatccccaacaatgtcaaaaccgccgtgtgcgacattccccctagaggactgaaaatggcggtcacttttattggaaattctacagccattcaggaattgtttaaaagaattagcgagcagttcactgcgatgttccggcgcaaggcttttctacattggtacaccggcgaggggatggatgaaatggagttcaccgaagcggaatccaacatgaatgatctcgtgtcggaatatcaacagtatcaggacgccaccgctgaggggggcggcctctag

SEQ ID NO: 210166 - DNA, 1308 bp, synthetic construct
  misc_feature 1..1308: note = Description of Artificial Sequence: Synthetic coding sequence
  source 1..1308: mol_type = other DNA
atgcgggagatcgtgcacatccaggccggccagtgcggcaaccagatcggggctaagttttgggaggtaattagcgatgagcacgggatcgacccaaccgggacctatcatggtgattctgaccttcagctggaccgcatttccgtctactataacgaggcaacaggaggcaagtacgtgccgcgagccattctggtcgatctcgagccaggcaccatggactcagtgagaagcggaccttttggtcagatcttccggccggacaactttgtctttggacagagtggagcggggaataactgggcaaagggacactatactgagggagcagagttggtggactccgtgctggatgtagtgcggaaagaagctgagtcatgtgactgtcttcagggatttcagctaacacactctctgggggggggtacaggctccggcatggggaccctcttgatctcaaagattcgcgaagaataccccgatcggataatgaacaccttctcggtggtaccctcaccaaaggtatcagatacagtggtagagccttacaacgccacattatccgtacaccaattagtggaaaataccgacgagacctactgtatcgacaacgaagctctgtatgacatctgctttcggacactgaagctgacaacccccacgtatggcgatctgaaccatctcgtttctgctactatgagtggagtgactacatgcctccggtttcctggacaactcaacgctgacttaaggaagctggcagtgaacatggtgccctttcctagactccacttcttcatgccgggctttgcccccctgacaagccgcggatctcagcagtaccgagcacttacggtccccgaattgacccagcaggtgtttgatgccaaaaacatgatggccgcctgcgatcccagacatggtcgatacctgacagtcgcggctgtgtttcgcggacgtatgtccatgaaggaggtagatgagcagatgctgaacgtgcagaacaaaaatagcagctattttgtggaatggattccgaacaatgtaaaaacagccgtctgtgatatcccaccacgggggcttaagatggccgtgactttcatcggcaactcgacagcaattcaggagttgtttaagcgcatttctgagcaatttaccgctatgttcagaagaaaagctttcctccactggtataccggggaaggaatggatgaaatggaatttaccgaggcagagagcaatatgaatgacctcgtgtcagaataccaacagtatcaagatgccacagctgaaggcggaggcctgtag

SEQ ID NO: 210167 - DNA, 1062 bp, synthetic construct
  misc_feature 1..1062: note = Description of Artificial Sequence: Synthetic coding sequence
  source 1..1062: mol_type = other DNA
atgcgggagatcgtgcacatccaggccggccagtgcggcaaccagatcggagctaagttctgggaggttatctccgatgagcatggcatcgacccaaccggcacatatcacggagatagtgatctgcaactgactcactcattgggtggaggaacaggaagcggcatggggacactgctcatcagtaaaatccgtgaggagtatccggaccgcattatgaataccttctccgttgtgccgtcccctaaagtgagcgacactgtagtagagccctacaatgccaccctgagtgtccatcaactcgttgagaatacggacgaaacctattgcatcgacaacgaggctctgtacgatatttgctttagaacattgaaactaacaacccccacatacggggatctcaaccatcttgtgtccgcgactatgtctggggtcaccacttgtctccggtttccgggacaactgaacgccgatctgaggaagttggctgtcaatatggttccattcccaagactacacttttttatgcccgggtttgcgcctctgacaagtcggggatcccaacaatatagagcacttactgtgccggaactgacacaacaggtgttcgacgcgaaaaacatgatggcagcttgtgatcccagacatggcagataccttacggtcgccgcggtgttccgaggcagaatgagtatgaaggaagttgatgaacagatgctgaatgtacagaacaaaaattcttcttactttgtggagtggatcccaaataacgtgaaaactgccgtgtgcgatattcctcctagaggactgaaaatggctgtaacattcatcggcaactccaccgccatccaggagttgtttaagcgcatttcggagcagtttacggctatgttccgcagaaaggcgttccttcactggtataccggtgaaggaatggatgaaatggagtttactgaagcagagtctaatatgaacgacctggtgtcggagtatcaacagtaccaggatgcgactgcagaagaggaagaagacttcggcgaggaggccgaagaggaggcatag

SEQ ID NO: 210168 - DNA, 1248 bp, synthetic construct
  misc_feature 1..1248: note = Description of Artificial Sequence: Synthetic coding sequence
  source 1..1248: mol_type = other DNA
atgcgggagatcgtgcacatccaggccggccagtgcggcaaccagatcggagctaagttctgggaggtgatctccgatgagcatggcatagatccaactgggacctaccacggcgactcagatctgcagctcgatcggatcagtgtgtactataatgaggctaccggaggcaagtatgtgccacgcgctatattggtcgacctagagccaggtaccatggacagtgtcagaagtggaccttttggacaaatttttagacccgataacttcgtgttcggccaatccggagcagggaacaattgcctgcagggttttcagctgacccacagcttgggaggcggcaccggatctgggatggggaccttgttgatcagcaaaattagagaggagtatcccgatcggataatgaatactttctccgtggtcccatcccccaaagtttccgacacagtggttgagccatacaacgccaccctcagcgtacatcaactggtcgagaacacagacgagacttattgcattgataacgaggccctgtacgatatttgctttcggacactcaaactaactactcccacctacggagacctaaaccacctggtgagcgcaaccatgagtggagtcaccacctgccttcgcttccccggccagctcaatgctgatttgcgcaagctcgccgtgaatatggtgcccttcccacgcttgcacttttttatgccaggatttgcccccctcactagccgcggctctcagcagtatcgggctctgaccgtgccagaactgacccagcaggtatttgatgctaagaatatgatggctgcatgtgatccacgtcatggcagatacctcaccgtagccgcagtctttcgaggcaggatgtcaatgaaggaggtggacgaacagatgctaaatgtgcagaataaaaactcttcctactttgtggaatggatccccaacaacgtcaaaacagcagtgtgcgacatcccaccaagaggactaaagatggcagtcacttttatcgggaactccactgccattcaggagttgttcaaaaggatatccgaacagttcacggccatgtttcgccggaaagcattcctgcattggtataccggggagggcatggatgagatggagttcaccgaggcagagtccaacatgaacgacctggtgtcggagtatcaacagtatcaggatgctactgcagaggaggaagaagactttggggaggaagccgaggaggaatag

SEQ ID NO: 210169 - DNA, 1308 bp, synthetic construct
  misc_feature 1..1308: note = Description of Artificial Sequence: Synthetic coding sequence
  source 1..1308: mol_type = other DNA
atgcgggagatcgtgcacatccaggccggccagtgcggcaaccagataggggctaagttctgggaagttatctccgatgagcatggaattgaccccactggaacttaccacggggattctgacctgcagctcgaccggatttcggtgtactataatgaggcaacaggtggtaaatacgtacctagagctatattggtcgaccttgagccggggaccatggatagcgtgaggagtggcccttttgggcaaattttccggcccgataacttcgtgtttggacagtccggagcaggcaacaactgggcaaagggtcattacactgaaggagcagaactggtagacagcgtgctcgacgtggtgcgcaaggaggccgagtcatgcgactgtctccaggggtttcagctgacgcattcgctagggggcgggaccggatccggaatgggtaccctcctgatcagcaagattcgggaagaataccccgaccgtattatgaacacatttagtgtagttccctctccaaaagtgtccgacaccgtggtcgagccttacaacgccactttgtcagtgcaccaactagtagaaaacacagacgaaacttattgcattgacaatgaggccctctatgacatctgctttcggactcttaagttgacaactccaacgtatggagacctgaatcaccttgtctctgctaccatgagcggtgtcacaacgtgcttacggtttcctggtcaattgaatgctgacctgaggaagctagcagtcaacatggtcccctttccccgacttcacttcttcatgccaggattcgcgcccctgacctctcgtggctcccagcagtatcgggccttgacagtgccggagctgacacagcaggtgtttgacgctaaaaacatgatggccgcgtgcgacccacggcatggtagatacctgactgtagccgcggtcttccgcgggcggatgagcatgaaagaagtggacgaacaaatgttgaatgtgcagaataaaaacagcagttattttgtagagtggattcccaacaacgtcaagacagccgtatgtgacattcctccgcgcggtcttaagatggccgttacatttattggcaactccacagccatacaggagctgtttaagcggataagcgagcagttcaccgcaatgttcagaagaaaggcctttctccattggtatacaggggaaggtatggacgagatggagtttaccgaggccgagtctaacatgaacgacctggtctctgaataccagcagtatcaggatgccacagccgaagagggaggggtttag

SEQ ID NO: 210170 - DNA, 1062 bp, synthetic construct
  misc_feature 1..1062: note = Description of Artificial Sequence: Synthetic coding sequence
  source 1..1062: mol_type = other DNA
atgcgggagatcgtgcacatccaggccggccagtgcggcaaccagatcggggccaagttttgggaggtgataagcgacgagcacgggatcgacccaacgggtacataccacggggatagcgatttacagcttacccattctttaggaggaggaacgggctctgggatggggacgctcctgattagcaaaattcgcgaggagtacccagatcgaatcatgaatacatttagtgtggtgcccagccccaaagtgtctgacacagtggtggaaccttataacgctactctatctgtccaccagctcgtggagaacacagatgaaacctattgtatcgacaacgaggccttgtatgacatctgcttcaggaccttgaagttaacaactcccacctacggtgacttgaaccacttagttagcgcaacaatgtctggggtgacaacatgcctgcggtttcctgggcagctgaacgccgacctgcggaaactggctgtcaatatggtgcctttcccccggctgcattttttcatgccaggctttgcccccttaacctcccgaggttcacagcagtaccgggcgttaaccgttcccgaactgacccagcaggtattcgacgctaaaaatatgatggctgcctgcgacccgcgccacgggagatatttaactgtcgccgccgtattccgaggaagaatgtccatgaaagaggtggacgaacagatgctgaacgtgcagaataaaaactcgtcctacttcgtggaatggatccctaataatgttaagaccgctgtctgcgacatcccaccaaggggcctgaaaatggccgtcacattcatcggtaattctaccgctattcaggagcttttcaagagaatcagtgaacagttcactgccatgttccgtcggaaggctttcctacattggtacaccggggagggcatggacgagatggagtttacagaggccgagtcaaacatgaacgacttggtatccgagtatcagcagtaccaggatgccaccgccgaagaagaggaggactttggcgaggaggccgaggaggaagcatag

SEQ ID NO: 210171 - DNA, 1062 bp, synthetic construct
  misc_feature 1..1062: note = Description of Artificial Sequence: Synthetic coding sequence
  source 1..1062: mol_type = other DNA
atgcgggagatcgtgcacatccaggccggccagtgcggcaaccagataggcgccaagttttgggaggtgatcagcgatgaacacggcatcgatcctaccggcacctaccacggcgattcagacctccagctcactcattcacttggcggtggaaccggcagcgggatgggtaccctgctcattagtaaaatacgtgaggagtatcccgatagaataatgaacaccttctctgtggttccaagcccgaaggtgtccgataccgtcgtggaaccctataacgctactctctcagtacaccagctggttgagaacaccgacgagacttactgtattgataatgaagccctgtatgacatctgtttccgcacactgaaactcacaaccccaacatatggtgacctgaatcacctggtttccgccaccatgtcaggagtgacaacatgcctgagatttcccgggcagctgaacgctgacctccgtaaattggccgtaaacatggttccctttcccagattgcactttttcatgcccggttttgccccgctaacttcccgtgggagtcaacagtaccgcgccctcactgtgccagagctcacccagcaggtctttgacgccaagaacatgatggctgcttgcgacccccgccacggaagatacctaaccgtggcagctgtgttccgaggtaggatgtctatgaaggaggttgacgagcagatgctgaatgttcagaacaagaacagtagctattttgtagagtggattcccaataacgtcaaaactgccgtctgcgacatccctcccagaggattgaaaatggccgtcacattcatcgggaatagtactgccattcaagagttgttcaagcgaatcagcgaacagtttacagccatgtttagacgtaaagcatttcttcattggtataccggagagggaatggatgaaatggagtttactgaagctgagtcaaatatgaacgacctggtgagtgaatatcaacagtatcaagacgcaacagccgaggaagaggaggatttcggggaggaggccgaagaggaggcatag

SEQ ID NO: 210172 - DNA, 1062 bp, synthetic construct
  misc_feature 1..1062: note = Description of Artificial Sequence: Synthetic coding sequence
  source 1..1062: mol_type = other DNA
atgcgggagatcgtgcacatccaggccggccagtgcggcaaccagattggagccaaattttgggaggtgatcagtgatgaacatggaattgatcccaccggaacttatcacggggatagcgatcttcagctgacccactccctgggcggagggactggttcgggcatgggaacgcttctcatatctaaaatccgagaggagtatcctgatagaattatgaacaccttttcggttgtgccaagcccgaaagtctcagataccgtggtcgaaccatacaacgccaccctttccgtacaccagctggttgaaaacaccgatgagacatactgtattgataatgaggcattgtacgacatttgcttcaggacccttaaactaactacaccaacgtatggtgacctgaaccaccttgtgagcgccacaatgtcaggcgtcaccacttgtctgagattccctggacagctcaacgccgaccttcgaaagctcgccgtaaacatggtgccgttccctcgtctgcactttttcatgcctggttttgcaccgctgacctcaagagggagtcagcaatacagagcactgactgtgcctgagctgactcagcaggtatttgatgctaagaatatgatggccgcttgcgatcccaggcatggcagataccttacggtggctgctgtattcagagggaggatgagtatgaaagaagtggacgagcagatgttgaacgtacaaaataagaactctagttattttgttgaatggattccaaacaatgtgaaaacagccgtctgcgacatccctcccagaggtttgaaaatggccgtcacgtttataggtaacagcaccgccatccaggagctctttaagaggatctccgaacagttcacagccatgttcaggcggaaggccttcctccactggtatactggggagggtatggatgaaatggagttcacagaggcggagtctaacatgaatgacctggtaagcgagtaccaacagtatcaagacgccacagcagaggaggaggaggactttggggaggaagccgaggaagaagcctag

SEQ ID NO: 210173 - DNA, 1248 bp, synthetic construct
  misc_feature 1..1248: note = Description of Artificial Sequence: Synthetic coding sequence
  source 1..1248: mol_type = other DNA
atgcgggagatcgtgcacatccaggccggccagtgcggcaaccagatcggcgctaagttctgggaagtgatttccgacgaacacggcatcgaccccacaggtacctatcacggggatagtgatttacagctcgacaggattagcgtgtactacaatgaggctacaggcggaaagtacgtgccacgcgctatcctggttgatctggagccgggcaccatggactctgtgagatcaggaccctttggccagatctttcgtcctgacaattttgtgttcggacaaagtggcgccggaaacaactgcctacagggtttccagctaacacacagcttgggcggcggcactggatccggcatgggcaccctactaatttccaaaatccgggaagagtaccccgaccgcattatgaacactttctccgtggttccttcacccaaagtctcggacacggtagtggagccatataatgccacactgagtgtgcatcagttggtggagaacacggacgagacctattgtatcgacaacgaagcactttacgatatatgtttcaggacgctgaagctcaccacacctacatacggggacctcaatcatttggtgagtgccacaatgtctggggtaactacttgtttgaggttccccgggcagctcaacgcagacctgcgcaaactggctgtgaatatggtgccatttcctcggttacatttttttatgcccggctttgccccactgacaagtcggggttcgcagcagtacagggcattaacagtacccgaattgactcagcaggtctttgatgctaagaacatgatggctgcatgtgaccccagacatggtaggtacttgacggttgcagccgtttttagaggacgcatgagcatgaaagaggttgatgagcagatgctgaatgtacaaaataaaaatagcagctactttgtggagtggatccccaataatgtcaagacagctgtctgcgacatccccccccgtgggctaaagatggccgtcacttttatcggcaactctacggctatacaagagctattcaaaagaatatccgaacagttcaccgccatgttcagacgaaaagccttcctgcattggtacacaggagaggggatggatgagatggagtttacagaagcggaaagcaacatgaacgacctcgtgtccgagtatcagcagtaccaggatgctacagctgaagaggaggaggatttcggcgaagaggccgaggaagagtag

SEQ ID NO: 210174 - DNA, 1248 bp, synthetic construct
  misc_feature 1..1248: note = Description of Artificial Sequence: Synthetic coding sequence
  source 1..1248: mol_type = other DNA
atgcgggagatcgtgcacatccaggccggccagtgcggcaaccagattggtgctaagttttgggaagtgatcagtgatgaacacggaatcgatcctacaggcacttaccacggtgactctgatcttcaactggacaggattagtgtatactacaatgaagctacgggcgggaagtacgtgccaagggccattctggtagacctggagccgggcaccatggattccgtacgatccggtccattcggacagatctttagacctgataacttcgtgtttggtcaaagcggcgcaggaaacaattgtctgcaggggtttcagctaacacattccttagggggtgggacgggatcaggcatgggaaccctccttatctccaagatccgggaggagtatccagataggatcatgaataccttcagtgtagttccctcccccaaagtaagcgacactgtggtggagccttacaatgccaccctgtcagttcaccaactcgtggaaaacaccgacgagacttattgcattgataacgaagcactttacgatatatgtttcagaacactgaagctgacaacgcctacttatggagacctcaaccatctcgtctcagctaccatgagtggggttacaacctgcctgaggttccccgggcagctgaatgctgacctgcgcaaactagccgttaacatggtgccatttccacgtctgcatttcttcatgcctgggttcgccccactgacctcccgcgggtcacagcaataccgcgctcttaccgtccctgagctcacacagcaggtcttcgacgcgaagaacatgatggctgcctgtgacccgcggcacgggagatacctaacagttgccgccgtgttccgcggacgtatgtctatgaaggaggtcgacgaacagatgcttaatgttcagaataagaattcgagttacttcgtggagtggattcctaataatgtaaagacggcagtgtgtgacatcccgcctagagggcttaaaatggctgtcacgttcatcggaaattccaccgctattcaggagctattcaagcggataagcgagcagtttaccgctatgttccgtaggaaagccttcctgcattggtatacaggcgaagggatggatgagatggagttcaccgaggccgagagtaatatgaatgacttagtgtctgagtaccaacagtaccaggacgccactgccgaagaagaggaagattttggcgaagaggctgaagaggagtag

SEQ ID NO: 210175 - DNA, 1062 bp, synthetic construct
  misc_feature 1..1062: note = Description of Artificial Sequence: Synthetic coding sequence
  source 1..1062: mol_type = other DNA
atgcgggagatcgtgcacatccaggccggccagtgcggcaaccagattggagctaagttctgggaggtgatatcggacgagcatgggattgaccccacgggaacttaccacggcgactccgatttacagctgactcattcccttggcggaggtacaggctcaggcatgggaaccctattgatctcaaaaatccgagaagagtatcctgacaggattatgaacacattctctgtggtcccctctcctaaggtgtcagatactgtggttgaaccttacaacgctacactctctgtgcatcagctggtcgaaaacacggatgaaacttactgtatcgacaatgaggccctgtacgacatctgcttccgtaccctgaagttgactacacctacctatggagatctgaatcacctggtctctgcaaccatgagtggcgttaccacatgcctaagatttccgggccaactgaatgccgatcttaggaagctggccgttaacatggtgcccttccctagacttcattttttcatgccggggttcgcaccccttaccagtagaggctcgcagcagtaccgagcacttacagttcccgaacttactcagcaggttttcgacgcaaaaaatatgatggcggcttgcgatccaaggcatggtcgctatcttacggtggccgctgtgtttagaggccgaatgtctatgaaagaggtcgatgagcagatgttaaacgtccagaataaaaattcctcctatttcgtagaatggatcccaaataatgtgaagactgcggtgtgcgacattcccccaaggggcctgaaaatggccgtgacctttattgggaatagtaccgcaatccaagaattgttcaagagaatctcagagcagtttacagctatgttcagacggaaggcctttctgcattggtacactggagaggggatggacgagatggagttcactgaggctgaatccaacatgaatgacctcgtgagtgaatatcagcagtatcaagacgctactgctgaggaggaagaagatttcggtgaggaagccgaggaagaggcctag

SEQ ID NO: 210176 - DNA, 1362 bp, synthetic construct
  misc_feature 1..1362: note = Description of Artificial Sequence: Synthetic coding sequence
  source 1..1362: mol_type = other DNA
atgagcatcgtgaccgtgcagctgggccagtgcggcaaccagatcggattcgaagtttttgatgcccttctcagcgactcccatagtagtcagggactatgcagtatgagagagaacgaagcctatcaggctagctgtaaggaacgctttttctccgaagaggagaacggcgttccaatcgcgagagccgtactagtggacatggagccaaaggtgattaaccagatgcttagcaaagccgcccagtccggacagtggaaatacggccaacatgcttgtttttgccagaagcagggcagcggtaacaactgggcatacgggtactcagtccatgggccccgccacgaagaatctataatgaacataattcgaaaggaggtcgagaagtgcgactctttctctggtttcttcataatcatgagcatggcgggagggaccgggagtgggctgggagctttcgtgacccaaaatctagaggaccagtacagcaatagtttaaagatgaaccaaatcatctggccatacggaaccggggaagtcattgtacagaattataattcaattttgaccctgtctcatctgtaccggtcatccgatgctttgctcctgcatgaaaatgacgctatccacaagatatgcgctaagctcatgaacatcaaacagatctctttcagtgacatcaatcaggttctggcacatcagctcgggtctgtattccagccaacctattccgctgagtcttcattccattatcggcgcaatccactaggcgacctgatggagcacctggtgcctcaccctgagttcaaaatgctgagcgtcagaaatatcccacacatgtctgagaattcacttgcctacaccacctttacttgggctggtctcctgaagcacctgcgacagatgctaatctcgaacgcgaaaatggaggagggcattgacagacacgtttggcctccgttgagtggtctgcctcccctaagcaaaatgtccctgaataaagacctccacttcaacaccagcatcgccaatttggttattctgcgcgggaaagacgttcaatctgccgatgtcgaagggtttaaagatcctgctctgtacacttcctggctgaagccagtcaacgcgtttaacgtttggaagacacagagggccttctccaaatatgaaaaaagcgcggtcctagtttctaatagccagttcttggttaagcctcttgatatgatagtcggcaaggcttggaacatgtttgccagcaaggcttacattcaccagtataccaagttcggcatcgaagaggaagattttctcgattcctttacgtctctggagcaagtggtagcctcctattgcaatctttag

SEQ ID NO: 210177 - DNA, 1197 bp, synthetic construct
  misc_feature 1..1197: note = Description of Artificial Sequence: Synthetic coding sequence
  source 1..1197: mol_type = other DNA
atgagcatcgtgaccgtgcagctgggccagtgcggcaaccagatcggattcgaggtgttcgatgccctcctctccgatagccacagtagccaaggactgtgctccatgagagagaatgaagcttaccaagcgagctgtaaagagcgttttttttctgaagaagaaaatggcgtgcccattgcgcgggccgtgctcgtggatatggaacccaaggtgatcaatcagatgttatccaaggctgcacagtccggtcagtggaagtacgggcagcacgcttgtttttgccagaagcagggatctggaaacaattgggcatacgggtacagcgtgcatgggcctagacacgaagagtctataatgaatataattagaaaggaggtggagaaatgcgatagcttttctggcttttttattataatgagtatggcagggggtaccggctctgggctcggagctttcgtgacacagaatctggaagaccagtattctaactctttgaagatgaatcagatcatctggccatacggcacaggcgaggtcatcgtacagaattacaactccatactgactctcagtcacctgtaccggagttccgatgcactactgctccatgaaaacgacgctattcataagatatgcgctaaactcatgaatattaagcagatctctttttcagatattaatcaagtgctggcccaccaactgggaagcgtttttcagccaacttacagtgcagagtctagtttccactaccgccggaatcccctgggtattgacaggcacgtgtggcctccactatcgggcctgccccctctgtctaagatgtcccttaataaagacctgcacttcaatacctcaattgcgaacttagtgattctacgggggaaggatgtacagagtgctgacgtggaggggttcaaggaccccgccctatatacctcttggctgaagccagtgaatgcctttaatgtgtggaaaacacagcgcgcattctccaagtatgaaaaatccgccgtcctggtctcgaactcgcaatttctggttaaaccactggacatgatcgtggggaaggcctggaacatgttcgccagcaaagcatatatccaccagtatactaagtttggcatcgaggaagaggactttctcgactctttcacgtccttagagcaagtggtcgcgagctattgtaacctgtag

SEQ ID NO: 210178 - DNA, 600 bp, synthetic construct
  misc_feature 1..600: note = Description of Artificial Sequence: Synthetic coding sequence
  source 1..600: mol_type = other DNA
atgagcatcgtgaccgtgcagctgggccagtgcggcaaccagatcggtttcgaggtgttcgatgctctcctctccgatagtcactcaagccagggactgtgctctatgagggaaaacgaggcctatcaagcatcctgcaaagagcggtttttctccgaggaggaaaatggaggaatagacagacatgtgtggccacctttaagcggtctccctccactttccaagatgtcactcaataaagatctccacttcaacacatcaatagccaacttagtaatcctgagaggaaaagatgttcagagcgctgatgtggagggattcaaagaccctgctctatacacttcatggctcaagccagtcaacgccttcaatgtttggaagacacagagagccttttcaaaatacgagaaatctgccgtcctggtctccaacagccagttcctggttaagccgcttgatatgatcgtcggaaaggcatggaatatgttcgcgagcaaggcatacatccaccagtataccaagttcggaattgaggaagaagacttcctcgactcctttacgtccctggagcaggttgttgcctcttattgtaatctgtag

SEQ ID NO: 210179 - DNA, 1056 bp, synthetic construct
  misc_feature 1..1056: note = Description of Artificial Sequence: Synthetic coding sequence
  source 1..1056: mol_type = other DNA
atgagcatcgtgaccgtgcagctgggccagtgcggcaaccagatcggattcgaagtctttgatgccttgctctctgattcacattcttcccaagggctctgtagtatgcgggagaacgaggcctaccaagccagctgcaaggagcggttctttagtgaggaagagaacggggtgccaatcgcccgcgctgtgttagtagacatggaacctaaggtgatcaatcagatgttatccaaggccgcacagtctggtcagtggaagtacgggcagcacgcttgtttctgtcagaagcagggttcagggaacaattgggcctacgggtacagcgtgcacggtcccagacacgaagagtccatcatgaacatcattaggaaagaagtggaaaaatgcgactctttctcggggtttttcatcataatgtcaatggcggggggcacaggcagcggattaggagcctttgtgacccagaacctggaagaccaatactctaattctcttaagatgaatcaaattatctggccttatggcactggagaagtgatcgtccaaaattacaattcaatccttaccctgtctcacctataccggagctcagacgccttgctgttacacgagaacgacgcgatacacaaaatctgcgcaaagctaatgaatatcaagcagataagcttctccgacataaaccaggtcctcgcacaccagctgggatccgtgtttcaacccacgtattccgcagaatccagctttcactatagacggaacccattggagggattcaaggatccagccctctacacctcatggctaaagccggttaatgcatttaacgtttggaagacacagcgcgccttttctaaatatgaaaaatctgccgtcctggtcagtaactctcagtttctagttaaaccactcgacatgatagtaggaaaagcatggaatatgttcgcttcaaaggcatatatacaccagtatactaagttcggcatcgaggaagaggacttcttggactccttcacatccctcgaacaagtggtggcctcatactgcaacctctag

SEQ ID NO: 210180 - DNA, 1191 bp, synthetic construct
  misc_feature 1..1191: note = Description of Artificial Sequence: Synthetic coding sequence
  source 1..1191: mol_type = other DNA
atgagcatcgtgaccgtgcagctgggccagtgcggcaaccagatcggctttgaggtatttgacgctctactctcggactcccactctagtcaggggctgtgtagcatgcgagagaacgaagcctatcaggcctcatgtaaagagaggtttttctccgaggaagaaaacggcgtcccaatcgcaagggctgtgctcgtcgatatggaaccgaaggttatcaaccagatgctgtccaaagccgcccaatccgggcagtggaagtatggccagcacgcatgtttctgtcagaagcagggaagcggtaataactgggcgtacgggtatagtgtgcacggcccacgccacgaagagtccataatgaacatcattcggaaggaggtggagaaatgcgacagttttagcggattttttatcatcatgagcatggccgggggaacaggaagcggactcggggcattcgttactcaaaatctggaggaccaatactctaacagcctgaagatgaatcaaatcatatggccttatggcactggcgaagtcatcgtgcaaaactacaattcaatcctgaccctgagtcacctctaccgttccagtgatgcgctgctccttcatgaaaatgacgccattcacaagatatgcgccaaacttatgaacataaaacagatatccttctctgatatcaatcaggttttggctcatcagctcggctctgtgtttcagcctacttatagcgctgagagctcattccactatcggcggaacccgttaggggatcttatggagcatctcgtgccccatcccgagtttaaaatgctgtccgtacggaatatcccccacatgagtgaaaattcactcgcatacacgacttttacctgggccggcctactgaagcacctgcgtcagatgctgattagcaacgccaagatggaggagggaatcgaccgtcacgtctggcctcctctaagcgggttgcccccactgtccaaaatgagtctcaataaggacttgcactttaacacatccatcgctaacctagtgattctgcgcggcaaggatgtgcaaagtgccgacgtggggaagaaattccgtgcttatatccatcagtacacgaaatttggcatcgaagaggaagacttcttggacagcttcacctcccttgagcaggtggtggctagctattgcaacctgtag

SEQ ID NO: 210181 - DNA, 714 bp, synthetic construct
  misc_feature 1..714: note = Description of Artificial Sequence: Synthetic coding sequence
  source 1..714: mol_type = other DNA
atgaacatcaagcagatcagcttcagcgacatcaaccaggtgctggctcaccaactgggttccgtttttcagcccacctactcagccgagagctctttccattacagacggaaccccctgggtgacctgatggaacacctggttccccaccctgaattcaaaatgttgagtgtacggaacatcccccacatgtctgagaatagccttgcttatacaacttttacttgggcggggctgctgaagcacctgagacaaatgctgatttctaacgcgaagatggaagagggcatcgatcgacacgtgtggccaccactgtccgggttgccccctctgtccaaaatgtccttgaataaggacctgcattttaatactagtatagctaacctggtgatactcagaggcaaagacgtgcaatctgctgatgtggagggtttcaaggatccagccctttataccagctggctgaaacctgtcaatgccttcaacgtgtggaagactcagagagccttcagcaaatacgaaaaaagtgccgtcctagtgtctaatagccagtttcttgtgaagcctctagatatgatcgtgggtaaagcgtggaacatgttcgcttcaaaggcttacatccatcagtatactaaattcggcatcgaggaggaggactttcttgactcttttaccagcttggaacaggtcgtggcctcctactgcaacctatag

SEQ ID NO: 210182 - DNA, 378 bp, synthetic construct
  misc_feature 1..378: note = Description of Artificial Sequence: Synthetic coding sequence
  source 1..378: mol_type = other DNA
atgagcatcgtgaccgtgcagctgggccagtgcggcaaccagatcggtttcgaggtctttgatgctctgttgagcgactctcactctagccaggggctgtgtagcatgagagaaaatgaggcatatcaggcctcttgcaaggaacgcttcttttctgaggaagaaaacggcgtaccaatagctcgtgctgtcctggtcgacatggaaccaaaggtaatcaatcagatgttatcaaaggccgcacagagcgggcagtggaaatacggccaacatgcttgtttctgtcagaagcagggctcaggaaataattgggcctacggaagggacaaggattcagcctgttatcctgactggtctggcaccccagggctacagtag

SEQ ID NO: 210183 - DNA, 492 bp, synthetic construct
  misc_feature 1..492: note = Description of Artificial Sequence: Synthetic coding sequence
  source 1..492: mol_type = other DNA
atgacccagagcgtggtggtgcaggtgggccagtgcggcaaccagatcggatgctgtttctgggatctggccttgagggagcacgccgctgtgaatcagaaggggatttacgacgaagcaatcagctccttttttcgcaacgttgatacacgtgtggtaggagatggcgggtccatttcaaagggaaaaatctgttccttgaaggctcgggctgttctgatcgacatggaggaaggggtagtgaacgaaattttacagggccccctgcgggacgtcttcgatactaagcaactgattacagacattagcgggtccgggaacaactgggccgtcgggcacaaggtgttcggcagcctgtaccaggatcagatactggagaaatttagaaagtcagccgagcattgcgactgcctgcaatgtttcttcattatacactcaatgggtggagggaaaatcttccattccttcgcttgcaactcagtcaagggttag

SEQ ID NO: 210184 - DNA, 621 bp, synthetic construct
  misc_feature 1..621: note = Description of Artificial Sequence: Synthetic coding sequence
  source 1..621: mol_type = other DNA
atggagagcgaccagcggaaggtggtgggcgacggcggcagcatctctaagggcaagatctgcagcctaaaggctcgcgcagtgctgatcgacatggaggagggtgttgtgaacgaaatcctacaagggccacttcgggacgtattcgataccaagcaactcattaccgatattagtgggtccggcaataactgggccgtcggacacaaagtcttcgggagcctataccaggaccagatactggagaagttcagaaagagtgcagagcactgtgactgtctacagtgcttctttattattcattccatgggcggcggcaccggatccggcctgggaacgttcctcctgaaagttttagaggacgagtttcctgaggtctaccggttcgtgacatccatttacccaagtggggaagatgatgttatcacctctccttacaactctattctcgctatgaaagagcttaatgagcacgctgactgcgtattgcccattgacaatcagagtctctttgacatcattagcaaaattgatctgatggtaaactccggaaagctcgggaccacggtaaaaccgaagagtctggttacttccagcagcggtgccctgaaaaaacagtag

SEQ ID NO: 210185 - DNA, 1428 bp, synthetic construct
  misc_feature 1..1428: note = Description of Artificial Sequence: Synthetic coding sequence
  source 1..1428: mol_type = other DNA
atgacccagagcgtggtggtgcaggtgggccagtgcggcaaccagatcggatgctgcttctgggacctggcacttagagaacacgccgccgtaaatcagaaggggatttacgacgaagcgatttctagcttctttcgtaacgttgatactagagtggtgggtgatggaggttctatcagcaaagggaagatctgttcactgaaggcacgcgctgtgctgattgatatggaggagggtgtcgtcaacgagatcctgcagggccctctccgtgacgtgtttgacaccaaacagttgatcaccgatatttcgggctcaggcaataactgggccgttgggcacaaagtgtttggctctttgtatcaggatcaaatactggaaaagttcagaaagtctgccgagcattgtgattgcctgcagtgcttctttattatccattccatggggggaggtacaggatccggcctgggtaccttcctgctgaaggtgctcgaagacgaattccctgaggtgtaccgctttgtcactagcatatatccatccggtgaagatgacgtaataaccagtccttacaattccatcctcgctatgaaagaactgaatgaacacgccgactgtgttttgcctattgataatcagtcactgttcgatattattagcaaaattgatctgatggtcaatagcggaaaactgggaaccactgtgaagcctaaaagtctggtgacttcaagttccggggcattaaagaaacagcacaagaaaccgtttgacgcaatgaacaatatcgttgctaacctgctgctgaatctgaccagctcagcgaggtttgaaggttcgctaaatatggacttaaacgagatctcaatgaatctggtgccgttccctcagctgcattacctggtatccagcctcacccctctctatacactgaccgacgtcaacatcccccctcggagactggatcagatgttttccgacgcctttagcaaggaccatcagttgctccgtgctgacccaaagcacagcctttacctggcttgtgccctgatggtcaggggaaacgtccagatcagtgatctgcggaggaatatcgaacggctgaaaccttccctgcagttcgtgagctggaaccaggaagggtggaagacatccctgtgctccgtgcccccagtcggccattctcactctcttttagctctcgctaataatacctgtgtgaagcctacttttatggagctgaaggagagatttatgaggctctacaagaaaaaagctcatctccaccattatctgcaggtggagggaatggaagaatcgtgcttcacggaagctgtgagtagtctgagtgccctgatccaagagtatgatcagctggacgctaccaaaaacatgcccgtgcaagatctgccgaggctttccattgccatgtag

SEQ ID NO: 210186 - DNA, 621 bp, synthetic construct
  misc_feature 1..621: note = Description of Artificial Sequence: Synthetic coding sequence
  source 1..621: mol_type = other DNA
atggagagcgaccagcggaaggtggtgggcgacggcggcagcatcagcaaggggaaaatctgctccctgaaggcacgggccgtactgatagatatggaggaaggagtcgtgaacgaaattttgcagggcccactcagagacgtttttgacacaaagcagctgattaccgacataagtgggtccggcaacaactgggcagtcggacataaggttttcggttctttgtatcaggaccagatattggaaaaatttaggaagtctgccgagcattgtgattgtctgcaatgcttcttcatcattcattccatgggcgggggcacaggaagcggactgggcacctttctgctgaaagtcctggaagacgagttccctgaagtttaccggtttgtaacctccatttatccttctggagaagacgacgtcatcacatcaccatataactccatcctggcaatgaaagagctcaacgaacacgccgattgtgttctacccatagacaaccaatcgctgtttgacatcattagtaaaattgatctgatggttaatagcgggaagctggggacaacagtgaaacccaagtctctcgtgacctcttcttcaggtgccctgaagaagcaatag

SEQ ID NO: 210187 - DNA, 1356 bp, synthetic construct
  misc_feature 1..1356: note = Description of Artificial Sequence: Synthetic coding sequence
  source 1..1356: mol_type = other DNA
atgccccgggagatcatcaccctgcagctgggccagtgcggcaaccagattggctttgagttctggaagcagttgtgcgcagagcacggcatttctcctgaaggaatcgtcgaagaattcgccaccgagggaactgataggaaagacgtgttcttctaccaagccgacgacgaacactacatccctcgtgctgtgctcctggacctcgagcccagggtcatccactcaatcctgaatagcccctatgcgaaactctataatccagaaaacatttacctctcagagcacggtggaggggcggggaataactgggcctccggcttcagccaaggtgaaaaaatccatgaggatattttcgacatcatcgacagagaagctgacggttccgattccctggaaggcttcgtgctgtgtcattctattgcgggcggaacagggtcagggctcgggtcctacctgctggagcgtttgaacgaccggtatccgaaaaagttggtgcagacttacagcgtgttccccaaccaggacgagatgtcagatgtggtggtccagccttacaactctctcctgaccctgaaacggttgacccagaatgctgattgcgttgtggttcttgataatactgcccttaaccgaatcgctactgacaggttgcacatccagaaccctagctttagccagattaatcagctcgtctccactattatgtcagcctcaactacaacgcttcgttatcccggctacatgaataatgatcttatcggcctgatcgcctccctaatacccactccaagactgcatttccttatgacgggctacacgccactgacaaccgaccagagtgtcgcctcggtgagaaaaaccacagtcctcgacgtgatgagacggctcttacagccaaagaatgtcatggtttctactgggagagatcgacaaaccaatcattgctatattgccatcttgaatattatccagggggaggtggatcctacccaggtgcacaaaagccttcaaagaatacgcgagaggaagctggccaatttcatcccatggggcccggcatccattcaggtggccttgtctcgcaaatctccatatctgccctcagctcatagagtctccggcctcatgatggctaatcatacatcaattagctccctgttcgagcgcacttgtcgacagtatgataagcttagaaagcgcgaggcatttctcgagcagtttagaaaggaggacatgtttaaggataattttgacgaaatggacaccagcagggaaatcgtacagcaactgatcgatgagtaccacgccgccacgagacctgattacatatcctggggcactcaagagcaatag

SEQ ID NO: 210188 - DNA, 1356 bp, synthetic construct
  misc_feature 1..1356: note = Description of Artificial Sequence: Synthetic coding sequence
  source 1..1356: mol_type = other DNA
atgccccgggagatcatcaccctgcagctgggccagtgcggcaaccagattggtttcgaattttggaagcagctgtgtgctgaacatggtatttcgcctgaggggatcgtcgaagagttcgctaccgaaggcacagaccggaaggatgtgttcttttatcaggccgacgacgaacactatatacccagagcagttctgctcgacctggagccccgcgtcatccatagcatactcaatagcccgtacgctaaactgtataaccccgaaaatatttacctctcagaacatgggggcggggccggaaacaactgggcatctggattttcccaaggagagaagattcacgaggacattttcgacatcattgaccgcgaggcagatggctcagatagcctggagggctttgtactgtgccactccattgcaggtggtacagggtccggcctgggctcctacctcctggagcggctgaatgataggtatcccaagaagttagtgcagacttactccgtcttcccttatcaagacgagatgtctgatgtcgttgtgcagccttacaatagcctcctcacgcttaaacgactgacacagaacgccgattgcgtggttgtcctggataatactgcacttaacaggattgccacagaccgactgcatatccaaaatcctagtttctcacagattaatcagttagtcagcacaattatgtccgcaagtacaaccaccctgaggtacccaggatatatgaacaatgacttaatcggcctgattgcatccctgattcctacgcctagactgcactttcttatgacagggtataccccgctaacgaccgaccagagtgtggcctccgtgcggaaaacaacagtgctggacgtcatgagaagactgttgcagcccaagaacgttatggtgagcacaggacgagatagacagactaatcattgttacattgccattctaaacatcattcagggggaggtcgaccccacccaggtccacaagagtctccaacgcatccgagaacggaaactggcaaacttcatcccttggggccctgcctctatacaggtggccctctccagaaagtccccatatctgccatcggcacacagagtgtccggtctgatgatggccaaccacacctctatatcatccctcttcgaatcttcgtgtcaacagttcgataaactgcgtaagcgcgacgcctttctggaacagttccgcaaggaagatatgttcaaggacaacttcgacgaaatggataggtcccgcgaggtggtccaggagttgatagacgagtaccatgccgccacccagcccgactacatctcttggggcacacaggaacagtag

SEQ ID NO: 210189 - DNA, 2001 bp, synthetic construct
  misc_feature 1..2001: note = Description of Artificial Sequence: Synthetic coding sequence
  source 1..2001: mol_type = other DNA
atgatccacgagctgctgctggccctgagcggctaccccggcagcatcttcacatggaataaaagaagcggcctgcaggtctcccaggacttccctttccttcacccgtcagagacatcagttctcaacaggctgtgtcgcctgggaaccgactatattcggtttactgagttcattgaacagtacactggccatgtgcaacagcaggatcatcacccttcccaacagggtcaaggaggcctacacggcatttacctgagggcattctgtaccggattggattctgtactgcaaccttaccgacaagctctgctcgatcttgaacaggagttcctgggagacccgcacttatccatcagtcatgttaactactttctagaccaatttcagctgttgttcccatcagtgatggtggttgtggagcagataaagagtcagaaaattcacggctgccagatcctcgaaactgtgtataagcattcctgcgggggtttgccacctgtgcgctcagcgttggaaaaaattctggccgtgtgtcacggagtgatgtacaagcaactgtctgcttggatgctgcacggattacttctggaccagcatgaggagttcttcatcaagcagggccctagcagcggtaacgtgtcagcccaacctgaggaggacgaggaggatctgggcatcggaggcctcaccgggaaacagctccgggaactgcaggacctacggctgattgaggaggaaaacatgcttgcaccttctctgaaacagttctcccttagggtggaaatcctgccttcttatataccagtgcgggttgccgagaagatcttgttcgtaggggagagtgtgcagatgttcgagaatcaaaatgtgaaccttaccagaaagggatcaatcctgaaaaaccaagaagataccttcgccgctgagctccaccgtctgaaacagcaacctctgtttagtctcgtagactttgagcaggtggtggacaggatccggagcacagtcgcagaacatctgtggaaactcatggttgaagagagcgatctgctgggacagcttaagattattaaggacttttatctccttggacggggcgagctcttccaggcttttatcgacacggctcagcacatgctgaaaactcctcccacggcagtgactgagcacgacgtgaacgtggcattccaacagtccgcacataaagtcctcttggatgacgacaatcttttgcccctcctgcacttaaccattgagtatcatgggaaggagcacaaggatgcaacgcaggctagagaggggccatcacgcgaaacatctccccgggaggctcccgcttctgggtgggcagcactcggcctgagttataaggttcagtggcccttgcatatattattcacccctgccgtcttggagaaatacaatgtcgtttttaaatacctcttgtccgtgcgccgagtccaggccgaactccagcactgctgggcgctgcagatgcaacgtaagcacttgaagagcaatcaaactgatgctatcaaatggagactcaggaaccatatggctttcctcgtcgataatcttcaatactatttacaggtggacgtactggagtctcagttttcccagctgctgcaccagattaactcgactagagacttcgaaagcattaggcttgcgcacgaccatttcctgtcaaatctgcttgctcagagcttcatcctcctcaagcccgtttttcactgtctgaacgaaatcttggacctgtgccactcgttctgctccctggtttcacagaacctgggcccattggatgagcggggagctgcccaactgtccatcttggtaaagggattttctcgccagtcctctctgcttttcaagatcctctcttctgtgaggaatcaccaaatcaattcagacttggcccagctgctcctgcgactcgactataacaagtattatactcaggccggcgggacgctggggtcttttgggatgtag

SEQ ID NO: 210190 - DNA, 1029 bp, synthetic construct
  misc_feature 1..1029: note = Description of Artificial Sequence: Synthetic coding sequence
  source 1..1029: mol_type = other DNA
atggtggtggtggagcagatcaagagccagaagatccacggctgccaaatacttgaaacagtgtacaaacactcctgtggcggactgccccccgtgcggtctgccctagaaaagatcttggcagtgtgccatggagtgatgtacaaacagttatctgcttggatgctgcatggcttgctcctggaccagcatgaagaattcttcatcaagcaaggaccctcatctgggaacgtatccgcccagcccgaagaggacgaagaagatcttggcattggtgggctgaccggaaagcagctgcgcgaactgcaggatctgcgcctaatagaagaagagaatatgttggcccctagtctaaaacaatttagcttaagggtcgaaattctcccaagctatattcctgtgagagtggccgagaaaatcctgttcgtgggagaatctgtccagatgttcgaaaatcagaatgttaatctgactcggaaaggaagtatcctgaagaatcaggaggacacattcgctgccgaacttcatagactgaaacagcagcccttgttcagcctagtcgacttcgagcaagtggtggatagaattcgttctaccgtcgctgagcacctttggaagctcatggtcgaagagtctgatctcctggggcagctcaagatcattaaggacttctacctgcttggtcgtggagagttgtttcaggcctttatagatacggcgcagcacatgctcaagactcctccaactgcggtgactgaacacgatgtaaatgtcgcgtttcagcaaagcgctcataaggttcttctagacgacgacaacctactgccgctcctgcaccttacaattgagtatcatgggaaggaacacaaagccgatgctacacaagctcgggagggccctagcagagagactagcccgcgggaggctcctgcaagtggatgggcagccctggggctgagctacaaggtgcaatggcccctccacatactcttcacccctgccgtcctcgaaaaaaacaggcagttttag

SEQ ID NO: 210191 - DNA, 3075 bp, synthetic construct
  misc_feature 1..3075: note = Description of Artificial Sequence: Synthetic coding sequence
  source 1..3075: mol_type = other DNA
atggcccggcacggccccccctggagccggctggacgcccagcaggaacgggatgtgcgggaactggtccgcggtgtggccggactgcaggacgaagccgatcctaacttccagctggcgctcaatttcgcttggtccaatttccgattccaccggttcctcgatgtaaactctcataaaatcgaaaagacaatagaaggcatatacgagaagttcgtcatacatagtgacctttctaaagcagcctcatggaaacgactcacagaggaatttctgaacgcccctcttccttccatcaaggaaattaagacggatgctcactactccattttgagcctgctgctttgtctgtcagacagtccctcgaattcaagctacgttgagacacccaggaacaaagaggtggaaaaaaaagacgacttcgattggggtaaatacttgatggaggatgaggagatggacatcggaccgtatatggatacaccaaattggtctgaggaaagcgaagaagagaatgaccagcagcccttaagcagagaggatagcggtatccaagtagatcgaactcccctagaggaacaggatcagaaccgcaagcttgacccatgcatcagctggaaggatgagccagacgacaggtcctggttagagcatcatgtggtccatcagtattggacagcccgtccatcgcaatttccacactctctacatcttcactccaacttggccgcggtgtgggaccagcatctttactcttccgatccactctatgtacctgatgatagggtgcttgtgacagaaacccaagtgatcagggaaaccctgtggctgcttagcggcgtcaagaaactgtttattttccagctcatcgatggcaaagtcacggtgaggaataatatcatagtgacgcacctcacgcattcatgtctgcgctcggtgctggagcagattgcggcgtacgggcaggtagtgtttcggctccaggaatttatagacgaagtgatgggccattcgagtgaaagtatgctccctggaagcggtagtgtccctaagaaatccacggaggcaccatttcgtacgtatcaggcattcatgtgggctctgtataagtattttattagcttcaaagaagagctcgcagagatagagaagtgtataattaacaacgacaccacgatcaccttggccatcgtggtggacaagctggcaccgcgcttatcgcagctgaaagttctccacaaggtgttttcaacaggtgtggcggaggtgcctccggatactcgcaacgtagtaagggcctcacatctgctgaatacactctacaaagccattctagaatatgataatgtgggggaggcttcagagcagaccgtttctcttctgtttagcttatgggtagagacagtccgaccataccttcagacggtcgatgagtggatagtgcacggccatctatgggacggcgcgagggagttcattatccagcgaaacaaaaatgtgccggtcaaccatcgcgatttctggtacgcaacatataccctgtacagcgtttccgaaaagactgaaaacgaggaaaagatgagcgacaacgcctccgccagctcaggctcggaccagggaccttccagccgccagcatacaatggtaagttttttaaaacctgtcctgaagcagataataatggctggaaagagcatgcagctcctaaaaaatctacaatgtgccgaatccacaacttgtcaggcaggcgctagagacgccgagagaaaatccctatacactttatttctggaatccgtgcaatccaggttgcggcacggagaggatagcacaccacaggttctgaccgaacagcaagcaactaaagagaacctgatgaagatgcagtcgattgccgagagccatcttgaattggatgatgtgcatgatcccctgctggctattaattttgctagaatgtacctggagcaatcggattttcacgaaaagttcgccgggggtgatgtctgcgtggacaggtccagcgagtcggtcacttgccagacttttgaactaaccttgaggtcctgcctgtaccctcacatagataaacaatatctcgactgttgcggcaaccttatgcaaactctaaagaaagattacagactcgtagagtatctgcaggcaatgcgcaacttctttctgatggagggaggagatacaatgtacgacttctacacgagtattttcgacaaaatcagggaaaaggaaacgtggcagaatgtatccttccttaacgtgcaattgcaggaggccgtgggacagcggtatcctgaagattcctctcgccttagtatttcattcgagaatgtcgatacagccaaaaaaaaattgcccgtgcacattctggacggccttaccctcagctacaaggtaccctggccggtggacattgttatttccctcgagtgccagaaaatctacaaccaagtatttcttcttctgttgcagataaagtgggcaaagtattcactggatgttctactattcggggagttagttagcactgcggagaagcccagattaaaagaggggctcattcacgagcaggatactgtggcacagtttggcccccagaaggagccggtgcgccagcagatccatcgaatgtttctgctcagagttaaactcatgcactttgtaaacagcctccacaattacatcatgacaaggattctacactctactggtctagaatttcagcaccaggtggaagaggcaaaagacttagatcaactcatcaagattcactatcggtacctgagtaccatccatgacaggtgtctgctgagagaaaaggtgtcattcgtaaaagaagctataatgaaggtgctaaatctggcgctgatgtttgccgatgggtggcaggctggacttggcacatggagaatggagtccattgaaaagatggagtctgatttcaagaactgccatatgtttttggtgacaatcctgaacaaggcggtctgtaggggcagttttccgcacttggagagcttagcacttagtctcatggccggtatggagcagtcctag

SEQ ID NO: 210192 - DNA, 3075 bp, synthetic construct
  misc_feature 1..3075: note = Description of Artificial Sequence: Synthetic coding sequence
  source 1..3075: mol_type = other DNA
atggcccggcacggccccccctggagccggctggacgcccagcaggagcgggacgtgagggaactcgtaagaggtgttgccggcctccaagatgaagctgatccgaattttcagctcgcgctgaattttgcttggtctaatttccggttccaccggttcctggacgtgaattctcacaaaattgagaagacgatagagggtatttacgaaaagttcgtgatacattccgatttatccaaagccgcttcttggaaacgactgacagaggagtttctgaatgccccacttccctccattaaggagattaaaactgatgctcactatagtatcctcagtctgctgctgtgtctctcagattcacccagtaattcttcctacgtggagacaccacggaacaaagaagttgagaagaaggacgacttcgattggggcaaatatctcatggaggacgaggagatggatattggcccttatatggatacacctaattggagcgaagagagtgaagaggaaaatgaccaacagcctctctcacgagaggatagcggcatccaagtggaccggactccactggaagaacaggaccaaaaccgaaagctagatccgtgtatctcgtggaaggatgaacctgatgaccgaagttggctcgaacatcatgtggtgcaccagtattggaccgccaggccatcccaatttccacattctttgcacttacactccaatcttgctgcagtttgggatcagcacctgtattcatctgatccactttacgtgcctgatgacagagttcttgtgaccgaaactcaggtgataagagaaacattatggttgctgagcggggtgaaaaaattgttcatattccaactcatcgacggcaaagtgacagtgaggaataacatcattgtgacacacttaacccatagctgtctgaggtctgtcctagaacagatcgcagcatatggccaggtggtctttaggctccaggagtttatagatgaagtgatgggccacagctcagagagcatgctgccaggctcaggttccgtacctaaaaaatccactgaggcccctttcaggacatatcaggctttcatgtgggctctgtacaaatattttatctccttcaaagaagagcttgcagagatcgagaagtgtatcatcaataatgacaccacgattacgctcgcaatcgttgtggacaaattggcacctaggctctcgcagctgaaggtccttcacaaagtcttctctaccggggtcgcggaggtcccccctgatacccgaaacgtcgtgcgcgcatcacatctactaaatactctttacaaagccatccttgaatatgataatgtgggtgaggcttctgagcagacagtatctctgctcttttctctatgggttgaaacagtgagaccctatttgcagactgtcgatgagtggatagtacacggccacctgtgggacggagctagggaattcatcattcaacgcaacaaaaatgtgccagtgaaccatcgggatttttggtatgcaacttacaccctgtattctgtgtccgagaaaaccgaaaacgaagaaaagatgagtgataatgccagcgcatccagcggctctgatcaagggccctcctccaggcagcacacaatggtcagcttcttgaagcccgttctgaagcagatcatcatggccggcaaaagcatgcaactgctcaaaaacttacagtgtgcggaatctaccacatgccaggcaggtgcgagggacgcagagcgaaagtccctctacacactcttcctcgagagcgtccagagcagactgcgccatggcgaggattccactccacaggtcttgacagagcaacaggcgactaaagaaaatctcatgaagatgcagtctatagcagagtcgcacctagagctggacgacgtgcatgaccccctgctggcgatcaacttcgcacgcatgtatttagagcaatccgattttcacgagaaatttgccggcggcgacgtgtgcgttgaccgctcttcagaatcggtcacgtgccagacattcgagttaacgttgcggtcttgtctgtacccacatattgataagcagtaccttgactgctgcggaaatctgatgcagacgctgaagaaagattatcgtctcgtggagtacctccaagctatgagaaacttcttcttgatggaaggaggtgacaccatgtacgacttttacacatccatttttgacaagattagagagaaggagacctggcagaacgtatcttttctgaacgtgcagctgcaggaagcagtcgggcagcgctatcccgaagacagctcaaggttgagtatttcttttgagaatgtggatactgcaaagaaaaagctccctgttcacatcctggacggcctgaccttgagctacaaggtgccttggccggtcgacattgtgatctctctcgagtgccagaaaatctacaaccaggttttcttacttttgcttcagattaagtgggccaaatatagcctggacgtcctgcttttcggcgaactcgtgagtactgccgaaaaaccacgcctgaaggagggcctaattcatgaacaggacaccgtcgctcagtttgggccacagaaagagcctgtgaggcagcaaatacatcgcatgttccttctgagagtgaaattgatgcactttgtaaatagcctccacaactatattatgacgcggattcttcacagtacaggtttggagttccagcaccaggttgaggaggctaaggacctggatcagctgattaaaatccactataggtatctcagcacaatccacgaccggtgtttactacgagagaaggtgtctttcgtgaaggaggcaattatgaaagtgctgaatctcgcattaatgttcgccgatgggtggcaagccgggcttggcacttggcgtatggaaagtatcgaaaaaatggagtccgatttcaagaactgccacatgttcctggtcactattctgaacaaagccgtctgtcggggtagcttcccccactgtgagtatataatgctgaagtatttctatttgtgtatttctttgtag

SEQ ID NO: 210193 - DNA, 1431 bp, synthetic construct
  misc_feature 1..1431: note = Description of Artificial Sequence: Synthetic coding sequence
  source 1..1431: mol_type = other DNA
atgtggaccggctacaagatcctgatcttcagctacctgaccaccgaaatctggatggagaaacagtacttaagccagcgcgaagtagacctggaagcctattttacccggaatcacacagtccttcagggtactcggttcaagcgggcaatcttccagggacagtattgtagaaatttcggttgctgtgaggatcgcgatgatggctgcgttaccgaattctacgctgcgaacgccctgtgttactgcgacaagttttgcgaccgcgaaaacagcgactgctgccccgactataaatccttctgtagggaggaaaaggaatggcctccccacacccaaccctggtaccccgaaggttgtttcaaggatggtcagcattatgaggagggctctgtcattaaagaaaactgcaactcttgtacatgctcaggccaacagtggaaatgttcacagcacgtttgcttggtgcgcagtgagctgatcgagcaggtgaacaaaggcgactacggttggacagcccaaaactactctcagttttggggaatgacactagaggacggttttaaatttcggcttggaacactgccccccagccccatgctcctgagcatgaacgaaatgacagcctccttgcctgctacaacggatcttccagaattcttcgttgcgtcatacaaatggccagggtggacccacgggccacttgatcagaagaactgtgccgccagctgggccttcagcaccgccagtgtggccgcggataggatcgcaatacagtcaaagggccggtatacagctaacctcagccctcagaacctgataagttgctgcgctaaaaatcggcatggctgtaatagtggttctatagacagagcttggtggtacctgcgaaaacgcgggctggtgagtcatgcctgttacccattatttaaggaccaaaatgctacaaacaatggttgcgcaatggctagccgctcggacggtcgaggtaagcgccatgcaactaaaccttgtcccaacaatgttgagaagtcaaatcgcatttatcagtgcagtcccccgtacagagtgtcctcaaatgagactgagattatgaaggaaatcatgcagaatggtcctgtgcaggcgatcatgcaggttagggaagacttttttcattacaaaacagggatttaccgccatgtcaccagcactaataaggagtctgaaaagtaccgtaaactccaaacgcatgcagtaaagttaacggggtggggcaccctcagaggcgcacaagggcagaaagagaaattctggattgcagcaaactcctggggtaaaagttggggggaaaatgggtactttcgcattctccgcggggtgaatgagtctgatattgagaagctcatcatcgccgcttggggccagctaacctcatctgatgaaccatag

SEQ ID NO: 210194 - DNA, 1008 bp, synthetic construct
  misc_feature 1..1008: note = Description of Artificial Sequence: Synthetic coding sequence
  source 1..1008: mol_type = other DNA
atgtggaccggctacaagatcctgatcttcagctacctgaccaccgaaatctggatggaaaagcaatatctgtcacagcgagaggtggatctagaggcctacttcaccagaaaccatactgtcctgcagggcacacgctttaagagagccatatttcaaggccagtactgccgaaacttcggatgctgcgaagatagggacgatggctgcgtaaccgagttctacgcggctaacgccttatgctactgtgacaaattctgcgacagagagaactccgactgctgtccggactacaaatctttctgtagggaggagaaagagtggcctccccacactcaaccatggtaccccgaagggcgttggaccgcccagaactactcgcagttctggggtatgactctcgaggacggattcaaatttcgcctgggcacactgcccccctcgcccatgctcctcagcatgaacgaaatgacgcggcttgtgagccacgcgtgctatcccctgttcaaagatcaaaacgccacaaacaacggttgcgcaatggcatccaggtccgatgggcggggcaaaagacacgcaacgaagccgtgccctaataacgtggagaaatcaaacaggatttatcagtgtagcccaccttatcgggtgtccagtaacgaaaccgagataatgaaagagatcatgcagaatgggcccgtccaagccattatgcaggtacgtgaggatttcttccattacaaaacaggaatctacaggcacgtcacatctacaaacaaagagtcagagaagtatcggaagttgcaaacccatgccgtcaaactgacaggctggggcacacttcgaggcgcacaaggccaaaaggagaaattctggatagccgccaacagctgggggaaatcctggggcgaaaatggctacttccggatcctacggggagttaatgaaagcgacatcgagaaattaataattgcggcttggggccagctgactagctccgacgagccctag

SEQ ID NO: 210195 - DNA, 612 bp, synthetic construct
  misc_feature 1..612: note = Description of Artificial Sequence: Synthetic coding sequence
  source 1..612: mol_type = other DNA
atggagaagcagtacctgagccagcgggaggtggacctggaggcctacttcactcggaaccacaccgtgctacagggaacaagatttaagcgcgcgatcttccagggccagtactgcagaaacttcgggtgttgtgaggacagagatgacgggtgcgttacagagttctatgcagccaacgctctgtgttattgcgacaagttttgcgatagagaaaacagtgattgctgccctgattacaaatccttttgtcgtgaagaaaaagaatggccaccacacactcagccctggtatccagaagggtgtttcaaagacggccagcattatgaggagggatctgtgattaaagaaaactgcaactcttgcacttgttccggccagcagtggaaatgctctcaacatgtgtgcctcgtccgttcggagctgatcgagcaagtcaacaagggtgattatggatggactgctcagaattactctcagttctgggggatgactctggaagatggtttcaaatttcgcttgggcacactgcccccttcaccaatgttgctgagcatgaatgagatgactgtaagtgttccttccgacagcaggatgtgcatgtatctctag

SEQ ID NO: 210196 - DNA, 468 bp, synthetic construct
  misc_feature 1..468: note = Description of Artificial Sequence: Synthetic coding sequence
  source 1..468: mol_type = other DNA
atggccagccggagcgacggccggggcaagcggcacgccaccaagccttgtcccaataacgtggaaaagagcaatcggatctatcagtgcagccccccctaccgagtgagtagcaacgaaacggagatcatgaaggagatcatgcagaatggcccagtgcaagctatcatgcaggtgcgtgaagacttttttcactacaaaaccgggatctaccgccacgtcacctccaccaacaaagagagcgagaagtaccggaaactgcagacccatgcggtcaaactaaccggttggggaacactgcgtggcgcgcagggacagaaggaaaagttctggatcgccgctaattcttggggcaagtcttggggggagaacggctatttccgaatcttgagaggggttaatgagagcgacatcgagaagttgatcatcgccgcctggggccagctcactagcagcgacgagccctag

SEQ ID NO: 210197 - DNA, 618 bp, synthetic construct
  misc_feature 1..618: note = Description of Artificial Sequence: Synthetic coding sequence
  source 1..618: mol_type = other DNA
atgcgggcctggatgttcgtgagcatgcaggccgagatctggatggagaaacaatacctgtcccagcgtgaggtggacctggaggcctactttactcgaaaccacacagtccttcaggggactcgattcaaacgggcaatttttcagggccagtactgcaggaacttcgggtgctgcgaagaccgtgatgatggatgcgttacagaattttacgcggcgaatgcgctgtgttattgcgataagttctgcgatagagaaaatagcgattgctgcccggattacaagagtttctgtcgtgaggaaaaagaatggccaccccacactcagccatggtatccagagggttgttttaaggacggacaacactacgaggagggctctgtgatcaaggagaactgtaatagttgcacctgcagcggccagcagtggaaatgttctcagcacgtgtgcttggtgcggagtgagctgattgaacaggtgaataagggagactacggatggaccgcgcaaaattactctcaattttggggcatgactctggaggacggctttaagtttagacttggtaccttacctccgagcccaatgctcttatctatgaatgaaatgaccgagtag

SEQ ID NO: 210198 - DNA, 3570 bp, synthetic construct
  misc_feature 1..3570: note = Description of Artificial Sequence: Synthetic coding sequence
  source 1..3570: mol_type = other DNA
atgagcgtgaagagccccttcaacgtgatgagccggaacaacctggaagccccaccatgcaaaatgactgaaccattcaatttcgagaaaaatgaaaacaaattaccacctcacgaaagtctgagatcccccggcactctccctaatcatccgaatttccgtcttaagagcagtgagaacggcaataaaaaaaataatttcctattatgcgaacaaacgaagcagtacttggctagccaggaggataatagcgtttcttctaatcctaacgggatcaacggcgaggtcgtcggttcgaaaggggataggaaaaaactgccggcaggtaactccgtatccccacctagcgccgaaagcaactcacccccgaaggaggttaatatcaagccaggaaataatgttaggcccgccaaatccaagaaactcaacaagctggtggaaaactcgttgagcatttccaacccaggactgttcacgtctctgggtcccccactcagaagtacgacatgtcatagatgtgggctctttgggtctctgcgatgttctcaatgcaagcaaacgtattattgctccactgcctgccaacggcgggattggtctgctcacagtatcgtctgtcgtcccgttcagccaaactttcacaaactggaaaacaagtcttccatcgagactaaggatgtcgaggtgaataataaatccgactgccctctgggagtgacaaaagaaattgccatttgggccgagcggataatgttcagcgacttgagatccctccagctgaagaagaccatggagatcaaaggaactgttactgaattcaaacaccccggcgacttctacgtgcagctctattccagcgaggtactggagtatatgaaccagctgtcggctagtcttaaggaaacttacgctaacgttcacgagaaggattatattcctgtgaaaggggaagtgtgcatcgctaagtacaccgttgaccagacatggaatagagccattatacagaatgtggatgtgcagcagaaaaaagcccatgtgctgtacatcgattacggaaatgaggaaattattcctcttaacaggatttatcatctgaaccgtaacattgatttgttcccaccttgtgcgatcaagtgcttcgtcgccaacgttattccagccgagggaaactggagttctgactgcattaaagcaaccaagccattgttgatggagcagtactgctcaattaagattgtcgacatcctggaggaggaagtggtgactttcgcagtcgaagtggagctgcccaactcagggaaactgctggatcacgtgcttatcgagatggggtatggacttaaaccttctggacaggacagtaaaaaagaaaatgccgatcagtctgacccagaagatgtaggcaagatgactactgagaacaacatcgttgtggataagtctgacttaatccccaaggtgctcaccttgaatgtcggagacgaattctgcggtgtcgtggcccacatccagacgccagaagatttcttctgtcaacagttgcaaagtgggcgcaaattggcggaactgcaggccagtctgtccaagtactgcgatcagctgcctccaagatcggatttctacccagcaatcggcgacatctgttgtgcccagttttcagaagacgaccagtggtatagggcatcagtattggcatacgcctctgaagaaagcgtattagtaggctacgtggattacggcaatttcgagatcttgtctctcatgcggctttgtccaatcattcccaaattgctggagctgcctatgcaggcaattaagtgtgtgctggccggcgtgaagccttcacttggaatctggacccccgaagccatttgtttgatgaagaaactggtccagaataagataattacagttaaggttgtcgataagcttgaaaacagctcgctggtcgagctgattgacaagagcgagactcctcacgtgtcagtctctaaggtgttgctggacgccggatttgccgtcggcgagcagtcgatggtcactgataaacccagcgacgtgaaggagacttccgttcctcttggcgtcgagggaaaggtgaaccccctggagtggacgtgggtggagctgggtgtggatcagaccgtggacgtggtggtttgtgtaatatacagtcctggtgagttctactgccacgtgctgaaggaagatgcgcttaaaaagttgaacgacttgaacaaatccctcgctgaacactgccagcaaaagctgccaaacggctttaaagctgagatcggacagccgtgctgtgctttcttcgccggggacggtagttggtaccgggccctcgtaaaagaaattctgccaaatggccatgttaaagtccattttgttgattacgggaacattgaggaggtaacagcagatgaactgcgaatgatttcatcaactttcctaaacctgcctttccaaggcattcgatgccagttagctgacatacagtcacggaataagcactggtccgaagaagcgataacacggtttcagatgtgcgttgccgggataaaactgcaggcgcgggttgttgaggtcacagagaatgggatcggagtggaacttactgacctctctacttgttatcccaggattatcagtgatgtgctcatcgacgagcacctggtcctcaaatctgccagcccccacaaagacctgcccaatgacaggttagttaacaaacacgaactgcaggtccatgtgcagggcttgcaggccaccagctctgctgagcagtggaagactatagagctccccgtggacaagacaatccaggcaaacgtcctggaaatcatctcacctaacttgttttatgccctgcctaagggcatgcctgagaaccaggagaagctttgtatgctgacagcagagctcctcgagtattgcaacgcacctaagagtaggcccccataccgcccgcgaattggcgacgcctgctgtgcaaaatacacaagcgatgacttctggtacagggcagtcgtgctcggtacgtccgacactgacgtggaagtcttgtacgccgactacggcaacatagagacactgcccctgtgccgagtccaaccgatcaccagttcgcatctcgccctgccctttcagattataagatgctcccttgagggcttaatggaacttaacggcagcagttcccagctcatcatcatgttgcttaagaacttcatgctgaaccaaaatgtgatgctgtccgtgaagggaatcaccaaaaacgtgcatactgtgtctgtggaaaagtgttccgagaacggaactgtagatgtagccgataagctagtcacattcgggctggctaagaacataactccgcaacgacaaagcgctctgaacacagagaagatgtatcggatgaattgctgctgcacagagctgcagaaacaggttgagaagcatgaacatatacttctgttcctgctaaacaactctacaaatcaaaataaatttattgaaatgaaaaagttgctcaagaagactgcctccctgggaggcaagcctctgtag

SEQ ID NO: 210199 - DNA, 3315 bp, synthetic construct
  misc_feature 1..3315: note = Description of Artificial Sequence: Synthetic coding sequence
  source 1..3315: mol_type = other DNA
atgagcgtgaagagccccttcaacgtgatgagccggaacaacctggaagcccctccatgcaaaatgacagaaccttttaacttcgagaagaacgaaaacaaactgccgccccatgagtcattgaggtctccaggaacactgccaaaccatccaaatttccgactcaagtcatcagaaaatggcaacaaaaagaacaacttccttttatgtgagcagaccaagcagtacctggcaagccaggaggacaacagcgtttcgagcaaccctaatggaattaacggagaggtcgttggaagtaagggagatagaaaaaagctgcccgctggaaactctgtatctcccccatcagcagagtccaatagcccaccgaaagaggtgaatattaaaccaggcaataacgtgcgacccgccaagagcaagaagctgaacaaactggtggaaaacagtttgtctatcagcaatcctgggttgttcacaagcctcgggcctccgctgcgttcaacgacttgccaccgctgcggactgtttggcagcctgaggtgctctcagtgtaaacagacatactattgctccaccgcctgtcaacgtagagactggtcagctcattcaattgtttgccggccagtgcaacccaatttccataaacttgaaaacaaaagctctatcgagacgaaagacgtggaagtgaataacaaaagtgattgtcctttgggcgtgacaaaggagatcgccatatgggctgaacgaatcatgttttctgatctccgcagcctccagttgaagaagactatggagattaaagggacggtgactgagtttaagcaccccggcgacttttatgtgcagctatattctagcgaagtgctggagtatatgaatcagctgtctgcctctctcaaggagacgtatgcgaacgtccatgagaaggattatataccggtgaagggagaagtgtgcatcgctaagtataccgttgaccagacctggaatagagctattattcagaacgtggacgtgcaacagaaaaaggcgcacgtgctttatatcgactatggcaacgaggagatcatccccctgaataggatatatcatctgaataggaacatagatctgttccccccatgcgctatcaaatgtttcgtagcgaacgtgatcccggctgaggggaactggtccagcgattgtatcaaagctaccaaacctctccttatggagcagtactgcagtatcaagatcgtggacatcctggaagaagaggtggttacattcgccgtcgaggtggaacttcccaacagtggtaagctgcttgaccatgtgctgatcgaaatgggctatgggctgaaaccttctgggcaggacagcaaaaaagaaaatgctgatcaaagcgatcccgaggacgtgggcaagatgacaacggagaacaatatcgtggtggataagagcgatctgattccaaaggtgctgaccctgaatgttggggatgaattttgtggagtagttgctcacatacaaactccagaggattttttctgtcaacagctgcaatcagggcgtaagctggctgaattgcaggcatctctgagcaagtattgcgaccagttacccccacggtcagatttttatcccgccataggcgacatttgttgtgcgcagttttccgaggatgaccagtggtaccgggcttcagtgctcgcctacgcatccgaagagtcggtgctggttggctacgtcgactatggaaatttcgagatccttagcctgatgaggctgtgccctatcattccaaagctgctggagctgcccatgcaagccattaagtgcgtcctcgcaggggtcaagccatctctgggtatttggactcccgaggccatctgtttgatgaagaagttagtacaaaataagataattaccgttaaggtggtggacaagcttgaaaactcctctctggttgagcttatcgacaaatcagagacacctcatgtttcagtgtccaaagtgctgcttgacgcaggcttcgctgttggcgaacagtcaatggtgacagataaaccttctgacgtaaaagaaacatctgtgccactgggtgtcgaggggaaggtaaatcctctcgagtggacttgggtggagctgggagtggatcagaccgttgatgtcgtggtgtgcgttatatattcacctggtgaattctactgccatgtgcttaaagaggatgcacttaaaaaactcaatgacttgaataagtcccttgccgagcattgtcagcagaagctacctaacggctttaaggccgagattggacagccttgctgtgcgtttttcgccggggacggttcttggtacagggctctcgtgaaagaaatactgcccaatggacatgtcaaggtgcattttgtggactatggaaacatcgaagaagtaacagccgacgagttgaggatgatcagttcaactttcctcaacttgccttttcagggcatccgctgccagctggccgacattcagtccagaaataagcattggtccgaagaggcaattaccaggttccagatgtgtgttgccggaatcaagcttcaagctcgcgttgtcgaagttactgagaacggaattggagtcgagttgactgatctgtcaacctgctacccgcggataataagtgatgtgctcatcgatgagcacctcgtgctgaaatcagcaagtccccataaagacctccccaacgacagactggtaaataagcacgagctgcaggttcacgtgcagggattgcaagccaccagctcagccgagcagtggaaaactattgagcttcctgtggacaagacgatccaggctaatgtactggagatcatttctcccaaccttttttacgccctcccaaagggcatgcctgaaaatcaggagaagttatgcatgcttacagctgagcttctcgaatattgcaatgctcctaagtcccgtccaccctacaggcctcgaatcggagatgcttgttgcgccaaatatacctctgacgatttttggtatagagccgtggtgttagggacctcagacaccgacgttgaggttctgtacgcagattacgggaatattgagactctgccgctctgtagagttcaaccaattaccagctctcatcttgcacttcctttccaaattattcggtgttctcttgaagagaaaatgtataggatgaattgctgctgcaccgaactgcagaaacaggtcgaaaagcatgaacacatcctgctgtttctactgaataattcaaccaatcaaaataaattcatcgaaatgaaaaaattgctgaagtcctag

SEQ ID NO: 210200 - DNA, 3228 bp, synthetic construct
  misc_feature 1..3228: note = Description of Artificial Sequence: Synthetic coding sequence
  source 1..3228: mol_type = other DNA
atgagcgtgaagagccccttcaacgtgatgagccggaacaacctggaggccccaccatgcaagatgacagagcccttcaacttcgagaagaacgagaataaactgcccccacacgagagcctccgatcaccaggcactctgcctaaccaccccaacttccgtctgaaaagttcggaaaacggcaacaaaaaaaataattttctcctgtgcgaacaaactaaacagtatttggcaagccaggaggataactctgtgagttctaatccaaacggtatcaacggagaggttgtcggctctaagggcgaccgcaagaagctgccagccgggaacagcgtgagtcccccttctgccgaatcaaattctcccccaaaggaggtgaatattaagccaggtaataatgtgcgaccagccaaaagtaagaagttgaacaagcttgtcgaaaactcactgagtatctccaatcccgggctcttcacctccctgggtcctccgttgaggtccacgacgtgccaccgttgcggactttttggctctctgaggtgcagtcagtgtaaacagacctattattgcagcaccgcatgtcaaagaagggactggagtgcgcacagcatcgtttgcagacctgttcaaccaaacttccataagcttgagaataagtctagcatcgaaacaaaggatgtcgaagtcaataataagtcagactgcccactcggagttacaaaagagatcgccatctgggctgagaggatcatgtttagtgatcttagaagtctgcaactaaaaaagaccatggagatcaaagggaccgtgactgaatttaagcaccccggggatttttatgtgcagctgtacagcagcgaggtgctggagtacatgaatcaactttcagctagcctgaaagagacctatgctaacgtgcacgagaaagactatattccagtgaaaggagaggtctgcatcgctaagtacacggttgatcagacttggaaccgcgcaattattcagaacgtggatgtacagcaaaagaaggctcacgttttatatattgactatgggaatgaggaaataatacctctgaatcgcatctatcacctgaaccgaaacattgacttgttccccccgtgtgccattaaatgctttgttgcaaatgtgatccccgcagaaggaaattggtccagcgactgtatcaaagctacaaaacctctgttaatggaacagtactgctctattaagattgtggacatcctcgaggaggaggttgtcacgtttgcggtggaggtagagcttccaaactcaggaaagctcctggaccatgttctcatagagatgggctatggcctcaagccctctggccaggatagcaagaaggaaaacgcagaccagagcgacccagaagatgtcggcaagatgactacggagaacaacattgtcgttgacaagagtgatctgatacctaaagttctgacattgaatgtcggcgatgagttttgcggagtggttgcacatattcagacccccgaggacttcttttgtcaacagctccagagtggccgtaagctcgcagaactgcaagcttccttgtccaagtactgtgatcagctcccacctagatcggacttctaccctgcaattggagacatttgttgcgcacagttctcaggagtcaaaccatccctcgggatttggactcccgaagcaatttgtctcatgaagaaactggtgcagaataagatcatcaccgtcaaagtggttgataaactcgaaaattcttctctcgtagagctcattgacaaatcggaaacaccccatgtcagtgtgtctaaggtgcttctggacgccggctttgcagtgggggaacagtcaatggtaaccgataagcctagcgacgttaaggaaaccagcgtgcccctcggagtagagggaaaagtcaaccctctggagtggacctgggtggagctgggtgtggaccagacagtagacgtggtcgtttgtgtcatttactcccctggcgaattttattgtcacgtgctgaaagaggacgctctcaagaaactgaacgacctaaataaatcacttgctgagcattgccaacagaaactgcccaacggcttcaaagccgagatcggacagccgtgctgtgcgttttttgccgacatccaatcacggaacaagcattggagcgaggaagccattacaaggttccaaatgtgcgtcgcagggatcaagctgcaggcccgggtcgtggaagtcacagaaaatggcatcggtgtggaactgaccgatttaagcacctgttacccaaggatcatctccgatgtattgatagacgagcacttggtccttaaatctgcaagtccacataaagacctgcctaacgatcggctggtcaacaagcacgaactgcaggtccacgtccagggactccaggccacctcttcagcagaacagtggaagacaatcgaactgcctgttgacaagacaatccaggctaacgttctggagatcatttcaccaaatcttttctacgcattacccaagggaatgccggagaaccaagagaagttatgtatgctcaccgccgaactgctggagtattgcaatgcacctaaatcccgtcccccctatcgcccacggatcggggacgcttgttgtgcaaagtacactagcgatgatttttggtaccgtgcagttgtcctgggaactagcgatacggacgtggaggtcttgtacgcagactatggtaacatcgagactcttcccctctgccgggtccagcctatcacaagcagtcatctggcactgccattccagatcatcagatgctcgctcgagggcctcatggagctcaatggcagctcaagccagttaattattatgcttctaaaaaacttcatgctcaaccagaatgtgatgctgagtgtaaagggtatcacaaagaacgtgcatacagtctccgttgagaaatgctccgagaatggcacagtggatgtcgccgacaagcttgtgaccttcggactagccaagaatatcacaccgcaaaggcagtccgctcttaataccgagaagatgtaccgcatgaactgctgctgtacggagctgcagaaacaggtcgagaaacacgaacatattctgctgttcctgctcaataactctacaaatcagaacaagttcatcgaaatgaagaagttgctgaagaagaccgcctcattgggagggaaaccactctag

SEQ ID NO: 210201 - DNA, 3342 bp, synthetic construct
  misc_feature 1..3342: note = Description of Artificial Sequence: Synthetic coding sequence
  source 1..3342: mol_type = other DNA
atgagcgtgaagagccccttcaacgtgatgagccggaacaacctggaggccccaccttgtaagatgaccgagccatttaacttcgaaaaaaatgaaaacaagctgccaccccatgaaagtctgagatctccaggaacccttccaaaccatccaaactttcgtctaaaatcatcagagaacggtaacaaaaagaacaactttctcctgtgcgagcagaccaagcagtaccttgcaagtcaagaagacaactctgtatcatcaaatccgaacggcatcaatggagaagtagtgggaagcaaaggggacagaaagaagttgccagccggtaattcagtctcgcccccttccgcagaatccaactctccgcctaaggaggtgaacattaagcctggcaacaatgtacgcccagccaagtcgaagaaactaaacaagctggttgaaaactcactcagtatttcaaatccggggctcttcacgtctctgggacctccactgagatcgactacatgccaccgctgtgggttgtttgggagcctcagatgttctcaatgcaaacaaacgtactattgctcaacggcttgccagcggcgagactggtccgcacattccatcgtctgtagaccagtgcagccaaattttcataagctggaaaataaatccagtattgagactaaggatgtagaggtcaacaacaagagtgactgtccgcttggtgtgacaaaggagatcgccatttgggccgagcgaattatgttctcagacctaagatctctgcagctgaaaaagacgatggaaataaagggaaccgtcactgaattcaagcacccaggggatttttatgtccaattgtattctagcgaagtcctggaatatatgaatcaactctccgcgtctctgaaagaaacctatgccaacgtgcacgagaaagactatatcccggttaaaggcgaagtatgcatcgccaaatacaccgtggatcaaacatggaacagagcgatcattcagaacgtcgacgtccaacagaagaaggcccatgtgctttacatcgattatggcaacgaggaaattatccccctgaaccgaatttaccacctgaaccgcaatatcgacttgttccccccctgtgccataaagtgcttcgtggccaacgtaattcctgcagaggggaactggagtagcgactgcatcaaagccaccaagcccttgctgatggaacaatattgcagcatcaagatcgttgatatcttagaggaggaagtagtcacttttgccgtcgaagtggaactgccgaattccggaaaactactggatcacgtattgattgaaatgggatatggtctaaaaccttcgggtcaggattccaaaaaggaaaatgccgatcagagcgacccggaagacgttggcaagatgaccacggaaaacaacattgtggttgacaagtctgatttaattcccaaagtgttgacactgaatgtcggcgacgagttttgtggcgttgtcgcgcacatccagacgccagaggacttcttctgccagcagctacaaagtgggcgaaagcttgctgaactgcaggcctccctgtcaaaatattgcgatcagctgcccccccgaagtgatttctaccccgctatcggggacatctgctgcgcacagttctccgaagatgatcagtggtacagagcctccgtgctggcctatgccagcgaagaatcagtcctagtgggatacgtggactacggaaactttgaaatcctcagccttatgagactgtgcccaatcattcctaaactgctggagttgcctatgcaagccatcaaatgtgttctggctggggtgaaacccagtctaggaatatggactcctgaggccatctgtcttatgaagaaacttgttcaaaataaaatcatcaccgtcaaagtggtcgacaagctcgaaaactcatccctggtggaactgatcgacaagagtgaaacccctcacgtctctgtaagcaaagtactgctcgacgctggcttcgcagtgggggagcagagcatggtcactgataaaccatccgacgttaaagaaaccagcgtgccattaggcgtggaaggtaaggtgaatcccctagaatggacatgggtcgaacttggtgtggaccaaaccgtggacgttgtggtgtgtgtgatttacagtccgggcgagttctactgtcacgtattgaaggaggacgcactgaagaaacttaatgacctgaacaagtccttagctgaacactgtcagcaaaagctccccaatggcttcaaggccgaaatcgggcagccctgctgcgcttttttcgcaggggatggaagctggtacagagctctggttaaagagatcctaccaaatggccacgtgaaggtccacttcgtggattacggcaatattgaggaggtcacggcagacgaactaaggatgatttctagcaccttcttgaacttgccattccaaggcattcgctgtcagctcgctgacattcagagccgcaacaagcattggtcagaggaagccatcacaaggttccagatgtgtgtcgcaggcataaagcttcaggcccgggtggtggaggtgacggagaacggtatcggcgttgaactgacagaccttagcacctgctacccaagaatcattagcgacgtgctcatagacgaacacctcgttctcaaaagcgcctctccccataaagaccttcctaatgatcgactggtaaacaaacacgaactacaagtacacgtccaggggcttcaagctacaagcagcgctgagcagtggaagaccatagagttacccgtggataaaacaattcaggctaacgtgctggaaattatctcacctaatctgttttacgcactgcctaagggtatgcccgaaaaccaggaaaaactgtgtatgttaaccgccgagcttctggagtattgtaacgcacctaagagtcgtcccccgtaccgaccgcggatcggggatgcatgttgcgccaagtatactagcgatgatttttggtaccgtgcggtggtcctgggaacgtccgataccgacgtggaggtcctctatgcagattatggaaatatcgagaccttgcctctgtgtagggtgcagcctattacctcgtcccacctggcactacccttccagatcataagatgttcattggaggagaagatgtataggatgaactgctgctgtaccgaactgcaaaagcaggtcgagaagcacgagcatatactgcttttcctgctgaataactcaactaaccagaataaattcattgaaatgaaaaagctgctaaaaaagacggcctcactgggcggtaaacccctctag

SEQ ID NO: 210202 - DNA, 2154 bp, synthetic construct
  misc_feature 1..2154: note = Description of Artificial Sequence: Synthetic coding sequence
  source 1..2154: mol_type = other DNA
atgaaccagctgagcgccagcctgaaggagacctacgccaacgtgcacgagaaggactatattcctgtcaaaggggaggtgtgtattgccaagtataccgtcgatcaggccatcaaatgctttgttgcaaacgtgatccctgccgagggaaattggagcagcgattgtatcaaggctactaagccactgcttatggaacagtattgctccataaagatcgtggacattctggaagaagaggtggttaccttcgctgtggaagtggagctgcctaattctggcaagctgctggatcacgtgctgatagaaatgggttacgggctgaaaccctctggccaggacagtaaaaaagaaaacgccgaccagtcagaccccgaggatgttggcaaaatgaccaccgagaataacatcgtagtggataaatccgatcttatacccaaggtactgacgttgaacgttggcgacgaattttgcggcgttgtcgcccatattcagacgccagaggatttcttctgtcagcagttgcaaagcggtcgaaaacttgcggagctccaggcctccttgtccaagtattgcgaccaactgccacccagaagtgacttttatcccgccatcggtgatatatgttgcgctcagttcagcggggtgaagccatcgctgggaatttggactccagaagccatatgtctgatgaaaaagcttgtccagaataagatcatcaccgtgaaagtagttgataagctcgaaaacagttctcttgtcgagctaatcgataagtccgaaacaccacacgtcagcgtcagtaaagtccttctagacgcagggttcgctgtgggagaacagtccatggttacggacaaaccttcagatgtgaaggaaacaagcgtgcctctcggcgtggagggcaaggtgaatcctttagaatggacatgggtagagttgggcgtggaccaaacagtcgatgtggttgtttgtgtcatatactcaccaggagagttctactgtcatgtcctgaaagaagacgccctcaagaagcttaatgacctgaataagagcctcgcggaacactgtcagcagaaactcccgaatggctttaaagccgaaatcggtcagccatgctgtgccttttttgctggggacgggtcttggtacagggcccttgtaaaagagattctgcctaatggtcatgtcaaagtgcattttgttgattatgggaacatcgaagaggtaactgccgacgaactccggatgattagttcgacctttctgaacctgcctttccagggaatacggtgccagttggccgacatccagtcccgcaacaagcactggagcgaggaagcgataactcggttccagatgtgtgtggctggtattaaacttcaggctagggtggtagaggtgacagaaaacggcatcggcgttgagctaacggatctgtcgacttgttacccacggatcatcagcgatgtactgattgacgagcatcttgtgctaaaaagtgcctctccccataaagacttacccaatgaccgattggtcaataagcatgaactgcaggtgcacgtgcagggacttcaggccactagctccgcagagcagtggaagacaattgaattaccagttgataaaacaattcaagcaaatgttctggagataattagtcccaacctcttctacgcattgcctaaaggaatgcccgagaatcaggaaaagctgtgcatgctgaccgccgaactgttagagtactgtaacgcccccaagtcccggccaccttaccgaccgaggattggggatgcctgctgtgctaagtatacgagtgacgacttttggtatagggccgtcgtcttggggactagcgatacggacgtggaggtcctttacgctgattacgggaacatcgagaccctaccactgtgcagggtccagccgatcacctcaagtcacctggccttgcccttccagataatccgctgcagtttggaggaaaagatgtataggatgaactgctgttgcactgagcttcagaagcaagtggagaaacacgagcacattttacttttcctcctaaacaactcaacaaaccagaataagttcatagagatgaagaaactcctcaagaagacagcgtccctgggcggtaagccgctgtag

SEQ ID NO: 210203 - DNA, 1956 bp, synthetic construct
  misc_feature 1..1956: note = Description of Artificial Sequence: Synthetic coding sequence
  source 1..1956: mol_type = other DNA
atgctgcggctgcagatgaccgacggccacatcagctgcaccgccgtcgagttcagctatatgagtaaaatctcactcaatactccacccgggactaaagtcaaattatctgggatagtggacataaagaatggctttttgctgctaaacgattcaaatacaactgtgctggggggggaagtggagcatttaattgagaaatgggagttacagaggagtctctcaaaacacaaccgttctaatattgggacagagggggggcctcctcctttcgtgccatttgggcagaagtgcgtgagtcatgtacaggtggatagtagggaactggatcggcgaaaaaccttgcaggttacaatgcccgtgaagcccactaatgacaacgacgaatttgagaaacagaggaccgctgccatcgctgaggttgccaaaagcaaagaaacaaaaacttttggggggggcgggggcggggcacggtctaatctgaacatgaatgccgccgggaataggaatcgcgaggtgctgcagaaggaaaagtccaccaaaagcgaaggcaaacacgagggggtttaccgagaacttgtggatgaaaaagccttaaagcacatcactgagatgggtttttcaaaagaggctagccgccaggctctgatggacaatggtaataatctagaagcggcattaaacgtgctgctgacaagcaacaagcaaaagccagttatggggccaccactccgagggcgcggaaaaggacgcggccgcatccgctcggaggacgaagaggatctgggcaacgcacgcccaagcgcaccctcaaccctgtttgatttcctggaatctaaaatgggaactctcaacgtggaggagcctaagagccagccacagcaactgcaccagggccagtatagatccagcaatacggaacagaacggagtgaaggacaataaccatctgcgacacccacctcgaaacgacacgcgccaaccaagaaatgagaaacccccccgattccagcgcgattcccagaattcaaagagtgtgctggaagggtctggactgcctagaaaccgaggaagcgagcgccccagcacctccagcgtctccgaggtgtgggccgaggacagaattaaatgtgacagaccctacagtcgatatgatcggacaaaggatacatcctacccactgggctcccagcattccgacggtgctttcaagaagagagacaactctatgcaatcaaggtcgggtaaagggcctagtttcgccgaagccaaggagaatccacttccccaggggagtgtggactacaacaatcagaaacgtggcaagcgggaatcacagaccagtatcccagattacttctacgaccggaagtctcagacgattaataacgaggccttctcaggaattaagattgagaaacacttcaatgtgaacaccgattaccaaaacccagtgagatcaaactcttttatcggcgttcccaacggagaggtcgagatgcctctgaaaggccgcagaattggccctatcaagcccgcaggaccggtaacagccgtgccatgtgacgacaaaatcttctataacagtgggccaaagcggcggtctggaccaattaaacccgaaaagatcttggagtctagcattcctatggagtacgctaaaatgtggaagcctggggacgagtgctttgctttgtactgggaagataacaaattttacagggcggaggtggaagcccttcattcgtccggcatgaccgctgtagtgaaattcatcgactacggcaattatgaggaggtcctgctttcaaacatcaaaccaattcaaacagaggcatgggaagaggaaggcacttacgatcagactctggagttcaggagaggaggagatggccagccacgacgctccaccaggcctactcaacagttttaccagccaccaagagccagaaactag

SEQ ID NO: 210204 - DNA, 1956 bp, synthetic construct
  misc_feature 1..1956: note = Description of Artificial Sequence: Synthetic coding sequence
  source 1..1956: mol_type = other DNA
atgctgcggctgcagatgaccgacggccacatcagctgcaccgccgtagaattttcctacatgagtaaaatcagcctgaatactccgccaggtacgaaggtaaagctgtcagggattgtcgacatcaaaaatgggtttcttctcctcaatgattctaatactacggtcctggggggcgaggtagagcacctcatcgagaaatgggagctgcagagaagtctgtccaagcataaccgttcgaacatcggaacggagggcgggcctccaccattcgtgccattcgggcagaagtgcgtctcccatgttcaggtcgacagccgagagttggacaggagaaaaacattacaagtgactatgcctgtgaagcccaccaatgacaatgatgagtttgaaaagcaacgaaccgcggctattgctgaagttgctaagtccaaggagacaaagacatttggcggcggcggcggaggtgcacggtcgaatctgaacatgaatgctgcaggaaatagaaatagagaagtgttacagaaggagaagtctacaaagtcagaaggcaaacacgaaggagtctatagagagctagtagacgagaaggccctgaaacatatcaccgagatggggttcagcaaggaagctagtcgacaagctttgatggacaatgggaacaaccttgaggccgcactgaacgtccttctgacttcaaacaagcaaaagcctgtgatgggaccccccctgcgtgggcggggcaaggggcggggtcggatccggagtgaagatgaggaggacctcggcaatgccaggcctagcgctcctagcaccttgttcgattttctggaaagcaaaatgggaacgctcaatgtagaggagccaaaaagccagcctcagcagctgcaccaggggcagtacaggtcctcaaacacagagcaaaacggggttaaggacaataaccacttgagacaccccccaaggaacgacaccagacaaccgcgaaacgaaaagccaccccgttttcagcgagactcccagaactccaagtctgttttagagggctccggactgcctcggaaccgcggctccgagagaccatcaacctccagcgtctccgaggtatgggcagaagacaggatcaagtgtgaccggccttatagcagatacgacagaactaaagacacctcctaccctctggggtcacagcatagcgacggtgcgttcaagaagagggacaattcgatgcagtcacgcagcggaaaagggccatcatttgcagaggccaaagagaatccactcccccaggggagtgtggactacaacaaccagaaacgaggaaagcgtgagtcacagacttccataccggactatttctacgatagaaagtcccagaccattaataatgaggccttcagcggcataaaaattgagaaacatttcaatgtgaacaccgattaccaaaaccccgtccggtcaaacagcttcatcggcgtacccaacggggaggttgaaatgccgctgaagggccgcaggattggtcccattaaacccgcggggccagtgacagcagtaccctgtgacgacaagattttttataattcaggcccaaagcgcagaagtggacctattaaaccagaaaaaatcctggagtcttctatacccatggaatacgcaaaaatgtggaagcccggagatgaatgctttgcattgtactgggaagataataaattctacagagctgaagtggaggcactgcacagcagcggcatgaccgctgtagtgaagtttatagattacgggaactacgaggaggtgctcttaagcaatattaagccaatacagaccgaagcttgggaggaggagggaacatatgaccagacgctggaattcagaagaggcggggacggtcagccacgccggtccaccagacccacgcagcaattttaccagcccccgcgtgccaggaactag

SEQ ID NO: 210205 - DNA, 390 bp, synthetic construct
  misc_feature 1..390: note = Description of Artificial Sequence: Synthetic coding sequence
  source 1..390: mol_type = other DNA
atgctgcggctgcagatgaccgacggccacatcagctgcaccgccgttgaatttagttatatgtctaaaatctccctgaacaccccgccgggaaccaaagtgaagctctctggtatcgtggacatcaaaaacggatttctactgctaaacgactcaaatactactgtattgggaggggaggttgagcatctgattgaaaaatgggagctgcaacgatctctctctaagcataatagaagcaacatcggcaccgaggggggcccacctcctttcgtcccctttggccagaaatgtgtctcccacgtgcaggtcgacagcagagagctggatcgtcgcaagaccctccaggtgacgatgcccgtgaaacctacaaacgataatgacgagtag

SEQ ID NO: 210206 - DNA, 1956 bp, synthetic construct
  misc_feature 1..1956: note = Description of Artificial Sequence: Synthetic coding sequence
  source 1..1956: mol_type = other DNA
atgctgcggctgcagatgaccgacggccacatcagctgcaccgccgtggagttttcatacatgtccaagatatctctcaacaccccccctggaacgaaggtcaagcttagcggaatagtggatatcaagaatggcttcctcttgctgaacgacagcaataccacagtgctgggcggggaggtggagcacttgattgagaagtgggaattgcagcggagcctttctaagcacaacagatccaacatcgggacggagggtggaccgcctccttttgttcctttcgggcagaagtgtgtgtcacatgtgcaagttgacagtcgtgagctcgaccgacgcaagaccttgcaagtcacaatgccagttaagcccactaacgataacgacgaatttgagaagcaacgcacagctgcaattgccgaggtcgcgaaaagtaaagaaaccaagactttcgggggcggcggcggaggagcccggtctaacctgaacatgaacgccgccgggaaccgcaatcgcgaggtgctgcaaaaagagaaaagtaccaaaagtgagggaaagcacgagggggtgtatagagaactggttgacgagaaagctttgaagcatattactgagatggggttcagtaaggaggccagtcgccaggccctcatggacaacggcaataatctggaagcagccctgaacgtcctgctaacgtcaaacaagcagaagccggtgatggggcctcctctgaggggcagaggcaagggcaggggccgaatcaggtccgaggatgaggaggatctgggaaacgctcgaccctcagcgccctcaacattgtttgacttcctggaatcaaaaatgggtaccctgaacgtagaagagccgaaatcccagccccagcagctccaccagggccaataccggtctagtaatacagaacagaacggcgttaaggacaacaatcacttgcggcatccacctcggaatgatacaaggcaaccgcgcaacgagaagcccccccggttccagcgcgacagtcagaactccaagtctgtcctggagggcagcgggctgccccgtaatagaggatcggagcgcccttctacctcttctgtgagcgaggtgtgggctgaagataggattaagtgtgacagaccctattccaggtatgaccgcaccaaggatacatcctaccccttaggtagtcagcactccgatggggccttcaagaaacgggataactccatgcagtccaggagtggcaagggaccgtccttcgccgaagctaaagagaaccccctaccgcagggaagcgtcgactataataatcagaagcgcggtaagagggaatcccagacttccatcccggactacttctatgaccgaaagagccagacaatcaataacgaggccttcagcggcatcaaaattgagaagcacttcaatgtcaatacagactatcaaaatcccgtcaggagcaattccttcatcggtgttcctaacggtgaagtggagatgccacttaaggggcgcaggattggccccattaaaccagcgggccccgtgactgcagttccctgtgatgataaaattttctataactccgggcctaaacgtcggagtggaccaataaagcctgaaaagatcctcgagtcctccattccaatggaatatgcaaaaatgtggaagcctggagatgaatgcttcgctctctactgggaggataacaagttctacagagccgaggtcgaagctctgcattccagcgggatgacagcagtcgtcaaattcatagattacggaaattatgaggaagtcctgcttagtaacataaaacctatccaaacagaagcatgggaggaggagggaacctacgatcaaactctcgagtttagacgtggcggagatggccagccacgcaggtcaaccagaccaacccagcagttctaccaaccgcctcgcgcccgcaactag

SEQ ID NO: 210207 - DNA, 2235 bp, synthetic construct
  misc_feature 1..2235: note = Description of Artificial Sequence: Synthetic coding sequence
  source 1..2235: mol_type = other DNA
atggcccaggtggccggcgccgccctgagccaggccggctggtacctcagcgacgaaggtatcgaagcctgtacctctagtccagataaagtgaacgtcaacgacattatattgatcgccttaaatacagacttgaggactattgggaaaaaattcttgccgagtgatatcaactcgggaaaagtggagaaattggagggtccctgcgtcctccagatccagaagattcgtaacgttgctgctcctaaggataatgaggaaagccaggccgccccacgcatgttgcgcctacagatgacggatggacacataagctgtactgccgtggagttctcttacatgtcgaagatttcattaaacacccctcccggcactaaagttaaactgtccggcatcgtcgatattaaaaacggtttcctgcttctgaacgatagcaacaccaccgtgctgggcggggaggtagaacatctgatcgagaaatgggagctacagcgaagccttagcaagcataatagaagtaatataggcacagagggtggacctcctcctttcgtgcccttcgggcagaagtgcgtttcccacgtgcaggttgactccagggaactggacaggaggaagaccctacaggtgaccatgcccgtgaaacctacgaacgataatgatgagtttgagaagcaacggacagcggcgattgctgaagtggcaaagagcaaggagaccaaaacatttggaggcggcggagggggtgctaggtctaatctcaacatgaacgccgcaggaaatcggaacagagaggtcctccagaaggagaagtctaccaagtctgagggcaagcacgagggcgtctatcgagagctcgttgacgagaaggcccttaagcacatcactgagatggggtttagcaaggaagcgtctaggcaagccctcatggataacggtaacaacctcgaggcagcactgaacgtcctgttgacctccaacaagcagaaacccgtgatgggcccacctctccggggaaggggtaaagggcgtggcagaattcggagtgaggacgaagaggatttaggcaacgcaagaccttctgctccatccaccctctttgattttctcgaaagtaaaatgggtaccctgaatgtcgaggagcccaagtcccagccacagcagctgcaccagggccaataccgatccagcaacacagaacagaatggtgtgaaagataacaaccacctcaggcaccccccccgcaatgacacgagacagcccaggaatgagaagccaccgcgattccagagagatagccaaaattctaaaagcgtgctggaaggtagtggtctcccgcgtaataggggatccgagagaccttctacatcctctgtgtccgaagtgtgggctgaagataggataaaatgcgacaggccttattcccgctatgatcgcaccaaagatacttcataccccctcggttcacagcacagcgatggagcctttaagaagagggacaatagcatgcagtctagatccggtaaaggaccatccttcgccgaagccaaagaaaatcctctccctcaagggagtgtcgactacaacaaccagaaaaggggtaaaagagagagtcagacaagcattccagactacttttatgaccgaaagtctcaaaccattaacaacgaagcattctcggggataaaaatcgagaagcactttaatgtcaataccgactatcagaaccccgtgaggagtaatagctttattggcgtccctaatggtgaagtggagatgccactcaaagggcggcgcatcgggcccataaaaccagccggccctgtgaccgctgtaccatgcgatgataaaattttctacaattccggccctaagcgccggagcgggccaatcaagcctgagaaaattctcgaatcctcaatcccaatggaatatgctaaaatgtggaagccaggggacgagtgcttcgccctgtactgggaggataacaagttttacagggctgaggttgaggctctgcactcctcaggcatgaccgcagtggtcaaattcattgactatggcaattacgaggaggtccttctgagcaatatcaaacccattcagaccgaggcctgggaggaggaaggaacttacgaccagaccctggaattcagacgcgggggagacgggcagcctcggcggtccacaaggccaacgcagcagttctaccaaccgcccagggccagaaattag

SEQ ID NO: 210208 - DNA, 3297 bp, synthetic construct
  misc_feature 1..3297: note = Description of Artificial Sequence: Synthetic coding sequence
  source 1..3297: mol_type = other DNA
atgctggagggcgacctggtgagcaagatgctgcgggccgtgctgcaaagccataagaacggcgtagcgctgccccggcttcaaggagaatatagatccttgaccggcgattggatcccattcaagcagctgggcttccccaccctggaagcctacctccgctcggtacctgctgtggtgagaattgagaccagccgctcaggagaaatcacctgttatgcgatggcctgtaccgaaaccgccagaatagctcagctcgtggcacgacagcggagcagcaaacggaaaaccgggcgccaggtaaactgccagatgcgcgtcaaaaaaactatgccattctttctcgaagggaagccaaaggcaacgctgcgtcagcctggattcgccagcaatttctctgtgggtaagaaacccaaccctgctcctctgcgcgataaaggcaatagtgtgggggtgaagcctgacgcagagatgtctccctatatgctccacactaccctcggaaacgaagcatttaaagacatccctgtgcagagacatgtgacaatgtcaacgaacaacaggtttagtccgaaagcaagcctgcagcctcctctgcaaatgcacctcagcagaacatctactaaggagatgagcgataacctgaaccagaccgttgagaaacccaacgttaagcctccagcctcttatacatacaagatggatgaagttcagaatcgtattaaagagattcttaacaagcacaataatggtatctggatctccaaactgccacacttttataaagagctttataaggaagacctcaaccaaggcattctgcagcaatttgaacattggccacatatatgcacagtcgagaaaccctgctctggaggccaggatctcctgctgtatcctgccaagcggaagcagctgctccgatccgaattggatactgaaaaggtgcctctatcccccctcccggggcctaaacagactcctcctcttaagggatgtccaactgttatggcaggcgattttaaggagaaggtggccgatttgctagtgaaatatacaagcggactctgggctagcgctctccctaaggcctttgaggaaatgtataaagttaagttccctgaagatgcgctgaagaacctcgcttcactgagtgacgtctgctcgattgattatataagtggtaatccccaaaaggctatcctctacgccaagcttcccctgcctacagataagattcaaaaggatgcgggccaggctcacggagacaatgacattaaagctatggttgagcaggagtatttgcaggtggaggaaagcatcgcagagtctgctaacacctttatggaagacattactgtgccacctttgatgatcccaacagaagctagtcccagcgttctggtggtggaactaagtaacaccaacgaagtggtgattcggtacgttggcaaggactatagcgctgctcaagaattaatggaagatgagatgaaggagtactattcgaagaatcccaaaatcactccagtacaagctgttaacgtgggccagctgctggctgtcaacgccgaagaagacgcctggctacgggcgcaggttatatccaccgaggagaacaagattaaagtctgttacgtggattatgggttctcagagaacgtcgagaaaagtaaagcttataagcttaaccctaaattttgtagtcttagtttccaagcaacaaagtgcaagctcgcaggactcgaggtgctgtccgatgacccagacctggtcaaggtggtcgaatcactgacttgcggtaaaatcttcgccgtggagatcctggacaaggccgatatcccactggtcgtgttgtatgacacgtccggggaggacgacatcaatattaatgctacatgcttaaaagcaatctgcgacaagtccctggaagtccacctacaagtggatgcaatgtacacaaatgtgaaggtcacgaacatctgctccgacggaacgctatattgccaagtgccatgtaaggggctgaacaaattgtcggatctgctccgcaagattgaagattacttccattgcaaacatatgaccagcgagtgctttgttagcctccccttctgtggaaaaatttgccttttccattgtaaaggaaaatggttgcgcgtggaaatcacgaatgtccacagttcccgcgcgctcgacgtgcaattcctggattccggcacggtgacaagtgtcaaggtaagtgagcttagagagatcccaccgcgcttcctgcaggaaatgattgccatccccccacaggcgattaaatgctgtctcgcggatttgccgcagtccatcggcatgtggacgcctgacgctgtgctatggctgcgggattccgttctgaactgctccgattgcagcattaaagtcacgaaggtggacgaaacccgggggatagcccacgtataccttttcacacctaagaacttccccgacccccaccgcagcatcaataggcagataacaaacgccgatctttggaaacaccagaaggacgtctttctgtccgcaatctctagcggggccgattcgccaaattccaaaaacggaaatatgcccatgagtggcaacactggagagaacttccggaaaaatcttactgatgtcatcaagaaatcgatggtagatcatacttccgctttcagtactgaggaactgcccccacccgtacaccttagtaagcccggcgagcatatggatgtttatgtcccggtcgcttgccaccctggttatttcgtgatccaaccatggcaggaaattcataaacttgaggtgctcatggaggagatgattctgtactattctgtgtcagaggagcgccacattgccgttgaaaaggaccaggtttatgctgccaaagtcgagaacaagtggcaccgggtgctgctgaagggtatcctaactaatggcttggtgtctgtgtatgagttggactacggaaaacacgagctcgttaatatccggaaggtgcagcccttagtggatatgtttcgcaagctgcccttccaagccgttacagcacagcttgcgggcgtcaagtgtaaccagtggtccgaggaagcttctatggtgtttagaaatcacgtagagaaaaaacctttggtcgctcttgtgcagacagtcatcgagaatgcgaatccctgggatagaaaggtggtggtgtatctcgtcgatacttcactgccagacaccgatacatggatccatgatttcatgagcgagtatttgatcgagttgtcgaaagttaattag

SEQ ID NO: 210209 - DNA, 3075 bp, synthetic construct
  misc_feature 1..3075: note = Description of Artificial Sequence: Synthetic coding sequence
  source 1..3075: mol_type = other DNA
atggcctgcaccgagaccgcccggatcgcccagctggtggcccggcagcggagcagcaaacgcaagactggccgccaggtgaattgccagatgcgagtaaagaaaaccatgcctttcttcctcgagggcaagcctaaggccaccctaagacagccgggattcgcatccaacttttctgtgggcaagaaaccaaatcccgccccactgcgcgataagggaaactccgttggcgttaaaccagacgccgaaatgtcaccttatatgttgcacaccactctcggcaatgaagcctttaaggacattcctgtgcagaggcacgtgacaatgtctacaaacaatcgctttagtcctaaggctagtcttcagccacctttgcagatgcacctctcccggaccagcacaaaagagatgtccgacaatcttaaccagactgtggaaaagcccaatgttaagccccccgctagctatacttacaagatggacgaggtgcagaacaggattaaggagattctgaacaagcataataatggcatatggatctctaaattgccacatttctacaaagaactgtacaaagaggatcttaaccagggaatactgcagcagtttgagcattggcctcatatttgcactgtggagaagccctgctctggtgggcaggatttgctcctctacccggcgaagaggaagcaattactgcggagcgagttggacacagaaaaagtccccctgtctcccctgcccggccctaagcaaactccccctttaaagggttgcccgaccgtgatggccggagatttcaaagaaaaagtagcagacctgctagtaaagtatacctcgggcttgtgggctagtgcactgccaaaggccttcgaagagatgtataaggtcaaattcccagaagatgccctgaaaaatctcgccagcctgagtgatgtttgctctatagactatattagcggtaatcctcagaaggctatcctgtatgcgaagctgccactacctacagataaaattcagaaagacgctggccaggcccacggggacaatgacataaaggccatggtcgaacaggaatatcttcaggtggaagagtctattgcagaaagcgctaacacattcatggaggacattacggtgccccccttgatgataccgacggaggcttctcctagcgttttggtggtcgaactgtccaatactaacgaggtggttattagatacgtagggaaagactactctgctgctcaggaactgatggaagacgagatgaaggagtactactcaaagaaccccaaaattacgccggtacaagccgtaaacgtggggcagttgcttgctgtgaatgcagaagaggacgcctggttacgagctcaggtcattagcaccgaggaaaataagataaaggtgtgttacgtggattatggatttagcgagaacgtagagaaatctaaggcttacaaactgaatcctaaattctgctccctcagcttccaggccacaaaatgcaagttagcaggcttagaggtgctgagcgatgatccagacctggtgaaggtggtggaatctctaacctgcggcaaaattttcgccgttgaaatcctggacaaagcggacatcccactcgtggtattatatgatacctccggggaagacgatatcaacatcaatgccacatgtctgaaagcgatatgcgataaatctctggaagttcatctgcaggtcgacgccatgtacaccaatgtaaaagttacaaacatctgctccgacggtaccctgtattgtcaggtaccttgtaagggcctgaataagctaagcgatttactgcggaaaatagaagattactttcactgcaagcacatgacttccgaatgctttgtgtctctccccttctgcggcaagatctgtctatttcattgcaagggcaaatggcttagggtcgagataacaaatgtgcattcttctcgtgccctggatgtgcagttcttggattcagggaccgtcacaagcgttaaagtatctgaattacgtgaaattcctccgcgttttctacaggagatgatagccattccgcctcaggcgataaagtgttgcttggccgacctaccccagtctattgggatgtggacacctgatgcggtcctgtggttacgcgacagcgtgctgaactgctcggactgctcgatcaaggtgacaaaggtcgacgaaactcggggaattgcccacgtttatctgttcacaccaaagaatttccctgacccccacaggagcatcaatagacagattactaacgccgatctttggaagcaccagaaagatgttttcctgtctgcaatctctagcggcgccgattctcccaactctaaaaacggcaatatgcccatgtcaggtaatactggagaaaactttaggaaaaatctcacagatgtgattaagaagtctatggtagatcatacctccgcgttctcaacagaggagctccctccaccagtccacctatcaaagcccggtgaacacatggacgtttatgtgcctgtcgcttgccatcctggttacttcgtcatccagccttggcaggaaatccacaagctggaggtcctcatggaagaaatgatcttgtattatagcgtgagcgaggagcgccatattgccgtggagaaggaccaagtatacgcagcgaaggttgaaaataagtggcacagagtcctgcttaaggggatcttgaccaatggcctcgtcagcgtttatgaactcgactacggaaagcatgaactcgtgaatatcagaaaggtgcagcctctggttgacatgttcaggaagcttccattccaggcagtcaccgcccagctggccggagttaaatgcaatcagtggtcggaggaggccagtatggtttttcgcaaccatgtggaaaaaaaaccactggtggcgttggtccaaaccgtgattgaaaacgctaacccttgggacaggaaggtcgtggtgtatctagttgacacctcactcccagatactgacacatggatccacgattttatgtcggagtatttgattgagctttccaaagtgaactag

SEQ ID NO: 210210 - DNA, 1257 bp, synthetic construct
  misc_feature 1..1257: note = Description of Artificial Sequence: Synthetic coding sequence
  source 1..1257: mol_type = other DNA
atgtacaccaacgtgaaggtgaccaacatctgcagcgacggcaccttgtattgccaagtgccgtgtaaaggattgaacaagctgagcgaccttctgaggaaaatcgaggactactttcactgtaaaatcaccaacgtacatagctcccgggctctggacgtgcagttcctggattccggcactgtaacaagtgttaaggtttcagagctgcgcgagatcccaccacgcttcctacaggaaatgattgcaatccctccgcaagctatcaaatgctgcttagctgatttacctcaaagcataggcatgtggacccccgacgctgttttgtggctgagagactcggtgttaaattgctcggattgttctataaaagtcactaaggtggacgaaacacgaggtatcgcccacgtttatttgttcacacctaaaaacttccctgacccacacagaagtatcaacagacaaattaccaacgccgacctttggaaacatcagaaggacgtgttcctgagcgctattagctctggggccgacagtccgaacagcaagaatgggaacatgccgatgagcggtaatactggagagaactttagaaaaaacctgacagacgtgattaagaaatccatggttgaccatactagtgcctttagcaccgaggagctgcctccgcctgtccatttgagcaagcccggggaacatatggacgtttacgtaccagtggcatgccaccccggatactttgtcattcaaccttggcaggagattcataagctggaggttctcatggaggagatgattctatactattcggtgtctgaggaaagacatattgctgtagaaaaggatcaggtctacgccgccaaagtggaaaataaatggcacagggtgcttctgaagggaatcctcaccaatggactggtttccgtctacgagctcgactacggtaagcacgagctggttaacattaggaaggttcagcctcttgtggacatgtttcggaagctcccctttcaagccgtgacagcccaactggcgggggtgaaatgtaaccaatggagtgaggaagccagcatggtctttagaaaccatgttgagaagaagccactggtggccctggttcagaccgtcattgaaaatgccaacccttgggatcggaaggttgtcgtctatctcgtggacacctcattgcccgacactgatacatggatccatgacttcatgtccgagtatctgatagagctgtctaaagtgaactag

SEQ ID NO: 210211 - DNA, 2514 bp, synthetic construct
  misc_feature 1..2514: note = Description of Artificial Sequence: Synthetic coding sequence
  source 1..2514: mol_type = other DNA
atgagcctgagccacctgtaccgggacggcgagggccggatcgacgatgacgatgacgaaagggagaatttcgagatcacagactgggacctgcagaatgagtttaatccaaaccgacagagacactggcagacaaaggaggaggccacctacggcgtttgggcagagcgtgactccgatgacgagcgaccctcttttggcggcaagcgcgcacgggactacagtgctccggttaattttattagtgcaggcttgaaaaagggcgcagcagaggaggctgagcttgaggattccgatgatgaggagaagccagtgaagcaggacgattttcctaaggacttcgggccaagaaagttaaaaacaggcggaaatttcaaaccctctcagaaggggttcgctggtggtacaaaatcgtttatggacttcggttcatgggagagacatactaagggaattgggcagaagctcctgcagaaaatgggctacgttcccggcagggggttggggaaaaatgcgcaggggatcattaacccgattgaagccaagcagcggaaaggcaaaggcgcagtgggcgcttacgggtccgaacggacaacgcagtcgatgcaggacttccctgtggtggactctgaggaggaggcggaggaggaattccagaaggaactttctcagtggcgcaaggacccaagtggatcaaaaaagaaacctaaatacagctataaaacagtagaggagctgaaggccaagggcaggatctccaagaaattgacagctccacagaaggagcttagccaagttaaggtcattgatatgaccggccgtgaacagaaggtttattacagctactcccagatctcgcataagcataatgtcccggacgacggcttacccctccagtctcagcagttgccacagtctggcaaagaggctaaggctcctgggttcgctctgcccgagttagagcacaacctccagctgctgatcgacttgacagagcaagaaataatacaaaatgatcggcagctgcagtacgagagagatatggtcgtcaatctctttcatgagttggaaaaaatgactgaagttttagatcacgaggaacgtgtgatctcgaatttgtcgaaggtgttggaaatggtggaggagtgtgaacgcagaatgcagcccgactgttctaatcccctgacactggacgagtgtgctaggatcttcgaaaccctgcaggacaaatattacgaggaatatcgaatgagcgaccgagttgatctggccgttgctatcgtttaccccctgatgaaagagtactttaaagaatgggatccactcaaggattgcacttacgggaccgaaatcatatccaaatggaaaagtttgcttgagaacgatcagttactgagtcatgggggacaggatctctcagcagatgccttccacagactcatctgggaagtgtggatgccgtttgtcaggaacattgtgacccaatggcagccgagaaactgcgatcctatggtggattttttggatagctgggtccatatcataccagtgtggatactggacaacattctggatcagcttatttttcctaagctccaaaaggaggttgaaaattggaacccactcaccgacaccgtcccgatccattcttggatccatccctggctgccattgatgcaagcacggctggaaccgctgtacagcccgatccgatccaagctttcatcagcactgcagaagtggcatccttctgatagctccgccaagctgatcctgcagccatggaaagacgtctttacccccggatcatgggaagcttttatggtgaaaaacattgtgcccaaactcggcatgtgtttgggcgagctcgttatcaaccctcaccaacaacatatggacgcgttctactgggttatcgattgggaaggaatgatttccgtctccagcctcgttgggctactggagaaacattttttccctaaatggctgcaggtcctttgttcctggcttagcaatagccccaactacgaggaaattaccaagtggtacctgggctggaagtcaatgttctcagatcaggtgttagctcacccatcagtgaaggacaagtttaatgaggccttggacattatgaatcgcgcagttagctcaaatgtaggagcttacatgcagccaggtgcccgcgaaaatattgcttatctaacacacaccgaaagacgaaaggattttcaatatgaggccatgcaggaacggagggaagcggaaaatatggcccaaaggggaataggggtcgcagcttcttcagtacctatgaacttcaaagacttgatcgaaacaaaagccgaggagcataatatcgtgtttatgcctgtgatcggtaaacgacacgaaggcaagcagctctataccttcggccgaatcgtaatttacatagatcgcggcgtggtatttgttcagggagagaagacctgggtgcctacctccctacagtctctcattgatatggccaagtag

SEQ ID NO: 210212 - DNA, 2514 bp, synthetic construct
  misc_feature 1..2514: note = Description of Artificial Sequence: Synthetic coding sequence
  source 1..2514: mol_type = other DNA
atgagcctgagccacctgtaccgggacggcgagggccggatcgacgacgacgatgatgagcgcgagaacttcgagataacggactgggatcttcagaatgaattcaaccctaatagacaacggcactggcagacgaaagaggaggcaacctatggggtgtgggccgaacgcgattccgatgacgagcgaccttccttcggagggaagcgagctcgagactacagtgcacctgtcaacttcattagcgctggtttgaagaaaggggccgccgaggaggcggaactcgaagattccgacgatgaggagaagcccgtgaagcaggatgactttcccaaggacttcggccctaggaaactgaagactgggggcaacttcaagcccagtcagaagggcttcgccggtggcacaaagagttttatggacttcggctcctgggaaagacatacaaagggcatcggccagaaactgcttcagaaaatgggctatgtgcccgggaggggcctgggcaaaaatgctcaaggaataatcaatcccattgaggctaagcagcgcaagggcaaaggagcagtcggggcttacggaagcgaaagaacgactcagagcatgcaggatttccccgttgtggatagcgaagaagaagcagaagaggagttccaaaaagaactgtcacagtggcgaaaggatcccagcggatccaagaaaaagcctaagtacagctataagaccgtcgaagagctgaaggcaaaaggccgaatctctaaaaagctgactgccccccagaaggaactatcccaggttaaagtgatcgacatgaccggtcgggagcagaaagtgtactattcatactcccagattagtcataagcacaacgtgccagatgatggccttccgctgcagagtcaacaactgcctcagtctgggaaggaggccaaagcacctggatttgccctgcccgagctggagcacaatttacagctgctgatcgatctaactgagcaggaaattattcagaacgatagacagttacagtacgagcgggatatggttgtcaacctcttccacgaactcgagaagatgacagaagtcttagatcatgaggaacgcgtgatctcaaatctaagcaaagtactggaaatggtcgaagagtgcgagagaagaatgcagcccgattgtagcaatccgctcactctcgacgagtgcgcgaggattttcgagacattgcaagataagtattacgaagagtaccgtatgagtgaccgggtggaccttgcagtggccatcgtctatccattgatgaaggaatacttcaaggagtgggatcccctgaaagattgcacctacggcactgagattatctcaaaatggaagtccttgttggagaacgatcagctgcttagccacgggggccaagacctgagcgctgacgctttccatagacttatctgggaggtgtggatgccatttgtcagaaatattgtgacacagtggcagccccgaaattgtgatccaatggtggattttctcgacagctgggtccatatcatccctgtctggattctagataatatcttggatcaactgattttccccaagctgcagaaagaggttgaaaactggaatcccctgacagataccgttccaatccattcttggatccacccctggctgcccctgatgcaggctcgcctggagcctttgtattccccgattagatcaaagctgagctccgccctacaaaagtggcacccttccgacagctcggcaaaactgatcctccaaccctggaaggatgtcttcacccctggctcatgggaggcgttcatggtcaagaatattgtccctaagctcgggatgtgcctaggcgagcttgtgattaatcctcatcagcagcatatggacgccttctactgggtcatagactgggagggcatgatctctgtgtctagtctggttggattattagaaaaacattttttcccgaaatggctccaagtgttgtgtagttggctttccaactctccaaattatgaagaaatcactaagtggtacctgggttggaagtctatgttcagcgatcaggtccttgctcatcctagcgtcaaggataagttcaatgaagccctcgatataatgaaccgggccgtctctagtaatgttggtgcctatatgcagccgggcgctcgggagaatatagcctacctgacacacaccgaacggagaaaggatttccagtacgaggccatgcaggagcgcagagaggccgaaaatatggcccagcggggcatcggcgtcgctgcgtccagtgtgcctatgaatttcaaagacctgatcgaaacaaaggccgaagagcataacattgtgttcatgccagttattggcaagcggcatgaagggaagcagctgtacacatttggtaggatagtaatatatattgacagaggggttgttttcgtccaaggagagaaaacctgggtgcctacttcacttcagtctctcattgacatggcaaaatag

SEQ ID NO: 210213 - DNA, 2514 bp, synthetic construct
  misc_feature 1..2514: note = Description of Artificial Sequence: Synthetic coding sequence
  source 1..2514: mol_type = other DNA
atgagcctgagccacctgtaccgggacggcgagggccggatcgacgacgacgatgacgagagagagaattttgagataaccgactgggatctgcagaatgagtttaaccctaatcggcaacgtcactggcaaaccaaagaagaagccacttacggggtctgggccgaaagggactcggatgacgagcgcccctcattcgggggcaagagggcacgagattacagcgcccccgtgaatttcattagcgctggcctgaaaaaaggcgctgctgaggaagctgagctggaagactcagacgatgaagagaagcccgtcaagcaggatgatttcccaaaagattttggcccacgcaaacttaaaaccgggggaaattttaaacctagtcagaagggctttgcaggcggaacgaaaagctttatggattttggcagctgggaacgccataccaaaggcattggacagaaactcttgcagaagatggggtatgttcctggacgaggattggggaagaatgcacagggcatcatcaaccctatagaggccaagcaacgcaagggtaagggcgccgttggcgcatacggcagcgaacggacgacccaatccatgcaggacttcccagtggttgatagcgaagaagaggccgaggaagagtttcaaaaagaactcagtcagtggagaaaggatcctagcgggtccaagaaaaagcctaagtatagttacaagacagtggaggaactcaaggccaagggaagaatatccaaaaaactcacagctccacagaaagaattgtcacaggtcaaggtgatcgacatgactggcagggagcagaaggtgtactatagctattctcagataagccacaaacataatgttcctgatgacggcctgccactccagtctcagcagctgccccaaagcggaaaggaagccaaggctccgggcttcgcactgcccgagctagagcacaatttgcagctgttgatagatctgactgagcaggaaatcattcagaacgatagacagctgcagtatgagagagatatggttgtgaacctgttccacgagctggagaagatgactgaggtcctcgaccacgaggagcgagttatttccaacctgtctaaggtgctggagatggttgaggagtgcgagcgtcgaatgcaacctgattgctctaaccctctgactctggacgagtgcgcccggatttttgagacacttcaggacaaatactatgaggaataccggatgtcagaccgggtggatctggcggtcgccattgtttaccccctcatgaaagaatacttcaaggagtgggatccgctgaaggactgtacctacgggactgaaataatttctaagtggaaatcacttctggagaatgaccaactgctgtcccatggcggacaggacctgagcgccgatgcctttcacagactgatttgggaggtgtggatgccattcgtgcggaacatagttacacagtggcagccaaggaactgcgatcctatggtcgactttctcgattcttgggtccacatcatccctgtctggatccttgataatatcttggaccagcttatctttcccaaactgcagaaagaggttgagaactggaacccgctgacagatacagttccgatccactcatggatccacccttggctacctctgatgcaggcccggctggagcctctgtactcccctataaggagcaagttgtcgtccgcattgcagaagtggcacccatcagactcctccgcaaagctgattctgcaaccctggaaggacgtgttcaccccaggctcctgggaggctttcatggtgaagaatatagttcccaagcttggtatgtgcctgggagaactcgtgattaatccgcaccaacaacatatggacgccttctactgggtcattgactgggaaggtatgatctccgtgagcagtctggtgggactcctggaaaagcacttcttccccaaatggttgcaagtgctgtgctcttggctgagcaatagcccaaattacgaggaaattacgaagtggtatcttggctggaagtcaatgttctcggaccaggtgctggcacacccttccgtgaaagataagttcaatgaagctcttgatatcatgaatcgcgcggtgtcaagcaatgtgggagcctacatgcaacccggggcacgcgagaatatcgcctacctgacgcatacagaaagaagaaaggacttccagtacgaagctatgcaagaaaggagagaagcggagaatatggcccagcgcggaatcggtgtagcggcttcgtctgtgccaatgaacttcaaggatcttatcgagacaaaagctgaagagcacaacattgtatttatgcccgtgatagggaagaggcacgaaggcaagcagctttatacattcggccgtatcgtcatatacattgacaggggcgttgtgtttgtgcagggagagaagacatgggtgcccacctccctgcaatccttgattgacatggccaagtag

SEQ ID NO: 210214 - DNA, 2514 bp, synthetic construct
  misc_feature 1..2514: note = Description of Artificial Sequence: Synthetic coding sequence
  source 1..2514: mol_type = other DNA
atgagcctgagccacctgtaccgggacggcgagggccggatcgacgatgacgacgacgagagggaaaactttgagattacggactgggacctccagaacgaatttaaccctaacaggcagcgtcactggcagaccaaagaagaggccacatacggagtatgggctgagagggactctgacgatgagcgccccagtttcggcggaaagcgagctagggactacagcgcaccagtgaattttatttcagctggtcttaagaaaggagcggccgaggaagcggagctggaagatagcgacgacgaagagaagcccgtgaaacaggatgatttcccgaaagattttggtcctagaaaactgaagaccggcggtaatttcaaacctagccaaaagggcttcgccggaggcacaaagtcatttatggacttcggaagctgggagcggcatacaaagggtatcggccaaaaactgttgcagaagatgggttatgttcctgggaggggactaggcaaaaacgcccaaggtataattaacccaattgaggctaaacaacgcaaaggtaagggcgcagtgggggcctacggaagtgagagaaccacacagtctatgcaggacttcccagtggtggattcagaggaagaagcagaggaggagttccaaaaggagctctcccaatggcgaaaagacccatccggcagcaaaaagaagccgaagtatagctacaagaccgtggaggagctaaaagctaagggacgaatttctaagaagcttaccgcaccccagaaagagctctctcaggtaaaggtaatcgacatgaccggtcgagagcagaaggtttattattcttacagccaaatctcacacaaacacaacgtgcctgatgatggactccctctccaatcgcagcagctgcctcagtccggaaaggaagctaaggcccctggtttcgccttacctgagctggagcataacctgcagctcctgattgatttaactgagcaggagattatccagaacgacagacagctgcaatacgagagggatatggtcgtgaatcttttccacgagttagaaaagatgacagaagtgctagaccatgaagaaagggtgatcagcaatttgagcaaagtgcttgagatggtggaggagtgcgagaggcgcatgcagccagattgctcgaaccctcttacattagacgagtgtgctcggattttcgagacgctgcaggataagtactatgaagagtacaggatgtctgatagagttgacctggctgtggcaatcgtgtatcccctgatgaaggaatatttcaaagagtgggacccacttaaagattgtacatacgggactgagatcatctccaagtggaaaagtctgcttgaaaatgatcagctgttgagccatggaggacaagatctgagcgccgacgcttttcacagattgatatgggaggtttggatgcctttcgtcaggaacattgtgactcaatggcaaccacggaactgcgatcccatggtggacttcctggacagctgggtacatattatccccgtctggatactagataacatcctggaccaactcatctttcccaaactgcagaaggaagttgagaattggaaccccctcactgatacagttcccattcattcttggatccacccatggttacccctcatgcaggcccggctcgagcccttatatagcccaatccgaagtaagctatcttccgcactccagaaatggcatccctccgactcttctgcaaagctcatcctccaaccctggaaggatgtgttcacgcctggctcttgggaagccttcatggtgaaaaacatcgtgccgaagttggggatgtgcttgggcgaactcgtcataaatccgcaccagcagcacatggatgccttctactgggtcattgactgggagggtatgattagtgtgtcatccttagtggggctcttggaaaaacactttttccctaaatggctgcaagtgttatgctcatggctgtcaaactcgcctaactacgaggaaattacgaagtggtacttgggttggaaatctatgttctcagatcaggttctggcccatccttctgtcaaagataaatttaatgaggccctggatatcatgaatcgcgcagtctcatccaatgtgggggcgtacatgcagccaggcgcccgcgaaaatatcgcctatctgacacataccgaacgtcgaaaggactttcagtacgaagccatgcaggaaagaagggaggcagaaaacatggcgcagcgtggcataggagttgccgcttcatccgtgccaatgaattttaaagatctcatcgagaccaaagcagaagagcacaatatcgtgtttatgccagtgattgggaagcggcacgaaggcaaacaattgtatacctttggccggattgttatctacatagatcgcggtgtggtttttgtgcagggcgaaaagacttgggttcctacatccttgcagtctctcattgatatggccaagtag

SEQ ID NO: 210215 - DNA, 267 bp, synthetic construct
  misc_feature 1..267: note = Description of Artificial Sequence: Synthetic coding sequence
  source 1..267: mol_type = other DNA
atgagcctgagccacctgtaccgggacggcgagggccggatcgacgacgacgacgacgagagggaaaatttcgagattaccgattgggatctgcagaacgagtttaatccaaataggcagcggcattggcaaaccaaggaggaggccacctacggcgtgtgggcagagcgcgactctgacgatgagagaccctcttttggcgggaagcgggcccgtgactattccgccccggtcaacttcatcagcgcgggcctgaaaaaaggttag

SEQ ID NO: 210216 - DNA, 261 bp, synthetic construct
  misc_feature 1..261: note = Description of Artificial Sequence: Synthetic coding sequence
  source 1..261: mol_type = other DNA
atgagcctgagccacctgtaccgggacggcgagggccggatcgacgatgacgatgacgagcgcgaaaatttcgaaattaccgactgggatctgcaaaatgagtttaacccgaatcgacagagacactggcagactaaggaggaggccacatatggagtgtgggcagaacgtgactccgatgatgaaaggccttcttttggcggcaagcgagcaagagactacagcgctccagtcaattttatttctgccggcttgaagtag

SEQ ID NO: 210217 - DNA, 129 bp, synthetic construct
  misc_feature 1..129: note = Description of Artificial Sequence: Synthetic coding sequence
  source 1..129: mol_type = other DNA
atgagcctgagccacctgtaccgggacggcgagggccggatcgacgacgacgatgacgagcgggagaatttcgagatcactgactgggacttgcagaacgaatttaaccctaataggcagcgtcattag

SEQ ID NO: 210218 - DNA, 1569 bp, synthetic construct
  misc_feature 1..1569: note = Description of Artificial Sequence: Synthetic coding sequence
  source 1..1569: mol_type = other DNA
atgagcctgagccacctgtaccgggacggcgagggccggatcgacgatgacgatgatgagagagagaacttcgaaataacagattgggacctacagaacgaattcaatttgtttcatgagctcgagaagatgacggaagttctcgatcacgaagaacgcgtgattagcaatttatcaaaggtgttggagatggtggaggaatgtgagaggcgaatgcagcctgactgctccaacccgctgacactggatgagtgtgcaagaatctttgaaacactgcaagacaagtactatgaggaataccggatgtcagaccgagtggacctggcagtagcgattgtgtaccccttgatgaaagaatacttcaaagagtgggacccactgaaagactgcacatatggcactgaaatcatcagcaagtggaaatcgctcttggaaaacgaccaactgctgtcccacggcggccaggacttaagcgccgacgctttccaccggctcatatgggaggtttggatgccctttgtaaggaacatcgtgacccaatggcaaccaaggaattgtgacccaatggtggattttctcgacagttgggtgcatattattcccgtgtggattcttgacaacatcctcgaccaactgatctttccgaagctccagaaggaagtggaaaattggaatcctctgaccgacaccgtcccgatccattcctggatacatccctggctccctttgatgcaggcgcgtcttgagcctttatactcacctatcaggtccaagctgtcaagcgccctgcagaagtggcatcccagcgacagttccgctaagctcattctccagccttggaaggacgttttcacccccgggagctgggaggcctttatggtcaaaaacatcgtccctaagctggggatgtgccttggcgaactggttataaacccccatcagcaacacatggatgcattttactgggttatcgactgggagggcatgatctccgtttcttctctggtgggccttcttgagaagcatttcttcccgaagtggcttcaggtgctgtgttcctggctgtctaactctccaaactacgaagaaataactaagtggtatttgggttggaaaagcatgttctctgaccaggtcctcgcgcaccctagcgtgaaagacaagttcaacgaggctcttgatataatgaatcgcgccgtctcttctaatgtcggcgcctatatgcagcccggtgcaagagagaatatcgcctatcttactcacacagagcggagaaaggacttccagtacgaggcgatgcaggagaggagggaagccgagaatatggctcagcgtggtatcggggtggcagctagctccgtacccatgaattttaaggatctgatcgaaacaaaggctgaagagcataatattgtattcatgcctgtaattggcaaacgacatgagggtaagcagctctacactttcggtagaatcgttatttacattgacaggggggtcgttttcgttcaaggcgaaaagacctgggtccctacctctctgcaatccctgatcgatatggccaagtag

SEQ ID NO: 210219 - DNA, 576 bp, synthetic construct
  misc_feature 1..576: note = Description of Artificial Sequence: Synthetic coding sequence
  source 1..576: mol_type = other DNA
tgaggccggggcctgggcaagaacgcccagggcatcatcaaccccatagaagctaagcagcgcaaaggcaagggggcggtgggcgcatacgggtcagaaaggaccacccagtcaatgcaggacttcccggttgtcgatagtgaagaggaggccgaggaatggctgttcctggcggcaagtgactgtatcctgctggtgcaggagtttcagaaagagctgtcccagtggagaaaagatccatctggaagcaagaagaagccaaagtacagctacaaaaccgtagaagaactcaaggcgaagggccgtatatcaaagaaactgacagctccacagaaagagctctcccaagtgaaggtaatcgatatgactggtcgagagcagaaggtgtattacagctacagccagatatctcataagcacaacgtgcccgatgatggattacccttacagagccagcaactgccccagagcggcaaggaggccaaggcacccgggtttgctttgccagagctggagcataacctccagctcctcattgacctgactgaacaagagatcatccagaatgataggtag

SEQ ID NO: 210220 - DNA, 366 bp, synthetic construct
  misc_feature 1..366: note = Description of Artificial Sequence: Synthetic coding sequence
  source 1..366: mol_type = other DNA
atgagcctgagccacctgtaccgggacggcgagggccggatcgacgatgacgacgacgagcgcgagaacttcgaaatcacagattgggatcttcagaacgagttcaaccccaatcggcaaaggcactggcagacaaaggaggaggcgacttacggagtgtgggctgagagagactctgacgatgagagacctagctttggcggcaaaagggcccgcgattatagcgcccctgtgaacttcatttctgccggcttgaagaagggcgccgctgaagaagctgaattggaggatagtgatgatgaggagaagcccgtcaagcaggacgattttcccaaggactttggcccacgcaagctaaagacttag

SEQ ID NO: 210221 - DNA, 723 bp, synthetic construct
  misc_feature 1..723: note = Description of Artificial Sequence: Synthetic coding sequence
  source 1..723: mol_type = other DNA
atggaggagagcgtggtgcggcccagcgtgttcgtggtggacggccaaacagacatcccctttaccaggctggggaggagccaccgaaggcagtcatgctctgtggctagagtggggctgggactattgctactgttgatgggagccggactcgcggttcaaggctggtttctgctgcagctacactggagactgggggaaatggtgacaaggctgcctgacggccctgccgggtcgtgggagcagctcatccaggaaagacgaagtcacgaagttaatccagctgcccacttgaccggcgcaaacagcagcctgaccggaagcggaggccctttgctttgggaaacccaactgggattggcttttctgcggggcctatcttaccacgacggggccttggtggttactaaggccgggtattactatatttactcaaaggttcagcttggaggagtagggtgcccattaggtctggcctcaacaataacccatggcctgtacaagaggaccccccgctatcctgaggagctggagctactggtaagccagcagtcgccttgcggcagggctacctcctctagcagagtttggtgggacagtagcttcctgggcggcgttgtgcacttggaagccggcgaaaaggtggtggtccgcgtcttggacgagcgcctcgtcagactgcgcgacggcacccggtcttattttggcgccttcatggtgtag

SEQ ID NO: 210222 - DNA, 954 bp, synthetic construct
  misc_feature 1..954: note = Description of Artificial Sequence: Synthetic coding sequence
  source 1..954: mol_type = other DNA
atgcggcgggccagccgggactacaccaagtacctgcggggcagcgaggagatgggtggagggccaggtgctccccacgagggccctttgcacgcgcctccacctcctgctccacaccagcccccagctgctagccgctcaatgtttgttgctctcttgggcttgggtcttggacaggttgtgtgttccgtggctctcttcttctacttcagagctcagatggacccaaataggataagcgaggatggtacacactgtatttaccgaattctgcgcctgcacgaaaacgccgattttcaggatacaacactcgagagtcaggataccaaattgatccctgattcatgccgccgcattaaacaggccttccagggcgctgtgcaaaaggagcttcagcacattgtcggaagccaacatattcgggcagaaaaagcaatggtcgacggatcatggctggatctggcgaaaagatctaaattagaagcccagccatttgcccacctcaccatcaacgccaccgacatcccctccggctcccacaaggtcagcctgagcagctggtaccacgatcgaggatgggccaagatttcaaatatgacattcagtaacgggaaattgatcgtaaatcaggatggcttctactatctgtacgccaacatatgctttagacaccacgagaccagcggcgacctcgccaccgagtatctgcagttgatggtgtatgtgaccaaaacatccattaaaatccccagctcccatactttgatgaaggggggctcaacaaagtactggtctggcaactcagagtttcatttctatagtattaatgtcggtggttttttcaagttacgctccggtgaggagatctccattgaggtgtcgaatcccagtctgctggaccctgaccaagatgcaacatacttcggcgctttcaaagtgagggacatagactag

SEQ ID NO: 210223 - DNA, 735 bp, synthetic construct
  misc_feature 1..735: note = Description of Artificial Sequence: Synthetic coding sequence
  source 1..735: mol_type = other DNA
atggaccccaaccggatcagcgaggacggcacccactgcatctaccggattctgcgcctccacgagaacgccgactttcaggacacaacacttgagtcccaggacaccaaactaattccagactcctgcaggcgaattaaacaagcatttcagggggctgtccagaaagagttgcagcacattgttgggagtcaacacatacgcgccgaaaaggccatggttgacggaagttggctcgatctagcgaagcgtagcaaacttgaggcccagccttttgcccacttaaccattaacgctaccgatatacctagcgggagtcataaggtgtccctcagttcctggtaccatgacaggggctgggcaaagatctctaatatgacatttagtaatggcaagctaatcgttaaccaagatggtttctactacttgtacgccaatatatgttttaggcatcatgaaacatcaggggacctggccaccgagtacctgcagctgatggtgtacgtcactaagaccagcatcaagatcccctcctcccacacacttatgaagggcggtagcactaaatattggagtgggaacagcgaattccatttctactcgatcaacgtagggggtttttttaagctgcggtcgggagaggaaatctccattgaggtgagcaacccatctctgctcgatccagatcaagatgcaacttacttcggtgcctttaaagtgcgagatattgactag

SEQ ID NO: 210224 - DNA, 735 bp, synthetic construct
  misc_feature 1..735: note = Description of Artificial Sequence: Synthetic coding sequence
  source 1..735: mol_type = other DNA
atggaccccaaccggatcagcgaggacggcacccactgcatctaccggatccttaggttacacgagaatgctgatttccaggacacaactttggagtctcaggacacgaaactcataccggatagctgccgacgcataaaacaggcatttcagggggccgtccagaaagagctgcagcacatcgtagggtcccagcatattagagcagaaaaggctatggtggacgggagctggctggatctcgcgaagagatcaaaactcgaggcccagccatttgcccatcttactatcaacgcaacagatatccccagtggctcacacaaggtgtccctgtcgtcttggtaccacgatagggggtgggctaagatctctaacatgaccttctcaaatggcaaattgattgtgaaccaggacgggttttactatctatatgccaatatctgctttaggcaccatgagaccagcggggaccttgcgacagaatatcttcagctgatggtatacgtgaccaagacttcaatcaagattcctagttctcatactctgatgaagggtgggtccactaaatattggtccggaaacagcgaatttcacttctattctattaacgtgggtggcttttttaagctgagatcaggtgaggagatctctatcgaggtatcaaatccctctttgctggatcccgaccaggacgcaacctatttcggcgcatttaaagtccgagacatcgactag

SEQ ID NO: 210225 - DNA, 735 bp, synthetic construct
  misc_feature 1..735: note = Description of Artificial Sequence: Synthetic coding sequence
  source 1..735: mol_type = other DNA
atggaccccaaccggatcagcgaggacggcacccactgcatctaccggattcttcggctgcacgagaatgctgactttcaggacaccaccctggaaagccaagacaccaaattgattcccgactcctgcagacgcataaagcaggcttttcagggggcagttcagaaggagctgcaacatatcgttgggagccagcatatccgagcagaaaaggccatggtcgatggcagctggctggacctggccaagcggtcgaaacttgaggctcagccgttcgctcatctcacaataaatgctacagacataccttcaggcagtcacaaagtaagcctgtccagctggtaccatgatagggggtgggcaaaaattagcaacatgaccttcagtaatgggaaacttatcgtgaatcaagatggattttactacctctacgcaaatatttgtttccggcatcacgagacgtctggagatctagccacagaatatctccagctgatggtctatgttaccaagacctccattaagatcccctcaagccacaccctgatgaagggcggctcgaccaaatattggagtggaaattctgaattccacttctactcgatcaacgtcggaggattttttaagctgcggtcaggcgaagagatctctatcgaggtatctaacccctccctgcttgaccccgatcaggatgccacctattttggtgctttcaaagtcagggatatcgactag

SEQ ID NO: 210226 - DNA, 735 bp, synthetic construct
  misc_feature 1..735: note = Description of Artificial Sequence: Synthetic coding sequence
  source 1..735: mol_type = other DNA
atggaccccaaccggatcagcgaggacggcacccactgcatctaccgcatactaaggctccacgagaatgcggacttccaagacaccactctagaaagccaggataccaaactgatcccagacagttgtcgccgtataaaacaggccttccagggagctgtgcagaaggagctccagcatatcgttggatcacagcacatacgggcagagaaagcaatggtggatgggagttggcttgacctggcgaagcgatccaagctagaggctcagccgtttgctcacctcaccattaatgcaacagacatcccttcggggtcccataaagtatcactttccagctggtaccacgacaggggctgggcgaagatcagcaacatgacctttagcaacggaaagctgattgtcaatcaggatggtttctactacctgtatgctaatatctgctttcggcaccacgaaacttccggagaccttgccacagaatatctgcaactcatggtctacgtgaccaagacctcaattaaaattcctagcagtcacacccttatgaagggcggatctacaaagtattggagtggaaacagcgagttccacttttatagtattaatgtggggggattcttcaagctccgctcgggggaagagatctctatcgaagtgtccaacccgtcacttctcgatcctgaccaggatgctacctatttcggagcatttaaagttcgggatattgattag

SEQ ID NO: 210227 - DNA, 750 bp, synthetic construct
  misc_feature 1..750: note = Description of Artificial Sequence: Synthetic coding sequence
  source 1..750: mol_type = other DNA
atggccgcccggcggagccagcggcggcggggccggcggggcgagcccggcaccgctctgcttgtcccactggcactcgggctggggctagcgttagcttgtctgggactactgctggcggtagtttcactgggcagcagggcctccctaagcgctcaggaacccgcacaagaagagctcgtggcagaggaggaccaggatccctctgaacttaatccccagacagaggagtcccaggatcccgctccctttttgaatagactagttagaccacgcaggtctgcccccaagggaagaaagacccgagccagacgcgctatcgccgctcactacgaagtgcacccaagacccgggcaggatggtgctcaggctggagtcgatggaaccgtgtcaggatgggaggaagcgcgcataaattccagcagtccgctgagatataaccggcaaatcggcgagttcatcgtaacaagggctggactctattacctctactgtcaggtgcactttgatgagggtaaggcagtttacttaaagctggatttgcttgtggacggcgtgctggccctgcggtgccttgaagaattctcggccaccgcggcctcttcgctgggaccccaactgcgattatgtcaagtgtccggactgcttgcactgagaccaggaagttctctgcgtatccggactctgccctgggctcacttgaaggcagctcccttcctgacttactttggcttgttccaggtgcactag

SEQ ID NO: 210228 - DNA, 993 bp, synthetic construct
  misc_feature 1..993: note = Description of Artificial Sequence: Synthetic coding sequence
  source 1..993: mol_type = other DNA
atggccgcccggcggagccagcggcggcggggccggcggggcgagccggggactgctcttctcgtgcccctggcgctgggtctgggtctggccctcgcttgtttggggctgctgctggccgtggtttccctgggcagtcgtgcaagtctaagtgctcaggaacctgcacaagaggaactggtggccgaggaggatcaggatcctagtgagctcaacccgcagaccgaagaatctcaagatccggcacccttcttaaaccgtctcgtccgcccaaggcgttctgctcccaagggacgcaaaacaagggccaggagagccatcgctgcacactatgaggtccatcctcggccgggacaagatggagcgcaggctggggtggatgggacagtgagtggctgggaggaggcaaggatcaacagttcgagtccacttcgttacaaccgccaaattggggaattcattgtcacccgcgcagggctgtactacctgtactgccaatcgtccgatgctctagaggcctgggaaaacggggaacggtcacgcaagagaagagcagttctgactcagaaacaaaaaaagcagcacagcgtcttacaccttgttcccatcaatgccacaagcaaagatgattcagatgtcacggaagtcatgtggcagcccgccctccgcagggggcgcgggctacaggctcagggatacggggttcgcattcaggatgccggcgtctaccttttgtacagccaggtcctattccaagacgttacatttaccatgggacaagtagtctcaagagaaggacaggggcgccaggaaactctgttccgatgcataaggtctatgccaagtcaccccgatagagcttataactcctgttactccgccggagtgttccatctgcaccagggagatatcctgtcagttatcatcccaagggcacgggccaagctgaatctaagtccccatgggactttcctgggcttcgttaagctgtag

SEQ ID NO: 210229 - DNA, 723 bp, synthetic construct
  misc_feature 1..723: note = Description of Artificial Sequence: Synthetic coding sequence
  source 1..723: mol_type = other DNA
atggaggagagcgtggtgcggcccagcgtgttcgtggtggacggccagacagatattcccttcacccgcctggggcgaagccaccgtaggcagtcttgtagcgttgcccgtgtggggctggggctgctcttgctgttaatgggcgccggtctggcggtgcagggctggtttctccttcagttgcattggcgattgggcgagatggtcacacggctgccagatgggcccgccgggtcttgggagcagctcattcaggagcgccggagtcacgaagttaaccccgcggcacatctgaccggggccaactcaagcctgacggggtctggcggccccctgctctgggagacccaattgggactcgcattcctgagaggactgagctaccatgatggagccctggtggtgacaaaggcaggctattattacatttacagcaaggtgcagctagggggtgtaggttgtccactaggactggcttcaaccattacccatgggctgtacaagagaactccccggtaccccgaagagctcgagctcctggtctcacagcaaagtccttgtggacgggccacttcctctagtcgtgtgtggtgggactccagctttctcggcggagttgtccacttagaggccggggaaaaggtcgtggtccgcgtcctcgatgagagactcgtgcgcctgcgtgatggcacgcggagttactttggagcttttatggtgtag

SEQ ID NO: 210230 - DNA, 615 bp, synthetic construct
  misc_feature 1..615: note = Description of Artificial Sequence: Synthetic coding sequence
  source 1..615: mol_type = other DNA
atggaggagagcgtggtgcggcccagcgtgttcgtggtggacggccagacggatatcccatttacacgcctcggtcggtctcatcgccgacaatcatgtagcgtggctagggacgggccggccggttcttgggaacaactcatccaggaacgtagatctcacgaggttaatcccgctgctcatctcaccggcgcgaatagctccctgacaggctccggaggcccgttgctgtgggaaacccaactagggctggcctttctgagaggtctgtcttatcacgacggggcccttgttgtgacgaaggctgggtactattacatatatagtaaggtgcagctcggaggcgtagggtgccctctaggtttagcttcgactatcacacatgggctgtacaaacgcacgccccggtacccagaagagctggagctgctggtcagccaacagtctccatgtgggcgcgccacgagcagtagtagggtgtggtgggattcttccttcttaggcggggttgtccatcttgaggctggggagaaagttgtggtgcgcgttctcgacgaacgattggtgagactcagggatggcacacggagctactttggggcttttatggtatag

SEQ ID NO: 210231 - DNA, 525 bp, synthetic construct
  misc_feature 1..525: note = Description of Artificial Sequence: Synthetic coding sequence
  source 1..525: mol_type = other DNA
atgcggcacttcctgagcaaggtgtacagcttccccatgcggaagctgattctcttcctcgtcttcccggtagtgaggcagacacctacccagcactttaagaaccaatttcctgccctgcactgggagcacgagcttggtctggctttcaccaaaaatcgcatgaattatactaataaatttctgctcatccccgaatctggggattactttatctactctcaggtgacctttcgaggcatgacttcagaatgcagcgaaatccgtcaggcaggtaggcccaacaaaccagattcgataaccgtggtaatcacaaaagtaaccgacagctaccctgagcctactcagttactgatgggaaccaagtcagtctgcgaggtcggatccaactggtttcagccaatataccttggggctatgtttagcctacaggagggggataaattgatggtaaacgttagcgatattagcctcgttgattacacaaaggaagacaagacattctttggcgccttcctgctctag

SEQ ID NO: 210232 - DNA, 756 bp, synthetic construct
  misc_feature 1..756: note = Description of Artificial Sequence: Synthetic coding sequence
  source 1..756: mol_type = other DNA
atggccgaggacctgggcctgagcttcggcgagaccgccagcgtggaaatgctgcccgagcacggtagctgccgcccgaaggcaagatcctcatccgccagatgggccctgacgtgctgcctggtccttctgcctttcttggctggattgacgacatacctgctcgtgagtcagctccgagctcagggcgaagcttgcgttcagtttcaggcactaaaaggtcaggaattcgctccgtcccaccagcaggtttacgcccctctgagggccgatggggacaagcctcgagctcaccttacagtggtcagacaaaccccaacccaacatttcaagaatcaatttcccgccctccactgggaacacgagcttgggctcgctttcacgaagaaccggatgaactacaccaataagttcctgttgatcccggagtccggcgactactttatatactcccaagtaacctttcgtggaatgacgagcgagtgttccgagatacggcaagctggacgcccgaacaagcccgacagtattactgttgttataactaaagtgaccgattcttaccccgagcccacccagctcttaatgggcacaaagtcagtgtgcgaggtgggaagtaattggttccaaccgatttatctgggggctatgtttagtctgcaggagggggataaattaatggtgaatgtgtcagacatctcactggtggattacacaaaagaggacaagacatttttcggcgcattcttgctgtag

SEQ ID NO: 210233 - DNA, 534 bp, synthetic construct
  misc_feature 1..534: note = Description of Artificial Sequence: Synthetic coding sequence
  source 1..534: mol_type = other DNA
atgtgcctgagccacctggagaacatgcccctgagccacagccggacccaaggcgctcaaagatcttcctggaaactctggctgttttgcagcattgtcatgctgttgtttctgtgcagtttctcatggctgatctttatcttccttcagctggagactgctaaagaaccttgtatggctaagtttggcccattgccctctaagtggcagatggccagctcagagccaccgtgcgtgaataaagtgtcggactggaagcttgagattctccagaatggactgtacttgatctatggacaggtggcaccgaacgcaaattataacgacgtggctccgttcgaggttagactgtacaaaaacaaagatatgattcagacgctgactaacaagagcaagatccagaacgtaggaggtacatacgaacttcacgttggggatacaattgacctcatcttcaatagcgaacaccaggtgcttaagaacaatacatactggggcatcattctgctggccaacccccagtttatatcttag

SEQ ID NO: 210234 - DNA, 600 bp, synthetic construct
  misc_feature 1..600: note = Description of Artificial Sequence: Synthetic coding sequence
  source 1..600: mol_type = other DNA
atgaccctgcaccccagccccatcacctgcgagttcctgttcagcacagcattgatctctcctaaaatgtgtcttagtcatctagagaacatgcccctatcccatagtcgtactcagggagcacaaaggtcgtcttggaaactctggttgttctgctctatcgttatgctcctgttcctctgctctttttcctggctgatcttcatctttctccagctggaaactgctaaggagccctgcatggccaaatttggccctctgccttctaaatggcagatggcctccagcgagccgccatgtgtgaataaagttagcgactggaagcttgaaatcttgcaaaatggattatatctgatctacggccaggtggctcctaatgctaactataacgacgtggctccatttgaggtgcgactgtataagaataaagacatgattcagactctaacgaacaagagcaagattcagaacgtcggagggacctatgaactgcatgtgggcgatactatcgacctgatctttaattccgagcatcaagtcctgaagaataacacttattgggggataatcctgctcgcaaacccccagttcatctcctag

SEQ ID NO: 210235 - DNA, 552 bp, synthetic construct
  misc_feature 1..552: note = Description of Artificial Sequence: Synthetic coding sequence
  source 1..552: mol_type = other DNA
atggagcgggtgcagcccctggaggagaacgtgggcaacgccgcccgcccgcgttttgagcgaaataagttactgcttgttgcatctgtgatacaggggttgggtttacttctttgctttacatatatttgtctccactttagtgcgcttcaggtatcccatcggtacccgcgcatccagtcaatcaaggtccagttcactgaatataaaaaggagaaaggattcattctgacttcacaaaaagaggacgaaatcatgaaagtgcagaacaactctgtaattataaactgcgatgggttctatctgatcagtctgaagggatattttagccaggaagtaaatatttcactacattatcagaaggacgaagaaccactttttcaactgaagaaagtccggtccgtgaactccctgatggttgctagccttacctacaaggataaagtctatttaaacgtcacaacagataacactagcctcgacgatttccatgtgaacggaggtgaactgatattgatccatcaaaaccccggcgagttctgcgttttatag

SEQ ID NO: 210236 - DNA, 402 bp, synthetic construct
  misc_feature 1..402: note = Description of Artificial Sequence: Synthetic coding sequence
  source 1..402: mol_type = other DNA
atggtgagccaccggtacccccggatccagagcatcaaggtgcagttcaccgaatacaagaaggagaagggttttatcctgacgagccagaaggaagacgagattatgaaggtccaaaacaactcagtcatcataaactgcgatggattttacctgatctctctgaaagggtacttctcccaggaagtgaatattagcttgcactatcaaaaagatgaggagcctctattccagctcaagaaggtcagaagcgtcaatagtctgatggtcgcatcattaacctataaagacaaagtatatctaaatgtgacgacagacaatacatccctcgatgattttcacgtcaacggaggcgaactcattctgatccaccagaatccaggggaattttgcgtgctgtag

SEQ ID NO: 210237 - DNA, 402 bp, synthetic construct
  misc_feature 1..402: note = Description of Artificial Sequence: Synthetic coding sequence
  source 1..402: mol_type = other DNA
atggtgagccaccggtacccccggatccagagcatcaaggtgcagttcacagagtacaagaaggagaagggatttattctcacaagtcagaaagaagatgagatcatgaaggttcagaacaactcagtcattattaattgcgacggattctatctcattagcctcaaaggctatttcagccaggaggtcaatatcagcctgcactaccagaaggatgaggaacctctctttcagctgaaaaaagtccgctctgtgaattccctcatggtcgcttccctgacctacaaggataaagtttatttgaacgttacaacagataatacatcgctggacgacttccatgtgaatggtggcgaactaattctaatacaccaaaatccaggcgaattttgtgtcctttag

SEQ ID NO: 210238 - DNA, 765 bp, synthetic construct
  misc_feature 1..765: note = Description of Artificial Sequence: Synthetic coding sequence
  source 1..765: mol_type = other DNA
atggagtacgccagcgacgccagcctggaccccgaggccccctggcctcccgcacctcgggcccgcgcctgccgggttctcccatgggctctcgttgccggtttgctgttgcttttgctgctggcagcagcctgtgccgtgttcttggcctgtccatgggcagtaagtggcgctagggcaagtcccggtagcgctgcttccccaagactccgggagggcccagagctgagtccagatgatcctgccgggctgctcgacctgcggcagggtatgttcgcccagcttgtggctcagaacgtgctgttgatcgacggcccccttagctggtactcagatccaggactggctggcgtgtccctgaccggcggcctgtcctacaaagaggataccaaggagcttgtagtggccaaggcgggggtgtactatgttttcttccagttggagctgaggcgtgtcgtggcaggagaaggctccggcagtgtctctctggcactgcacttacagcctctgaggtccgcggctggcgctgccgctcttgctctcaccgtcgatctgccgccagccagttctgaggcccgaaacagcgctttcgggttccagggaagattgctgcatctgtcggctggccaacgactaggggtgcatttgcataccgaggctcgtgctcggcacgcctggcagctgactcaaggagcaactgttcttggtcttttccgagtgactcctgaaatcccagccggcctgccttccccccgtagcgaatag

SEQ ID NO: 210239 - DNA, 1851 bp, synthetic construct
  misc_feature 1..1851: note = Description of Artificial Sequence: Synthetic coding sequence
  source 1..1851: mol_type = other DNA
atggccccccgggcccggcggcggcggcccctgttcgccctgctgctgctctgcgccttattggcccgactccaggttgcgttgcaaatcgcaccaccctgcacttcggaaaagcactacgagcacctcggacggtgctgcaacaagtgcgagccaggcaagtacatgtcaagcaagtgtacaacgaccagcgatagtgtgtgcctgccctgtgggccagatgaatatctggatagttggaatgaggaggataagtgcctgctgcataaggtgtgtgacaccggcaaagcactggtggcggtcgtcgcaggaaacagcaccacccctaggaggtgtgcttgcactgcgggttaccattggtcccaggactgcgaatgctgccgccggaacaccgagtgtgcccctgggctgggagctcagcatccactgcagctcaacaaggataccgtgtgtaagccctgcctggccggttacttttccgacgccttttctagcactgacaagtgtagaccatggaccaactgcacattcctggggaagagggtcgaacatcatggaaccgagaagagtgacgccgtctgcagctccagccttccagctcgcaaacctcctaatgagccccacgtttatctgcctggcttgatcatcctgttactctttgcctctgtagcattggtcgctgccattatcttcggcgtttgttaccgaaaaaaggggaaggccttaactgccaacctctggcactggatcaatgaggcttgtggacggttaagcggagacaaggagtcctccggggactcttgtgtgtcgactcacacggcaaattttggacaacaaggcgcatgtgagggtgtgttgctcctgacccttgaagagaaaactttccccgaagatatgtgttatccagaccagggtggtgtgtgccagggaacttgcgtgggaggcggcccttatgcccagggcgaggacgctcgtatgctgtcacttgtgagtaaaaccgagatagaggaagattcttttaggcagatgccaaccgaagacgaatacatggatcggccttctcaacccacagatcagctgcttttcctgaccgaacccggttctaaatcaacgcccccattttctgaacccctggaggtgggggagaacgatagcctgtcccagtgcttcaccggtactcagtctaccgtggggagcgaatcatgcaactgcactgaacccctctgtagaaccgactggacgcccatgagcagtgaaaactatctccagaaagaagtcgactccggccactgtccacattgggccgcgtccccatcaccgaactgggccgatgtttgcaccgggtgtcgtaacccccccggcgaggattgtgaacctctggtcggaagcccgaagagaggacctcttcctcagtgcgcctatggcatggggttgccacctgaagaggaagcctcaaggacagaggccagggaccagcctgaggatggggctgacggtagactgccctcctctgcccgggcaggggccggatccggtagttccccgggaggacagagtcctgcctctggaaacgtgacgggaaatagtaattctacgttcatctcttccggacaggtgatgaacttcaagggcgatatcatagtagtgtatgttagtcagacctcccaggagggggccgccgccgcagccgaacctatgggccggccagtgcaggaggagactctcgcccgacgcgactcttttgctggtaatggtcctcgttttcccgatccatgcgggggccccgagggattgcgggagcctgaaaaagccagcagaccagttcaggagcagggtggagcaaaggcgtag

SEQ ID NO: 210240 - DNA, 780 bp, synthetic construct
  misc_feature 1..780: note = Description of Artificial Sequence: Synthetic coding sequence
  source 1..780: mol_type = other DNA
atggcccggatccccaagaccctgaagttcgtggtggtgatcgtggccgtgttactgccggtccttgcttactccgcaacaaccgcccgccaggaagaagtgccgcagcagacagtggccccccaacagcaacgtcatagttttaagggcgaggagtgtccggccggttcccacaggagcgagcacaccggagcttgtaatccctgcaccgaaggggtagactacactaatgcttccaataatgaaccaagttgcttcccttgtactgtctgtaagtcagatcagaagcataagagctcgtgcactatgactagagatacagtgtgccagtgcaaggaggggacttttaggaatgagaatagtcctgagatgtgtcggaaatgctctcggtgtccttccggtgaggtgcaggtcagtaactgcacgtcttgggacgacatccagtgcgtagaggaattcggcgccaacgccaccgtcgaaactcccgctgcggaagagaccatgaataccagccccggcacccctgccccagcggcggaggagaccatgaatacgtcccctggcaccccagcgcccgccgccgaggagacaatgaccactagcccaggcacgccggcgccagcggctgaagagaccatgacaacaagcccaggaactcccgcccctgcagcggaagagaccatgatcacatccccaggtacgccggcaagctcacactatctctcttgtacaatcgtcggcatcatcgtgctcatcgttttgttgattgtcttcgtgtag

SEQ ID NO: 210241 - DNA, 474 bp, synthetic construct
  misc_feature 1..474: note = Description of Artificial Sequence: Synthetic coding sequence
  source 1..474: mol_type = other DNA
atgacccgggacaccgtgtgccagtgcaaggagggcaccttccggaatgagaatagcccggaaatgtgtcgcaagtgctcaaggtgtccttctggcgaggtgcaggttagcaattgcacctcttgggacgacatccagtgtgtggaggagttcggcgcgaatgcaaccgtggaaactccagccgctgaagagaccatgaatacctctccaggcacgccagcgcccgccgccgaggagacgatgaacacaagccctgggaccccagcccccgctgccgaagagactatgacaacgtctccgggtacccctgcaccagccgctgaagagactatgaccacctcccccggtactcccgcccccgcggctgaagaaacaatgatcacgtccccgggcactcccgcgtcatcgcactacctgagctgcaccatcgtgggaataatagtactcatcgtgctgctcattgtgtttgtttag

SEQ ID NO: 210242 - DNA, 834 bp, synthetic construct
  misc_feature 1..834: note = Description of Artificial Sequence: Synthetic coding sequence
  source 1..834: mol_type = other DNA
atggcccggatccccaagaccctgaagttcgtggtggtgatcgtggctgtattgttgcccgtgctagcctactctgccacaaccgccaggcaggaggaggttccccaacagaccgttgccccgcagcagcagcggcactccttcaagggagaggagtgccccgcaggttcacataggtccgagcacacaggcgcctgcaacccatgtaccgagggcgtggactacacgaatgcgtccaataatgagccctcctgttttccttgtaccgtctgtaagagcgatcagaaacacaagagtagttgtactatgactcgggataccgtgtgtcagtgtaaggaaggaacattccggaacgaaaactcacccgaaatgtgccgcaaatgctcaaggtgcccgtcaggggaggtccaggtctccaattgtacgtcctgggatgatatccagtgcgtggaggaattcggagccaacgcaactgtagagaccccggccgccgaggagacgatgaacacgtccccggggaccccagctcctgccgccgaggagacaatgaataccagccccggcactcctgctcccgccgcagaggaaacaatgacaaccagcccaggcaccccggccccggccgcagaagaaaccatgacgacatcacccggaacaccagcccccgcagccgaagaaaccatgattacttcccccgggacgccagctagctctcactatctgtcttgtaccatagtgggaataatagttctgatcgtgctcctaatcgtgccctacctcaagaagaaaaaaaagaaaaaacttaagaaaaaacagaaaaggaagtctaagtag

SEQ ID NO: 210243 - DNA, 1851 bp, synthetic construct
  misc_feature 1..1851: note = Description of Artificial Sequence: Synthetic coding sequence
  source 1..1851: mol_type = other DNA
atggccccccgggcccggcggcggcggcccctgttcgccctgctgctgctctgcgccctattggcaaggttgcaggtagccctgcagatagcaccgccatgcactagcgagaaacattacgaacacctcggcaggtgttgcaacaagtgtgaacccgggaagtacatgtcaagcaaatgtactactaccagtgattccgtctgtttgccatgcggtcccgacgaatatctggactcttggaatgaagaagataagtgccttctgcataaagtttgtgataccggaaaagcactggtggccgtggtggctggcaatagtacaaccccgaggcgatgcgcctgtaccgccgggtaccattggagccaggattgcgaatgttgtagaaggaacacggagtgtgccccgggtctgggagcgcagcatcctctccagcttaataaggatactgtgtgcaaaccgtgccttgctggatacttttctgatgctttttcctcaacagataaatgtcggccttggaccaactgcacgtttctcggcaaacgagtcgagcaccacggaactgagaagtcagatgctgtctgctcatcaagcttgccagctaggaaacctccaaacgaaccacatgtgtacctccccggcctcatcattctgttgttatttgcgagcgtcgcactggtcgccgccattatcttcggagtgtgttatcggaagaagggcaaggcattaactgctaacctctggcactggattaatgaggcttgtggtcgcctctcaggcgacaaagagtcgagcggggactcctgtgtttccacccacactgccaactttggacagcaaggggcttgtgagggcgttctgctgttgactctggaagagaaaaccttccctgaagatatgtgttacccagaccagggtggagtgtgccagggaacctgcgtggggggaggtccatacgcgcagggggaagatgcaaggatgttgagcctggtgtccaagaccgagattgaggaagactctttccgacagatgcctacagaggacgaatacatggatcgcccgtcacagcctactgaccagttgctgttcctgaccgagcctggaagcaagagcaccccgcctttttctgaaccactcgaggtgggagaaaacgacagcctctcccagtgtttcaccggtacccagagtactgtcggcagcgaaagttgcaactgcaccgaacccctttgccgcaccgactggacccctatgtcttctgaaaattacctccagaaagaagtcgatagcggacactgcccccactgggcggcaagtccgagtcccaattgggcagacgtgtgcactgggtgtcgtaacccacccggggaggactgtgaacctctcgtaggcagtccaaagcgcggaccattaccacagtgcgcttatggcatggggttgccccctgaggaggaggctagtcggaccgaagcacgtgaccagcctgaggacggagccgatggcaggttgcccagcagtgctcgagctggcgcaggatctggatcctcaccaggcggccaatcacctgctagtgggaatgtgacgggtaacagtaacagcacgttcattagctccggccaggttatgaatttcaagggtgacatcattgtggtgtacgttagccagacgagtcaagaaggcgctgctgcagcagctgagcccatgggacgtcctgtgcaggaggagactctcgctagaagagacagtttcgctggaaacggaccccggttccccgatccttgcggcggccctgagggcctgcgagagcctgagaaggcctctcgccctgtgcaggagcagggcggggcaaaagcatag

SEQ ID NO: 210244 - DNA, 966 bp, synthetic construct
  misc_feature 1..966: note = Description of Artificial Sequence: Synthetic coding sequence
  source 1..966: mol_type = other DNA
ggcagccgggcccggtgggccaccgaggccgccgaggccgccgccccggcctctctctcacgggctatggcaccaagggcacgcaggagaaggccgctctttgccctgctcctcctctgcgcactcttagcccgcttacaggtcgccctgcagatcgccccaccttgcaccagtgagaagcactacgagcacctgggcagatgttgcaataagtgcgagccaggcaagtacatgtcatccaagtgtactacaacctcagatagtgtttgtctgccttgtggcccagacgaatacctggactcatggaatgaggaggataaatgtctgttgcataaagtttgcgacaccgggaaggcactcgttgcagtggtggccgggaattcgacaacaccacgccgctgtgcatgcactgcaggctaccactggtcacaggattgtgagtgttgtcgtaggaacacagaatgcgctcctgggttgggtgcgcaacaccccctccaacttaacaaggatactgtctgcaaaccttgcctggccgggtacttctccgacgcctttagctccaccgataagtgcaggccttggacgaattgtacttttctcggcaaacgcgtggaacatcatgggaccgaaaaatcagatgctgtttgctcatcgtctctgccagccaggaagccccccaacggcaatgttaccggcaatagtaactccacatttatatcctccgggcaggtaatgaatttcaagggagacataattgtggtgtacgtgagtcaaacctcccaggaaggagctgctgctgccgccgagcctatggggcgccccgtccaggaggagactctggctaggcgggactctttcgctgggaacggacctagatttccggacccctgcggcgggcccgaaggcctgagagagcccgaaaaggcatcaaggcctgtccaggaacaaggcggcgctaaagcctag

SEQ ID NO: 210245 - DNA, 1206 bp, synthetic construct
  misc_feature 1..1206: note = Description of Artificial Sequence: Synthetic coding sequence
  source 1..1206: mol_type = other DNA
atgaacaacctgctgtgctgcgccctggtgttcctggacatcagcatcaagtggactacacaggaaactttcccgccaaagtatctacattatgatgaggaaacctcccatcaactgctgtgcgataaatgtcctcctggaacctatctgaagcagcactgcacagccaagtggaagaccgtgtgcgcgccctgtcccgatcattactacaccgactcctggcacacaagcgatgagtgtctgtattgtagccctgtgtgcaaggagctgcaatacgtcaaacaagaatgcaacaggactcataacagggtgtgtgaatgcaaggagggtcgctatctggagatcgagttttgcctcaagcaccgatcctgcccgcctggttttggcgtagtacaagccggcacaccagagagaaataccgtgtgtaaacggtgtccagacggcttcttctctaatgaaacctctagcaaggcaccttgccgcaagcacacgaactgtagcgtgtttggcctgctcttaacccagaaagggaacgccacccacgacaacatctgctccggtaacagcgaaagcacccagaaatgcggcattgacgttacactttgtgaggaggcgtttttcagatttgcagttcccaccaagttcactcctaattggctgagcgtgttagtcgataatttgccaggcactaaggtgaatgccgaatccgtcgagagaattaagcggcaacactcttctcaggagcagacctttcaactactgaaactctggaagcaccaaaacaaggaccaggacattgttaaaaagatcatacaggatatagatctgtgcgagaatagtgttcagcgccacatcggacatgctaatcttacattcgagcagttgaggagcctgatggagtcactgcctggcaaaaaagttggagcagaggatattgaaaaaacaataaaagcgtgcaaaccgtccgaccaaatattgaagctactgtcgctgtggagaatcaaaaatggtgatcaggataccttaaagggcctgatgcatgccctgaaacattcaaagacttaccatttccctaagacagtcacacagtccctgaaaaaaacaatccgctttctgcattcctttacaatgtacaaactgtaccagaaattgttccttgagatgataggcaaccaggtgcagtcagttaaaatttcctgtctgtag

SEQ ID NO: 210246 - DNA, 390 bp, synthetic construct
  misc_feature 1..390: note = Description of Artificial Sequence: Synthetic coding sequence
  source 1..390: mol_type = other DNA
atggcccggggcagcctgcggcggctgctgcggctgctggtgctggggctgtggctagcactgctgcgaagtgtcgcaggcgaacaggctcctggaaccgcaccatgcagccggggaagttcatggtccgcagacctggacaagtgcatggactgcgcctcatgtagagcacgaccccattccgatttctgcctgggctgcgccgctgcaccacctgcgccttttagacttctctggcctatcttaggcggtgccttgtcactcacttttgtattgggcctcctgagcggatttcttgtctggagaaggtgtcgtaggagagagaagttcacaacaccaattgaggagacaggcggggaggggtgccctgcggtggcgttgatccagtag

SEQ ID NO: 210247 - DNA, 285 bp, synthetic construct
  misc_feature 1..285: note = Description of Artificial Sequence: Synthetic coding sequence
  source 1..285: mol_type = other DNA
atggcccggggcagcctgcggcggctgctgcggctgctggtgctgggcctgtggctggccctccttcggagcgtggccggagaacaggctccaggtgcggctgcaccccctgcacctttccggctcctctggccaattctggggggagccctcagcctgacctttgtgctgggtctgctgtccggttttttggtgtggcgaaggtgtcgccggagagaaaagtttacgactcctatagaggagacgggtggagaaggatgtcctgcagtggccctgatccagtag

SEQ ID NO: 210248 - DNA, 882 bp, synthetic construct
  misc_feature 1..882: note = Description of Artificial Sequence: Synthetic coding sequence
  source 1..882: mol_type = other DNA
atgagcggcctgggccggagccggcggggcggccggagccgggtggaccaggaagagagattccctcagggactgtggactggtgtcgccatgcgctcttgccctgaggagcagtactgggatccgctgctcgggacatgcatgagctgtaagaccatctgtaatcaccagagtcaacgcacctgtgccgctttctgcaggagtctgtcctgccggaaagagcagggaaagttttacgaccatctgttgcgtgattgtattagttgtgcaagtatctgcggccagcaccctaagcagtgcgcctatttctgcgagaataaactccggtctccagtgaacctccctccagagctgcggaggcagaggtctggcgaagttgagaacaactctgacaacagcgggcgctaccagggcctagaacacagaggctcagaagcctccccggctctgcccgggctgaagcttagtgccgatcaggtggccctggtctattcaaccctcggcctatgtctctgcgccgttctatgctgcttcctggttgctgtcgcatgttttcttaagaaacggggagatccatgcagctgccagcccaggtctcggcccagacagagccctgcgaaatcttctcaggaccacgcaatggaggccggaagccccgtgtcaacctcaccagagcctgtagagacgtgctcattttgttttcctgagtgcagggctcctactcaggagtccgcggttacaccaggcacacctgatccaacctgcgcagggcgctggggatgtcacactcgtactacagttctccaaccttgccctcatatcccagattctggactagggattgtctgtgttccagcccaggagggcggtcccggtgcctag

SEQ ID NO: 210249 - DNA, 747 bp, synthetic construct
  misc_feature 1..747: note = Description of Artificial Sequence: Synthetic coding sequence
  source 1..747: mol_type = other DNA
atgagcggcctgggccggagccggcggggcggccggagccgggtggatcaggaagagaggtggagcctgagctgcagaaaggaacagggtaagttttatgatcatttgctgcgcgactgtatatcttgtgccagtatctgcggtcagcatcctaagcagtgtgcttatttttgtgagaacaagttaaggagcccagttaatcttccacccgagctgcggagacaacggagtggcgaagttgaaaataacagcgacaattctggaaggtatcaaggtctggagcaccggggaagtgaggccagccccgccttaccaggtctgaagctaagcgctgaccaggtcgccttggtgtattccactcttgggctgtgcctgtgtgccgtgctctgctgttttctcgtcgctgtcgcctgcttcttgaaaaaaaggggcgacccttgttcttgtcaaccacggtcccgcccacggcagagccccgcaaagtcatcgcaagatcatgccatggaggcaggaagcccagtatccacatcgcccgaacctgtcgaaacttgcagcttctgtttccctgagtgtagagcacccacacaggagtcagctgttacacctggaaccccagaccctacctgtgccggccgcaaaaccaaaccacctccagtgctgaccgctggcaattgcggtgtacatcgccctcctcccgagacaagtaccggaagcccacgaggacaacgcttgctttggacccagtag

SEQ ID NO: 210250 - DNA, 555 bp, synthetic construct
  misc_feature 1..555: note = Description of Artificial Sequence: Synthetic coding sequence
  source 1..555: mol_type = other DNA
atgcggcggggcccccggagcctgcggggccgggacgcccccgcccctacaccctgcgtgccggcagagtgcttcgatcttctggtgcgccattgcgttgcctgcggtttgctgcgtactccgcgcccaaagccagccggcgccagcagccctgcaccaagaacggcactccagccacaggagtcagtgggagctggagcaggggaggctgcactgcctctacctggtctcctctttggtgcacctgcactcttaggcctggcgttggtgttggctctggttctcgtgggcctggtttcatggaggcggagacaaaggaggcttaggggtgcttcctctgcagaggcacctgatggcgataaggacgctccggagccactggacaaggtgattattcttagcccgggtattagcgatgccactgcgccagcctggccgcccccaggggaggatcccggcactactccaccgggtcatagtgtgcctgttcctgccactgagttgggaagcacagaactcgttaccacaaaaacagcaggtccggagcagcaatag

SEQ ID NO: 210251 - DNA, 852 bp, synthetic construct
  misc_feature 1..852: note = Description of Artificial Sequence: Synthetic coding sequence
  source 1..852: mol_type = other DNA
atggagccccccggcgactggggcccccccccctggcggagcacccctaaaacagacgttttacgactggttctgtacctgacgtttctgggcgctccctgctatgcccctgcgctaccttcttgtaaagaggacgaatacccagtggggagcgagtgttgtccaaaatgttcacccggctacagagtgaaagaagcctgcggagaactgacagggaccgtttgcgaaccttgccctcctggtacatacattgcacacctcaatggtctttctaagtgcctgcagtgccagatgtgcgatcccgccatgggtctgcgcgcatcccggaattgctccaggacagaaaatgccgtatgcgggtgttctcccgggcatttctgtatcgtgcaggacggcgaccattgtgcagcctgtcgtgcgtatgcaaccagttctccaggccagagagttcaaaaaggtggcacagagtctcaagatactctgtgtcagaattgtccccccggtaccttctctcccaatggtacactagaagagtgtcagcaccagaccaaatgtagctggctcgtgaccaaggcaggcgcagggacgagctcctcccattgggtctggtggttcctgtcgggcagcctggtgattgtgattgtgtgttctacggtgggcttgatcatctgcgtgaaaagaagaaaaccacgtggtgacgtggttaaggtgattgtgagcgtccagaggaagaggcaggaggccgagggagaggctaccgtgatcgaagcccttcaggccccgcctgacgtgactactgttgctgtggaagaaacaattcccagcttcactggacgaagtccaaatcattag

SEQ ID NO: 210252 - DNA, 522 bp, synthetic construct
  misc_feature 1..522: note = Description of Artificial Sequence: Synthetic coding sequence
  source 1..522: mol_type = other DNA
atggagccccccggcgactggggcccccccccctggcggagcaccccaaagaccgacgttctgagattagttctgtacctgaccttcctcggggctccctgctatgcccccgcactaccctcttgtaaggaggacgaatacccagtgggatcggagtgttgtcctaagtgtagtcctggatacagagtgaaggaggcatgtggcgagctcacagggacagtgtgtgaaccttgtccccctggaacgtatatagctcacttaaatggcctatctaagtgcctgcagtgtcaaatgtgcgatcccgatattggatccccctgtgatctgcgcgggcgcgggcacctggaggcgggcgctcacctgagtcccggtcggcagaaaggagagccggatcccgaggtggcatttgagagcctgtcagccgagccacacgctcgcctgagcatggcctccgcaccctgcgggcaggccggccttcaccttagggatcgggccgatggcacccccggcgggagggcatag

SEQ ID NO: 210253 - DNA, 552 bp, synthetic construct
  misc_feature 1..552: note = Description of Artificial Sequence: Synthetic coding sequence
  source 1..552: mol_type = other DNA
atggagccccccggcgactggggcccccccccctggcggagcacccccaagaccgacgtgctccggctggtgttatatcttacctttttgggagcaccgtgctacgccccagccctaccctcttgtaaggaagacgagtacccggtggggtcagagtgctgccctaagtgctccccgggatatcgtgtgaaagaagcttgtggcgaactgaccgggacagtctgcgagccctgtcccccaggcacatatatagcccaccttaatgggctgtccaaatgtctgcagtgccagatgtgtgatcccgcaatggggcttagagcttcaagaaactgctcgcgcacagaaaacgccgtgtgcggttgttcccccggccacttttgtatcgtgcaggatggcgatcactgtgcagcatgtagggcttatgctaccagtagtcccggccagcgggtccaaaaagggggcactgaaagccaggataccctgtgtcagaattgtcctcccggcaccttcagccccaatggaaccctagaggagtgccagcatcagacctag

SEQ ID NO: 210254 - DNA, 696 bp, synthetic construct
  misc_feature 1..696: note = Description of Artificial Sequence: Synthetic coding sequence
  source 1..696: mol_type = other DNA
atggagccccccggcgactggggcccccccccctggcggagcacccctaagacggatgtgcttcgcttggtcctttatctgacttttctcggtgcaccctgttatgcccccgcactccccagctgcaaggaggatgaatacccggtaggcagcgagtgttgccccaagtgctccccaggttaccgcgtcaaagaagcgtgtggtgagctgactgggaccgtgtgtgagccctgcccaccaggcacttacattgctcacctcaatggcctgagcaagtgccttcagtgtcagatgtgcgaccctgccatgggtttgagggcaagcaggaactgctcaagaaccgaaaacgccgtttgtgggtgcagccccggacacttttgcattgtccaagatggcgatcactgcgccgcctgcagggcctacgccacttctagtcccgggcagagggtgcagaagggaggcacagagtcccaggatacactgtgtcagaattgcccccccgggaccttctcccctaatgggacactagaagaatgccagcatcaaacgaagtgcagctggttagtcaccaaagcgggcgctggcacaagctcttctcattgggtttggtggtttctgagcgggagcctggtcattgtcatcgtttgttccactgtcgggctgataatctgtgtaaaaagacgtaaaccccgctag

SEQ ID NO: 210255 - DNA, 696 bp, synthetic construct
  misc_feature 1..696: note = Description of Artificial Sequence: Synthetic coding sequence
  source 1..696: mol_type = other DNA
atggagccccccggcgactggggcccccccccctggcggagcacccctaagacagatgtcctgagactagtactgtatctgactttcctaggcgccccctgctatgcccctgccctgccgtcgtgtaaggaagatgagtatcctgtcggatcagaatgctgtcctaaatgtagtccagggtacagagttaaggaagcatgcggcgaacttacaggcacggtgtgtgagccatgcccaccgggaacctacatcgcccacttgaatggactgtccaaatgcttgcagtgtcaaatgtgtgatcctgcaatgggccttagggcatctcgcaactgttctcgtaccgaaaacgctgtgtgcggctgctctcccggacacttctgtatcgtgcaggatggggatcactgtgcagcatgccgggcttacgccacctccagccccggccagcgggtgcaaaaaggaggtaccgaaagtcaggatacactttgccagaactgcccgcctggcaccttttcaccaaatggcaccctggaagaatgccaacaccagacaaagtgcagttggctggtgactaaagctggcgccggaacttcttcatcccactgggtatggtggttcctctcgggcagcctggtgatcgtgattgtgtgctcaacagttggtctgattatctgcgtcaagcgaaggaaaccccgctag

SEQ ID NO: 210256 - DNA, 696 bp, synthetic construct
  misc_feature 1..696: note = Description of Artificial Sequence: Synthetic coding sequence
  source 1..696: mol_type = other DNA
atggagccccccggcgactggggcccccccccctggcggagcacccccaaaactgatgtgctccgacttgtattgtacctcacatttctcggtgcaccctgctatgcacccgctctccccagctgcaaagaagatgagtacccggtgggctcagaatgttgtccaaagtgcagtcctggataccgagtgaaggaagcttgtggcgagctgaccggtacagtgtgcgagccctgtccccccgggacctacattgcccatttgaatggcctgtccaagtgcctacagtgccagatgtgcgaccccgctatgggattacgggcatcaaggaattgtagtaggacagagaacgcagtatgtggctgtagccctgggcatttctgcattgtacaggacggggaccattgcgcagcctgcagagcttacgcaacctctagccccggccaacgagtgcaaaagggcgggaccgaatcccaggatactctctgtcaaaattgtcctcccgggacgttctcaccgaacgggaccttagaggagtgtcagcaccaaacaaaatgttcatggctcgtgacaaaagcgggtgcggggacatcatccagtcactgggtatggtggttcctaagcggttccctggtgatagtgatagtgtgttccactgtgggtttgattatttgcgttaagaggcgaaagcctagatag

SEQ ID NO: 210257 - DNA, 555 bp, synthetic construct
  misc_feature 1..555: note = Description of Artificial Sequence: Synthetic coding sequence
  source 1..555: mol_type = other DNA
atgctgcagatggccggccagtgcagccagaacgagtacttcgacagcttactgcatgcctgcattccttgccagctgcggtgctcttccaatactccacctctgacctgtcagcggtattgtaatgcatcggtgaccaactctgttaaaggtacaaatgccattctgtggacctgcctggggctgtccctgatcatctctctagctgtgtttgtgctgatgtttcttctgcgcaagattaactccgagcctctgaaggatgaattcaaaaacacaggctccgggctgctgggcatggccaatatcgacctggagaagagccgcaccggggacgaaatcattttaccaagaggactcgaatataccgtggaggagtgtacctgtgaagactgcattaaatctaaacctaaagtggactcagatcactgctttcctctgccagctatggaagaaggggccaccatccttgtgacaacgaaaacaaatgattactgcaaatctctccccgccgctctttctgcaactgagatcgagaagagcattagcgccagatag

SEQ ID NO: 210258 - DNA, 408 bp, synthetic construct
  misc_feature 1..408: note = Description of Artificial Sequence: Synthetic coding sequence
  source 1..408: mol_type = other DNA
atgctgcagatggccggccagtgcagccagaacgagtacttcgactcactcctgcatgcatgcatcccgtgtcagctcagatgtagctcaaacacgcccccactcacgtgccagcgctactgtaacgcccggtccggcctgttggggatggcgaatattgaccttgaaaagtcacgcactggagatgaaattattctgcctcgtggtctcgagtacaccgtggaggaatgcacctgcgaggactgcattaagagcaaacctaaggtggattcagaccactgcttcccactccccgcaatggaagagggagcaaccattctcgtcacaactaagactaatgattactgtaagtcccttcccgccgcactgtcagccactgaaattgaaaaaagcatttcagctcgctag

SEQ ID NO: 210259 - DNA, 417 bp, synthetic construct
  misc_feature 1..417: note = Description of Artificial Sequence: Synthetic coding sequence
  source 1..417: mol_type = other DNA
atggccggccagtgcagccagaacgagtacttcgacagcctgctgcacgcgtgcattccctgccagctccggtgcagtagtaacaccccacccctgacctgccaacgctactgtaacgccagcgtgacaaacagtgtgaaaggcacaaacgccattttatggacctgtctcggtctctcacttatcattagtctggcggtcttcgtgctgatgtttctgctccggaaaataaactcagagccactgaaagacgaatttaagaacaccgagatggagagtcgatcggttgcccaggcaggcgttcagtggcgggatctcaattcactccagccgttgccactagggttcaagcagttttctcatttgtcgctgttgtcgaactgggactatcgcattcggtcacccggacacgggtag

SEQ ID NO: 210260 - DNA, 768 bp, synthetic construct
  misc_feature 1..768: note = Description of Artificial Sequence: Synthetic coding sequence
  source 1..768: mol_type = other DNA
atggcccagcacggcgccatgggcgccttccgggccctgtgcggcttggcgctgctctgcgctttgtcactcggccagcgcccgacagggggtcccggttgcggccctgggcgccttcttctgggaaccggaaccgatgcccgctgttgccgcgtgcacaccactagatgctgccgcgattatcccggtgaggaatgctgcagcgaatgggattgcatgtgtgtccaaccagaatttcactgcggcgacccctgctgcacaacatgtcggcaccacccatgtcccccgggccaaggagtgcagagccaggggaaattttcatttggattccagtgtatcgattgtgcgtcaggcactttctctgggggtcacgagggacactgtaaaccctggaccgattgctgctggagatgccggaggcgtccgaagacccctgaagctgcgagctcccctaggaaatcgggcgctagcgatagacagaggcgaagggggggctgggagacatgtggctgtgaacctggtaggccgcctgggcccccgacagcggcatctccgtcaccaggggcccctcaggccgccggagccctgaggtctgcattgggtcgggcactgctgccctggcagcagaagtgggtgcaggagggaggatctgaccaaaggcccggcccctgctcctctgctgcagccgccggcccctgtaggagagaaagagagacacaatcctggccaccctctagtttggctggtcctgacggcgttgggagctag

SEQ ID NO: 210261 - DNA, 705 bp, synthetic construct
  misc_feature 1..705: note = Description of Artificial Sequence: Synthetic coding sequence
  source 1..705: mol_type = other DNA
atggcccagcacggcgccatgggcgccttccgggccctgtgcggcctcgccctgctttgcgcactctctctgggccagcgtcccaccggcggccccgggtgcggtcccgggcgcctgctcttgggcacaggtactgatgcccggtgctgccgcgtgcacacaacaaggtgctgccgtgattatccaggagaagagtgctgttcagagtgggactgcatgtgcgtccaacctgaatttcactgcggtgacccctgctgtaccacttgcagacaccacccttgtccacctggtcagggggtccagagccaggggaaattttcatttggcttccagtgtattgactgcgctagcggtacattcagtggaggccatgaagggcactgcaagccttggacggattgcactcagtttggctttctgacagtcttccctggcaataaaactcataatgccgtgtgcgttcctggatcccctcctgcagaacccctaggatggctaactgtggtccttctcgccgtggcagcatgtgtcctcctccttacttctgcccagctggggctgcatatctggcagctccggaagactcagttgctgctcgaggtcccgccaagcactgaagatgcaagaagttgccagttcccagaggaagagagaggagaaaggagtgctgaggagaagggtcgacttggagatctgtgggtctag

SEQ ID NO: 210262 - DNA, 726 bp, synthetic construct
  misc_feature 1..726: note = Description of Artificial Sequence: Synthetic coding sequence
  source 1..726: mol_type = other DNA
atggcccagcacggcgccatgggcgccttccgggccctgtgcggcctggctctcctgtgtgcgcttagcctaggtcagaggccaaccggtgggccaggatgtggccctggtagactacttcttgggacaggaacagatgctaggtgctgcagggtgcacaccacgaggtgttgtcgcgactatcccggcgaagagtgctgctccgagtgggactgtatgtgcgtgcagccagaatttcactgcggggatccctgttgtactacttgccggcaccacccctgcccaccagggcagggcgttcagtcgcagggtaaattttcctttgggtttcaatgcatcgattgcgccagcggtacatttagtggcgggcacgaaggccactgtaaaccctggactgactgcacacagtttggatttcttactgtgttcccaggcaataagactcacaatgctgtatgcgtaccaggaagcccacccgccgaaccactgggttggctgaccgttgttttgctcgccgtggcggcttgcgtgctgctgttgacctcggcccagctgggacttcatatttggcagctccgatcccaatgcatgtggccgagggagacgcagctgttgcttgaggtccctccaagtactgaggatgctagaagttgccaattcccagaggaggagcgtggcgaaaggagtgctgaggagaaaggcagactgggcgacctctgggtgtag

SEQ ID NO: 210263 - DNA, 834 bp, synthetic construct
  misc_feature 1..834: note = Description of Artificial Sequence: Synthetic coding sequence
  source 1..834: mol_type = other DNA
atgtgcgtgggcgcccggcggctgggccggggcccctgcgccgccttgcttctgctcgggctcggcctgagcacggtcacagggctccactgtgtgggggacacctatcccagcaatgaccggtgctgccacgagtgccgccccggaaatggcatggtcagcagatgtagccgaagccagaatacagtttgtcgcccttgcggacccggtttctataacgatgtggtttcatcaaagccatgcaaaccatgtacctggtgcaatctgaggtccgggtcagagcgaaagcagctctgcaccgccactcaagacactgtctgcagatgtcgcgccggtacgcagcctttggacagctataaacctggtgttgattgtgccccttgtccccccgggcatttcagcccgggggacaaccaggcatgtaagccttggacgaattgtaccctggctgggaagcacacactgcaacccgcaagcaattcatctgatgctatctgcgaggaccgggacccccctgccactcagcctcaggagacacagggaccacctgcccgccctatcacagtccaacctaccgaggcttggcctagaacgtcccaagggccaagtacccgccccgtggaagtgcccggtggtcgggcggtggctgctatcctggggctaggccttgtactaggcctcctagggcctctggccatcttgctggcactctacttgcttagacgcgaccagcgactgccacctgatgctcataagcctcctggcggtggaagtttccgaacgccaattcaggaagagcaggcagacgctcactccaccctcgcgaaaatttag

SEQ ID NO: 210264 - DNA, 399 bp, synthetic construct
  misc_feature 1..399: note = Description of Artificial Sequence: Synthetic coding sequence
  source 1..399: mol_type = other DNA
tgacccggcgccccccccctgccccccggcgcccagacccggccccgtcctcggggtgtgggcgagacaacattagctatgtggcctgggctcgctgggctcagcagaagcggatctgagcgcaagcaattgtgtacggctacacaggatacggtatgccggtgcagagcgggcacacagccactggactcttacaaacctggggtagactgcgctccatgcccacccggccatttttcccctggcgacaatcaagcatgtaaaccgtggacgaattgtacactggcgggcaaacacaccctgcagcccgccagcaatagttcagatgctatatgtgaggaccgggatccgcctgccacacagcctcaagagacccaggggccacccgcacgcccttag

SEQ ID NO: 210265 - DNA, 423 bp, synthetic construct
  misc_feature 1..423: note = Description of Artificial Sequence: Synthetic coding sequence
  source 1..423: mol_type = other DNA
atgcgggccctggagggccccggcctgagcctgctgtgcctggtgttagccctaccagccctgctgccggtaccggcagttagaggcgtcgcagagactccaacctacccatggagggatgccgaaacaggagagcgcctagtgtgtgcgcagtgcccgcccggaactttcgtgcagcggccctgtaggcgcgattcacctacgacatgtggaccttgccctccaagacactacacacaattttggaattatctcgaaaggtgccgttattgtaacgtgctgtgcggcgagcgtgaggaggaggcccgggcctgtcacgccacccacaaccgggcctgctgtggctgttgcaggcggtgcgcctggccagggtgccctggatggagcggcgccagtgtctccgcctccagtttgtgtacttag

SEQ ID NO: 210266 - DNA, 903 bp, synthetic construct
  misc_feature 1..903: note = Description of Artificial Sequence: Synthetic coding sequence
  source 1..903: mol_type = other DNA
atgcgggccctggagggccccggcctgagcctgctgtgcctggtgctcgcactgccagccctattacccgtgccagctgtgcgtggagtcgcagagactcccacctatccttggcgagacgccgagactggagagaggctggtctgcgcccagtgcccacccggaacatttgttcagagaccatgcagaagagactcacctacgacatgcgggccgtgtcctccacgccactatacccagttttggaactatctcgagcgttgccgctactgcaatgtgctgtgcggcgaacgtgaagaagaagcacgagcttgccacgcgacccacaatcgagcctgccgttgtagaactgggtttttcgcacacgccggcttttgtcttgagcatgctagctgtccgcctggcgccggcgtgattgcccccggcaccccatctcagaacacccagtgtcagccctgcccacccggcacattctcagctagcagctccagcagcgaacagtgccagcctcatcgcaattgtacggctcttgggctagcattgaacgtaccaggttcttctagtcatgacactctctgcactagctgtactgggttccctctgagcacgcgagtgccgggagccgaagaatgcgagagagccgtgatcgatttcgtggcatttcaggatattagcattaagaggctccaaagactgttgcaggctctggaagcccctgagggctggggacccacgccaagggctggcagagcggccctgcaattgaagctccgcaggcgactcacagaattgcttggcgcacaggatggcgccttgcttgtgagacttcttcaggccctgagggtggctcgtatgccaggtcttgaacgctctgttagggagcgttttctcccggttcactag

SEQ ID NO: 210267 - DNA, 903 bp, synthetic construct
  misc_feature 1..903: note = Description of Artificial Sequence: Synthetic coding sequence
  source 1..903: mol_type = other DNA
atgcgggccctggagggccccggcctgagcctgctgtgcctggtgttagctttgcccgctctgctccccgttccagctgtccgcggggtcgccgaaaccccgacctacccatggcgagatgcggagacgggagagaggttggtgtgtgcacagtgtccgcccggcactttcgtgcagagaccctgtagacgtgattcaccaactacttgtggaccatgtccccctcgccattatacacagttttggaactacttggagagatgcaggtactgtaatgttctctgcggtgaaagagaggaggaagctcgggcatgtcacgccacacacaatcgcgcatgtcgatgccggactggcttcttcgcccacgctggcttctgcctggagcatgcatcgtgccccccaggcgcaggggtgatagcaccagggacaccaagccagaatacacaatgccagccctgcccgcctggcaccttcagcgcatcatcgtcatccagtgagcaatgccagccgcaccggaactgcactgccctgggcctggccctgaatgtgcccggctctagctcccacgatactttatgcacttcctgtaccggtttccccctcagcaccagagtaccaggagcagaagagtgtgaacgggccgtgatcgatttcgtagcatttcaggacatcagcatcaagcggcttcagaggctcctccaggcactagaggcccccgaagggtgggggccgacccctagggccggtcgtgcagccctgcaacttaagctgagaaggagactgacagagctgctgggtgctcaggatggagccctgttggttagacttttgcaggctctgagagtagcccggatgcccgggttagagcgaagcgtcagggagcgctttctgcccgtccattag

SEQ ID NO: 210268 - DNA, 1788 bp, synthetic construct
  misc_feature 1..1788: note = Description of Artificial Sequence: Synthetic coding sequence
  source 1..1788: mol_type = other DNA
atgcgggtgctgctggccgccctgggcctgctgttcctgggcgccctgcgagctttccctcaggacaggcctttcgaagatacctgtcatggaaaccctagccactattatgacaaagctgtccgcagatgctgctaccgatgtccaatgggattgttcccaacccagcagtgccctcagaggcccactgattgccgaaaacagtgtgagccagactattatcttgatgaggccgaccggtgcacagcatgtgtcacctgttccagggacgacttggttgaaaaaactccgtgtgcctggaacagttcccgcgtttgcgaatgccgtccaggcatgttctgttccacgagcgcagtgaattcttgtgcaaggtgtttttttcactccgtatgtcccgcaggaatgattgttaagtttcctgggacagcgcagaaaaataccgtgtgtgagccagcaagcccaggggtcagccccgcttgtgccagccccgaaaattgcaaagagccttcttcaggaaccatcccccaggccaagcctactccagtaagcccagcaacgagcagcgcatccactatgcccgttagaggaggtaccaggctagctcaggaggcagcgagcaagctgacgcgagcccccgatagcccgtcatcagtgggtcgtcctagcagcgacccaggcttgtcccctacacagccctgccctgagggatcaggagattgtagaaaacaatgtgagccagactactacttggacgaggccgggaggtgtaccgcatgtgtgtcttgttcccgtgatgacctggtggaaaagacgccatgtgcttggaattctagccgcacctgcgagtgtaggcctggcatgatatgtgcgacaagcgcaaccaattcccgagcacggtgcgtcccatacccaatctgcgcagcagagacggtcaccaagccgcaggatatggctgagaaggacacaacattcgaggccccccctctgggcactcaacctgactgtaatcctacgcctgagaatggcgaggcgcctgctagcacctcccccacgcagtccctgctggtggactcccaggcttccaagacacttcccatccctacctctgcaccggtggccttgtcttccactggcaaaccggttctggatgctggaccagtgcttttctgggttatactcgtgttagtcgtcgtggtcggatcgagtgcctttctgctctgtcaccggcgagcctgtcgcaaacgaatacggcaaaagttacacctatgttacccagtgcaaacctcccagcctaaactggagcttgtggattccagaccacggcggtcatccacccagctacggtccggtgcctccgtcacagaacctgttgccgaggaaagagggcttatgtctcagccactaatggaaacctgccacagtgtaggtgccgcttatctggaatccttacctctacaggacgcaagtcccgccggcggaccatcgtctcctagagatctacccgaacctcgtgtgtccacagaacatactaataataaaatagaaaagatctatattatgaaggcggatacagtgatcgtagggaccgtgaaggctgaactgcccgaagggaggggtcttgccggccccgccgaaccagaactggaagaggaattggaagccgatcatacccctcattatccggagcaggagacagaaccccctctggggagctgttccgatgttatgttgagcgttgaggaggaaggcaaggaagatcctctacctactgctgccagcgggaagtag

SEQ ID NO: 210269 - DNA, 399 bp, synthetic construct
  misc_feature 1..399: note = Description of Artificial Sequence: Synthetic coding sequence
  source 1..399: mol_type = other DNA
atgagccagcccctgatggagacctgccacagcgtgggcgccgcctacctggagtctctgcctcttcaggatgcctccccagctggcgggccctcctcaccccgggacctgcccgaaccgcgcgtttcaactgagcacaccaacaataagatcgagaagatttacatcatgaaggccgatactgtgatcgtcggcactgtcaaggccgagctgccggaaggtagaggcctcgcaggccctgctgaaccagagttagaggaagagttggaggccgatcataccccgcactatccagagcaggagaccgagccccctttaggaagttgtagtgatgtgatgctctctgttgaggaggaaggcaaggaggatccactgccaaccgcagcttccggcaagtag

SEQ ID NO: 210270 - DNA, 1452 bp, synthetic construct
  misc_feature 1..1452: note = Description of Artificial Sequence: Synthetic coding sequence
  source 1..1452: mol_type = other DNA
atgttctgcagcaccagcgccgtgaacagctgcgcccggtgcttcttccactcagtgtgccccgccggtatgatcgtcaagtttcctgggactgcgcaaaagaacacagtgtgtgagccagccagtcccggtgtctccccagcatgcgcatcgcccgaaaattgtaaagaaccaagtagcgggacaataccccaagccaaaccgacccctgtctcaccagctacttctagtgccagcacaatgccagtccgaggcggcacccggctggcccaggaagccgccagcaagctcacacgggccccagactccccgtcctccgtcggcaggccgtcatctgatccaggtttgtcacccacgcaaccttgtccggagggttctggcgattgcaggaagcaatgtgaacctgactattatttagacgaggctggtaggtgcacggcatgcgttagctgctcacgtgacgacctggtggagaagacaccttgcgcctggaactccagccgaacatgcgagtgtcgtcccggcatgatttgcgccacctctgcaaccaattctcgagcccgatgcgttccctatcctatctgcgctgccgagaccgtgaccaagccacaggacatggccgaaaaggacaccacctttgaagcacccccccttggtacacagccagattgtaatccaacccctgagaacggggaagcacccgcatcaaccagccctacccagtctctgctggtcgacagccaagctagcaagacccttcccatacctacctccgctccagtggccctttccagcacaggaaagcctgttctggacgccggacccgtgcttttctgggtaatattggtcctggttgtcgttgtgggcagctcagcgttccttctatgtcataggcgggcatgtagaaagcgcatacgacagaaactccacctttgttaccctgtgcaaacaagccaacccaaactggagctcgttgactcaagaccccggcgttcttccaccttgcgctcaggagcatccgtgacggagccagtggcggaagagcgagggctcatgtcccagccgcttatggagacatgtcatagtgtgggcgcagcttatttggaatcactgcccctccaggacgcatctcccgcgggaggcccttcatccccaagggacctccccgagccaagagtctccaccgaacacacgaataataaaattgagaaaatttacatcatgaaagccgacactgtcatcgtggggaccgtgaaagcagaactgcccgagggacgcggactggcaggccctgccgagccggaactggaggaggaattggaagctgatcacacaccacattatcctgagcaggaaaccgagccgcccctggggtcctgctcagacgtgatgctttccgtggaagaggagggaaaggaggatcctctgccaacggccgcttcgggcaagtag

SEQ ID NO: 210271 - DNA, 1437 bp, synthetic construct
  misc_feature 1..1437: note = Description of Artificial Sequence: Synthetic coding sequence
  source 1..1437: mol_type = other DNA
atggcccccctgcggcccctgctgatcctggccctgctggcctgggtggccctcgccgaccaagaatcttgtaagggcaggtgtacagaaggatttaatgttgataagaagtgccaatgcgatgaactctgcagctactatcaaagttgctgcaccgactatacagctgaatgcaagccacaagttaccaggggggacgtgttcaccatgcccgaggacgagtacactgtgtatgacgatggggaggagaagaataacgctaccgttcacgaacaggtaggaggacctagcctgacaagcgatctgcaggcccagtccaagggcaacccggaacagacacctgtgctgaaacccgaggaagaggcaccggctccagaagttggagcctccaaacctgagggaattgactcacggccagagacgttacatcccggccgcccccagccgcctgctgaggaggaactatgcagcgggaaacccttcgacgccttcacagatctgaagaacgggtctctctttgcgtttagaggacagtactgttacgaattagatgaaaaagccgttaggccgggataccctaagttaatcagagatgtgtggggaatcgaaggccccatcgacgctgccttcacacgtattaattgtcagggaaagacctacttgtttaagggctcccaatactggcgatttgaggacggcgttctcgaccccgactaccccaggaatatcagtgatggcttcgatggcatccctgacaacgtcgacgcagcattggccttacctgcccattcttattcaggacgggagcgcgtttacttctttaagggtaaacagtactgggaataccaattccaacaccaaccatcccaagaggaatgtgagggtagctcactctccgcagtcttcgaacatttcgccatgatgcagagagactcctgggaggacatctttgagctgctgttctgggggcggacctctgctggtaccaggcagcctcagttcatttctcgcgactggcacggggtgcccggccaggtggacgcagccatggcaggcagaatatatatttccggcatggcccctcgcccctctctggccaagaagcagcggtttaggcaccggaatagaaaagggtaccgcagccagcgggggcattctagaggccggaaccagaatagtcgcaggccaagtagggccacctggctaagcctattttccagcgaggagtcaaacttgggtgccaacaattacgatgattatagaatggattggctagtccccgccacctgtgagcccatacagtctgtgttttttttttctggggacaagtattatcgcgtgaatctgcgcacaaggagggtggacaccgtcgacccaccatatcctagatcaatcgcacagtattggttggggtgccccgcccccggccacctgtag

SEQ ID NO: 210272 - DNA, 639 bp, synthetic construct
  misc_feature 1..639: note = Description of Artificial Sequence: Synthetic coding sequence
  source 1..639: mol_type = other DNA
atggccgaggccaagtactacctgatccagggcctggtgaacatgtgccagagtgcattgcaggacaaaaaggacagctaccagccagtctgcaatattcctattatcacctcacttaaagaagaagagcggctgatcgaatcttcaaccaagccagtggtcaagctgctctataataggagcaacaataagtattcttatactagcaattctgacgaccacttgctcaagaatattgaattgttcgataaactgtctttgcgcttcaacggccgggtcctgttcattaaagacgtgataggcgacgagatctgctgttggtcattctacgggcaaggcagaaaattggctgaagtgtgctgcaccagcatcgtgtatgccactgaaaagaaacagactaaggtcgaatttcccgaagccaggatttatgaggagacactcaacgtgcttctgtatgaaacccctagagtgcctgataacagtctgctggaggccacaagtcggtctcggagtcaagccagcccatcagaggacgaagagaccttcgagctccgggaccgcgtgcgaaggatccatgtcaagcgctacagcacatacgacgatagacaactaggacaccagagtacacatcgcgactag

SEQ ID NO: 210273 - DNA, 1965 bp, synthetic construct
  misc_feature 1..1965: note = Description of Artificial Sequence: Synthetic coding sequence
  source 1..1965: mol_type = other DNA
atgagcgaggccagcagcgaggacctggtgccccccctggaggccggagccgcaccctatcgcgaagaagaggaagcagctaagaagaagaaggagaagaaaaagaagtccaagggcctcgctaatgttttttgcgtgtttacaaagggcaaaaagaagaagggccagccatcctctgctgaacccgaggatgccgcgggatctcgccaagggctggacggaccaccgcctacagtggaggaactgaaagccgccttagagagagggcaactggaggctgctaggcctctcctcgcgctcgagagagagctggctgccgcagcagccgctggcggcgtgtcagaggaggagcttgtgaggcggcaatcaaaagtggaggccctgtacgaacttctgagggatcaggtactcggggtgctccgccgacccctcgaggcgccccctgaaaggctgagacaagccctggctgtggtggctgaacaggaacgtgaggatagacaggccgctgctgccggacctggaacctccgggctagccgcaacgagaccgcgtaggtggctgcagctttggagacgtggggtcgccgaagcagcggaggaaagaatgggacagcgtcccgccgccggcgcggaggtgcctgagtcagtgttcctccatcttggtcgaactatgaaagaagatctggaggccgtagtcgagagactgaaacctctattccctgctgagtttggtgtagtggcagcctatgccgagagttatcaccaacacttcgcagcgcatctagcggccgtggcccagtttgagctgtgtgagcgggacacctatatgttactgctgtgggtccagaacctctaccccaacgatatcatcaactcacctaagctggtgggcgagcttcagggaatgggcttaggtagcctgctgccacccaggcagatcagactgctggaagccacgttcctatcttctgaggcggcaaatgtgagggagctcatggaccgcgccctggaactggaggcccggagatgggcagaggacgtccctccgcagcggctggacgggcactgccacagtgaactggcgatcgatattatccaaattacctcccaggctcaggcaaaggccgaatcgattacactggacctaggctcgcagatcaaacgggtgctactggtggaattacctgcctttctgcgctcttatcaaagagctttcaatgagttcctggagcgtggaaaacagctgacaaactaccgcgccaatgtgattgccaatatcaacaactgtctctcatttagaatgagcatggagcagaactggcaggtcccccaggataccttgtcacttctcctgggcccactcggggaacttaagtctcacggctttgacactctcctgcaaaacctccacgaagacctcaaacctcttttcaagagatttactcatacaaggtgggctgctcccgttgaaactctcgagaatatcatcgccaccgtcgacaccaggctgcctgaattttctgaattgcaggggtgctttcgtgaggaactgatggaagctctccatcttcacttagtgaaagaatacatcattcaactcagcaaaggacgcctggtcctgaaaaccgcagagcagcaacagcagttagcgggttacatactagccaacgctgatacaatccagcatttttgcactcagcacggcagcccagccacttggctgcaacccgctcttcctacgctcgcagaaattataagactgcaagacccttctgctataaaaatcgaagtggccacctacgcaacctgctatcctgattttagtaaggggcatctgagcgctatcctggctatcaaagggaacctcagcaattccgaggttaagcggatcagatcaattctggatgtttccatgggggcccaggagcccagccgccccctgttttctctgataaaagtgggctag

SEQ ID NO: 210274 - DNA, 972 bp, synthetic construct
  misc_feature 1..972: note = Description of Artificial Sequence: Synthetic coding sequence
  source 1..972: mol_type = other DNA
atggaccgggccctggagctggaggcccggcggtgggccgaggacgtgccgccacagcggttagatggccactgtcactccgagctcgcaattgacatcattcaaatcacttctcaggcacaggctaaagccgagtcgatcaccctcgacctcggcagccagattaagagggtgctgctggtggagctgcctgccttcctgcggagttaccaaagagccttcaatgagtttctggaacgtgggaagcagctgactaactacagagcgaacgtaattgctaatatcaataattgcctatcttttcgaatgtctatggagcagaattggcaggtgccacaggatacactgtctttactactgggacctcttggcgaacttaagagccatggctttgacacactgctgcaaaacctgcatgaggatctgaaaccccttttcaaacgatttacacacacccgatgggcagctcctgtagaaacactggagaatattatagccactgtcgacacgaggctcccagaatttagtgaactccagggctgcttcagggaggagctcatggaggcgcttcaccttcaccttgtcaaggagtacatcatccagctatccaaaggcaggctggtcttgaagactgccgaacagcagcagcagctggccggatatattttggccaacgccgacactattcagcatttctgcacacagcacggttcccccgcgacgtggctacagccagcactgccgaccctggctgagatcatccggttgcaagacccgtctgctataaagatcgaagtggctacatatgctacttgctaccccgatttctctaaaggacacctcagcgctatcctggcaattaaaggaaacctgtcgaattctgaagtgaaacgaattaggtcaatcctcgatgtcagcatgggcgcccaggaacctagccgcccactatttagcttgattaaggtgggttag

SEQ ID NO: 210275 - DNA, 600 bp, synthetic construct
  misc_feature 1..600: note = Description of Artificial Sequence: Synthetic coding sequence
  source 1..600: mol_type = other DNA
atggaggccctgcacctgcacctggtgaaggagtacatcatccagctctcaaaggggcgtcttgtactgaaaactgctgaacagcagcaacaactggccggatatatcttggctaacgctgatactattcagcacttttgcacgcaacatgggagtcccgctacgtggctgcagcctgcccttccaaccctggccgagatcattaggctgcaggacccaagcgcaataaagattgaagtggccacctatgctacatgctaccccgatttttctaagggccacctgtccgctatcttagctataaagggaaacctgtctaactcagaggtcaaaagaatcagatccatcttggatgtatcaatgggggcccaggagccgtcgaggccgcttttctcgctgattaaacctagagcagctgtgtcggggatccagcagtggtggaacggccgccaaaattggaaaaggaagaaagagaaaatgagcagccgccttgccggcgcatttcgggtgctttggagggcggtgtctacagcttctattagacgccacatccaggtggctccacgccctctccaggctggacctgctatgggcccatag

SEQ ID NO: 210276 - DNA, 120 bp, synthetic construct
  misc_feature 1..120: note = Description of Artificial Sequence: Synthetic coding sequence
  source 1..120: mol_type = other DNA
atgagcgaggccagcagcgaggacctggtgccccccctggaggccggtgcggccccctatcgcgaggaggaggaagccgccaagaaaaagaaggagaagaagaagaaatccaagggatag

SEQ ID NO: 210277 - DNA, 1965 bp, synthetic construct
  misc_feature 1..1965: note = Description of Artificial Sequence: Synthetic coding sequence
  source 1..1965: mol_type = other DNA
atgagcgaggccagcagcgaggacctggtgccccccctggaggccggcgctgccccctacagggaagaggaggaggccgctaaaaagaaaaaagaaaagaagaaaaagtccaagggtctggccaatgtgttctgtgtgtttaccaagggtaagaaaaagaaggggcaaccttcatcggcggagccggaggacgcggctgggtctcgtcagggtctcgacggtccacctcctacagttgaggaacttaaagctgcattggagcgaggtcagctagaggccgccaggcccttgctggcactcgagcgcgaactagccgccgctgccgcggccgggggagtcagcgaggaagagctggtgagacgccagagtaaggtggaagccctctacgaattgctcagagaccaggtgctcggcgtcctgcgacgcccactcgaggcaccgccagagcggctgcggcaagccctggccgtcgtggccgaacaggagcgtgaggacaggcaggccgcagctgctggacctggcactagcgggcttgccgcgacacgccctagacggtggctgcagctatggagaagaggcgttgcagaagcggccgaggaaagaatggggcagagacccgccgctggagctgaagtgccagagtccgtgttccttcacctgggcaggacaatgaaagaagatctggaggctgtagtggagagacttaagccactcttccccgccgagttcggcgtagtggcagcctatgcagaaagctatcaccagcacttcgccgcccacctggctgctgtggctcaattcgagttgtgtgaaagggatacatacatgctactgctatgggtgcaaaacttgtacccaaacgatatcattaactccccaaagctggtcggggagctgcaggggatgggactcggttctctgttgccacctcgacagataagactgcttgaagctacattcctctcctccgaagccgccaacgtaagagagctgatggatcgggcgctggagctggaggccagaagatgggcagaagacgtgccacctcagagactggacggacattgccactcagagttggccatcgacattattcagattaccagccaggcccaagcaaaggcagagtccattacgctcgacctagggtcgcagatcaagagagttctcttggtagagctcccggcatttctccgatcttatcagcgcgcctttaacgagttcttggaacggggaaaacagcttaccaattaccgggccaacgttattgcaaacattaataactgtctctcatttcgtatgtcgatggaacagaattggcaggtgccacaggacaccctctctctcctcctgggccctctgggcgaattgaaatctcatggatttgatacccttctgcaaaacctgcacgaagacctaaagcctcttttcaagcgattcacccatactaggtgggccgctcccgtggaaactctcgagaacatcatcgcaacggtagacacaagactgccagagttttccgagcttcagggctgtttccgtgaggagttgatggaggccctgcacctgcatctcgtgaaagaatatataattcagttgtcaaaaggccggctggttctcaagacggcagagcagcaacagcaacttgccgggtacatcctggctaacgccgacacgatacagcacttttgcacacagcacggatctcccgcaacctggctgcagccagccctccccactctggcagagatcattaggctccaggacccgtcagcgataaagatcgaagtcgcaacatatgccacgtgctatcccgacttttccaagggacacctctccgccatcctggcgattaaggggaatttgtcaaactctgaggtcaagcggatcagaagcattctggatgtgtccatgggcgcccaggagccctcccggcccttattctcattgataaaggtgggatag

SEQ ID NO: 210278 - DNA, 2373 bp, synthetic construct
  misc_feature 1..2373: note = Description of Artificial Sequence: Synthetic coding sequence
  source 1..2373: mol_type = other DNA
atggccgagcaggtgctgccccaggccctgtacctgagcaacatgaggaaagccgtcaagatccgggagaggacgccggaggatatttttaagccaaccaatggcatcatacatcattttaagacaatgcacaggtatactctcgagatgttccgcacttgccagttttgtccacagttccgggaaattattcacaaggcactgatcgaccggaatatccaggcaaccctcgagagccaaaagaagctgaattggtgcagagaggtgcgaaagctcgttgctctgaaaaccaacggtgacggcaactgcctgatgcatgccacgtcccagtacatgtggggagttcaggatactgacctggtcctgcgtaaggccttgttctccacattgaaggagaccgacacaaggaacttcaagtttcgctggcagctcgaaagtctgaagtcccaagagtttgttgagacaggtctgtgctatgacacccggaattggaacgatgaatgggataacttgataaaaatggctagtaccgatacacctatggcacggtccggccttcaatacaactctctggaggaaattcatatcttcgttctctgcaacatactgcggcgtcccataatagtgatatcggataaaatgttgaggtcacttgaatccggatcaaactttgctccactgaaggttggagggatttatctgccactgcattggcccgcccaggagtgttaccgctatccaattgtgctagggtatgactcccatcacttcgtcccactcgtcacattgaaggacagcggccctgagatacgggcagtgcccctcgttaatcgggatagaggtaggtttgaggacctcaaggtgcattttctgaccgatcctgagaacgaaatgaaggagaagcttctcaaagagtacctgatggttattgaaatccctgtgcaaggttgggatcatggtacaacccacctaatcaatgccgctaagctcgatgaggccaaccttcccaaggaaatcaacctggtggacgactactttgagctggttcagcatgagtataaaaagtggcaggagaattccgagcaggggaggcgggagggtcacgcccagaatccgatggaacccagcgttccccagttgtcccttatggacgtgaagtgtgagactcctaactgcccgtttttcatgagtgtaaatacacagcctctctgccatgaatgttcagagcggagacaaaagaaccagaataagctccccaaactgaactccaagcccggcccggagggcctgcccggtatggctcttggcgcgtcacggggggaggcctacgagccattggcctggaacccggaagagagtaccggcgggccccacagcgcccctcctactgctcccagcccttttctgttctccgaaactaccgccatgaaatgccgcagccctgggtgcccctttactttaaatgttcagcacaatggattttgcgagcggtgccataatgctaggcaactgcacgcctctcatgctccagaccacactaggcacctggaccccggcaagtgtcaggcctgcctgcaggacgttacccgcactttcaacggcatttgcagcacatgtttcaaacgtaccactgcggaggcaagctcctcactgtccacgagtctgcctccgagctgccatcaaaggtccaagtcagatccaagcaggctggtccgatccccaagccctcacagttgccaccgggccggtaatgacgcgcctgccggctgtttgtctcaggccgcaaggacccccggtgataggaccggaacctctaagtgtaggaaagcaggctgtgtatacttcggaaccccagagaacaagggcttttgcacactgtgcttcattgaatatcgagagaacaaacacttcgcagccgctagcggcaaagtgagtccaacagcttctcgtttccagaataccatcccatgtctcggccgggagtgtggtacactaggctcaactatgtttgaaggctattgccaaaagtgtttcatcgaggcccagaatcagcgctttcacgaggccaaacgtaccgaggagcagttaagatcatctcaaagacgggatgtgccaagaaccacgcaaagtacctctcgcccaaagtgtgccagggcctcctgcaagaacatcttggcatgcaggagtgaagaactgtgtatggaatgccagcaccccaatcagagaatgggccccggagcgcacagaggcgaacctgctccggaggatccacctaagcagcgatgccgtgcgcctgcctgcgatcattttggaaatgcaaagtgcaatggatattgtaatgaatgctttcagttcaaacagatgtacggctag

SEQ ID NO: 210279 - DNA, 489 bp, synthetic construct
  misc_feature 1..489: note = Description of Artificial Sequence: Synthetic coding sequence
  source 1..489: mol_type = other DNA
atggccgagcaggtgctgccccaggccctgtacctgagcaacatgcggaaggctgtgaaaattagggagagaacacctgaagatattttcaagccaacgaatggaattatccaccatttcaaaaccatgcacagatacactcttgagatgttccgtacctgtcaattttgtcctcagttccgcgaaatcattcacaaagctttgattgatagaaatatacaggctacactagagtcccagaagaagctaaattggtgccgggaggtccgcaaactggtagcactgaagactaacggggacgggaattgtctaatgcacgctacttcgcagtacatgtggggcgtccaggatacggacttagtgcttaggaaagccctcttcagtacactaaaggaaactgacacccggaactttaaatttcgatggcagctggaaagtctcaagtctcaggagttcgttgaaaccgggctctgctatgatacgaggtag

SEQ ID NO: 210280 - DNA, 81 bp, synthetic construct
  misc_feature 1..81: note = Description of Artificial Sequence: Synthetic coding sequence
  source 1..81: mol_type = other DNA
atggccgagcaggtgctgccccaggccctgtacctgagcaacatgaggaaggctgtgaaaattagagaaagaaccccgtag

SEQ ID NO: 210281 - DNA, 297 bp, synthetic construct
  misc_feature 1..297: note = Description of Artificial Sequence: Synthetic coding sequence
  source 1..297: mol_type = other DNA
atggccgagcaggtgctgccccaggccctgtacctgagcaacatgcgcaaggcggtgaagatcagagaacgcacacccgaggacattttcaagcctaccaacggtataatacatcattttaagacaatgcacagatacaccctcgagatgtttcgaacctgtcagttctgtccccaatttagggagatcatccacaaggctctgattgataggaatatacaggctacccttgagagccagaagaagctgaactggtgcagggaagtcaggaaactcgtggcactgaaaacaaattag

SEQ ID NO: 210282 - DNA, 813 bp, synthetic construct
  misc_feature 1..813: note = Description of Artificial Sequence: Synthetic coding sequence
  source 1..813: mol_type = other DNA
atggccgagcaggtgctgccccaggccctgtacctgagcaacatgcggaaagcggtgaaaattagggagcggactcctgaggatatatttaagccgacaaatgggatcattcaccattttaaaaccatgcatcggtatacgctggaaatgttcagaacatgccaattttgtcctcaattccgcgagataattcacaaagctctgattgatcgaaatatccaggctacactggaatctcagaaaaagttgaattggtgcagagaggtgcgaaagttggtcgcccttaagacaaatggagatgggaactgtctcatgcacgccacctcacagtacatgtggggggtgcaggatacagatctcgtgctccgaaaagcccttttctcgaccctgaaggagactgatacaagaaatttcaaatttagatggcagctagagtccctgaaatcccaggagttcgtagagaccggactttgttacgatacccgcaactggaatgatgagtgggataacctgatcaagatggccagcactgatacacccatggcgaggtcagggctgcagtacaacagtctggaggaaattcatatattcgtgctttgcaacatcctccggcggccaattatagtaatcagtgataagatgttgcgctccctggagtctgggtcaaactttgccccactgaaggttggcggaatttatttacccttgcactggcctgcccaggaatgttatcgctatcccattgttctgggctacgactctcaccatttcgttccactggtcactttgaaggatagcggtcccgacatctag

SEQ ID NO: 210283 - DNA, 2250 bp, synthetic construct
  misc_feature 1..2250: note = Description of Artificial Sequence: Synthetic coding sequence
  source 1..2250: mol_type = other DNA
atggccgagcaggtgctgccccaggccctgtacctgagcaacatgcgcaaggctgtgaaaattcgggagcgcactccagaggacatctttaaaccgaccaatggcattattcaccacttcaaaaccatgcaccggtacacgctcgaaatgtttaggacctgtcagttctgtcctcagtttagggagatcattcacaaggccctgattgatagaaacattcaggcaactctggagtcacagaaaaagttaaattggtgcagagaagtgagaaagctcgtggcccttaagactaatggcgacggaaactgccttatgcacgcaacttctcagtatatgtggggcgttcaggacacggaccttgttttgcggaaggccctgttctccaccttgaaggaaacagacacacggaactttaaattcaggtggcagctggagagcctgaagagccaggagtttgttgagactggactctgctacgacaccaggaactggaatgatgagtgggacaacctaatcaaaatggcctccacagacacaccgatggctcgtagtgggctgcagtataattcacttgaggagatccatatcttcgtactgtgtaatatcctgagaagacccatcattgtgatcagcgacaagatgttgcgctcgctggagagcgggtctaatttcgccccactcaaagtcggtgggatctacctgccgctccattggccagcccaggagtgttaccgttaccccattgtgctgggatacgattcacatcactttgtccctctcgtcactctgaaggattcagggcctgagatacgggctgtcccccttgtaaatcgtgaccggggacgttttgaagacctgaaggtgcatttcctgactgaccctgaaaatgaaatgaaggagaagctgctgaaggagtatctgatggttattgagataccagtacagggatgggaccacgggacgacccatcttatcaacgccgcaaaattggatgaggctaatctgccaaaggaaatcaatctggtagatgattattttgaactagtccagcacgaatacaagaagtggcaggagaactcagagcaaggccgtcgtgaaggacatgctcaaaaccctatggagcccagcgttccacaattatctctgatggacgttaagtgtgaaactcctaattgtccctttttcatgagcgtgaacacacagcccctttgtcacgagtgctcagaacgccgacaaaagaaccaaaataagctccctaagttaaacagcaagcccgggcctgaaggcttaccggggatggctttaggagccagccgcggagaggcctacgaacctctcgcttggaatcccgaggagtcaacagggggcccccactccgccccaccaaccgcaccctcacccttcctttttagtgagactaccgctatgaagtgtagaagccccggatgccctttcacactgaacgtgcagcataatggattctgcgagcggtgtcataacgccagacaattgcatgcatctcacgccccagatcacacaagacatctggacccaggcaagtgccaggcttgcctgcaggacgtgacccgcaccttcaacgggatctgtagcacatgctttaaacggactactgccgaagcatcatcctcactgtcaacatcactgcccccctcctgtcaccagcggtctaagagcgatccctccagactcgttcggtccccctctccccactcttgccaccgcgctgggaatgacgctccagccggttgtctttcacaagccgcccgtactcccggtgacaggaccggcacttctaaatgccggaaggcagggtgtgtctacttcggtactccagagaacaaaggcttctgtacactctgcttcatcgagtaccgagagaacaaacatttcgctgctgcatctgggaaggtttctcccactgcttcccggttccagaatactattccttgtttagggcgtgaatgcggcacactgggaagcacaatgttcgagggatattgtcagaagtgttttattgaggcacaaaatcaacggttccatgaggctaagcgcaccgaagaacagctgcggagttcccagcgtcgagacgtgcctaggacgacacagagcacttcgcggcctaagtgcgcccgcgcgtcatgcaagaacattctggcctgtaggtctgaggagttgtgtatggagtgccaacatcagccagaggacggaccatggggtccccccggctag

SEQ ID NO: 210284 - DNA, 459 bp, synthetic construct
  misc_feature 1..459: note = Description of Artificial Sequence: Synthetic coding sequence
  source 1..459: mol_type = other DNA
atggccgagcaggtgctgccccaggccctgtacctgagcaacatgcgtaaggctgttaaaatccgggaaagaactcccgaggatatctttaaaccaaccaacggcatcatccaccactttaagaccatgcatcggtatacgctagagatgttcagaacctgccagttctgcccccagttccgggagattattcacaaagcactgatagaccgaaatattcaggcaactcttgagtcccaaaaaaagctgaattggtgtcgagaagtgagaaaactggtcgcactgaaaacgaacggtgacggcaactgtctgatgcatgcgacttcacaatacatgtggggtgtacaggataccgacttagtcctgcgaaaggctctgtttagcactctgaaagaaaccgacacacgcaatttcaagtttcgctggcagttggaaagtcaaatctcgggtatttgctag

SEQ ID NO: 210285 - DNA, 645 bp, synthetic construct
  misc_feature 1..645: note = Description of Artificial Sequence: Synthetic coding sequence
  source 1..645: mol_type = other DNA
atggccgagcaggtgctgccccaggccctgtacctgagcaacatgaggaaagctgtgaagataagggagcgaactccggaagacatcttcaaacccaccaatgggattatccaccactttaagactatgcacagatataccctggagatgttccggacctgccaattttgcccacaattcagagagattatccataaagccctcatcgaccgaaatattcaggccacacttgaatcccaaaaaaagctgaactggtgccgtgaagtgaggaaactcgttgcacttaagacgaatggagatggcaactgcctcatgcatgccacctcccagtacatgtggggcgtccaggatactgatctggtgcttcgaaaggccttgttctccacactcaaagagaccgacactcgtaacttcaaatttcgttggcaacttgaaagcctcaagagccaggagttcgtggagaccggcctctgttacgacacaagaaactggaacgacgaatgggacaatcttatcaaatggctgcctcagacacatccatggccggaagtggatttcagtaccacccattggaaaaaatatacatatctatcgtttgctacatcctcagaagggcagagcctgtcgtttcagacaaagtgctag

SEQ ID NO: 210286 - DNA, 2010 bp, synthetic construct
  misc_feature 1..2010: note = Description of Artificial Sequence: Synthetic coding sequence
  source 1..2010: mol_type = other DNA
atggccgagcaggtgctgccccaggccctgtacctgagcaacatgcgtaaggctgtcaagatacgcgagaggacgcctgaggacatcttcaagcctactaacggcatcatccatcatttcaagaccatgcatcgatatacactggagatgttccggacctgccagttctgcccccagtttagggagatcattcacaaagccctgatcgaccggaacattcaagcaacactggaatctcagaaaaagctgaactggtgtcgggaggtcaggaaactagtggcactgaaaacaaatggggacggtaactgcctcatgcatgctacgtcacagtatatgtggggggtccaagacactgacttggttctccgtaaagccttgttctctaccttgaaggagactgacacccgcaatttcaaattccgatggcagttggaatccctgaagtcacaggaatttgtggagacaggtctgtgctacgatactcggaactggaatgacgagtgggacaatttgatcaagatggcgtccaccgatacgcccatggcgagatcaggactacagtacaacagtctggaggagattcacatctttgtcctgtgcaacattctgcggagaccaatcatcgttatcagcgacaagatgttacgcagcctggagagtgggagcaatttcgcacctctgaaggtcggcggcatttaccttcccctccactggcctgctcaggaatgctaccgatacccgattgtgctggggtacgactcccatcattttgtacctctggttaccctcaaagactctgggcctgaaatccgagcagtgccgctcgtcaatagggatcggggacggttcgaggatctaaaagtccactttctcaccgaccccgagaacgaaatgaaagaaaagctgctgaaagagtacctaatggtaattgagatccctgtgcaggggtgggatcacggaaccacccacctaattaacgccgcaaaactggatgaggccaatctgcctaaagaaattaaccttgttgatgattacttcgaactcgtccaacacgagtacaaaaagtggcaagagaacagcgagcaaggaagaagggagggacatgcacagaatccaatggagccatctgttccgcagctgtcgcttatggacgtaaagtgtgagacaccgaattgcccctttttcatgagtgttaacacacagcctctgtgccacgagtgctcggaacgcagacagaagaatcagaataaacttcctaaattgaactcaaaaccaggcccagaggggctgcccgggatggcactgggggcatccaggggagaagcttacgaacccctggcgtggaacccagaagagtctacaggaggcccccactctgccccccctaccgcgccatcgccctttctgttctctgagacaactgccatgaagtgtcgaagcccaggatgtccatttacactgaacgtccagcataatggcttttgcgagcggtgccacaacgcaaggcaattgcacgcatctcacgctcccgatcatacaaggcatctcgaccccggaaagtgccaggcatgccttcaggacgtcaccaggacattcaacggcatctgttcgacttgttttaaaaggacaacggcagaggcctcttcctcacttagtacttccttaccaccctcttgtcaccagaggagcaaaagcgaccccagcagactggttcgatccccgagcccccactcgtgccacagggccggcaatgacgctccggccgggtgtctgtcgcaagccgcacggaccccgggagatcggactgggactagcaaatgcaggaaagcaggatgcgtctattttggcaccccggagaataagggcttttgtaccttgttccatcgcgtgcagcggaaacaaacattctgctgctgcttgagagaatcccagtcacatagtgtgcaggtgccggagcatcatagcgtacccggggaaggaatgagacatccgtggaagcaccacgtatag

SEQ ID NO: 210287 - DNA, 834 bp, synthetic construct
  misc_feature 1..834: note = Description of Artificial Sequence: Synthetic coding sequence
  source 1..834: mol_type = other DNA
atgatcatcctgatctacctgttcctgctgctgtgggaggacacccagggttggggcttcaaggatggaatctttcataatagcatatggctggaaagagccgccggcgtctatcatcgcgaagctcggagtgggaagtacaagctcacatacgctgaggccaaagccgtttgcgagtttgaggggggccatctggctacatacaagcagctggaggccgctcgcaaaataggatttcacgtgtgcgccgccggttggatggccaagggtagggtagggtaccccatcgtgaaacctgggcctaactgtggatttggaaaaacaggcattatagattatgggattcgtctaaaccgatcagagcggtgggacgcatactgctacaacccacatgccaaagagtgcggaggtgtgttcacagatcccaaacaaatctttaaaagccccggattccctaacgaatacgaggacaaccaaatttgctactggcacattcgactcaagtatgggcagaggattcacctgagctttctagatttcgacttggaagacgatcccgggtgcctggccgattatgtggagatctatgattcatatgatgacgtccacggattcgtggggcggtactgcggggatgagctccctgatgatataatcagcacaggcaacgtaatgacattaaagtttctttctgatgccagtgttacagccggcgggttccagattaagtacgtggccatggaccccgtgagtaagtcaagccaggggaagaataccagcacaaccagcaccgggaacaaaaattttcttgctgggaggttctcgcacctgtag

SEQ ID NO: 210288 - DNA, 567 bp, synthetic construct
  misc_feature 1..567: note = Description of Artificial Sequence: Synthetic coding sequence
  source 1..567: mol_type = other DNA
atggccaccgacgtgttcaacagcaagaacctggccgtgcaggcccagaagaaaatcctcggcaaaatggtatcaaaatctatcgccactacgctgatagatgacacctcttcagaggtgttagatgaactgtaccgggtgactcgtgagtacactcagaataaaaaggaggccgagaagattataaaaaatttaatcaagaccgtgattaagcttgcgatcctgtacagaaacaatcagtttaaccaagatgaattagccctgatggagaaattcaagaagaaagttcaccaactggcaatgaccgtcgtgagcttccaccaggtagactacacttttgatcgaaatgtactatcgagactcctcaacgagtgtcgtgaaatgctccatcagattattcagcgacatctgacagcgaaaagccacggaagagttaacaatgtttttgatcacttctctgattgcgaattcctggctgctctctataacccgttcggaaacttcaagccacatttgcagaagctgtgtgacgggatcaataagatgcttgatgaggagaatatttag

SEQ ID NO: 210289 - DNA, 597 bp, synthetic construct
  misc_feature 1..597: note = Description of Artificial Sequence: Synthetic coding sequence
  source 1..597: mol_type = other DNA
atgcacagcgaggccgaggagagcaaggaggtggccaccgacgtgttcaactccaagaatctggccgtgcaggcccagaaaaaaattttgggtaagatggtaagcaaatcgatcgcaaccacactcatagacgatacttcaagtgaggtcctggacgagctgtaccgcgtcacgagagagtatacgcagaacaaaaaggaggccgagaagattattaagaacctgatcaagacagtgatcaagctcgccattctatatcgcaataaccagtttaaccaagacgagctggcccttatggagaaattcaagaagaaggttcaccagctggctatgacagtagtgtcatttcatcaggtggactatacctttgacagaaacgtgctgtcccgtctcctgaacgagtgccgagaaatgcttcaccagatcatacaaagacacctcacagcaaagtcacatggccgcgtcaataacgtattcgaccacttctctgattgtgagttcctggctgctctgtataatccctttggtaacttcaagccgcacttacagaagctgtgcgacggcatcaacaagatgctggatgaagagaacatctag

SEQ ID NO: 210290 - DNA, 597 bp, synthetic construct
  misc_feature 1..597: note = Description of Artificial Sequence: Synthetic coding sequence
  source 1..597: mol_type = other DNA
atgcacagcgaggccgaggagagcaaggaggtggccaccgacgtgtttaactccaaaaacctggcagtacaggcccaaaaaaagattctgggaaagatggtgtcaaagagtatcgccactacactgatcgatgatacctcttccgaggtcctggacgagctttatcgcgtgacaagagaatacactcagaacaagaaagaagcggagaagattattaagaacctgattaagacggttataaaattggctattctgtaccgtaataaccagttcaaccaagatgagctcgctttaatggagaaatttaaaaagaaagtccaccagctagccatgaccgttgtctccttccaccaggtcgactataccttcgatcgcaatgttttgagtcggctgctaaatgaatgccgtgaaatgctgcaccaaatcattcagaggcatttgaccgctaaatcacatgggcgcgtcaataatgtgttcgatcatttctcagattgtgagtttctggccgcgctgtacaaccctttcggaaatttcaagcctcacctgcagaagctctgcgacggcattaacaagatgctggatgaagagaatatatag

SEQ ID NO: 210291 - DNA, 555 bp, synthetic construct
  misc_feature 1..555: note = Description of Artificial Sequence: Synthetic coding sequence
  source 1..555: mol_type = other DNA
atggagagcttcagcagcaagagcctggccctgcaggccgagaagaaactgctctcaaaaatggctggaagaagtgtggctcatttgttcatcgatgaaacttcaagtgaagtgctagacgagctctaccgcgtgtcgaaagagtacacccactcccggcctcaggcccagagggtgatcaaagatttgatcaaggttgcaataaaagtggccgtgctccatagaaatggcagtttcgggccctctgagctggctctcgcaacacggtttcggcagaagctcagacagggcgctatgactgccctgagctttggcgaggtcgatttcacattcgaagcagccgtgttggccggcctgctgaccgagtgtcgcgacgtgctgctcgagctggtagagcaccacctgacaccaaagtcacacggcaggattcggcacgtgtttgaccacttctctgaccccgggctactgacggccctttatggcccagacttcactcagcacctgggaaagatctgcgacggcctgcgcaagttgctcgatgaggggaaactgtag

SEQ ID NO: 210292 - DNA, 1296 bp, synthetic construct
  misc_feature 1..1296: note = Description of Artificial Sequence: Synthetic coding sequence
  source 1..1296: mol_type = other DNA
atgtaccggaccaaggtgggcctgaaggaccggcagcagctgtacaagctgatcattagccaattgctgtatgatgggtacatcagcattgcaaacgggcttatcaatgagattaaaccgcagtccgtttgcgccccaagcgagcagctcctgcacctgattaaactaggcatggaaaacgatgacacagccgttcagtacgcaattggacgatcagacactgtcgccccgggtacgggtatcgatcttgagtttgacgcggatgtacagacgatgagcccggaagcctccgaatatgaaacatgttatgtgacgtcccataagggcccttgccgggtcgctacctattccagagacggtcaactgattgcgacagggtcagccgacgcttctatcaaaattctggatacagaaagaatgcttgccaagagtgccatgccaatagaggtcatgatgaacgagaccgcccagcagaatatggagaatcaccccgtgatccgcactttatacgaccacgtggatgaggtgacttgtctggcctttcaccccaccgagcaaattctagcctctggttctagggactacacgctcaagctctttgactacagcaagcctagcgccaaacgggcttttaagtacattcaggaggccgaaatgctccgcagcatttcttttcacccgagcggggactttattctcgtgggcactcagcatcccactcttcggctttatgatatcaatactttccagtgcttcgtttcttgcaacccccaagaccagcacaccgatgcaatttgttctgtgaattataactcaagcgctaatatgtatgtgaccgggagtaaggacggatgcatcaaactgtgggatggggtgtccaaccggtgtattacaacctttgagaaggcacatgatggggctgaagtctgtagtgctatcttctccaaaaactctaagtacatcctctcgtccggtaaggatagtgtcgctaaattatgggaaatctctaccgggcggacactggtcaggtacaccggggccggcctgtccggaaggcaagtgcataggacccaggctgtgtttaatcatactgaggactatgtgctgttaccagatgagcggaccatttccttgtgttgttgggacagtcgcacggccgaaaggcggaacctgctgtcactgggtcataataatatcgtgcgctgtattgtgcacagtcctacaaacccaggatttatgacttgttctgacgatttcagggcacggttctggtaccgtagaagcacaactgattag

SEQ ID NO: 210293 - DNA, 621 bp, synthetic construct
  misc_feature 1..621: note = Description of Artificial Sequence: Synthetic coding sequence
  source 1..621: mol_type = other DNA
atggacagcgccggccaggacatcaacctgaacagccccaacaagggactcctgagcgacagtatgaccgacgttccagtggacactggagtggcagcccggactcctgctgtagaggggctgaccgaggctgaagaggaagaactcagagctgagcttactaaagtggaagaagaaattgtgacgctgcgccaggtgctcgccgcaaaggagcgccactgcggcgagttgaagcgaaggttagggttgtcaaccttaggggaactgaagcagaacctgtcccgaagctggcatgacgtgcaagtaagttctgcgtatgtgaagactagtgagaagctgggagagtggaacgagaaagttacccagtccgatctgtataagaaaacccaggaaactctgagccaggccggacagaagacctcagccgcactttctactgtagggtcggctatatctcgaaagctgggcgatatgcgtaactccgccacgttcaagtccttcgaagatcgcgtggggaccatcaaaagcaaagtcgttggtgatagagagaacgggagcgataacctgccctcatccgctggctctggcgacaagcctctgagtgatcctgcccctttctag

SEQ ID NO: 210294 - DNA, 561 bp, synthetic construct
  misc_feature 1..561: note = Description of Artificial Sequence: Synthetic coding sequence
  source 1..561: mol_type = other DNA
atggacagcgccggccaggacatcaacctgaacagccccaacaagggcttgctctctgactcaatgacagacgtccctgtcgacaccggagtggcggcaaggactcccgctgtggaagggctaacagaagccgaagaagaggaactgcgtgctgagttgaccaaggtcgaagaggaaatcgtgacgttacgtcaggtactggctgctaaggagcggcactgcggagaattgaagagacgcttagggctgtctactttgggcgagctaaagcagaatctgtccagatcctggcatgatgtacaagtttctagtgcatacaaaaaaacgcaagagacactctcccaggctggacaaaagactagtgcggccctttctactgtgggctccgccatcagccgcaaattgggtgacatgaggaactccgccacctttaaatctttcgaggaccgggtgggcacaataaaaagcaaagtggtcggggaccgggagaatggcagcgataatttgccatcaagtgccggcagcggtgacaaaccgctgtccgatcctgccccattctag

SEQ ID NO: 210295 - DNA, 630 bp, synthetic construct
  misc_feature 1..630: note = Description of Artificial Sequence: Synthetic coding sequence
  source 1..630: mol_type = other DNA
atggacagcgccggccaggacatcaacctgaacagccccaacaagggcctcctgagtgattcaatgactgacgtgccggttgacacgggtgtggctgctcgcactccggctgtggaagggctgaccgaggccgaggaagaggagctgcgcgctgaactgaccaaagtagaggaggagattgtcacgttacgacaggtgcttgccgccaaggagcgccattgtggcgagctgaaacgaagattggggctcagcacgttaggtgaattaaaacagaatttgtcacgctcctggcacgacgtacaagttagtagcgcctataagaaaactcaggagaccttaagccaggcagggcagaagacctccgctgccttgtccaccgtgggttctgctatttcgaggaaactcggcgacatgcgcgcacatccattttctcactccttctcttcttacagtatcagacattctatcagcatgccggccatgcggaactccgccacttttaagtcattcgaggaccgggtagggaccattaagagcaaagtcgtaggtgatcgtgaaaacgggagcgacaatctgccatcatccgctggatcaggagataagcccttgtcagatccagcaccattctag

SEQ ID NO: 210296 - DNA, 663 bp, synthetic construct
  misc_feature 1..663: note = Description of Artificial Sequence: Synthetic coding sequence
  source 1..663: mol_type = other DNA
atggacagcgccggccaggacatcaacctgaacagccccaacaagggactgctctctgattcaatgacagacgttccagtcgacacaggagtggcagccagaacccccgccgtagaaggccttaccgaggcagaggaagaggagctgcgagcagaactgacaaaggttgaagaagagatagttacgctgcggcaggtactggctgcgaaggagaggcactgcggggagctcaagcgtagactgggcttgtcgacacttggtgagcttaagcagaatctatctagaagctggcacgatgttcaggtgagctccgcctatgtgaagacctccgagaaactgggggagtggaacgagaaagttactcagtccgatttgtataaaaaaacgcaggaaactctgtcgcaggctggccagaagacatccgcagctttgtccacagttggcagtgctattagtaggaagctgggcgatatgagttcctatagcattcgacattctatctccatgcctgcaatgcgaaattcagcaacttttaagagcttcgaggaccgcgtgggtaccatcaaaagcaaagtggtgggggaccgggagaacgggtctgataacctgccgagtagcgctggatcaggggacaagcctctgtcagatcccgctccattctag

SEQ ID NO: 210297 - DNA, 603 bp, synthetic construct
  misc_feature 1..603: note = Description of Artificial Sequence: Synthetic coding sequence
  source 1..603: mol_type = other DNA
atggacagcgccggccaggacatcaacctgaacagccccaacaagggcctcttgtccgattccatgacagacgtgccagtggatacgggggtcgctgctcggacccctgccgtagaaggattgactgaagccgaggaagaggagcttagggctgaactgaccaaggtggaagaggaaattgtgaccctcagacaagtgttagcagctaaagaacggcattgtggcgaactgaagaggcgacttggactgtccacgcttggcgagttgaaacagaacttatcccggtcttggcatgacgtgcaggtttctagtgcatataagaagactcaagagaccctcagtcaggctggacaaaaaaccagcgccgccctgtctactgtcggaagcgccatctcccgtaagctcggagacatgagcagctacagcatacggcacagcatctctatgcccgccatgcggaatagcgcaacattcaaatcttttgaggatagagttggcaccataaaaagtaaagtcgttggggaccgagaaaacggctctgacaatctaccatcctcagcgggaagcggtgataaaccattgagcgatcccgcccccttctag

SEQ ID NO: 210298 - DNA, 492 bp, synthetic construct
  misc_feature 1..492: note = Description of Artificial Sequence: Synthetic coding sequence
  source 1..492: mol_type = other DNA
atggacagcgccggccagggcgtggccgcccggacccccgccgtggagggcctgactgaggctgaggaggaggaactgcgggccgagctgactaaagtggaggaggagattgtgaccctcaggcaggtgttggcagctaaggagagacactgcggcgagctgaagagacgactggggctgtctacactgggggagttaaagcagaatctcagccgcagctggcacgatgtgcaggtgtcctccgcctacaaaaagacacaggagaccttgtctcaggcgggtcagaagactagcgcagcgctgtctactgtggggtccgctatcagccgcaagcttggtgatatgcgcaattcagctacatttaaatcctttgaggaccgcgtcggcacaatcaaaagtaaagtcgtaggtgatagggagaacggcagcgataatttgcctagctccgcgggaagcggggataaacccttatccgatcccgctcccttttag

SEQ ID NO: 210299 - DNA, 3405 bp, synthetic construct
  misc_feature 1..3405: note = Description of Artificial Sequence: Synthetic coding sequence
  source 1..3405: mol_type = other DNA
atgcggttcggcagcaagatgatgcccatgttcctgaccgtgtacttaagcaataatgagcaacacttcacagaggtgcctgttactcccgagacaatttgtagagacgtggtcgacctgtgcaaagagccaggggagtctgactgccatcttgcggaagtatggtgtgggtccgaaagaccagtggcggacaacgaacgaatgttcgatgtactccaaagattcggatcacagcgtaatgaggtgagatttttcctcagacatgaacgaccccccggcagagatatcgtaagcgggccccgttctcaagacccttcccttaaaagaaatggcgtcaaagtacctggcgaataccgtagaaaggagaacggcgtgaacagcccccgaatggacctaactttggccgaactacaagagatggcctcccggcagcagcagcagattgaggcccagcagcaactgttagcaaccaaagagcaacgcctgaaatttctgaagcagcaagaccaacggcagcagcaacaggtagcggagcaggaaaagcttaagaggctcaaagaaatcgctgagaaccaggaggcaaagctcaaaaaagtgcgcgcactgaaaggccacgtcgagcagaaacggttgagcaatggaaaactggttgaggaaattgagcagatgaacaatttgtttcaacaaaagcaacgcgagctggtattagcagttagcaaagttgaagaactgacccgacagctggaaatgctcaaaaatggtcgtatagactcacaccatgataatcagtcagctgtggctgaattggatcgattgtacaaagaactacaactgcgaaataagttgaaccaggagcagaatgccaaactgcagcaacagcgcgaatgtttaaataagcgaaacagcgaggtcgcagtgatggataagagggtcaatgaacttcgggaccggctttggaaaaagaaggcagctcttcagcagaaagaaaatcttcctgtgtcttcagatggcaatctgccccaacaagctgcgtctgcgcccagtcgagtggccgccgttggcccctacattcagtccagtacgatgccacggatgccttcgaggccagagcttcttgtgaagccagccctgcctgacggcagcctggtcatccaggccagtgaaggcccaatgaaaatccaaaccctgcccaacatgagatcaggcgccgcatcacaaactaagggttcgaagatccacccagtgggacctgattggagtccctcaaacgctgatctcttcccctcgcagggaagcgcctcagtcccacagagtactggcaatgccctcgatcaggtggacgacggggaggtccccttaagagagaaagagaagaaggtgcggccattctctatgttcgatgctgtcgaccagagcaacgccccaccttcttttggaacactgagaaaaaaccaaagtagcgaagatatactgcgggatgcccaggtggccaacaagaacgtggcaaaggtccccccacccgtaccaacaaagcccaagcaaattaacttaccttactttggccagaccaatcagcctccatctgatataaagcctgatggctcttctcaacagctgtctactgtagttccatcgatgggcaccaagcccaaaccggcggggcagcagcccagggtgctgctgtctccatcaattccttccgttggccaagatcagacactgtctccaggatccaagcaggagtcgccacccgcagctgccgtacgaccctttacgcctcaaccatctaaggatacacttttgcccccattccgaaaaccccaaacggttgctgcctcatcaatttactcgatgtacactcaacagcaggctcccggaaagaatttccagcaagccgtgcaatcggctctgacaaagacccatactagagggccacacttcagctccgtatatggaaaaccagtgattgccgctgcccaaaatcaacagcagcatcctgagaatatctacagtaatagccagggtaagccaggtagtcctgagcctgaaacagagcccgtcagctctgtgcaagaaaaccacgagaatgagaggatcccacgcccgttatcaccaactaaactgctgccgtttctgtccaacccatacaggaatcagtccgatgcagatttggaggccctgaggaaaaagttatccaacgctccacggcctttaaagaagcggagctcaatcactgagccagagggaccaaatggaccgaacatccagaaactcctgtaccagcgcacaactatagccgccatggaaactattagcgttccatcttatccttccaagagcgcaagtgtgaccgcctctagcgaaagtccggtcgagatacagaacccttatctccacgttgaaccagagaaagaggtcgtgtctctcgttccggagtcactttccccagaggacgtgggtaacgcttcgactgaaaatagcgatatgcccgcgccatctccgggactggattacgagccagaaggggtgccagataattctccgaacctgcaaaataatccagaggaacccaaccccgaagcacctcacgtgctagatgtgtacttggaagagtaccccccctatcctcctcctccatatccttctggcgaacctgaggggcccggagaggatagcgtgtctatgaggccgccagagattacagggcaagtctcacttccacccggtaagagaaccaatctccgcaagactggatcggagcgcatagcacatgggatgcgggtgaagtttaacccgctggccctgctgctagatagttctctggaaggggagtttgacttggtgcagaggataatctatgaagttgacgacccttccctgccaaacgacgagggcattactgccctgcataacgcagtgtgcgcgggccacacggaaatcgtgaagttcctcgtgcaatttggcgtcaacgtgaacgctgcggacagcgacggatggactccattgcactgcgccgcttcatgtaataacgtgcaggtgtgtaaattccttgtcgagagcggggctgcggtctttgctatgacatattccgacatgcaaacagcagctgataagtgtgaggaaatggaagagggatacacccagtgcagccagttcttatatggtgtacaagaaaagatgggaattatgaacaagggggttatatacgcattgtgggactacgagcctcagaacgatgatgaactgcccatgaaggaaggcgactgtatgacaataatccatcgggaagacgaagacgagatagaatggtggtgggccaggctgaacgataaggaaggctacgtaccacggaatcttctaggtctttacccacgcattaaaccccgccaacgcagcctcgcatag

SEQ ID NO: 210300 - DNA, 3018 bp, synthetic construct
  misc_feature 1..3018: note = Description of Artificial Sequence: Synthetic coding sequence
  source 1..3018: mol_type = other DNA
atggacctgaccctggccgagctgcaggagatggccagccggcagcaacagcagatcgaggcacagcagcagttgcttgccacaaaggaacagcggctgaagttcctcaagcagcaggaccagagacagcagcagcaggttgccgagcaagagaagctgaaacggcttaaggaaatcgccgaaaatcaggaggccaaattgaaaaaagtgcgtgccttgaagggccacgtggaacagaagaggctgagtaatggaaagctcgtggaagagatagaacagatgaacaaccttttccaacagaagcagcgggagctggtgctggccgtgagcaaggtagaagagctgacacgccagcttgagatgctcaagaacggaaggatcgacagccaccacgacaatcagagcgcagtcgcagaactggaccgtctctataaggagctgcagctcagaaacaaacttaatcaggagcaaaatgcgaagctccaacaacaacgcgagtgcctgaataagcggaacagtgaggtcgccgtgatggacaagcgtgtgaacgagctgcgagaccggctgtggaaaaagaaggccgcattgcagcaaaaagagaatttgccagtgagcagtgatggcaaccttccgcagcaggcagccagcgctccttctcgagtggccgctgtcggtccatacattcagtccagcactatgcctcgaatgccaagcaggcccgaactcctagtaaaacctgccttgcccgatggctccctggtgatccaagcttcagaagggcccatgaagatccagaccttgccaaatatgcgtagcggagctgcttcacagaccaagggatcgaagatccaccccgttggccccgattggagcccttccaacgccgacctgttccctagtcagggtagcgcctcagttcctcagtctaccggcaacgctttagatcaggtcgacgatggcgaggtacccttgagagagaaggagaagaaggttcggcccttctctatgttcgatgcggttgaccagagtaatgctccacccagctttggtactttacggaagaaccaaagctcagaagatattctccgtgatgcacaagtggctaacaagaatgttgcgaaggtgcccccacctgtgcccaccaagccaaaacagattaacttaccatacttcggccaaactaatcagcccccatcagacattaaacccgacggaagctcacagcaactgagcaccgtggtcccatccatggggaccaaacccaagccagccgggcagcaacctcgcgtgctgctgagcccctccatacctagcgtaggccaagaccagacactgtcgcctggctcaaaacaagaatctccgcctgccgctgccgtacggccctttacacctcaaccgtctaaggacacgttgctgcccccatttcgcaaaccacagaccgttgccgcatcatccatctatagcatgtacactcagcagcaggcacctgggaagaattttcagcaagcagtccagagtgccctgactaaaacccacacgaggggtccccatttctcctcagtgtatggaaaaccagtgatcgcagccgcccagaatcagcaacagcaccccgagaacatctacagtaactctcagggcaagcctggaagcccagagcctgagacagaacccgtatcttccgtgcaggagaaccacgaaaatgagagaatccctcgtcccctgagtcccacaaaactcctccccttcttgagcaacccataccgcaatcaaagtgacgccgatctggaggccctacgaaagaagctttcaaacgctccccgccccctgaagaagagatcaagcatcactgagccggaaggtcccaatggaccaaatatacagaaactcctgtatcagagaacaactattgcggctatggagacaattagcgttccttcctacccatctaagagtgcaagcgtgactgcctcctctgagtcccctgttgaaatccagaacccatacctgcacgtggagccggaaaaggaggtcgtaagtttggtaccggagtccttatctccggaggacgtcggcaatgcatctacagaaaactctgacatgccggcgccttctccagggctggactatgaacctgaaggcgtgcccgataactctcccaatctgcagaacaatcccgaggagccaaacccggaagctccgcatgtgctggacgtgtacctggaagaatatccaccctaccctccacctccttacccgagtggcgagcccgagggcccgggggaagattcagtttcaatgaggccacctgagataaccggacaagtctctctaccgcccgggaaaagaacgaatttacggaagaccggtagcgagcgcattgctcatggtatgcgagttaagtttaatccattggccctgttactggacagttccctagaaggagagttcgatctggtccaacggattatctatgaggtggacgacccaagtctccctaacgacgaaggcatcaccgccctgcacaatgccgtctgcgccggccataccgagattgtcaagtttctggtccagtttggggtcaatgtgaacgccgccgacagcgatgggtggacccccttgcactgtgccgcttcatgcaacaacgttcaggtgtgtaagttcctcgtggaatccggagccgcagtgttcgccatgacttatagcgacatgcaaacagccgccgataaatgtgaggagatggaggagggatatactcagtgttcccagttcctttacggggtccaagaaaaaatgggcatcatgaacaaaggcgttatctatgcactgtgggactatgagcctcagaatgatgatgaactgcctatgaaagagggggactgcatgactatcatccacagagaggatgaggatgagatcgaatggtggtgggcgaggctgaacgacaaggaaggatacgtgccacggaatctgcttgggctgtaccctcgaatcaagcccagacagcgaagcctggcctag

SEQ ID NO: 210301 - DNA, 1104 bp, synthetic construct
  misc_feature 1..1104: note = Description of Artificial Sequence: Synthetic coding sequence
  source 1..1104: mol_type = other DNA
atggagaccatcagcgtgcccagctaccccagcaagagcgccagcgttaccgcctcgagcgaatcacccgtggaaatccaaaatccatacctccatgtcgaacctgagaaagaggtggtgtccttggttcctgaatcactgagcccagaggacgtggggaatgcgtccacagaaaactccgatatgcccgccccgagccctggcttagactacgaaccagaaggggtgccggacaactcccccaacctgcagaacaatccggaggagcctaacccagaagcccctcacgtgctggatgtttaccttgaggaatatcctccttatcccccacctccttatcccagcggagagcccgaggggcccggcgaagacagcgtgtcgatgagacctcctgagataacggggcaggtttctctacccccaggaaagaggaccaacctcaggaaaacaggatcagaacgcatcgcacacggcatgagggtgaagttcaatcctctggctctccttctcgactcaagtcttgaaggggaattcgacctcgtacagcgaattatctatgaagtagatgaccccagcctacctaatgatgagggtataaccgctcttcacaatgctgtgtgtgcggggcacaccgagatcgtgaaatttctggtccagtttggcgtgaacgtgaacgccgctgactctgacgggtggaccccgctgcattgcgccgcttcctgtaacaacgtgcaggtgtgcaaatttttggtggagagcggggcggcagtgttcgctatgacctactcggatatgcaaaccgccgcagataaatgtgaagagatggaagaagggtatacgcagtgtagtcaatttctctacggagttcaggagaagatgggtatcatgaataagggagtgatctacgccctctgggactacgaacctcagaatgacgatgagctacctatgaaggagggcgactgtatgacaatcattcaccgggaggatgaagacgagatcgaatggtggtgggccaggctcaacgataaggagggctacgtgcctcgtaatctcctggggttatatccacgaatcaaaccaagacagcgatcactggcttag

SEQ ID NO: 210302 - DNA, 2043 bp, synthetic construct
  misc_feature 1..2043: note = Description of Artificial Sequence: Synthetic coding sequence
  source 1..2043: mol_type = other DNA
atgaacttcgagaccagccggtgcgccaccctgcagtactgccccgacccttacattcagcgtttcgtggaaactccggcccacttctcttggaaggagtcctattatcgctcgacaatgagtcagtcgacacagacaaacgagttcttatccccagaagtcttccagcacatttgggattttctggagcagcctatatgttccgtccagcccatagacctgaacttcgtagacgaaccctcggaagatggggccacaaataagatagaaatctcaatggactgtatcaggatgcaggacagcgacctcagtgacccaatgtggcctcagtacacaaatttggggctgctcaactctatggatcagcagatccagaacggctccagttcaacatccccatataataccgaccacgcccaaaactcagtcaccgcgccgtctccttatgcccagccaagctcaactttcgacgctctttcacccagtcccgctattcccagtaacacagactatcccgggccacattccttcgatgtcagcttccaacagagctctacggccaagagcgcaacctggacttactctactgagttgaagaaactctattgtcagatcgcaaaaacatgtcctatccagattaaggtgatgacacctccaccacaaggggccgtaatcagggccatgcccgtgtacaagaaggctgaacacgtgaccgaagtggttaagcgctgtcctaaccatgagctgagtcgagagttcaacgagggacaaatcgcccctccatcccacttgatcagagtcgagggcaattcccatgcacagtacgtcgaagatcccatcactggtagacagagtgttcttgtcccgtacgagccaccacaggtcggcactgaattcaccacagtcttgtacaatttcatgtgcaattccagctgcgttggcgggatgaatcgccgacctattttaatcatcgtgacactggagaccagagatggccaagtcctggggcgaaggtgcttcgaagcacgcatttgcgcgtgtcctggaagagatcgcaaggcagacgaggactcgatacgcaaacagcaggtaagcgactcgacaaagaacggggatgggaccaaaaggccgttccgacagaacactcacggaattcagatgacctcaataaaaaagcggagatccccggacgatgaactgttgtatttgccagttagaggccgcgagacttatgagatgttactgaagataaaagagagcctggagctgatgcagtatttgccacagcataccatcgagacatatcgccagcagcagcaacagcagcaccaacacctgttgcaaaagcaaacctccattcaatcaccttccagctacggaaactcaagtcctcccttgaacaaaatgaattcgatgaacaagttacccagcgtctctcagcttattaaccctcagcagcgaaacgcgctgacaccaacaacaatacctgacggcatgggcgctaatattcccatgatggggactcacatgccaatggccggtgacatgaatggtctgtccccaacacaagccttgccaccacctttgtcgatgccatctacttcccactgcactccccctcccccgtaccccactgattgtagtattgtgtcttttttggccagactgggatgcagtagctgtttggactacttcacaacacagggattgaccaccatctaccagattgagcactatagcatggatgaccttgcgtcactgaagattcccgagcagtttagacacgccatctggaagggtattctcgatcaccgacaactgcatgagttttcatcaccttcgcatctgctgaggaccccttcatctgctagcaccgtgtccgtgggatcaagcgagaccaggggcgagcgcgtgattgacgctgtgagatttactttgcgccagacaatctctttccccccaagggacgaatggaacgatttcaactttgacatggacgcccggagaaataaacaacagaggatcaaagaggaaggtgaatag

SEQ ID NO: 210303 - DNA, 1533 bp, synthetic construct
  misc_feature 1..1533: note = Description of Artificial Sequence: Synthetic coding sequence
  source 1..1533: mol_type = other DNA
atgaacttcgagaccagccggtgcgccaccctgcagtactgccccgatccatacatacagaggttcgtcgagactcctgcccattttagttggaaggaatcttactatcgtagtaccatgtctcagtctactcagacaaatgaattcctgagtcccgaagtgttccagcacatttgggacttccttgaacagccaatctgttctgtccagcccattgatttgaattttgtggacgagccaagtgaagatggcgctactaacaagatcgagatcagcatggactgcataaggatgcaggattcagacctttctgaccccatgtggcctcagtatacaaacctgggtctcctgaacagtatggaccagcagattcagaacggatcttccagcacatctccatataacacagatcatgcacagaattctgtgaccgcaccgagtccttacgcccaaccctcaagtactttcgacgcgctcagccccagtcctgcaatcccctctaacaccgattaccccggtcctcactcatttgacgtaagtttccagcaatcgagcaccgccaagtccgctacatggacctacagcaccgagctaaaaaaactctattgtcaaattgcgaaaacgtgtccaatccaaattaaagtgatgacaccccccccacagggggccgtgattagagccatgcccgtgtacaagaaggctgagcacgttaccgaggtggtgaaaaggtgcccaaaccatgagctaagtcgggagtttaacgaaggacaaatagcgccccctagccacctgattcgcgtggagggcaactcccacgcacagtatgtggaggatcccattaccgggaggcaatctgtgctggtcccttatgagcctccccaggtcggcacggaattcactacagtcctgtacaactttatgtgcaattccagctgcgtggggggcatgaatcgacggcccatccttatcattgtcactctggaaaccagagacggtcaggtgctgggccgacggtgcttcgaagcgaggatctgcgcttgccccggccgcgatagaaaagcagatgaagacagcatcaggaaacagcaggtgtccgactccactaaaaatggtgacggaactaaacggcccttccgccagaatacacacggaatccagatgactagcatcaagaagcgtcggtcccccgatgatgaactgttgtacctgcccgttcgaggccgggaaacctatgaaatgctgctgaagatcaaagaatctctcgagctcatgcagtatctgccacaacatacaatcgagacttataggcagcagcagcagcagcagcaccagcacctattgcagaagcagacaagcatccagagtccgtcaagctacggtaattcctcgcccccactgaacaaaatgaatagcatgaacaaactcccttcagtctcccagctcataaatccccagcagcgaaacgccttaacccccaccacaattcctgatgggatgggggcaaataggagtggcaaatcggagaacccatag

SEQ ID NO: 210304 - DNA, 1761 bp, synthetic construct
  misc_feature 1..1761: note = Description of Artificial Sequence: Synthetic coding sequence
  source 1..1761: mol_type = other DNA
atgctgtacctggagaacaacgcccagacccagttcagcgagccccagtacaccaacctggggttgctcaactcgatggaccaacaaatccaaaacggatcaagtagtacatcaccctacaatacggatcacgcacagaactccgtgactgccccatccccatatgctcagccttcctcaacttttgacgccctatctcccagcccagctattccttccaatacagattaccccggcccacactccttcgatgtgagctttcagcagagttctaccgccaagagcgccacttggacctatagcactgagcttaaaaagctgtactgccagatcgctaaaacttgtcccatccaaattaaggtaatgacgcctcctccgcaaggagccgtaatacgagccatgcctgtgtacaagaaggccgaacacgttacagaagtagtgaaacgctgccccaatcacgagctgtcccgtgaattcaacgaaggccagattgctcccccatcacacctcatcagagtggagggaaactctcatgcgcagtatgttgaagatcccatcacaggccgtcagagcgtgcttgtcccatacgagccaccccaggttggaaccgaattcaccactgtactctacaatttcatgtgtaatagctcctgcgtgggcggcatgaataggcgccccatactgattatcgtcactcttgagacccgagacgggcaggtgctcggtcgtcggtgttttgaagccagaatttgtgcatgcccagggcgggatcggaaggctgacgaggattccatccggaaacagcaagtgtcagacagcaccaagaacggcgacggaacaaaacggccattccgccagaatacccatggtatccagatgaccagcatcaagaaaagacgctctcccgatgacgagctcttgtacctacctgttcgaggcagggagacctacgagatgctgctcaaaattaaagagagtctcgaactcatgcagtatctgccacagcataccatcgagacctaccgtcagcagcagcagcaacagcaccagcatttactccaaaagcaaacctctattcagagtccctctagctatgggaactcatcccctcccctgaacaagatgaacagtatgaataagcttccgtccgtgagccagctgatcaatccgcagcagcggaacgctttaacacctacgaccataccggatggtatgggcgctaatatcccgatgatgggtacccacatgccaatggccggagacatgaatggactgtccccgactcaggccttacccccacccctttccatgcccagcacctctcattgtacaccgcctccaccatatccaaccgattgctctatcgtatctttcttggctaggctaggctgtagtagctgccttgattacttcacgactcaggggctgacaactatctaccagattgagcactacagtatggacgatctggcctcgctgaaaatcccagaacagttcagacacgccatctggaagggaatcctcgaccatagacagttgcatgaattctcctcccccagtcaccttctgcgcacaccctcttccgctagcactgtctccgtaggctcaagcgagacaaggggcgagcgcgtaatcgacgcagtgcgcttcacacttaggcaaactatttcttttccacctagggacgaatggaacgacttcaacttcgacatggatgccaggcggaataaacagcagcgcattaaggaggaaggggaatag

SEQ ID NO: 210305 - DNA, 1788 bp, synthetic construct
  misc_feature 1..1788: note = Description of Artificial Sequence: Synthetic coding sequence
  source 1..1788: mol_type = other DNA
atgaacttcgagaccagccggtgcgccaccctgcagtactgccccgatccttacatacagaggtttgtagaaacgcctgcgcacttttcttggaaagaaagctattatagatctacaatgtcccaaagcacacagacaaatgaattcttaagcccagaggtcttccagcatatctgggatttccttgagcagcccatctgttccgtccagcccatagatctcaactttgtggacgagcctagcgaagacggcgcaaccaataagatcgagatcagcatggactgcattagaatgcaagactcggatctgtctgaccccatgtggtatagcaccgaactgaaaaagctctattgtcagatcgcgaaaacttgccccatccagatcaaggtgatgacaccccctccccagggtgcagtgatccgggccatgcccgtctacaagaaagccgaacacgtgaccgaagtcgtgaaaaggtgtcctaatcacgagttgagcagggagtttaatgagggacagattgcccccccaagccaccttattcgggtagagggcaacagccacgcccagtatgtcgaagaccctatcactggacgacagtctgttctggtcccctatgagccccctcaggttggaaccgagttcacgacagtcttatacaacttcatgtgcaactcctcttgcgttgggggaatgaacagacgccctatcctaatcatagttaccctggagacccgagacgggcaggtgctcggcagacgatgttttgaggccaggatctgcgcctgccctggccgagacagaaaggctgatgaggacagtatacgcaagcagcaggttagcgactcaacaaagaatggcgacggcaccaaacgtccctttcgccagaatacccacggcattcaaatgacctcaataaagaagagaaggtcccctgacgatgagctgctctatctaccagtaagagggcgggagacatacgagatgcttttgaagatcaaggagtccctggaactgatgcaatacctaccacaacacactatcgagacctacaggcagcagcagcagcaacagcaccagcacctgcttcagaaacagacgagcattcagtctccctcatcatatggcaacagtagccctcctcttaacaaaatgaactctatgaacaaacttccttctgtaagtcaactgatcaatccacagcagcgaaacgcattgacccccaccaccatacctgacggcatgggggctaacataccaatgatggggacgcatatgccgatggctggcgacatgaacggcctgtctccaacacaggcccttccacccccactgtctatgccgtcaacaagccactgtactccccctcccccatatcccaccgattgcagcatcgttagttttctcgcccgcctcggttgtagctcttgtctggactattttacaacccaagggctcaccaccatatatcaaatcgaacattatagcatggacgacttggccagcttgaagattcccgagcagtttcgccacgctatctggaagggtatattggatcacaggcaattacacgagttttcaagcccttcccacctgctgcgtacgccatcaagcgccagtacagtgtcggttggaagtagcgagacacgcggtgagagagtgatcgacgctgtgaggtttacgcttaggcagacaattagcttcccaccccgggacgaatggaatgactttaactttgatatggatgctcgccgtaacaagcaacagaggattaaagaggaaggtgagtag

SEQ ID NO: 210306 - DNA, 1668 bp, synthetic construct
  misc_feature 1..1668: note = Description of Artificial Sequence: Synthetic coding sequence
  source 1..1668: mol_type = other DNA
atgaacttcgagaccagccggtgcgccaccctgcagtactgccccgacccttacatccagaggttcgtcgaaacgcctgcccatttctcttggaaagagtcttactacaggtcaacaatgtcacagtcaacgcagactaacgagttcctcagccctgaagtcttccagcatatctgggattttctggaacaaccaatctgctccgttcagccaatagatctgaattttgtcgacgagcctagtgaggacggcgcaactaataaaatagaaatttctatggattgtatccgcatgcaggacagtgatctaagtgaccccatgtggccacaatacaccaacctgggcctgctaaatagcatggaccagcagatccagaacggatcaagttccaccagcccgtacaacactgaccacgcacagaactctgttaccgcaccatcaccatatgcccagccatcctctacctttgacgctctatctccctcccccgccatcccttccaacactgattaccccgggccgcattcatttgacgtctcttttcaacagtcttcaaccgccaaatcggcaacgtggacctactcaacagagctgaaaaaactttactgccagatagctaaaacctgcccgatccaaattaaagtgatgactccgcccccccaaggggccgtcatccgggcgatgccagtttacaaaaaggccgaacatgtgaccgaggttgtgaaaagatgccccaatcacgagctgtcccgcgagttcaatgaaggccagattgcaccccccagccatctcattcgggtcgaaggcaacagtcacgctcaatacgttgaggaccctattacaggacgccaatctgttctagtcccatatgaaccccctcaggtcggtacggagttcaccactgtgctgtataatttcatgtgcaatagtagttgcgttggcgggatgaataggcgcccaatcctcatcatcgtcacccttgagacacgggacggccaggtgctcgggaggcgatgttttgaggctcgcatttgtgcctgtccgggaagggacaggaaggctgacgaggactctatcaggaagcagcaggtaagtgactcaacaaaaaatggagatggcaccaagcgacccttccgtcagaatacacatggaattcagatgaccagtataaaaaagcgacgttcaccagacgacgaactgctttacctgcctgtgcggggccgtgagacatacgaaatgcttttgaagattaaggagagtctggaactcatgcagtatctgcctcagcacacaattgaaacctaccggcagcagcagcagcaacagcatcagcaccttctgcaaaagcagacatcaattcagagtccctcttcatacggaaattcctcaccaccgctgaacaagatgaattcaatgaacaaactgccatccgtcagccagctgatcaacccccaacagcgcaacgccctgactcctacaacaattccagacggaatgggggcaaacatcccaatgatggggacccacatgcctatggccggagacatgaatgggctgtcccccacacaggcccttccccctcctctgagtatgccttctaccagtcactgcactcctccacctccctaccccacggattgcagcattgtaaggatctggcaagtttag

SEQ ID NO: 210307 - DNA, 1251 bp, synthetic construct
  misc_feature 1..1251: note = Description of Artificial Sequence: Synthetic coding sequence
  source 1..1251: mol_type = other DNA
atgctgtacctggagaacaacgcccagacccagttcagcgagccccagtacactaatctgggtttgctgaactctatggaccaacagattcaaaatggaagctcaagtacctcgccttataataccgaccatgcccaaaattctgttactgctccaagtccttatgctcagcctagttccacatttgacgctctttcgcctagccccgccatcccctctaacacggactacccgggacctcattcgtttgatgttagtttccaacagtctagcactgccaaatcagccacttggacatatagcaccgaactgaagaaactgtattgccagatagcaaaaacatgtcccatccaaatcaaagtgatgacgcctcccccccagggcgcagtaatccgagcaatgcctgtatataaaaaggctgaacatgtaaccgaggtcgtgaaaaggtgccctaatcacgaactgagtcgggagttcaacgagggtcagatagcccctcctagccacctcattagggttgagggcaatagccatgcccagtacgtggaagatccgattacagggcgccagagcgtgttggtcccctatgagccccctcaggtcggaaccgaatttaccacagtattgtataacttcatgtgcaattcatcctgcgtggggggcatgaaccggcgaccaattttgattatcgtgaccctcgaaacacgcgacggacaagtgttgggacgaaggtgctttgaggccagaatctgtgcttgccctggccgggaccgaaaagcagatgaggacagcatcaggaaacagcaggtgagtgattctaccaaaaacggagatggaacaaaaagaccctttagacagaatacccatggaatccagatgacctccattaaaaaacgcagaagcccagacgatgagcttttatatctgccagtgcgcggacgggagacttatgaaatgctcctgaagatcaaggagtcattggagcttatgcagtacctaccgcagcacactatcgaaacatatcgccaacaacagcagcaacagcatcaacacctgcttcaaaagcagacatccattcaatccccgtcttcctacggcaacagctcccctccacttaacaaaatgaacagtatgaacaagttaccctccgtgtctcagctgataaacccacaacagagaaacgctctgacaccaacaacgatccctgatggaatgggggcaaaccgcagcggaaaaagcgagaatccatag

SEQ ID NO: 210308 - DNA, 1386 bp, synthetic construct
  misc_feature 1..1386: note = Description of Artificial Sequence: Synthetic coding sequence
  source 1..1386: mol_type = other DNA
atgctgtacctggagaacaacgcccagacccagttcagcgagccccagtacactaacctaggcttgttgaattccatggaccaacagatccagaacggctcgagttctacctcaccatataatacagaccatgcccaaaacagtgtcacggctcctagtccatatgcccaaccttcctccactttcgacgcactgagcccctctcccgccatccccagcaacaccgactacccgggccctcactcttttgacgtctccttccagcaatcctctacagcaaagtctgccacctggacatattcaacggagctcaagaaactctattgccagatcgctaagacatgccccattcagataaaagtgatgacaccccccccccaaggggctgtaatcagggccatgcccgtgtataagaaggccgaacatgtaacagaggtggtcaagcgctgcccaaatcatgaactcagccgggaattcaatgaggggcagatcgcgcccccatcccatcttattcgcgtagaaggtaactctcatgcccagtacgtcgaggacccgatcacaggacggcagtcggtcctggtgccatatgagcccccacaagtcggcactgaatttacaacggttctgtacaacttcatgtgcaattccagctgcgttggaggtatgaataggcggccgatactgatcatcgtcacgctggagactcgcgatggccaggtattggggcgccgttgtttcgaagcacggatctgtgcctgccccggtcgagatcgaaaggccgacgaggatagcatccgcaagcagcaggtgagcgatagcacaaaaaacggagacggcacaaaacgtcccttcaggcaaaatactcacggtattcaaatgacctcaatcaagaaacgacggagcccagacgacgaacttctgtatctgcccgtccggggccgggagacgtacgagatgctgctgaagattaaagagtccctggaactaatgcagtatctccctcaacatactatcgaaacgtaccgtcaacagcagcagcagcagcaccagcacttacttcagaaacagacatctattcaatctccgtctagttacgggaacagtagtccacctctcaataagatgaactcaatgaacaagctgccgtccgtgtcccagctgatcaatcctcagcagcggaacgctttgacaccaacaaccattcccgatgggatgggcgccaacatcccaatgatgggtacgcatatgcctatggctggagacatgaatgggttgtcccccacccaggcgctaccacctcctctgtcaatgccatccacatcccactgtacgccacctcctccgtatcctactgactgtagcattgtaagaatatggcaggtgtag

SEQ ID NO: 210309 - DNA, 1464 bp, synthetic construct
  misc_feature 1..1464: note = Description of Artificial Sequence: Synthetic coding sequence
  source 1..1464: mol_type = other DNA
atgaacttcgagaccagccggtgcgccaccctgcagtactgccccgacccctatattcaaagattcgtggaaacccccgctcacttcagttggaaagagtcctattaccgcagcactatgtcacagtctactcagaccaatgagtttttgagcccagaagtgtttcagcacatatgggatttcttggagcaaccaatttgctctgtgcagcccattgatctgaacttcgtcgatgagccaagcgaagatggagcgaccaacaagattgagataagcatggattgtatccggatgcaggattccgacctcagcgatcccatgtggcctcagtataccaatctcggcctgctgaactctatggaccaacagatacagaacggcagctcttccacaagtccatataacaccgaccatgctcagaatagcgtgaccgctcctagcccctatgcacaacctagctctactttcgacgcactctctccatctcccgcaattccaagcaataccgactaccccggcccccacagctttgacgtatcatttcagcagtcctccacggccaagtccgcaacttggacctattccaccgagctgaagaaactatactgccagatcgcaaagacttgtcctatccagatcaaagttatgaccccacctcctcagggggccgtgatcagagccatgccagtctataaaaaagccgagcacgtgacggaagtcgtcaaaaggtgcccaaaccacgaattgtcacgggaattcaacgagggtcaaattgccccaccctctcatctgataagagtggaagggaacagccatgcccaatacgtcgaagatcctataacaggacgccaatccgtgctggtgccatacgagcctccccaggttggtactgaattcactaccgttctatacaactttatgtgtaacagctcttgtgtcggaggaatgaaccgccgacctatcttaatcattgtcacccttgagaccagagatggacaggtcctgggacgtaggtgttttgaggctcgcatctgcgcctgccctggtcgtgaccgtaaagccgacgaagacagtattagaaagcagcaggtgtcagacagtacaaagaacggcgatggcaccaagagaccattcagacagaacacacacggaatccagatgacctctatcaagaagcgccgctcgcccgatgatgaactgctctacttgcccgtgcggggaagggagacttatgagatgctgttaaagatcaaggaatccctcgaactgatgcagtacctgccccagcatacaatcgagacatatcgtcagcagcaacagcagcagcaccagcatctgctgcagaaacacctattgtctgcatgtttcagaaatgagctggtcgagccccggcgggagacacccaaacagtcagacgtgttcttccggcatagtaagccgcctaatcggtcagtctacccgtag

SEQ ID NO: 210310 - DNA, 1182 bp, synthetic construct
  misc_feature 1..1182: note = Description of Artificial Sequence: Synthetic coding sequence
  source 1..1182: mol_type = other DNA
atgctgtacctggagaacaacgcccagacccagttcagcgagccccagtatactaacctaggcttattaaattctatggaccagcaaattcagaacggctcttcttcaaccagcccatacaacaccgaccacgcccaaaacagtgtgactgccccatccccctacgcccagcctagttcgacattcgatgctctctccccgtctcctgccattccaagcaacactgactaccccgggccacatagctttgacgtgagctttcaacagtccagtacagctaaatcggctacgtggacatacagtaccgagctgaagaaactttactgccagatagctaaaacatgccccattcaaatcaaggtcatgacccctcccccacagggggctgtgatacgggccatgcctgtttacaaaaaagcggagcatgtgacagaagtggtgaagagatgtcctaaccatgagttgtcacgggaatttaatgagggacagattgctcctccaagccacttaattagagtggagggcaattcccacgcccaatatgtggaggaccccataacaggtcggcagtctgtcttggtcccttacgagcctccccaggtgggcaccgagtttaccaccgtactgtacaacttcatgtgtaattccagttgcgtggggggaatgaaccgacggccaatcctgatcattgtaaccctggaaacacgcgacggtcaggtcttggggcggcggtgtttcgaggctcgcatctgtgcttgtcccgggcgcgaccgaaaggccgacgaggattctatccggaagcaacaggttagcgacagcacaaagaatggggacggcaccaagaggccttttcggcagaacactcacggcatccaaatgactagcattaaaaagagacgcagccccgatgatgaactactgtatctgccagttcgtgggagagagacatacgaaatgctcctgaaaatcaaagagtcgctagaactcatgcagtatctcccccaacacactattgagacctacaggcagcagcagcagcaacagcaccagcatctgctgcagaagcatctgctgtcggcttgttttcggaatgagttggtggagccaagacgcgaaaccccaaaacagtctgacgtgttcttccgccatagcaagccaccaaacaggtcagtttatccttag

SEQ ID NO: 210311 - DNA, 2031 bp, synthetic construct
  misc_feature 1..2031: note = Description of Artificial Sequence: Synthetic coding sequence
  source 1..2031: mol_type = other DNA
atgaacttcgagaccagccggtgcgccaccctgcagtactgccccgacccctacatccagcgcttcgtagagacccccgctcacttcagttggaaagaatcctactacaggagcaccatgagccagagtacccaaacgaatgaattcttgagccccgaagtcttccagcacatatgggatttcctggagcaacccatctgttctgtgcagccaatcgatctgaattttgtcgatgaacccagcgaagacggggccacaaataaaatcgagataagtatggactgcatccgaatgcaggactccgatctgtcagacccaatgtggccgcaatacaccaatctgggtctacttaactccatggaccagcagatccagaatggctccagtagcacgtctccctacaacaccgaccatgctcagaatagtgtgacagccccatctccatacgctcagccatcttcgacattcgatgcgctgtcaccctctcctgcaataccatctaacacagattatcccggacctcactctttcgatgtttcgtttcagcaatcaagcactgccaagtccgccacctggacttacagtactgaactcaagaagctgtactgccagatcgccaagacttgccctatccagatcaaggtcatgacgcctcctccacagggagccgtaatcagagccatgcctgtgtataagaaggcagaacatgtgactgaggttgtgaaacgttgtcctaatcacgagcttagccgggagttcaatgaaggccagatcgctcccccgtctcatctgatccgggtggagggcaattcccacgctcagtacgtcgaagacccaatcaccgggcgccagagcgtgcttgtgccttatgagcctccacaagtgggaaccgagttcacaactgtgctgtataactttatgtgcaactccagttgcgtcggagggatgaatcgaagaccaattctcataatcgttacacttgagacaagagacggccaggtgctgggacggaggtgcttcgaagcccgtatatgtgcctgcccgggccgggacagaaaagctgacgaggatagtatacggaaacagcaggtcagtgattccacgaaaaatggagacgcattcagacaaaatacccacggcatccagatgacttctatcaagaagaggcgctcccccgacgacgagctgctgtacctgcctgttcgcggccgtgaaacctacgagatgctcctcaaaataaaggaatccctcgagctgatgcaatatctaccacagcataccatcgaaacctaccggcaacagcagcagcagcagcatcagcatcttctgcagaaacagactagtatccagagtccgtcttcctacgggaattctagccccccactgaacaaaatgaactcaatgaataagcttccctctgtcagccagctgataaatccgcagcagagaaacgccctcacccctactaccatacctgatggcatgggcgccaacattcctatgatgggaactcacatgccgatggccggtgacatgaacggattaagcccaactcaagctctgccaccgcccctcagtatgccgagcacctcccattgtacgccgccccctccttatcccactgattgttccatcgtaagcttcctggcccggctcggttgttcttcctgtctggactactttacaacgcaagggttgaccactatttaccagatcgaacactattctatggacgatctggccagtttgaaaattccggaacagttccggcacgctatttggaaaggcattcttgatcatcgccagcttcacgagttttcctcaccaagccatctcttacggacaccgtcatccgcttcaactgtttctgttgggtcctctgaaacaagaggtgaaagagtaatcgacgccgtgcgatttactctgaggcagacaatttcctttcctccccgggacgagtggaacgatttcaacttcgacatggacgccaggcgcaacaaacagcagcgtatcaaagaggagggcgagtag

SEQ ID NO: 210312 - DNA, 1506 bp, synthetic construct
  misc_feature 1..1506: note = Description of Artificial Sequence: Synthetic coding sequence
  source 1..1506: mol_type = other DNA
atgctgtacctggagaacaacgcccagacccagttcagcgagtactcaacggagctaaagaagttgtactgccagattgctaagacatgtccaattcagattaaagttatgacaccccccccgcagggcgctgtgattcgtgcgatgcccgtatacaagaaagctgagcacgttactgaagttgtgaagagatgcccaaaccacgagctgagccgcgaattcaacgaaggtcagatcgcccctccaagtcatctaatccgggtggaaggaaactcgcacgcccagtatgtcgaggatcctattacgggacgccagtcagtgttggtgccgtacgagccaccccaggtaggtaccgagttcaccactgtcctttacaacttcatgtgcaactcaagttgtgttggtggtatgaaccggagaccaatattgataattgtcacattggagaccagagatgggcaagtgttagggcgaagatgttttgaggctcgcatatgcgcatgccctggacgcgataggaaggccgacgaggacagcatccgcaaacagcaggttagtgacagcacgaaaaacggtgatgggacaaagcggcctttcagacagaatacccatgggattcagatgacaagtattaaaaagagacggtcgcccgacgatgagttattgtacctgccagtgcgcggcagggagacatacgagatgctactgaagatcaaagagtccctggagctgatgcaatacctcccccagcacaccatcgagacatatcgacagcagcaacaacaacagcaccaacatttgctgcaaaagcaaactagcatccagagtccctcctcttatggcaatagcagccctcccctgaataagatgaattctatgaataaactgccctcagtgagtcagctgattaacccgcagcaacggaacgcactgacacctacaacgatcccagatggcatgggcgcaaacattcctatgatgggcactcatatgcccatggccggcgatatgaatgggctctcgccaacccaggccctacccccgccactgtctatgcctagcacatctcactgtacaccgcctcctccatacccgacggactgtagcatagtgtccttcttggcgcggttagggtgtagctcttgtctggactattttaccacccagggactaaccactatttatcaaatagagcactatagcatggatgacttagcttcacttaaaatcccagagcaattccgtcacgccatctggaagggtatactggatcatcgccagcttcatgaattctcttccccttcccatctattaaggacccctagctccgcatccaccgtgagtgttggtagctctgagactcgcggcgaaagagtgattgatgccgtcagattcacgttgcgccagaccatctcgttcccgccaagagatgagtggaatgactttaatttcgacatggacgcccggagaaacaagcagcaacggattaaagaggaaggagagtag

SEQ ID NO: 210313 - DNA, 1749 bp, synthetic construct
  misc_feature 1..1749: note = Description of Artificial Sequence: Synthetic coding sequence
  source 1..1749: mol_type = other DNA
atgctgtacctggagaacaacgcccagacccagttcagcgagccccaatatacaaacttagggctgctgaattcaatggatcagcagatacagaacggaagctcttctaccagtccatacaatacagatcacgctcagaatagtgtgactgccccgagtccttatgctcaaccttcctccaccttcgacgccctgtccccgtctcccgcgatcccaagtaatactgattacccaggaccacatagctttgacgtgtcctttcagcagtcaagtaccgccaagtcggcgacatggacctattcaaccgaactcaagaaactgtactgccagatcgccaagacatgccccatccagattaaggtgatgaccccgccgccccagggagcggtaatccgcgcaatgcccgtttataaaaaagccgagcatgtaacagaggttgtgaagcggtgcccgaaccacgagcttagtcgcgagttcaacgaggggcagatagctccaccgtcccatttgatccgggtagagggaaacagccatgcccagtatgtagaagaccctatcaccggcaggcagtctgtgttagtcccatatgaacctcctcaggtgggcacagaattcactactgtgctgtacaactttatgtgcaattcctcatgcgtcggcggaatgaacagacggcccattctcattatcgtaaccctggagacgagggacgggcaggtactgggacgacggtgcttcgaagcccggatatgcgcgtgtcctggacgagatcgtaaagcggatgaggacagcatcagaaagcagcaggtctctgatagtaccaagaacggcgatgccttccggcagaatacacacgggattcagatgacctcaatcaagaagcgcaggtcccccgacgatgagttgctatatctgccggtaagaggtcgggagacatacgaaatgctgcttaagatcaaggagagcctagagctgatgcagtatctcccgcaacacaccattgaaacataccgccagcagcaacagcagcaacatcaacacttactccagaaacaaacatccatccagtcacctagcagctatggaaattctagtccccccctgaataagatgaactctatgaataagctgccgagcgtctcccaactgatcaaccctcagcagcgcaatgccctgactccaactacaatccctgacgggatgggcgcgaatatacccatgatgggtacacatatgcccatggcaggggatatgaacgggctgtcccctacgcaggccctgcctcctcccctatcgatgccttctacttcccactgcacccctcctcctccgtacccaacggattgctctattgtgtcctttctggcaaggctgggctgcagtagctgtttagattatttcactacacagggtttgacgacaatctatcagattgagcactattcgatggatgatcttgcatcgctgaaaattcccgaacagtttcgtcatgccatctggaaaggaatcctggaccacaggcagctacatgagtttagctcaccatcccacctgctcagaacaccatcttccgcctctacggtgagcgtaggatcttcagagacgcgaggagaacgggttatcgacgccgtgcgctttacactccgtcagaccatctcctttcccccgcgggacgaatggaacgacttcaattttgatatggacgctcgaagaaataaacagcagcgtataaaggaagaaggggaatag

SEQ ID NO: 210314 - DNA, 567 bp, synthetic construct
  misc_feature 1..567: note = Description of Artificial Sequence: Synthetic coding sequence
  source 1..567: mol_type = other DNA
atgatcatctaccgggacctgatcagccacgacgagatgttcagcgatatttacaagatcagagaaatcgcagatggcttgtgccttgaggtggaaggaaagatggtcagtaggacggaaggcaatattgacgactcattgattggggggaatgcatctgccgagggccccgagggggaaggcaccgagtcaacagtgattacgggggtggacattgttatgaatcaccacttacaagagaccagctttacaaaagaggcatataagaagtatatcaaggattacatgaagtccatcaagggaaagctcgaagagcaaagaccagaaagggtaaagccatttatgacaggcgcggccgagcaaatcaaacatatactcgccaacttcaaaaactatcagttctttatcggagagaacatgaaccccgacggcatggtggccctgttggattatcgcgaggacggcgttacaccatacatgatattcttcaaggacggtctggagatggagaagtgtgtctccactcgtaaatgggtaaagattaataatgtgaaaaagaccttctag

SEQ ID NO: 210315 - DNA, 417 bp, synthetic construct
  misc_feature 1..417: note = Description of Artificial Sequence: Synthetic coding sequence
  source 1..417: mol_type = other DNA
atggtgagccggaccgagggcaacatcgacgacagcctgatcggcggaaatgcgtccgcagaaggccctgagggtgaaggaacggagagcacagtcatcacaggggtggatatcgtcatgaatcatcacctacaggaaacaagctttacaaaggaggcctacaaaaagtacatcaaggattacatgaaatcgatcaaaggcaagcttgaagagcaaagacccgaaagggtgaagccatttatgacaggagcagctgaacaaatcaagcatatcttagccaatttcaagaactaccagttctttatcggtgaaaacatgaatcccgatggaatggttgcccttttggactatcgggaagatggagtaaccccatatatgattttcttcaaagacggtcttgaaatggagaaatgttag

SEQ ID NO: 210316 - DNA, 417 bp, synthetic construct
  misc_feature 1..417: note = Description of Artificial Sequence: Synthetic coding sequence
  source 1..417: mol_type = other DNA
atggtgagccggaccgagggcaacatcgacgacagcctgatcggcggcaatgccagcgccgaaggacctgagggagagggcaccgagagcaccgtgatcacaggtgttgacatcgtcatgaatcatcacctccaggagacctcatttaccaaggaggcatacaagaagtatattaaggattacatgaagagcattaagggcaagctggaggagcagcgcccggagagggtcaaacccttcatgaccggagcggctgagcagatcaaacatatcctcgcgaacttcaaaaactaccagttcttcatcggcgagaatatgaatccggatggcatggtggcactgttggactatcgcgaagatggtgtgactccctatatgatcttcttcaaggatggcctggaaatggagaagtgctag

SEQ ID NO: 210317 - DNA, 483 bp, synthetic construct
  misc_feature 1..483: note = Description of Artificial Sequence: Synthetic coding sequence
  source 1..483: mol_type = other DNA
atgttcagcgacatctacaagatccgggagatcgccgacggcctgtgcttagaagtggagggtaagatggtgtccaggactgagggaaatattgacgactcgttgataggggggaatgcttccgccgaaggaccggagggggaagggacagaatctacagtcatcaccggcgttgacatcgttatgaatcaccaccttcaggaaacatcttttactaaggaggcctacaaaaagtatatcaaagactacatgaaatcaattaaggggaagttagaggagcaacggcccgaacgtgtcaaaccatttatgactggggctgcggagcagatcaaacatattcttgccaacttcaagaattaccagttcttcatcggcgagaacatgaacccagatggcatggttgcactgctcgactatcgcgaagatggagtgactccctacatgatcttcttcaaagatggactggagatggaaaagtgttag

SEQ ID NO: 210318 - DNA, 519 bp, synthetic construct
  misc_feature 1..519: note = Description of Artificial Sequence: Synthetic coding sequence
  source 1..519: mol_type = other DNA
atgatcatctaccgggacctgatcagccacgacgagatgttcagcgatatttacaagatcagggagattgccgacggcctgtgcctggaggtggaaggcaagatggtgagccgaactgaagggaatattgatgacagcttgattggaggcaacgcctccgcagagggaccggaaggcgaggggaccgagagtaccgtcatcacaggagttgacattgtgatgaaccaccacttacaggagacctcctttacaaaggaagcttataaaaaatacattaaggactatatgaagtcaatcaaaggaaaactggaggagcaacgaccagaaagggttaagccttttatgactggcgccgctgagcagatcaaacacattttagccaattttaagaactaccagttctttattggggagaacatgaaccccgacggcatggtggctctgttggattatagggaggatggcgtgaccccatatatgatttttttcaaagatggactggagatggaaaaatgttag

SEQ ID NO: 210319 - DNA, 1164 bp, synthetic construct
  misc_feature 1..1164: note = Description of Artificial Sequence: Synthetic coding sequence
  source 1..1164: mol_type = other DNA
atggaggacgacgcccccgtgatctacggcctggagttccaggcccgcgctcttacaccccaaacagctgaaactgatgcaatccgttttcttgtgggcactcagtccttgaaatatgataaccagattcatattatagatttcgacgatgaaaacaatattattaataagaacgttcttctgcaccaggcaggagaaatctggcatatctccgcgtcccccgccgaccgtggcgtgctaacaacttgctacaaccgcacatcagattctaaggtccttacctgcgctgccgtttggaggatgccgaaggagctggaatcgggctcacacgaatctcctgatgactcgtccagtaccgcacagactctggagttgttgtgccatctggacaacaccgcccatggaaatatggcctgcgtggtgtgggaacccatgggtgatggcaaaaaaatcatttctttggcagacaaccatattctcctgtgggacctgcaggagagttcaagccaggcagtcttggcgtcttctgcctccctcgagggcaagggtcagttgaaattcacaagcgggcgctggtcgccacatcacaattgtacccaggtggctaccgctaatgacaccaccttgcgtgggtgggatacgaggtctatgtcacaaatctactgcatcgaaaatgcccatggccagctggtaagggatttggactttaatcctaataaacagtattacctcgcgagttgtggcgacgattgtaaagtgaagttctgggatactagaaacgttactgaaccagtcaagaccctggaagagcactcccattgggtatggaatgttcgatataatcactctcacgatcagttggttctcactggctcctcggactccagggtgattctgtccaacatggtgagcatttccagtgaacccttcggacacctagttgacgatgatgacatcagcgatcaggaggatcacaggagcgaggaaaagagcaaggagccactgcaggacaatgtcatcgccacctacgaggaacatgaagactcagtctacgcagtagactggagttccgcggacccttggctgttcgcttcactgtcctacgacggcaggcttgtgattaacagagtgccaagggcccttaagtaccacattctactgtag

SEQ ID NO: 210320 - DNA, 990 bp, synthetic construct
  misc_feature 1..990: note = Description of Artificial Sequence: Synthetic coding sequence
  source 1..990: mol_type = other DNA
atggccgaggccggcaccggcgagcccagccccagcgtggagggcgaacacggtacagaatatgatacgctcccttccgatacagtgagcctctcggactcagattcggacttgtccttgcctggaggggcggaggtagaggctctgtctccaatgggcctgcccggcgaggaagattcagggccagacgagccacccagtccgccgtctggattactgcctgctacagttcagccttttcaccttagaggcatgtcatctaccttttcccagagatcccgtgatattttcgattgtttggagggggctgcccggcgagctccaagctcagtcgcgcatacaagcatgtctgacaacggtgggttcaagcgacctcttgcaccgtctggtcgctctccagtggagggtctgggccgggcccacaggtctcccgctagtcctagagtgccgcctgtgccagactacgtggcacacccagagcgctggaccaagtactccctcgaggacgtgacagaagtatcggagcagagtaatcaggctacagccctcgccttcctggggtcgcagagcttggctgcgccaactgattgtgtgagtagtttcaatcaggacccctcctcttgcggggaaggacgagtcattttcacgaagcctgtgagaggagtcgaggcccggcacgagaggaagcgcgtcttaggtaaggttggggaacctggcagaggggggctcggaaatccagccacagatagaggagagggcccagtcgaactggcacacctggccggcccaggttcacccgaagctgaggagtggggatcacatcacggaggattgcaagaggtggaggctctgtctggaagtgtccattcagggtcagtgccggggctgcctcccgtagaaacagtgggattccatggctcacggaagcgttcacgcgaccatttcaggaataaaagctcttccccagaagaccctggagctgaggtatag

SEQ ID NO: 210321 - DNA, 798 bp, synthetic construct
  misc_feature 1..798: note = Description of Artificial Sequence: Synthetic coding sequence
  source 1..798: mol_type = other DNA
atggccgaggccggcaccggcctgctgcccgccaccgtgcagccctttcatctacggggaatgtcctccactttttcgcaacggagtcgcgacattttcgactgtttagaaggagctgccagaagggcaccgagttccgttgcacacacttctatgtcagacaatggtgggttcaagcgcccgttggcccctagtggcaggtctcctgtcgaagggctggggcgggctcatagaagtcctgcctcccctcgagtgccgccagtgccggattatgtggcgcaccccgagcgatggaccaaatatagcttggaggacgtaacagaggtcagcgagcagagtaatcaagccactgccctcgcatttcttggaagccagtcacttgccgcgccaacggattgcgtgtcctcctttaatcaggatcctagtagttgtggggagggacgggtaatattcacaaaaccagtgcggggcgtggaggcccgtcacgagaggaagagagtgctgggcaaagtcggtgaaccgggccgcgggggcctgggcaaccctgccacagaccgcggagagggcccagttgagctcgcccacttggcgggccctggatctcccgaggccgaagaatggggatcccatcacggaggacttcaggaagttgaagccctgtcagggagcgtccacagcgggtcagtcccagggctaccacccgtcgagacggttggattccatggttctagaaaaaggagtagagatcattttcggaataagtcctcttcaccagaggaccccggtgccgaagtgtag

SEQ ID NO: 210322 - DNA, 339 bp, synthetic construct
  misc_feature 1..339: note = Description of Artificial Sequence: Synthetic coding sequence
  source 1..339: mol_type = other DNA
atggccgaggccggcaccggcgagcccagccccagcgtggagggcgagcacggtacggagtacgacactctgccttctgataccgtcagccttagtgattctgacagtgatctcagccttccaggcggggccgaagtggaagcactgagccctatgggtctgccaggcgaagaggacagcggaccagacgagcccccgtcccctccctcagggctccttcctgctacggttcaacccttccacctcagaggtatgtcttccaccttctcccagcggagtcgggacattttcgactgcttggagggagcagcccggcgcgcacccagctcagtggcctag

SEQ ID NO: 210323 - DNA, 612 bp, synthetic construct
  misc_feature 1..612: note = Description of Artificial Sequence: Synthetic coding sequence
  source 1..612: mol_type = other DNA
atggccgaggccggcaccggcgagcccagccccagcgtggagggcgaacatggcacagagtacgatacactgccgagtgacacagtctcgctatccgactccgacagtgacctatccctccccggtggagcagaggtggaggcactctctcctatgggtctgcctggagaagaggacagcggccctgatgagccgccatcaccaccctccggtctcctgcccgccacagtgcagcccttccacctcagaggaatgtccagtacattcagccaaaggtctagggacatcttcgactgcttggaaggcgcggcccggagggctccatcatccgttgctcacacctccatgtccgataacgggggcttcaagagaccgttagctcccagtggcagatcacctgtggaagggctgggccgcgcacaccgctctccagccagccctcgggtaccaccagtgcctgattacgtggctcaccccgaacgttggaccaagtacagtctggaggacgtgacagaggtctccgaacaatccaatcaggctaccgcgctggcgtttttggggagccagtccctcgcagcaccgacggattgtgtttcatcttttaaccagtag

SEQ ID NO: 210324 - DNA, 627 bp, synthetic construct
  misc_feature 1..627: note = Description of Artificial Sequence: Synthetic coding sequence
  source 1..627: mol_type = other DNA
atggccgaggccggcaccggcctgctgcccgccaccgtgcagcccttccatttgcgaggcatgtcatccactttctctcagaggagtagagacatatttgactgtttagagggggcggcccgccgcgcacctagctcggttgcacacacctcaatgtcagacaacggagggttcaagagacccctggctccatctgggcggagccccgtagaaggactggggagagcacatcggtcgcccgcatcacctagggtgccccccgtgccagattatgtcgcccaccccgagcgctggacgaagtacagtctagaggatgtcacggaggtgtccgagcagagtaaccaggcaacagccctggcctttttaggatcccagagcctcgccgccccaaccgattgcgttagttcattcaaccaggacccctcaagttgtggcgagggtcgggtgattttcactaagcccgtcagaggtgtcgaagccaggcacgagagaaaacgcgtcttaggaaaagtgggtgaaccaggaaggggcggactgggtaaccccgctacagatagaggggagggcccagtcgagctggcccatctggcaggccccggcagtcctgaagccgaggaatggggctag

SEQ ID NO: 210325 - DNA, 990 bp, synthetic construct
  misc_feature 1..990: note = Description of Artificial Sequence: Synthetic coding sequence
  source 1..990: mol_type = other DNA
atggccgaggccggcaccggcgagcccagccccagcgtggagggcgaacacggaacagagtacgacactctcccatctgacaccgtttcattatcagactccgattcggacttgagtctacccgggggggccgaggtggaggctcttagccccatgggcctccccggggaggaggacagtggcccagacgaacccccctctccgccttctgggcttttacctgccacggtgcaacctttccatctgcgggggatgtcttccaccttttcccagaggtctcgcgacatttttgactgcctggagggcgccgccaggcgcgctccctcctcagtggcccacactagcatgtcagataatggcgggttcaagcgtcctctcgcaccatccggccgctctccagtcgagggacttggacgtgctcaccgttcaccggcttccccacgggtccctccagtgcccgactatgttgctcatcccgagagatggacaaaatatagtctggaggacgtgaccgaggtgtccgagcagtccaaccaggccaccgctttagcattcttgggcagccagagtcttgctgcacctactgactgcgtttcctctttcaaccaggatcctagcagctgcggagaaggacgcgtgatcttcaccaaaccagtacgaggcgttgaggcaagacatgagagaaaacgcgtgctcggtaaagttggagagccaggacgtggagggctgggcaacccagctaccgataggggagaaggccctgtagaacttgcacacttggctgggccggggagtcccgaggcagaagagtggggctcccatcacggcggcctgcaggaggtggaggcccttagtggcagcgtccattccggttctgtaccaggtctcccgccagttgaaaccgtcgggtttcacggcagtcgtaaaagatcacgcgatcattttagaaataagtcctcttcacccgaggatcctggtgccgaagtctag

SEQ ID NO: 210326 - DNA, 333 bp, synthetic construct
  misc_feature 1..333: note = Description of Artificial Sequence: Synthetic coding sequence
  source 1..333: mol_type = other DNA
atggccgaggccggcaccggcgagcccagccccagcgtggagggcgagcacggcaccgagtacgatactcttccatctgacactgtgagcctttcagatagtgacagtgacttgtctctgcctggtggggccgaagtagaagctttgtctccaatgggcctgcctggggaggaagactccggacctgatgagccaccttctcctccctctggcctcctgcccgcgactgtgcagccgttccacttgaggggaatgtcatcaacttttagtcagcggtccagggatatttttgattgtctggaaggcgctgccagaagggccccaagcagctag

SEQ ID NO: 210327 - DNA, 576 bp, synthetic construct
  misc_feature 1..576: note = Description of Artificial Sequence: Synthetic coding sequence
  source 1..576: mol_type = other DNA
atggccgaggccggcaccggcgagcccagccccagcgtggagggcgagcacggtaccgagtacgataccctgccaagtgacaccgtaagtttgtcagactcggatagtgaccttagtctgcctggaggggcggaggtggaggcactgtctcccatgggcctgcccggtgaagaggacagtgggcctgacgagcctccaagccccccttctgggctgctgccagcaacggtccagccgtttcaccttcgcggaatgtcaagcacattcagccagagaagtagagacatttttgactgcctcgagggcgcggcacgccgcgcaccttcaagtgtcgcgcacacgtccatgtccgataacggcggctttaaacgacccctggctccgagcggccgatcacccgtcgagggattagggcgagcccaccgcagcccggcgagcccaagagtaccacctgtaccagattacgtggcccatccggagcgatggaccaagtattcgttggaggatgtcacagaagtgtctgagcagtcaaatcaggccactgccttagctttcctggggtcacagagtttatag

SEQ ID NO: 210328 - DNA, 639 bp, synthetic construct
  misc_feature 1..639: note = Description of Artificial Sequence: Synthetic coding sequence
  source 1..639: mol_type = other DNA
atgggccccatgtggcggatgcggggcggcgccacccggcggggcagttgttgtggtggtgacggagctgcggatggcagagggcccgggcgtagcgggagggcgagaggtggaggttccccgtctgggggaggaggcggcgttggttggagaggacgtgcagacggcgcccgccagcagttagaagaacggtttgccgacctggctgcctctcatctcgaagccattcgcgcacgtgatgagtgggacaggcagaatgcccgattgcgtcaggaaaacgcgcgactacggctagaaaatcgccggctgaaaagggagaaccgctctttgttccgccaagcactcagactacccggcgagggtggcaacggtaccccagctgaggcccggagggtcccggaggaggcgagtaccaaccgccgcgcacgcgattccggcagagaggatgaacctggctctcctcgagcgttgcgggcgaggttggaaaagcttgaagccatgtataggcgagccctgctgcagttgcacctggagcagcgagggccccggccttccggcgacaaagaagagcagcccctgcaggaaccagacagcggactgagatcacgggattccgagccttctggcccatggctgtag

SEQ ID NO: 210329 - DNA, 1047 bp, synthetic construct
  misc_feature 1..1047: note = Description of Artificial Sequence: Synthetic coding sequence
  source 1..1047: mol_type = other DNA
atgggcgcccggggcgcccccagccggcggcggcaggccggccggaggctgcgctacctccccactgggtctttccctttcttgctgctcctgctgcttctctgtatccagttgggaggaggacagaaaaagaaagagaatctcctagccgaaaaagtcgagcagttgatggagtggtccagccggcgaagcatcttccggatgaatggtgataaattccgaaaatttatcaaggcaccccccaggaattactctatgattgtcatgtttacggcattgcagcctcagagacagtgcagcgtgtgtaggcaagctaatgaggagtaccagattctcgcaaattcttggcgctacagctccgcattttgtaataaactattcttcagcatggtggattatgatgagggaactgatgtgttccagcaacttaatatgaattccgcaccaacatttatgcacttccctcccaaagggcgccccaagcgcgcagatacgttcgacttgcagcgaatcggcttcgccgccgaacaactggcaaaatggattgcagaccggactgatgtacatatcagagtttttcgacctcccaactacagcggtactatcgcactggcactgctcgtgagcctcgtcggggggctcctgtatctgcggcggaataaccttgagttcatctacaacaagaccggatgggcaatggtgtccctgtgtatcgtcttcgcaatgacaagtggccagatgtggaaccacatcaggggcccgccttacgctcacaagaacccccataacgggcaggtgtcttacatccacggatcaagccaggcacagttcgtggctgagagtcacataatcttggttctcaacgcagctattacaatgggcatggttctgctgaacgaggccgcgacctccaaaggagacgtgggcaagaggcggataatttgtttagtgggcttagggttagtcgtcttcttcttctcttttctgctgtccatttttcggtctaagtaccatggatacccttattctgacctggatttcgagtag

SEQ ID NO: 210330 - DNA, 1044 bp, synthetic construct
  misc_feature 1..1044: note = Description of Artificial Sequence: Synthetic coding sequence
  source 1..1044: mol_type = other DNA
atgggcgcccggggcgcccccagccggcggcggcaggccggccggagactccggtatctccccacggggagtttcccattcttactgttactcctgctgttgtgcattcaattgggaggtggccagaaaaagaaggagaacctgctggcagaaaaagttgagcagctcatggagtggtcaagccgtcgatcaatcttccgcatgaatggcgacaagttcaggaagttcatcaaggcgcctcctcgcaattatagcatgatagtgatgtttaccgcactccaacctcagaggcaatgtagtgtgtgccgccaagcaaacgaagagtaccagattctggcgaactcctggcgttatagcagcgcattctgcaacaaattgttctttagcatggtggattacgatgaaggaactgatgtattccaacagctcaacatgaacagcgccccaacctttatgcatttcccgccgaaagggcgccctaaacgggcagatacttttgatctacagagaattggattcgccgccgagcagctcgccaagtggatagccgaccgcaccgatgtgcatatcagagtctttaggcccccaaattattccggaacaattgccctggcactgctggtgtctctggtgggcggactgttgtacctgaggaggaacaacctggagtttatctataacaaaaccggctgggctatggtttctctgtgtatcgtgttcgcaatgacctctgggcagatgtggaaccacattagaggtccgccatacgcccacaagaacccacacaacggccaggtatcctatatccacgggtctagccaggcccagttcgtagcagagagccatatcatcttggtcctgaacgcagcaatcacaatgggcatggtgcttcttaacgaagccgctacttccaaaggtgacgtgggaaaaaggcggatcatatgtctagtggggcttggcctcgtcgtcttcttctttagcttcctgctgagtatcttccgctccaagtaccacgggtacccctactcatttctgatcaagtag

SEQ ID NO: 210331 - DNA, 1047 bp, synthetic construct
  misc_feature 1..1047: note = Description of Artificial Sequence: Synthetic coding sequence
  source 1..1047: mol_type = other DNA
atgggcgcccggggcgcccccagccggcggcggcaggccggccggaggcttcggtacctgcccactggctcctttccatttctcttactactcctgctgttatgcatccagctcggcggagggcagaagaagaaggaaaacttgctggcagaaaaggtcgagcagcttatggagtggtcttcacggcgctccattttcaggatgaatggggataagtttcgtaaattcatcaaggctccccctcgaaattactccatgatagtgatgttcactgcgctgcagccgcagcggcagtgttccgtttgtcggcaggctaacgaggaatatcagatccttgccaattcctggaggtactcatcagctttctgtaataagttgttcttctcaatggtggactatgacgaaggcacagacgtgttccaacagcttaatatgaattccgcccccaccttcatgcactttccaccaaagggccggcccaaacgcgctgacacgttcgatttacagcggattgggttcgctgcagagcaactggctaaatggatagcagaccgtaccgatgtgcacatccgggtctttcgtccccctaattacagtggcaccattgccctcgcgctgctcgtttccctcgtgggaggtctgctgtatttgcgcagaaataacctggaattcatatacaataagaccggctgggcaatggtctcactgtgtatagtctttgcaatgacaagcgggcagatgtggaaccatattagaggacctccttacgctcacaaaaatcctcacaatggccaggtgtcatatatccacggaagcagtcaggcacagtttgtggccgaatcccacataatccttgtgctgaatgccgcaatcactatgggcatggtcctgctgaatgaggctgccacaagcaaaggcgacgtgggtaaaaggcgcatcatctgcctggtcggactgggtctcgtggtcttttttttttcttttcttcttagcatttttcggtcaaagtaccatgggtatccttacagtgatctcgattttgaatag

SEQ ID NO: 210332 - DNA, 1047 bp, synthetic construct
  misc_feature 1..1047: note = Description of Artificial Sequence: Synthetic coding sequence
  source 1..1047: mol_type = other DNA
atgggcgcccggggcgcccccagccggcggcggcaggccggccggagactgcgctatctgcctaccggaagtttcccctttttactgttgttgctgctcctctgtatccagttgggtggaggccagaagaagaaagagaacttactcgcagaaaaggttgagcagctgatggaatggtcctcacgccgcagcatcttcagaatgaacggtgacaaatttcgaaagttcatcaaggcccctccacggaattactcgatgattgttatgtttacagcgctgcagccacagaggcagtgcagcgtgtgtaggcaggctaatgaagagtatcaaattctggctaattcttggcggtactcttcggccttctgtaacaaactcttcttttcaatggtggactacgatgagggcactgacgtcttccaacagctcaacatgaacagcgcgccaacatttatgcacttcccccctaaaggaaggcccaagcgtgccgacacgttcgacctccaaaggatcgggtttgctgccgagcagctcgctaagtggattgcagaccgcactgacgtgcacatccgggtgttcagacctcccaattacagtggcaccatcgccctcgccctgctggtgtcactagtgggtgggcttctctacttgcgcaggaataaccttgagttcatctacaataagactggatgggccatggtatcactttgcattgtctttgcaatgacgtccggccagatgtggaaccatatcagaggcccaccctatgcacacaaaaacccacataatggccaggtctcctatattcatggctcctctcaggctcaatttgtggctgagagccacattatcctcgtgcttaatgccgccattactatgggcatggtattactgaatgaggctgctacaagtaagggcgatgttggcaagagaagaataatttgcctggtagggctgggactggtggtgttctttttcagttttctgctttccatatttagatctaagtatcacggctatccatactctgatctggactttgagtag

SEQ ID NO: 210333 - DNA, 534 bp, synthetic construct
  misc_feature 1..534: note = Description of Artificial Sequence: Synthetic coding sequence
  source 1..534: mol_type = other DNA
atggcccaccccgtgcagagcgagttccccagcgcccaggagcccggctccgccgctttcctagatcttcccgaaatggagatcctcttaaccaaagcggagaacaaggacgacaagacacttaacctgtccaaaaccctcagcgggcctctggatctggaacagaactcccagggattaccttttaaggccatcagtgaaggtcacctcgaggcacccctgcctcggtcaccaagcagagcaagcagtaggagggccagttcgattgcaacaacaagctatgcccaggatcaggaagccccacgggactatctcattcttgcagtggtggcctgtttttgccctgtctggcctctgaatctgatccctctgatcatcagcataatgtcgaggtctagcatgcagcaggggaatgtcgacggagctcggcgactcgggcgcctggctcgcctgctgtccataaccctaattataatggggatcgtgattattatggtagcagtcaccgtaaacttcaccgttcagaagaaatag

SEQ ID NO: 210334 - DNA, 1173 bp, synthetic construct
  misc_feature 1..1173: note = Description of Artificial Sequence: Synthetic coding sequence
  source 1..1173: mol_type = other DNA
atggccgtgagcgagagccagctgaagaagatggtgagcaagtacaagtaccgggacttgacagtacgggagactgttaacgtgatcacattgtataaagatttgaaaccggtgcttgatagttacgtgttcaacgatggttcgagtagagagctaatgaaccttactggcactatccctgtaccttatcgcggcaatacctacaatattcccatctgtctctggctgctcgatacctatccatataatcctcccatttgcttcgtgaaacctaccagctcaatgaccattaagacaggcaagcatgttgacgccaatggaaagatatatctaccttacctgcatgagtggaagcaccctcagtccgatctgctggggttgatccaggtgatgattgtggtgtttggcgacgagcctcctgtgtttagcaggccgatatctgcttcatatccaccttatcaggcgactggacctcctaacacctcttatatgcccggcatgcctggaggtatcagcccctatccatcaggataccctccaaacccaagcggatacccaggttgtccctatcctcctggtggcccttaccctgccaccacgtccagccagtatccctcacagccacccgtcactacagtgggaccaagccgggacggaacgatttcagaagacacaatccgcgcttctctcatcagcgccgtgtccgacaagctgcggtggagaatgaaagaggaaatggaccgcgcccaagctgagctgaatgcgctgaaacgcacagaagaggacctcaagaaaggacatcagaagcttgaagagatggtgactcgacttgatcaggaggtggccgaagtcgacaagaatatcgagcttcttaaaaaaaaagatgaagagttgtcatccgctctggaaaagatggagaatcagagcgagaacaacgacattgacgaggttattatccccaccgcacccttgtataagcagatattgaacctttacgcagaagaaaatgccatcgaggatactatcttttacctgggcgaggcacttcgccggggcgtcatagaccttgatgtgttcttaaagcacgtgcggctgctatcgagaaagcaattccagctacgcgctttaatgcagaaggccaggaaaactgccggattgtctgacctgtactag

SEQ ID NO: 210335 - DNA, 858 bp, synthetic construct
  misc_feature 1..858: note = Description of Artificial Sequence: Synthetic coding sequence
  source 1..858: mol_type = other DNA
atggccgtgagcgagagccagctgaagaagatggtgagcaagccccaaagcgatttgctcgggctgatccaagtcatgatcgtggtcttcggggatgaaccacccgttttttcccggcctattagcgccagctaccctccttaccaagcaaccggtcccccaaatacttcgtacatgcccggcatgcccggcggaatcagtccctacccatctggctacccccccaatcccagtggctatccgggctgcccctaccccccggggggcccttatcccgccaccacctcttcccagtatcccagccaaccaccagtaacaactgtgggcccgagtcgcgatgggaccatttccgaggacactatcagagcttcattaatcagtgctgtctcagataaactcagatggcggatgaaggaagagatggacagggctcaagccgaattaaacgccctgaaacgtacggaagaagatctgaagaaaggacaccagaagcttgaagagatggtcactagactggatcaggaagtggccgaggtggacaagaatatagagctcctcaagaagaaggatgaggagctgtcctccgccctggagaagatggagaaccagagtgaaaacaacgatattgacgaggtcatcatccccaccgcacccctctacaagcagatactgaatctctatgccgaagagaatgcgatcgaggacacaattttttaccttggggaagctctgcgccgaggagtgatcgacttagatgtgtttctcaagcatgttagattgctgagtaggaaacagtttcagttacgagccctgatgcagaaagccaggaaaacagctgggctatcagacctgtactag

SEQ ID NO: 210336 - DNA, 972 bp, synthetic construct
  misc_feature 1..972: note = Description of Artificial Sequence: Synthetic coding sequence
  source 1..972: mol_type = other DNA
atggcccggggccccggcctggcccccccccccctgcggctgcccttgctgcttctggtactggccgccgtcaccgggcatacagccgctcaagataactgtacttgccctactaataaaatgaccgtgtgcagccccgacggtccgggcggcagatgtcagtgtcgggcactcggatctggcatggcagtggactgtagcactctcacatctaagtgtctgctgctcaaggcaagaatgagtgccccgaagaatgctaggaccctggtgaggccctccgaacacgccttggtggacaacgatggattgtatgaccccgactgcgatccggagggacgattcaaagcacgccagtgcaatcagacaagcgtgtgttggtgtgtgaatagtgttggggtacggcggacagataagggagacttatcactgcggtgcgacgaactggtgaggactcaccacatactcattgacctccgacatcgacccaccgccggtgcttttaaccacagcgacctggacgctgaactcagacgtttgttccgagagaggtacagattgcacccaaagttcgttgctgccgtccactacgagcaaccaacaatccagatagagctcaggcagaacacctcacagaaagctgcgggggacgttgatattggcgatgcagcatactatttcgaacgtgacatcaagggcgagtcgctgttccagggcaggggcggactcgatctccgcgttcgtggcgagccactccaagtggagaggacgcttatctactacctggacgaaataccccccaagttctctatgaagcgactaacagcaggactgatagccgtgatcgtggtggtggtggtggccctggtggccggtatggcagtgttagtgattactaataggcgaaaaagcgggaagtacaagaaggtggaaatcaaagaactgggggagttaaggaaagagcccagcttatag

SEQ ID NO: 210337 - DNA, 1353 bp, synthetic construct
  misc_feature 1..1353: note = Description of Artificial Sequence: Synthetic coding sequence
  source 1..1353: mol_type = other DNA
atgggcgccccccccggctaccggcccagcgcctgggtgcacctgctgcaccagctaccgcgcgccgatttccagcttcggccagtccccagcgtcttcgccccccaagagcaagaataccagcaggcattactgctggtggccgcacttgccggcctcggactcggtctatccctgatattcatcgcagtgtacctcatccgcttctgttgttgcaggcctccagaaccgcctggttccaagatcccctcgcctggaggcggatgcgtgacctggtcttgtatcgtagccctcctggcagggtgcaccgggataggtattggcttctacggtaattcagagacttcagatggtgtatcccagctttcttccgcactcctgcatgccaatcatacactatcaactattgaccacttggtacttgaaaccgtggagaggttgggagaagcagtccggacagagttaacaacacttgaggaagtattagagccaagaaccgagctcgtggccgccgctagaggtgccaggagacaggccgaagccgcagcccagcaactgcagggactcgctttttggcagggtgttcctttgagcccactgcaggttgcagaaaacgtgtctttcgttgaagagtatcgatggcttgcctatgtgctgttgctgctcctggagctcctggtctgtcttttcaccctgcttggcctggcaaagcagtctaaatggctagtgatcgtcatgactgtaatgagcctcctagtgttggtgttaagttggggatctatgggcctggaggccgcaactgccgttggtctgtccgacttttgtagcaaccccgatccttacgtgttgaacctgactcaggaggagaccgggctcagttcagacatcctctcttactacctgctgtgcaatagggcagtcagcaaccccttccagcagaggttgaccctgtcccagcgggctttggccaacatccactcccaactgctaggcttggagagagaagccgtaccacagttccccagcgcacagaagcccctcctgtccttagaggaaacgctcaacgttactgagggcaactttcaccagctcgtcgcgctactccactgccgttccttgcataaagattatggagcagccctgcggggtctctgtgaagatgctcttgagggtctgctgttcctcctgttattttctctgctgtctgctggggcactggccacggcgctgtgttcccttcccagagcttgggccctcttccccccatctgacgattacgatgacacggatgatgatgatccatttaatcctcaggagtccaaacggtttgtccaatggcaaagtagcatatag

SEQ ID NO: 210338 - DNA, 1383 bp, synthetic construct
  misc_feature 1..1383: note = Description of Artificial Sequence: Synthetic coding sequence
  source 1..1383: mol_type = other DNA
atgggcgccccccccggctaccggcccagcgcctgggtgcacctgcttcatcagctgccaagagcagacttccaactcaggccagttcccagcgtgtttgccccacaggagcaggaatatcagcaagccctcctactcgtggccgctctggcggggttagggcttggacttagcctcatctttatcgctgtgtacttaatccgattttgttgttgtaggcccccggagcctcccggttctaagattccatctcctggaggcggctgcgtaacctggtcctgcattgtggctctgctggccggctgcacggggatagggatcgggttttacggcaactccgaaaccagcgacggcgtctcgcaactgagtagcgccctgcttcatgccaaccacaccttgagtaccatcgaccacctagtactggaaaccgttgaacggttgggcgaggcagttcggactgagttgacaactctggaagaggttcttgagccaaggactgagctggtggctgctgctaggggcgcacgacgacaggcagaagccgcagctcagcagctgcaggggttggcattctggcaaggggtgccgttgtccccactccaggtggccgagaacgtgagtttcgtggaggagtaccggtggctagcctacgtgctgctgttattgctcgagttgctcgtatgcttattcaccctgctgggtctcgctaaacagtcaaaatggcttgtcatagttatgaccgtgatgagcctgctggtccttgtcttaagttggggctcaatgggcctcgaagccgctacagccgtggggttgagcgatttctgctctaacccagatccatacgtcttgaatctgacccaggaagaaactgggttatccagcgatattctgtcctactacctcctttgtaatcgggcagtgtcaaatcccttccagcagcgactgactctgagccaaagagcgctggccaacatccactctcagctgctcggactcgaacgtgaggcggtcccccagtttcccagcgcccagaagcccctcctctcccttgaggagaccttgaatgttaccgaaggcaacttccaccagctcgtcgccttactgcactgcaggtctctccacaaagattatggggctgccctgagggggctgtgcgaggacgcgctggaaggactgctcttccttttgttatttagtctcctgtctgccggggcacttgcgaccgcgctgtgttccttgccacgggcgtgggcgttatttcctcctcgaaatccaagtgctttatgctcaggctcacggctcagtgagccccttcttccggccggcctggaacccggcagccctctgcggtcttttcccggctgtcgtcggcggccgcattag

SEQ ID NO: 210339 - DNA, 1362 bp, synthetic construct
  misc_feature 1..1362: note = Description of Artificial Sequence: Synthetic coding sequence
  source 1..1362: mol_type = other DNA
atgggcgccccccccggctaccggcccagcgcctgggtgcacctgctccatcagctcccccgggccgattttcagctccgtccggtaccatctgtgttcgctccacaagaacaggaataccagcaggaccagtcttctctggctgtcacacagaggccaccgccaacgaccccactccaccgcctccggccccgccccaggctcacaccagccttggctcggaggccgcctgaggcagccagaggggaccctcggccacagagtccccccgaagctctgctgctggttgctgccctggccgggctgggattaggactgtcactcatcttcattgcagtgtatctgattcgtttttgctgctgtcgaccaccagaacctcctggatctaaaatccctagtcccggtggtgggtgcgtaacctggagttgcatcgtggcactgttagctggttgcacaggaattggcatcggtttttatgggaatagtgaaacaagcgacggtgtgagccaacttagctcagccttgctacacgcaaatcacaccctgagcacaatcgatcatcttgtcctggagaccgtggagcgcttaggcgaggcagtgagaactgaattaaccaccctggaggaagtgcttgaaccaagaacagagctggtggcagccgcacgcggcgcacggcgacaggcagaggccgcggcccagcagctgcagggactggctttctggcagggagtgcctctctccccactccaagttgccgagaatgtgtcttttgtagaggaatacaggtggctcgcttacgtgttgctgctgctcctagagctgctggtctgtctgttcacactgctgggtctggcaaagcaatctaagtggctcgtgatcgtgatgaccgtgatgtctctgctagtcttagtcctgtcttgggggagcatgggcctagaggcggccactgcggttgggctgtctgatttctgtagtaatccagatccatatgtcctgaatctaactcaggaggagaccggcctgtcctccgaggccgatagtgtccccgcaagctctggccaacaccccttgcctgccgctggacccggggcaaggagctgcgcatccgtgccgtttagcgcggaagctagcgcggtacttggaggcgattccgaatgcgatcgccgaaagtttcctccagtgggtggcaccgcgactctgccccagccagctcaggggctgtggtgcagcccagctggtcccgtaagaagacggccggggcgtcccgccctgcctgcgaccctattacctgccgtgtgtcggtctgctggacactgccctctgcagcctgcgcctagcctgggtccactgcccacgcagtag

SEQ ID NO: 210340 - DNA, 1356 bp, synthetic construct
  misc_feature 1..1356: note = Description of Artificial Sequence: Synthetic coding sequence
  source 1..1356: mol_type = other DNA
atgggcgccccccccggctaccggcccagcgcctgggtgcacctgttgcatcagctgcctagagccgactttcaactgaggcccgtcccgtccgttttcgctccacaggaacaggaataccagcaggcccttctgctagttgccgctctcgccggactggggctgggcctgagtctgatcttcatagcagtctatctcatccgcttttgttgctgtaggcctcctgaaccacccggttcaaagatcccaagccccggcgggggctgcgtgacatggtcgtgtattgtggcattactcgcggggtgcacagggataggcattgggttctatgggaatagtgaaacttccgacggtgtatcccagctgtctagcgcactgctgcacgcgaatcacactctgtccactatcgaccacctggtcctcgagactgtggaaaggcttggtgaagctgttagaacggagctgactacgcttgaggaggtgctggaaccccgcacggaactggtggcagcagctcgaggtgctcgcaggcaggcggaggctgcagcccaacaactccagggacttgccttctggcaaggcgtcccattatcaccactgcaagttgccgaaaacgtctctttcgtggaagagtaccgctggctcgcttacgtgctgcttcttctcctggagctcctggtgtgtttatttactctgctcggccttgccaaacagtctaagtggcttgttattgtgatgaccgtcatgtccctgcttgtgctggtgttgtcgtggggaagcatgggccttgaagcagcgacagccgtagggttaagcgatttctgctcaaatcctgatccctatgttttgaatttaactcaagaagaaacaggtttatcctcggacatcctaagctactaccttctgtgcaacagggctgtttcaaacccctttcagcagagactgactttatcccagcgagcacttgccaacattcatagccagctgctcgggcttgaaagggaagcagtaccccagttcccctccgcccagaagcctctgttgtccctagaggagaccctaaacgttactgaaggaaactttcatcagttggttgccctcctgcactgccggtctcttcacaaagattacggagcagctctgagaggcctgtgcgaagatgccctggagggattactgttcctcctgctcttctcactgttaagcgctggggccctggccaccgccctgtgctcgctgcccagagcctgggcgctcttccctccaagcgatgattacgatgatacagacgacgacgatcccttcaatccccagcaggagtcaaaacgcttcgtgcagtggcaaagcagtatctag

SEQ ID NO: 210341 - DNA, 1155 bp, synthetic construct
  misc_feature 1..1155: note = Description of Artificial Sequence: Synthetic coding sequence
  source 1..1155: mol_type = other DNA
atgacccggcggggccggcggcggagcagccacttcctgggccccccagccggtgctgccggttgtacacagaggagatcccgcgagttggctgctgccgccatgtcccatcaaaccggcatccaggcctcagaggacgtcaaggaaatttttgccagggcccgtaacggcaagtacaggctcttaaaaatttccatcgaaaacgagcagcttgtcatcgggtcatatagccagccgtccgatagctgggataaggattatgatagcttcgtgttaccacttctcgaggacaagcaaccttgctatatactctttcggttggatagccaaaatgcacagggctacgaatggatttttatagcatggtctccagaccacagccatgtgaggcagaagatgctgtatgcggcaactagggccacactgaaaaaagaattcggagggggacatatcaaggacgaggtgttcggaactgtcaaggaggacgtgtccctccacggctataaaaagtatcttctgtcccagagttcccccgcacccctgaccgccgcagaagaggaactccgccagatcaagatcaacgaagttcagaccgatgtgggcgtggacactaagcaccagacactgcagggagtcgcatttcccatctctcgtgaggctttccaggcactcgagaagctcaacaaccggcagctgaactatgtgcagttagagatagatattaagaatgaaatcatcatactggcgaatacaacgaacacagagctcaaggaccttcccaaaagaatccctaaggattccgccaggtatcatttttttctgtacaaacacagtcatgaaggagactatctcgaaagtattgtgttcatttattcaatgccgggctatacctgttcaatccgggagagaatgctttacagttcctgtaaatcccggctgttggagatcgtggagaggcaactccagatggatgtgatacgaaaaatagagattgacaacggggacgaattgaccgctgattttctgtatgaggaagtccaccctaaacagcacgcacacaagcagagctttgcaaaacctaaaggcccagctggtaaacggggaatacggcgactgataagaggcccggccgagaccgaagctactactgattag

SEQ ID NO: 210342 - DNA, 1053 bp, synthetic construct
  misc_feature 1..1053: note = Description of Artificial Sequence: Synthetic coding sequence
  source 1..1053: mol_type = other DNA
atgagccaccagaccggcatccaggccagcgaggacgtgaaggagatcttcgctcgggcaagaaacggtaaataccggcttctcaaaatcagcattgagaacgaacagttggttatcggttcctactcccaacccagcgatagttgggataaggactacgatagcttcgtactgccactgctggaggacaagcaaccttgttatatccttttccgtttggattcacagaatgcacagggatacgaatggatttttatagcctggtctcctgatcacagtcacgtgaggcaaaaaatgctgtacgccgctacacgcgctacattgaagaaggaatttggcggaggccatattaaagacgaggtgttcggcacagtgaaggaggatgtgtctctgcacgggtataagaagtatttacttagtcagagcagccccgcccccctgacagcagcggaagaagaactgagacagatcaagatcaatgaggttcaaaccgacgtcggtgtggatacaaagcatcagacactgcagggtgtggcatttccgatctctagagaagcctttcaagcacttgagaaactgaataatagacaactcaactacgttcagcttgagattgatattaaaaacgagatcatcattttggccaataccaccaataccgagctgaaggatctgcccaaaagaataccgaaggatagtgcgaggtaccacttctttctgtacaaacacagtcatgaaggggactatctcgagtctattgtgtttatctattcaatgcctgggtatacatgctctattagagaacgcatgttgtatagctcctgcaagagccgcttattagagatcgtagagaggcaactgcaaatggacgtgattcgcaagatagaaatagacaatggggatgaattaaccgccgacttcctgtacgaagaggtgcatcctaaacaacatgcccacaagcaatcctttgccaaaccgaagggacccgcagggaaacggggaatcaggcgtctgattcggggacctgccgaaaccgaggccacaactgactag

SEQ ID NO: 210343 - DNA, 1074 bp, synthetic construct
  misc_feature 1..1074: note = Description of Artificial Sequence: Synthetic coding sequence
  source 1..1074: mol_type = other DNA
atgagccaccagaccggcatccaggccagcgaggacgtgaaggagatattcgccagagcacgaaatggtaaataccggcttttgaagatcagcatcgagaatgagcaactggtgataggatcttattcgcagccaagcgactcctgggataaggattatgacagtttcgtgctcccactactggaggacaagcaaccatgttacatcctgtttaggttggactctcaaaacgcccaaggctatgagtggatcttcatcgcttggtctcctgatcacagccatgtcaggcagaaaatgctgtatgcagccacccgggccacgctcaagaaggaatttggcggcggacatatcaaagacgaggtattcggtaccgtgaaggaagatgtgtccctgcatggctacaagaagtaccttctttcacagtcctcacccgctcccctcacagccgccgaagaggagctacggcagattaagattaacgaaagccccgaagatcacattggcgtacagaccgatgtgggagtggatacaaagcaccagaccctccagggagtagcctttccaatcagtcgggaggccttccaggctctcgagaaacttaacaatcgtcagcttaactacgttcagctggagatcgatattaagaacgagattattatactggcaaacacaaccaacactgaactcaaagacttaccaaaaagaatccctaaggattccgccagataccacttcttcctctacaagcacagccatgaaggtgactatcttgagtctattgtgttcatatactccatgccaggatatacttgtagcatccgagagagaatgctgtactcctcttgtaagtcacgacttctagaaatcgttgagcgccagctgcagatggacgttattcggaagatcgagatcgacaacggggatgaattgaccgctgattttctgtacgaggaggtccatcccaaacaacacgcacacaaacagagtttcgcaaaacctaagggcccggctggaaaacgcggcatcagaagactaatcagaggcccggcagaaaccgaggctacaactgactag

SEQ ID NO: 210344 - DNA, 1050 bp, synthetic construct
  misc_feature 1..1050: note = Description of Artificial Sequence: Synthetic coding sequence
  source 1..1050: mol_type = other DNA
atggcccaccagaccggcatccacgccaccgaggagctgaaggagttcttcgctaaagctcgcgctggttctgtccggctgataaaagttgtcatagaggacgagcagcttgtgctaggggcttcacaggagccagtgggaaggtgggatcaggattatgatagagcggtgctgccattactggacgcgcagcagccatgttacttgctctatcggctggactcgcaaaatgcccagggatttgagtggctgttcctggcctggtctcccgacaacagtcctgtgagacttaaaatgttatatgcagcgactcgcgcaactgtgaagaaggagtttggtggaggacatattaaagacgaactgtttgggacagttaaagatgacctgtccttcgccggttaccagaagcacctgtctagctgcgcggccccagcacctctgactagtgctgagcgggagctccagcagatcagaattaatgaggtcaagacagagatttccgtcgaaagtaagcatcagactttgcaaggcctggccttcccactgcagcccgaagcccaacgtgccctacagcagctgaagcagaaaatggtgaactatatacagatgaaactcgatcttgagagagagacaatcgagctagtccacaccgaacccaccgacgttgcacaactgccaagccgcgttcccagagacgcagctcggtaccacttcttcttgtacaagcacacccacgagggagatcccctggaaagcgtggtgtttatttactccatgccaggatacaaatgctcgatcaaggagcgaatgctgtattcctcctgcaaatcccgtctgctggacagcgttgagcaggattttcacctggaaattgcgaagaagatagaaatcggtgacggagccgagttaaccgcagagtttctgtacgacgaggttcatccaaaacaacacgcttttaaacaggcttttgcgaagcccaagggccccggaggaaaaagaggacataaaaggttaatcagagggcccggagaaaatggcgatgacagctag

SEQ ID NO: 210345 - DNA, 483 bp, synthetic construct
  misc_feature 1..483: note = Description of Artificial Sequence: Synthetic coding sequence
  source 1..483: mol_type = other DNA
atggaggagggcagcagcagccccgtgagccccgtggacagcctgggcacttcagaggaagaactcgaaagacagccaaagcgcttcggccgaaagaggaggtattccaaaaagtccagtgaagacggcagccctacccccgggaaacggggcaaaaaagggtccccaagtgctcagtcatttgaggagctacagtctcagcggattctggccaacgtgcgagaaagacaaaggacccagtccctgaatgaagcattcgctgcgctccggaaaatcatcccaacacttccatccgataagctttcaaaaatccaaaccctgaagttagcagcccggtacatagatttcctgtaccaagtgctccaatcagacgagatggataacaagatgacatcctgcagctatgttgcacatgaaaggctcagttacgcatttagcgtatggagaatggaaggtgcctggtccatgtctgcctcccactag

SEQ ID NO: 210346 - DNA, 1476 bp, synthetic construct
  misc_feature 1..1476: note = Description of Artificial Sequence: Synthetic coding sequence
  source 1..1476: mol_type = other DNA
atgaaccccgccgccgaggccgagttcaacatcctgctggccaccgacagctacaaagtaacacattataagcagtaccccccaaacacttccaaggtgtactcgtactttgagtgccgggaaaagaagaccgagaactcaaagctgcggaaggtgaaatatgaggagactgtgttctatggcctgcaatacattcttaacaagtacttgaaaggcaaggttgttacaaaggaaaagatccaggaggcaaaggacgtgtacaaggaacactttcaggacgatgtcttcaacgagaagggctggaactatattctggaaaaatatgatggacaccttccaattgagatcaaggccgtgccggaaggcttcgtcatccccagaggaaacgtgctcttcacagtggaaaacaccgaccctgaatgttattggctgacaaactggatagagactatccttgtccagtcctggtatccaatcacagttgcgaccaactcacgcgagcagaagaagattttagctaagtatctattggagacatcaggtaatcttgatggcctggagtacaagctgcacgattttgggtacagaggtgtgtccagtcaggaaaccgcaggaattggagcttctgcacacttggtgaattttaaaggcaccgataccgtagctggactcgcccttatcaaaaagtattatggtaccaaggaccccgtacctggatattccgtgccagcagcggagcacagtacgattacggcatgggggaaggaccacgaaaaagacgcatttgagcacatcgtcacccagttttcaagcgtgccagtgagcgttgtgtctgacagttacgacatttataatgcttgtgagaagatatggggcgaagatttaaggcacctgatcgtatccaggtccactcaagcccctctgattattcgccctgattctgggaaccccctcgataccgtgctaaaggtgctcgagattcttgggaagaaattcccggtgactgagaacagcaagggatacaaactgctccccccctatctgcgcgtgatacaaggggatggggtggacattaacacattacaagagatcgttgaaggcatgaagcagaagatgtggtctattgaaaacatcgcctttgggtctggcgggggccttttgcagaagctgacacgcgacctactgaattgttcctttaagtgttcctacgttgtgacaaacggactaggcatcaacgttttcaaagatccagttgccgacccgaacaaacgatctaagaagggtaggctgagtctgcaccgcaccccagcgggaaacttcgttactctcgaggaaggaaaaggagacctggaagaatatggacaggacctccttcacaccgtattcaagaatggcaaagttaccaagtcttacagcttcgatgagatcagaaaaaatgcgcagctgaacatcgagctagaggctgcacatcattag

SEQ ID NO: 210347 - DNA, 672 bp, synthetic construct
  misc_feature 1..672: note = Description of Artificial Sequence: Synthetic coding sequence
  source 1..672: mol_type = other DNA
atgaagctgcactacgtggccgtgctgaccctggccatcctgatgttccttacatggctgcccgagagcctttcctgcaataaagcactgtgcgcctccgacgttagcaaatgtttgattcaagagctgtgtcagtgtcgccctggtgagggcaactgctcttgctgcaaggagtgcatgctctgcctaggcgctctgtgggatgaatgctgtgattgcgttggcatgtgcaatccccggaattacagcgacacaccccccacaagcaaaagtacagtggaggagctgcatgaacccatcccctcactgttccgagctctgacagagggtgatactcagctgaactggaacatagtatcctttccagtcgccgaagaactgtctcaccacgagaacctggtcagctttctggagaccgtcaaccagccccaccaccaaaacgtcagtgttcctagcaacaacgtgcacgccccctactccagtgacaaggagcacatgtgtacagtggtgtatttcgacgactgcatgagcatccaccagtgcaagataagctgcgagtctatgggtgcgtctaaatataggtggttccacaacgcatgctgtgagtgcataggcccagaatgtattgactacggctcaaaaacggtgaaatgcatgaactgtatgttttag

SEQ ID NO: 210348 - DNA, 2451 bp, synthetic construct
  misc_feature 1..2451: note = Description of Artificial Sequence: Synthetic coding sequence
  source 1..2451: mol_type = other DNA
atggccgtgagcctggacgacgacgtgcccctgatcctgaccctggacgaaggtggctcggcaccacttgccccaagcaacggcttaggtcaagaagagctgcctagtaagaatgggggtagttatgctatccacgatagccaagcgcctagccttagtagtggcggggaatcttcaccctcctcccccgcacacaactgggagatgaattaccaggaagctgctatttacctgcaggaaggagaaaacaacgacaagttcttcacacatcccaaagacgccaaagctcttgcggcatatctgttcgcccataaccatctcttctacctcatggaactcgcaactgcactgctgctgctcctcctctctttatgtgaggctcccgctgtccccgctttgaggttggggatttacgtgcacgccaccctggagttgttcgccctaatggtggttgtgttcgagctctgtatgaagctgagatggctcggactccacacattcatcaggcacaaacgaacgatggtgaagacttctgttctcgtcgtacaattcgtagaagcaatagttgtcctcgtccggcagatgtcacacgtcagagtcaccagggccttaagatgtatctttctggtggattgtcggtattgtggcggtgtgcgacgcaacctgcgccagatcttccagagtttgcccccatttatggatatcctgcttctgctgctgtttttcatgattatttttgccatcttaggcttctatctattcagtccgaacccatctgacccatatttctctaccctggagaattctatagtctcactgttcgttctactgaccaccgctaacttcccagacgttatgatgccttcctactctcggaatccttggtcatgcgttttctttatagtttacctgagcattgagctttactttatcatgaatctgctcctggcagttgttttcgatacgttcaacgatatagagaagagaaagtttaagagcctcctgctgcataaacgcactgccatccaacacgcctacagactcttaatcagccagcggaggccagctggtatctcttacagacagtttgaaggattgatgaggttctataaacctcgcatgagtgcccgtgaacgctatttgactttcaaagccctgaaccagaataatacacccctgctctcgctgaaagacttttatgacatttacgaggtggcagccttaaagtggaaggccaaaaagaacagagagcactggttcgatgaactgcccaggacggcactgttaatctttaagggcatcaacatcctcgttaagagcaaagcttttcagtacttcatgtacttggtcgtggccgttaatggtgtgtggatactggtggagaccttcatgttaaagggcggaaactttttctcgaagcacgttccatggtcttacctcgttttcctgaccatatatggcgttgaactttttctgaaggtcgctggattaggcccagttgaatacctctcttccggttggaatctatttgatttctcggtcaccgtgtttgctttcttggggttattggccttggcactcaatatggaacccttctactttatcgtggtcctcaggcctctccagctgctgagattatttaaactgaaagaaaggtatcgaaatgttctggacacgatgtttgagctccttccaagaatggcatccctcgggttgaccttgttgatcttctattattcatttgctatcgtggggatggagttcttctgtgggatcgtctttccaaactgctgtaatacaagcacggtggccgatgcttatcgctggagaaatcacacagtgggtaatcggacagtagtcgaggagggctattattatcttaataacttcgacaacattttgaacagtttcgtcaccctctttgagctcacagttgtcaacaactggtatattataatggaaggagtgacgagccagacatcccactggagtaggctctactttatgaccttttatattgttacaatggtcgttatgacaattatcgtggcctttattctcgaggcctttgtgttccgtatgaactactctagaaagaaccaagactccgaggttgacgggggaattacactcgagaaggaaatctcgaaggaagaactggtggcagtgctcgagctgtaccgggaagcccgaggggcaagttcagacgtgactagactgctggaaaccttatcccaaatggagcggtaccagcagcactcaatggtgttcttgggccgcaggtcccgcaccaaaagcgatttgagtctgaaaatgtatcaggaggagatccaggaatggtacgaagagcatgcaagagaacaagaacagcagagacagttatccagctcagcagccccagccgcccagcagccccctggaagcaggcaacggtctcagacagttacatag

SEQ ID NO: 210349 - DNA, 2247 bp, synthetic construct
  misc_feature 1..2247: note = Description of Artificial Sequence: Synthetic coding sequence
  source 1..2247: mol_type = other DNA
atgaactaccaggaggccgccatctacctgcaggagggcgagaacaacgataaattcttcacccacccaaaagatgccaaagcattggcagcatacttgttcgcacacaatcacctgttctatcttatggagctggcaacagcgctcctgttattactgctctctctttgtgaggcccccgccgtccctgccctgcgtttaggcatctacgttcacgcaaccctggaattgtttgccctcatggtcgttgtgttcgaactctgcatgaaattgagatggcttggactccatacatttataagacacaaacggaccatggttaaaaccagtgtgcttgtagttcagtttgtagaggccattgttgtgctggttcggcagatgagccatgtgagggtaaccagggccctgaggtgcatcttcctggtagactgtcgctactgcggcggggtgagacggaatctaaggcagatcttccagtctttacccccctttatggatatcttgcttctgctgctctttttcatgatcatatttgctattctgggtttctacctattctctcccaatcctagcgacccctattttagcacactggagaatagcatcgtgtccctttttgttctgctcacgacggccaacttccccgacgtaatgatgcccagctacagtcggaacccttggagttgtgttttcttcattgtatacttgagtatcgaactgtactttataatgaacctcctcctagccgtcgtatttgatacgttcaacgacatcgagaagcggaagttcaaatcactattgttacacaaaaggactgccatccagcatgcctacagacttctcatatcacagagacggcctgcgggaatcagttatcggcagtttgagggactgatgagattttataaacctcggatgtccgctagggagagatatcttactttcaaggctctaaatcagaataatacacctcttctatccttgaaagacttttacgatatctatgaggtggcagctcttaagtggaaggcaaaaaagaaccgcgaacactggtttgacgagttacctcggacagcactactcattttcaagggaataaatatcttggtgaaatccaaagcattccagtacttcatgtatctcgtcgtcgctgtgaatggggtctggatcctcgtggagactttcatgctcaagggcggcaatttctttagtaagcacgtgccatggtcctacctggtctttcttacaatctacggtgtggaactttttctcaaagtggcaggacttgggcccgtcgaatacctgtcttctggatggaatctcttcgacttctccgttacagtttttgctttcctgggcctgctcgctctggctctgaacatggagcctttctatttcatcgttgtgcttcggcccctgcagctcctgaggttattcaaactgaaagaaaggtatcggaatgtccttgataccatgtttgagttgctgcctaggatggctagcctgggactgaccctattgatattttattacagcttcgcgatcgtgggaatggagtttttttgcgggatcgtgttcccaaactgttgcaatacctctacagtggccgatgcctatcggtggaggaatcatacagtgggcaatagaaccgtggtcgaggagggatattactacctcaacaatttcgacaatatcctgaacagtttcgtcacactctttgagctgaccgtagtaaacaactggtatattatcatggagggtgtgacgtcccagacttctcactggtcccgtttatattttatgactttttatatcgtgacaatggtcgtgatgacaatcatcgtagcattcattctcgaggcctttgtgtttaggatgaactacagtcgcaagaaccaggactcagaggttgacggcggaatcacacttgagaaagagatctctaaagaagagctggtagctgtcctcgagctctatcgggaggcccggggggcctcctccgatgtgacacgactattggaaacactttcccagatggagagatatcagcagcatagcatggtgtttctggggcggagatccagaacgaaatccgacctgtccctaaaaatgtaccaagaggagatacaggagtggtacgaagagcacgccagggagcaggaacaacaaaggcagctgagcagttctgctgctccagcggctcaacagccccctgggagccggcagagatcgcagactgttacatag

SEQ ID NO: 210350 - DNA, 2667 bp, synthetic construct
  misc_feature 1..2667: note = Description of Artificial Sequence: Synthetic coding sequence
  source 1..2667: mol_type = other DNA
atggagagctgctacatcgcccaggccggcctggagctgctgggctctagtagtagcccaactctgactagccagtcagccgaaattacagaggacgcttcaaatggcggggtaagtgaacagcacccttggcccagcggcttcgaacgagagctgaaaccagaaaccatctcatcacccgggtatcacatattgagggcaaccggggaggaaaatatggctgtcagtctggacgatgacgtccctttgatccttaccctggatgagggcgggagcgcgccattagctccgagcaacggtctagggcaggaggagttgccgtcaaagaatgggggatcctacgctattcacgacagccaagcgccctcgttgtcctctggtggcgaatcctccccatcaagccccgcccacaattgggagatgaactaccaggaagcagcgatctacctgcaggaaggcgaaaacaacgacaaattctttacccaccccaaagacgcaaaggccctcgcagcctacctgtttgcccataatcacttgttttacctcatggagctcgctacggccctgctgctccttctactatctttatgtgaagcccccgccgtgcctgcattgagactaggaatctatgtacatgcaacactggaattattcgctctgatggtcgtggttttcgagctttgcatgaaactccggtggctgggacttcacacatttattaggcacaagaggaccatggttaagacgtcagttttagtagtacagttcgtggaggcgatcgttgtcctcgtcaggcagatgtcacacgtaagggttacaagagcccttcggtgtatcttcttggtcgattgtaggtactgcggaggcgtgaggaggaacctgagacagatcttccagtctcttccccctttcatggacatcctgcttttgctactcttttttatgattattttcgcgatcctcggattctaccttttttcccccaatccaagtgatccttattttagcacactggagaatagcatcgtctctctctttgtgctcctgaccaccgcaaattttccagatgttatgatgccctcctatagcagaaatccatggtcctgtgtgttctttatagtgtacctatctatagagctgtactttatcatgaacctactcctcgcagttgttttcgatacgtttaatgatatcgaaaagagaaagttcaaatcactccttctccacaaaagaactgctatccagcacgcatatcgactcctgatttctcagcgtcggcccgctgggatctcatatcgacagttcgaaggtctgatgcgcttttataaaccgcggatgagcgcccgcgagcgatatctgacatttaaggctctcaaccagaataatacccccctcctgtccctgaaagacttctacgatatatacgaggtggccgccctcaagtggaaagcgaagaaaaaccgggaacactggtttgatgaacttccccggacggccctcctgatttttaaaggcattaacatacttgtaaaatctaaggccttccaatacttcatgtatttagtagtggccgtgaatggcgtctggattctagttgaaactttcatgctgaagggcggcaatttcttcagcaagcacgtgccatggtcataccttgtgtttttgacaatttatggtgtggagctctttcttaaggtggccggtctcggtcctgtagagtatttgagttctggctggaacctttttgacttttcagtcacagtgttcgccttcctgggcttgttagccctggcactgaacatggagcccttctacttcatcgtggtcctgcgccccctgcagctgctgcggctcttcaaacttaaggagaggtatcgcaatgtgttggacactatgttcgagcttctacctaggatggcctctctggggctgaccctgctgattttttactattcgttcgccatagttggtatggaatttttctgcggcatagtttttcctaattgctgtaatactagtacggtggcggatgcatatagatggaggaaccatacagtaggcaatagaaccgtggtggaagagggctattactatctgaataactttgataatattctgaacagcttcgtcacgctcttcgagttgactgtggtgaataattggtacatcatcatggaaggagtgacatctcagacatctcattggtctcgactgtacttcatgaccttctatattgtgacgatggtggtgatgacaatcattgttgccttcatcctggaggccttcgtgtttaggatgaactatagccgaaaaaatcaggattcagaggtggacggaggtatcactcttgagaaggaaatctcaaaggaagagctggtcgccgtgctggaactgtaccgcgaagcccgaggcgcgtctagcgatgtaacaagactccttgagacactctctcaaatggaacgctaccaacagcacagtatggtgtttttagggcgccgctcaagaacaaagtctgatctgtccttgaagatgtaccaggaagaaatacaagagtggtacgaggagcatgcaagagaacaggagcagcagagacagctgtccagtagtgccgcacctgctgctcagcaacctcctgggagtaggcagcggagtcaaacagtgacctag

SEQ ID NO: 210351 - DNA, 2667 bp, synthetic construct
  misc_feature 1..2667: note = Description of Artificial Sequence: Synthetic coding sequence
  source 1..2667: mol_type = other DNA
atggagagctgctacatcgcccaggccggcctggagctgctgggcagtagctcatcacctacgcttaccagccagtccgccgaaattacggaggacgcatctaatggaggtgtgagcgagcagcacccatggccgtcgggcttcgagagggagctgaagcccgaaactatctcctctccgggttatcatatcctgcgtgctactggcgaggagaacatggccgtgtccttggacgacgacgttcctcttatactcacactcgatgaaggcggatccgccccacttgctccaagcaacggcttggggcaggaggagctgccatctaaaaacggaggatcgtatgccatacatgatagccaggcaccaagcctgagttccggcggcgagtcgagcccttcaagcccagcacacaactgggagatgaactaccaggaggccgcaatctatttacaggagggagagaacaacgataagttctttactcacccgaaagacgccaaggccttagccgcctatctctttgcacacaaccacctgttttatctgatggagctcgcgaccgcactgctgcttctgctcctcagtctgtgcgaagcacctgcagtgcctgctctgcggctagggatatacgtgcatgccacactggagctgtttgcgcttatggttgtcgtttttgagctgtgtatgaagttgcgctggctggggcttcacacctttattaggcataagcggacaatggtgaaaacctccgtattggttgtgcagttcgtagaagccattgtagtcctcgtgagacaaatgtcccatgtgcgcgttacgcgcgcattgagatgtatcttcttggtggactgtcgctattgcggaggagtccggcggaacctgcggcagatctttcagagcctgccgccattcatggacatcttactgctgctcctatttttcatgataatatttgcaatactgggcttctatctcttcagccctaaccccagcgacccatacttttccaccctggaaaattccattgtgtcactattcgttctgttgactacggcaaatttccccgacgtgatgatgccatcatatagcagaaatccctggtcttgcgtcttctttattgtgtaccttagtatcgaattatattttattatgaaccttcttctggccgtcgtattcgacacttttaatgatatcgagaaaagaaagtttaagtcactgctgcttcacaagaggacggcgatacagcacgcataccgattattgatcagccaacgtcggccggccgggataagctacagacagttcgaggggctgatgagattctacaaacctaggatgtcagccagggagcggtacctcacctttaaggcactgaatcaaaataacacccctctattgtcccttaaagacttctacgatatctatgaggttgccgcactgaagtggaaggcaaagaagaatcgggagcactggttcgatgagcttcctcgtactgccttattgatcttcaaaggaattaatattctcgtcaaaagcaaagcgttccagtactttatgtacctcgtcgtggcagtgaacggagtctggattctggtcgagacattcatgctcaagggcggcaacttcttctccaagcatgtgccctggtcctatctggtctttctgacaatctatggtgtagaactatttctgaaagtggccggcctcggcccagtggagtatctgagtagcgggtggaatcttttcgatttctcggtcaccgtgtttgcctttctaggcctgcttgcactcgccctcaatatggagccgttttactttatcgtcgtgctacggcctcttcagttgcttcgtctatttaaactgaaggagaggtataggaatgtccttgacacaatgtttgaactccttccacggatggccagcttaggtcttaccctcctgattttctactattccttcgcgatagtaggaatggagtttttctgtgggatagtatttcctaactgctgcaacacttctaccgtcgccgatgcctaccggtggaggaaccacaccgtgggcaaccggacagttgttgaagagggctattattacctaaataattttgacaacatcctgaattcgtttgtgactcttttcgagctcacagtggtcaacaactggtatattatcatggagggggttaccagtcagacgtcgcactggagtcgtctgtattttatgacgttctacatcgtgactatggtagtgatgactataattgtggcattcatcctggaggctttcgtttttcggatgaactacagtcggaagaaccaggattccgaggtcgatggcggaattaccctggagaaggaaattagcaaagaggagctggtggctgtgctggagctgtacagggaagcaaggggtgcatcatctgacgtcacaaggttgctggagacactgtcccagatggagcgatatcaacagcattccatggtgtttctgggacgtaggagtagaaccaagtcagatctgtcccttaaaatgtatcaggaggaaattcaggagtggtacgaggagcacgcaagagaacaggagcaacagcgccagttgagtagtagcgctgctcccgccgcacagcaaccaccaggtagtaggcagcggtcacagacagtgacgtag

SEQ ID NO: 210352 - DNA, 258 bp, synthetic construct
  misc_feature 1..258: note = Description of Artificial Sequence: Synthetic coding sequence
  source 1..258: mol_type = other DNA
atggccgtgagcctggacgacgacgtgcccctgatcctgaccctggacgaaggggggagtgccccattggcgccctccaacggtctgggacaggaggagttgccctctaagaatgggggctcttacgcaattcatgattcccaggccccctccctttcttcgggcggcgaaagttcacctagtagcccagcccataactgggagatgaactaccaggaagccgctatctatctgcaggaaggggagaacaacgattag

SEQ ID NO: 210353 - DNA, 303 bp, synthetic construct
  misc_feature 1..303: note = Description of Artificial Sequence: Synthetic coding sequence
  source 1..303: mol_type = other DNA
atggccgtgagcctggacgacgacgtgcccctgatcctgaccctggatgaaggcggctctgctccactcgcaccgtctaatggactgggccaggaggagttgccatcaaagcggcgctgctgcatgctctgttcctctaaacagaagccatggatcccgtgcagggttattagcgatgttgcatgtaaagcagcctcttgctttgagggagcttctggtccttgtgacatctcgatgtgggagtgttacagggtgtgcaagcagatggctgcggccatgccatccacaactcctcgtccatag

SEQ ID NO: 210354 - DNA, 2259 bp, synthetic construct
  misc_feature 1..2259: note = Description of Artificial Sequence: Synthetic coding sequence
  source 1..2259: mol_type = other DNA
atggccgagccccaggccgagagcgagcccctgctgggcggcgcccggggcggcggcggcgattggcccgccggcctgacgacttaccggagcatacaggtcggccctggggctgcggcacgatgggacctgtgcatcgatcaagccgtggtctttatcgaggacgcaattcagtatcgctccatcaaccacagagtggacgcctcatccatgtggctgtaccggagatactacagcaatgtgtgtcagcgaacactgtctttcacaattttcttaatcctgttcctcgcattcatagagactcccagctcactcacgtccacggcagatgtgcgataccgcgctgccccttgggagccaccgtgtggcctgacggaaagtgtggaggtcttgtgtctgctcgtgttcgccgccgacctttcagtgaagggatatctcttcggatgggctcatttccaaaagaacttatggctactggggtacctggtggtgctcgttgttagtctcgtcgattggacagtctctctgagtctggtttgtcatgaacctttgaggataaggcgtctccttaggcccttcttcctcctccaaaatagttcaatgatgaagaaaacgctcaagtgcatcagatggtcactgccagaaatggcgtcagtgggcctgctgctggccatacacctgtgtttatttactatgtttggtatgcttttgttcgctggtggaaaacaggatgatggccaggaccgtgaaaggttaacttatttccagaatctgcccgagtccctgacaagtctgctggtcctgctgacgacagctaacaatccagacgtcatgattcctgcctactccaagaacagagcttacgcgatcttttttattgtgtttactgtgatagggagccttttcctgatgaatcttctaacagctattatttactcacagttccggggctacctgatgaaaagtttgcaaacgagcctttttagaagacgactgggcacccgcgccgccttcgaagtcctaagctctatggtcggcgaaggcggtgcatttccacaggcggttggcgtaaagcctcagaacctccttcaagtgctgcagaaagtccagctcgacagctcccataagcaggcaatgatggagaaagttcgctcgtatgggagcgtcctgttgtcagccgaggagtttcagaagctcttcaatgagctggatcgctccgttgtaaaagagcatccccccaggccagagtatcagtcacccttcctgcagtccgctcagttcctattcgggcactattactttgactaccttggaaacctgattgcacttgctaacttagtgtccatttgtgtttttcttgttcttgacgctgacgtcttacccgctgagcgcgacgatttcatcctgggaatcctaaactgcgttttcattgtgtactatttgctggagatgctgctgaaggtttttgccctagggctcaggggatatctctcctaccctagcaacgtgtttgatggattgctgaccgtggtgctgttggtgttggagatctcaactctggcagtgtacagactgccccacccagggtggaggcctgaaatggtcgggcttctctcattatgggacatgacaagaatgctgaacatgctgatcgtcttcagattcctgcgcatcataccgtctatgaagttgatggcagtcgtggcctctactgtcctaggactggtgcaaaacatgcgcgcatttggtggcatcttagtcgtggtttattatgtgttcgccataatagggataaatctgtttcgaggggttatcgtcgctctgcctggtaattcttcgctcgctcccgccaacggttccgcgccttgtggttccttcgagcagctggagtactgggccaacaattttgacgattttgctgccgctctggtgactttgtggaatctgatggtggtgaataattggcaagtctttctggatgcatatagaaggtactcaggtccatggtcaaagatctatttcgtgctctggtggttggtctcgtccgtcatatgggtcaacctgttcttggccctgatcctggaaaacttcctgcacaagtgggaccctagaagccaccttcaaccactggctggcactccagaagccacctatcagatgaccgtggaattactcttcagggacatattggaagagccaggggaagacgagctgactgagcggctctcccaacatccacatctgtggctatgccgatag

SEQ ID NO: 210355 - DNA, 1407 bp, synthetic construct
  misc_feature 1..1407: note = Description of Artificial Sequence: Synthetic coding sequence
  source 1..1407: mol_type = other DNA
atgtggctgtaccggcggtactacagcaacgtgtgccagcggaccctaagctttacaattttcctgatcctcttcttagcttttatcgaaactccgagctctcttacctctacggctgacgtgagatacagagcagctccctgggaacctccttgtgggctgactgagagcgtggaggtcttatgcttgctcgtgtttgcagctgatttgagcgtcaaaggctacttgtttggatgggcacacttccagaaaaatctttggctgctgggctacttagttgtgctggtggtaagcctggtggactggacagtctcactgtcactggtgtgccatgaaccccttcggatccgccgtctgctaaggcccttcttccttctgcagaattccagcatgatgaagaagaccctgaaatgcattaggtggagcctccccgaaatggccagcgtgggcctgctgctcgccatacatttgtgcttgtttacaatgttcgggatgctacttttcgccggggggaaacaagacgacggacaagaccgagaacggctcacctacttccagaatctgcccgagagtttaacctcattgctcgtactcctgacaactgctaataaccctgacgtcatgattccagcctacagcaagaatcgcgcttacgccatttttttcatcgtgtttacagtgatcggtagcctgttccttatgaatctgctgaccgctataatctactcccaattcagagggtacctgatgaagtctctacagacgagtctgtttcgacggcgattagggaccagagcagcgttcgaggtcctgtccagcatggttggggaaggaggtgcattccctcaggccacacggcgaggtccttcaaccagcttgagattctgccgggcccccagttcttcctctgctaccaccacactgaccacgtggggaactagcagcccctggcagacatggtgtccattcgcctgtagctggtgctggatgcaaatgtgttgtctcctaagtgtgatgacgtcaagctgggggttttcaaccgcctctagcctgtgtaccacatgctggcggtgctgcagccgtagcctcccctgggcttgcgaaggcacttgtcctaccccggctacttgtttaactgggtcatcaccactttcttgctggcggcccgagatggtgggcctgctttcactctgggatatgacccggatgttaaacatgctgatcgttttccggttcctccggattattccatcaatgaaattgatggcggtggtggctagtacggtactgggcctagtgcaaaacatgagggccttcggggggatcctggtcccggggccctgccaatggctcggcgcattgtgggagctgcgggccgccggagtgttgggacagcagttacgttag

SEQ ID NO: 210356 - DNA, 1584 bp, synthetic construct
  misc_feature 1..1584: note = Description of Artificial Sequence: Synthetic coding sequence
  source 1..1584: mol_type = other DNA
atgatcctgagcagctacaacaccatccagagcgtgttctgctgctgttgctgctgttccgtgcaaaagcggcaaatgcgcacacagatttccctgtctaccgatgaggagcttcccgagaagtatacccagcgaagacggccctggttgtcccaattgagcaataaaaaacagagcaacactggcagagttcagccttctaagcggaaacctctgccgccgctgccaccgagcgaagttgcggaggagaagatccaggtgaaagccctttatgactttctgccgcgagagccatgcaacctagcgctgagaagagctgaggagtacttaatcctcgagaaatataaccctcactggtggaaggctcgtgacagactgggcaacgaagggctgattcctagcaactatgtgacagaaaataaaatcacgaatttggaaatctacgaatggtaccacagaaacataacgagaaatcaggctgagcatctgcttcggcaggagtcaaaggaaggtgccttcatcgtacgagacagtcggcacttagggagctatacaatatcagtcttcatgggagcccgccgcagcacagaagctgcaattaaacactaccagatcaagaagaatgactcgggacagtggtacgtcgcggagcgccacgccttccagtctattccagaattgatctggtatcaccagcacaacgcagcagggttgatgacacgcctccgctatcccgtcggcctgatgggctcctgtctccctgctactgccggcttttcttatgaaaagtgggagatcgaccccagcgagctggcgtttatcaaagagatcgggtctggccaatttggcgttgtgcacctcggggaatggcggagccatattcaggttgccatcaaggccattaacgaagggagtatgtctgaggaagactttattgaggaagccaaagtcatgatgaagttaagccattccaagctggtgcaactatatggggtctgcatccagcgtaaaccactgtacattgttaccgagttcatggaaaacggctgtctgctgaattatctgagggagaacaagggcaagttgcgcaaggagatgctcctttccgtgtgtcaggacatctgcgaaggtatggaatatctggaaaggaatggctatatccatcgcgacctggccgcccgtaattgtctggttagctcgacatgtatcgtaaagatctcagatttcggcatgactcgatatgtgctggacgatgaatatgtgtcgtcgttcggagcgaagttccccattaaatggagtcctcccgaagtcttcttgttcaacaagtactcatctaaatcagatgtgtggagtttcggagtgttgatgtgggaggtgtttactgaaggtaaaatgccgtttgaaaataagagcaacctgcaggtggtggaggccatcagcgaggggtttcggctctacagaccgcacctggcccctatgtccatctacgaagtgatgtactcttgctggcacgagaaaccagaggggagaccaacatttgccgagctgctaagggctgtgaccgagatcgcagagacatggtag

SEQ ID NO: 210357 - DNA, 342 bp, synthetic construct
  misc_feature 1..342: note = Description of Artificial Sequence: Synthetic coding sequence
  source 1..342: mol_type = other DNA
atgggcggcctggagccctgcagccggctgctgctgctgcccctgctgctagctgtgtcaggactgaggccagtgcaggcacaagcccaatcggactgttcctgcagcaccgtgtcaccaggcgtactagcggggatcgtcatgggggatctcgtcctgacagttctcatcgctctggcagtatattttctgggaagactggtaccacggggacgaggagcggccgaggcggccactagaaagcagcgcatcactgagaccgagagcccctatcaggaactgcagggccagcgctccgatgtgtattctgatttgaacactcaacggccttattataagtag

SEQ ID NO: 210358 - DNA, 339 bp, synthetic construct
  misc_feature 1..339: note = Description of Artificial Sequence: Synthetic coding sequence
  source 1..339: mol_type = other DNA
atgggcggcctggagccctgcagccggctgctgctgctgcccctgctcctggccgtgagcggactgcgacccgtgcaggcgcaggcacagagcgactgttcctgctctactgtgagtcctggtgtcttggccggaatcgtgatgggcgatctcgtcttgaccgttctgattgctctggctgtgtatttcctcgggagacttgttccccgagggaggggggcagcagaggccactcggaaacagcgtataaccgagactgaatctccttaccaagagttacagggccaacgcagtgacgtgtactccgacttgaacacccagcggccgtactacaagtag

SEQ ID NO: 210359 - DNA, 309 bp, synthetic construct
  misc_feature 1..309: note = Description of Artificial Sequence: Synthetic coding sequence
  source 1..309: mol_type = other DNA
atgggcggcctggagccctgcagccggctgctgctgctgcccctgctcctcgcggtttcagactgcagttgctcgaccgtgagcccgggcgtgcttgccggcatcgtgatgggggacttagttttgactgtgctcatagctctggccgtttattttttggggcgcctggtgcctcggggccgcggtgcagccgaggcagctacaaggaaacaaaggataactgagactgagagcccataccaagagctgcagggccagcggagtgacgtttactccgacctaaatacccagagaccttactataaatag

SEQ ID NO: 210360 - DNA, 339 bp, synthetic construct
  misc_feature 1..339: note = Description of Artificial Sequence: Synthetic coding sequence
  source 1..339: mol_type = other DNA
atgggcggcctggagccctgcagccggctgctgctgctgcccctgttgctggcagtcagcggattgagaccggtccaggcccaggctcaatccgattgttcctgcagtacggtgtcgcccggggtgctggcagggattgtgatgggtgaccttgtgttaacagtactgatcgccctggctgtgtactttctgggcaggttggtgccgcgcggtaggggcgcagctgaagctacccggaaacagaggattacggaaacagaatcaccttaccaagagttgcagggacaaaggtccgatgtgtattccgatttgaacacccagaggccctactataagtag

SEQ ID NO: 210361 - DNA, 2673 bp, synthetic construct
  misc_feature 1..2673: note = Description of Artificial Sequence: Synthetic coding sequence
  source 1..2673: mol_type = other DNA
atggccctgcggcggagcatgggccggcccggcctgccccccctgcccttgccaccacctccgagactgggcttactgctcgcagctctggcgagccttctgctgcccgaatcagcagcagccggcttaaagctaatgggggccccagtgaagctgacggttagtcagggccagccagtgaagctcaattgcagtgttgaaggcatggaagagccagatattcaatgggtgaaggacggcgctgtggtacaaaacctggaccagctctacatccctgtcagcgaacagcactggattggattcctcagtctgaaatccgtggaacgtagcgatgctggcaggtactggtgtcaagtggaggatggaggcgagacagagatctctcagccggtatggcttaccgtggagggcgtccccttttttaccgtggagcctaaagacttggctgtcccccctaatgcaccttttcagctgtcatgtgaggccgtcggcccacctgagccagtcactattgtctggtggcgaggaaccactaagattggcggtccagcccctagtccctccgtgctgaacgtaacaggtgtaacacaatccacaatgttttcttgcgaggcccataacctgaagggcctggcctcttccagaaccgcaaccgtccatctgcaggccctgcctgcagcacctttcaatattacagtaactaagctgtctagcagtaacgcttccgtggcttggatgcctggagccgatggccgagctctgctgcaaagctgcactgtccaggtgactcaggccccgggaggctgggaggtgctggctgtggtggttccggtgccgccattcacatgtcttctgagggacctggtgcccgcgacaaattattccctaagggtcaggtgtgctaacgcgctggggccttctccttacgccgactgggtgcccttccaaactaagggcttggctccggctagcgccccccagaatctgcacgctattagaaccgactccggcttaattctggagtgggaggaagtgataccagaggcgcctcttgaagggcccctcggcccctataaactgtcctgggttcaagataatggcacccaggacgaacttaccgtggaaggcacgagagctaacctgacaggctgggatcctcagaaggaccttatcgttagggtatgcgtttctaacgccgtgggatgcggcccctggtcccaaccgcttgtggtgtcctctcacgatcgtgcagggcagcaaggaccaccccattctaggactagctgggttcctgtggtcctaggtgtccttacagccctagtcacagccgccgcactcgccctcatactgctcaggaaacggaggaaggaaacaagatttggccaggcgttcgactccgtgatggcaagaggcgagccagccgtccatttcagggctgcacgttccttcaaccgggagcgaccagagcgaatcgaagcgaccctggattctctcggaatttcggacgaactgaaagaaaaattagaagatgtactcattcctgagcaacaatttaccctcggaaggatgctgggcaaaggcgaattcgggtctgtcagagaggcgcagttgaagcaggaggacggttccttcgtgaaggttgccgtgaaaatgttgaaggccgatatcattgcctccagcgatattgaggagttcctgagagaggctgcctgtatgaaggaattcgatcacccacacgttgcgaagcttgtgggagtttccctcaggagtcgggctaaaggacgccttcctatcccaatggtcatcctgcctttcatgaaacacggggatcttcatgcttttttgctggcaagcaggatcggagaaaacccctttaacctccctctccaaaccctcatcaggttcatggtggacatcgcttgcggcatggagtatctctcttcccggaattttattcacagggacctcgccgcccggaactgtatgctggccgaagacatgacagtctgtgtggcagacttcggcctgtcgcggaagatctactccggggattactatcgccagggctgcgcaagcaagctgcctgtcaagtggctagcactggagtctctggctgataacctgtacactgttcaatctgatgtttgggcattcggcgtaacaatgtgggagattatgacgcgtggccaaaccccctacgccggcatcgaaaacgcagagatctacaactacttaataggcggaaaccgtttgaagcagccgcccgagtgtatggaggatgtctacgacctgatgtaccagtgttggagcgctgatccaaagcagcgaccatcgttcacgtgtttacgcatggagctggagaacatactggggcagctctcagtgctgagtgcctcccaggaccctctgtacattaacattgagcgggcagaagaaccgaccgctggaggctcattagaattacctggacgagatcagccttattccggtgctggcgatggctctggaatgggagcagtgggtgggactccctccgactgtcgctatatcctgaccccaggggggttagccgaacagccgggtcaggccgaacaccagccagaatcaccactcaatgaaacacaacgtctgctgctactccagcagggcttgctcccacactcaagctgttag

SEQ ID NO: 210362 - DNA, 2529 bp, synthetic construct
  misc_feature 1..2529: note = Description of Artificial Sequence: Synthetic coding sequence
  source 1..2529: mol_type = other DNA
atggaggagcccgacatccagtgggtgaaggacggcgccgtggtgcaaaacttggatcagctttacattccagtcagcgagcagcattggatcggctttctgagcctgaaatcagtggagcggtccgacgcaggcagatactggtgtcaggtggaggacggcggggaaacagaaatcagccagcctgtctggctgacggtggagggcgtgcccttctttactgtggagcctaaagaccttgccgtgcctcccaacgcccccttccagctgagctgcgaggccgtggggccccctgaaccagttaccatcgtgtggtggcgaggtacaacgaagattggcggaccggccccgagtccatcagttctgaatgtcacgggagtaacccagagcaccatgttctcatgcgaggcccacaacttgaaaggcctcgcatcatctagaacagccaccgtgcatttgcaggctcttccggccgccccttttaacattactgtgaccaagctcagtagctccaacgccagtgtcgcctggatgcccggtgctgatggacgtgcccttctccagagttgcacagtgcaagtaacacaggcacccggcggctgggaagtactggccgttgtggtccctgtacccccctttacttgtttgctgcgtgacctggtccccgcaacaaattatagcctgagagtgagatgcgctaacgcactcggtcccagcccttacgcggattgggttcccttccagacaaagggccttgcacctgccagtgctcctcagaatctgcacgctatccggactgatagcggcttgatattggaatgggaagaagttatacccgaggctccactggagggaccacttggcccatacaagttgtcttgggtccaggataacggtactcaggacgagctcaccgtggagggcacccgggcaaacctgacaggatgggacccccagaaggaccttattgttagagtgtgtgtgtctaatgctgttggctgtggcccgtggagccagcctctcgtcgtatcaagccatgaccgggccgggcagcaggggccccctcattcgcgcacctcatgggtgcccgtggtactgggagttctgactgctctggtcaccgcagccgccctggccctgattctgctgaggaagcggcggaaggagaccagattcgggcaagcctttgacagcgtgatggctcgaggagagcccgctgtccactttcgggccgcccgtagctttaaccgagaacgtccggagcgcattgaagctactcttgattctctgggaattagtgatgagctcaaagagaaactggaagacgttctaatcccagagcaacagttcacgctcggacgcatgctgggcaagggagagttcggaagtgtgcgggaagcgcagctcaaacaggaagacggtagcttcgtcaaggtggccgtcaaaatgctcaaagcagacatcatcgcatccagcgatatcgaggaattcttaagggaagctgcttgcatgaaggagtttgatcaccctcacgtagccaagctcgtgggagtgagccttcgtagccgcgcaaaagggcgtctgcctataccgatggtaatcctgccattcatgaaacacggcgacctgcatgcttttttattggcgtcacggatcggcgaaaatccattcaacttaccattacaaaccctcattcggttcatggtagacattgcctgtggcatggagtacttgtcgagtcgcaactttattcacagagacttggcagcccgaaactgtatgctggctgaggacatgaccgtctgcgtggcggattttgggctgagccggaagatttactctggagactactatcggcaggggtgtgctagcaaactccccgtgaaatggctcgctcttgaaagtctcgccgataacctgtataccgttcagtccgacgtctgggcctttggagttacaatgtgggaaatcatgacacgcggtcagacaccctatgccggcattgagaacgctgaaatctacaattatctgattggcggaaacagactcaagcagccccctgagtgcatggaagatgtatatgatctcatgtatcagtgttggtccgcggatcccaagcagaggcccagtttcacgtgtttgcgcatggagctggagaatatcctggggcagctgagtgttctgagcgcttcccaagaccccctgtacattaacattgaacgcgctgaggagccaacagccggaggcagtctggaacttcccggacgggatcagccatattctggggcaggagacggatctggtatgggagccgtcggaggaacaccttccgattgccggtacatcttgactccgggcgggctcgcggagcagcccggccaggccgaacatcaacccgaatctccactgaatgagacccaacggctgcttctgttgcagcagggccttcataccgtggctgtatccccccaggcagaaggcatcggcgccatctggccagctctagttgctaccgagctggctgattag

SEQ ID NO: 210363 - DNA, 741 bp, synthetic construct
  misc_feature 1..741: note = Description of Artificial Sequence: Synthetic coding sequence
  source 1..741: mol_type = other DNA
atgaccatggacaagagcgagctggtgcagaaggccaagctggccgagcaggcagagaggtacgatgacatggccgctgcaatgaaggccgtgaccgaacaggggcatgaactgagcaacgaagagcggaaccttttatctgtggcttataaaaacgtcgtgggcgctcggcgatctagttggcgggtgatttctagcatcgagcaaaagaccgagcgaaacgaaaagaaacaacagatgggcaaggaatatagagaaaagatagaagcagaactgcaggatatctgtaatgacgtgctggagcttctggacaaatacctcatccccaatgccactcagcccgagagcaaggtgttttatctgaagatgaaaggtgattacttcagatatctgtccgaagtggcatccggagacaacaagcagacaactgtgtccaatagccagcaagcgtaccaggaggcatttgaaatttccaagaaggaaatgcaacccacccatcctattcggttaggcctcgccttgaatttttccgtattctactacgagatcctgaattctcccgagaaagcatgtagcctggcaaaaaccgcttttgatgaggccattgctgaattggatacccttaatgaggaatcatataaggactccaccctgatcatgcagttgctgcgggacaacctgaccttgtggacttccgagaaccagggggatgaaggcgacgccggcgagggcgagaattag

SEQ ID NO: 210364 - DNA, 741 bp, synthetic construct
  misc_feature 1..741: note = Description of Artificial Sequence: Synthetic coding sequence
  source 1..741: mol_type = other DNA
atgaccatggacaagagcgagctggtgcagaaggccaagctggccgagcaggcagagagatatgacgacatggcagctgccatgaaggctgtgactgaacaggggcacgaactgtcaaatgaggaacggaatttactgtcagttgcatataaaaacgttgtcggggcaagacgtagcagctggcgtgttatctcctctattgaacagaaaaccgaaagaaacgaaaaaaagcagcaaatgggaaaagaatatcgcgaaaagatcgaagcggaactgcaggacatctgcaacgacgttttggagctgctggacaagtatctgattcccaatgcaactcaaccggaaagcaaggttttttacctgaaaatgaaaggcgattacttccggtacctaagtgaggtggcgagcggggataataaacagacgaccgtgagtaacagccaacaggcgtaccaggaagccttcgagatcagcaagaaggaaatgcagcccactcatccaatacggctgggactcgccctaaatttcagcgtcttctactacgaaatccttaacagccctgagaaggcttgttccctggctaaaaccgctttcgacgaagccattgcagaactggacactctcaatgaggaaagctacaaggactcaaccttgattatgcagcttttgcgcgataacctaaccctgtggacatctgagaatcagggggatgaaggagatgcaggggaaggcgaaaactag

SEQ ID NO: 210365 - DNA, 303 bp, synthetic construct
  misc_feature 1..303: note = Description of Artificial Sequence: Synthetic coding sequence
  source 1..303: mol_type = other DNA
atgaccatggacaagagcgagctggtgcagaaggccaagctggccgagcaagctgaacgctacgacgacatggccgcggccatgaaggctgtaaccgaacaaggccacgaactgtctaacgaggaacgcaatctactgtctgtggcgtataaaaatgttgtgggagcaaggaggtcatcatggcgggttatatcctcgatcgagcagaagactgaaaggaacgaaaaaaaacagcagatgggaaaagagtatcgggagaagatcgaggctgagctccaggacatctgtaacgatgtgctgtag

SEQ ID NO: 210366 - DNA, 225 bp, synthetic construct
  misc_feature 1..225: note = Description of Artificial Sequence: Synthetic coding sequence
  source 1..225: mol_type = other DNA
atgaccatggacaagagcgagctggtgcagaaggccaagctggccgaacaggctgagcgctacgatgatatggctgcggccatgaaagctgtcaccgagcagggccatgaactgagtaacgaggagagaaacttgctaagcgtggcctacaagaatgttgtgggggctagacggtcaagttggcgcgtaattagctctatagagcagaaaacggagcggaactag

SEQ ID NO: 210367 - DNA, 768 bp, synthetic construct
  misc_feature 1..768: note = Description of Artificial Sequence: Synthetic coding sequence
  source 1..768: mol_type = other DNA
atggacgaccgggaggacctggtgtaccaggccaagctggccgagcaagcggagaggtacgatgaaatggtcgagtctatgaaaaaggtagctggaatggacgttgagctgactgtcgaggaaagaaatctgctttcagtcgcatataaaaatgttattggtgcccggagggcgtcctggcggataatcagttccatcgagcaaaaagaggaaaataagggaggagaggacaaactcaaaatgatcagagaataccgccagatggtggaaacagaactgaaactgatctgttgcgacatcctggacgtgctagataaacatctgatacctgccgcgaacaccggcgagagcaaggtattctactataagatgaaaggcgattatcaccgatatctcgccgagttcgccaccggcaacgacagaaaagaggcagcagaaaattcgttagtcgcctataaggcagcatccgatatagcgatgactgaactgccgcccacccaccctataagactcggcctcgctctcaacttttcagtattctactacgaaatacttaactcacccgacagagcttgtcgactcgccaaggccgccttcgacgacgccatcgctgagctcgatacgttgtccgaagagtcatataaggatagtactttgatcatgcaacttctgagagacaatctgactctgtggacttctgacatgcagggagacggggaagagcagaataaggaagcattgcaagatgtggaggacgagaaccagtag

SEQ ID NO: 210368 - DNA, 702 bp, synthetic construct
  misc_feature 1..702: note = Description of Artificial Sequence: Synthetic coding sequence
  source 1..702: mol_type = other DNA
atggtggagagcatgaagaaggtggccggcatggacgtggagctgactgtggaggagcgtaacctgctcagcgtcgcctataagaatgtgattggggcacggcgagcatcttggagaatcattagtagcatcgagcaaaaagaagagaacaaaggaggggaggacaagttgaagatgatccgcgagtacaggcaaatggtcgagactgaactgaagcttatctgctgcgacattctcgacgtcctggataagcatctgattccagccgctaacaccggtgagtctaaagttttctattacaagatgaagggtgattaccatcggtacctggcagagtttgctactgggaacgacagaaaggaagccgccgaaaattctctagtggcttacaaagctgcatcggatatagctatgaccgagcttccaccaacccatcccatcagactgggactggccctcaatttcagcgtgttttattacgagatcctgaacagcccagatcgggcttgtaggttagctaaggcagccttcgatgatgctatcgctgagttggatacccttagtgaggaaagctacaaagactccacccttatcatgcagctgctgcgagacaatctgacactgtggacatccgacatgcaaggtgacggggaggaacaaaataaagaagcactccaggatgttgaagatgagaatcagtag

SEQ ID NO: 210369 - DNA, 744 bp, synthetic construct
  misc_feature 1..744: note = Description of Artificial Sequence: Synthetic coding sequence
  source 1..744: mol_type = other DNA
atggtggaccgggagcagctggtgcagaaggcccggctggccgagcaggctgaacggtacgacgatatggcagcagccatgaaaaacgtaactgaactgaatgaacccctgtccaatgaagagaggaacctgctgtctgtcgcctacaaaaacgtcgtcggtgcgcgaagatcaagttggagggtcatttcctccatcgaacaaaaaacaagcgctgacgggaatgaaaagaagatcgaaatggttagagcctacagagagaaaatagagaaagaactggaggccgtatgccaggatgtgctctccctactcgacaattacttaatcaagaattgttccgaaacgcagtatgaatctaaagtcttctatctcaaaatgaagggcgactactacaggtatctggcagaggtggccaccggggagaagagggccacagtggttgagtcatctgagaaagcatactctgaagctcatgaaatcagtaaggaacacatgcagcctacacatcccatccgacttggcctagccctgaattactctgtcttttactatgagattcagaatgctccagagcaggcctgtcatttagctaaaacagccttcgatgacgctatcgccgagctggacacgctgaacgaagattcttataaggattccacactgataatgcagctacttcgggataacctgacactctggacatctgatcagcaagatgacgatggcggtgagggtaacaattag

SEQ ID NO: 210370 - DNA, 624 bp, synthetic construct
  misc_feature 1..624: note = Description of Artificial Sequence: Synthetic coding sequence
  source 1..624: mol_type = other DNA
atggtggaccgggagcagctggtgcagaaggcccggctggccgagcaagctgagaggtatgatgatatggcagcagccatgaagaatgttacagaactgaacgaacccctgagtaacgaggaaaggaaccttctctctgtcgcctataagaatgtggtgggagccaggaggagctcctggcgagttatatcgagtattgaacaaaaaacatccgccgacggcaacgaaaaaaaaatcgagatggtcagggcgtatcgcgaaaagatcgagaaggagctcgaggccgaggtggctaccggcgaaaaaagggccacagtggttgagagctcagagaaggcttacagcgaggcacatgaaattagcaaagagcacatgcagcccacacatcctatacgcctgggcttggcactgaattatagcgtgttttactatgagatccagaacgccccagaacaggcctgccacttggccaagaccgccttcgacgacgcgatcgcagagcttgatacgttgaatgaggacagctacaaggattccaccctgattatgcagctgctcagagacaaccttaccctctggacttctgatcagcaagacgacgacggcggggagggcaataattag

SEQ ID NO: 210371 - DNA, 678 bp, synthetic construct
  misc_feature 1..678: note = Description of Artificial Sequence: Synthetic coding sequence
  source 1..678: mol_type = other DNA
atggccgccgccatgaagaacgtgaccgagctgaacgagcccctgagtaacgaggagcggaatcttctgtctgttgcctacaaaaacgtggtcggcgcacgccggtcaagctggcgtgtcataagttccattgagcagaagacttccgctgacggcaatgagaaaaagatagagatggtgagagcctatcgggaaaagatagagaaggagctcgaggcagtgtgccaggacgtgttgtcgctgcttgataactacttgatcaagaactgttccgagacacagtacgaatcaaaggtgttctacctaaagatgaaaggtgattattaccgctacttagcagaggttgcaaccggggagaagcgggcaactgtagttgaatcctcagagaaagcatactccgaagctcatgagatcagcaaggagcacatgcagccaacacatcctattcggctcgggctggcgctgaactacagtgtgttttactatgaaatccagaacgcccctgagcaggcttgtcacttggctaagactgcgttcgatgacgcgatcgcagaactagacaccctgaacgaggactcttacaaagatagtacgctgataatgcagctcctgcgggacaacctgaccttgtggacctcggaccaacaggacgacgatggcggagaagggaacaactag

SEQ ID NO: 210372 - DNA, 738 bp, synthetic construct
  misc_feature 1..738: note = Description of Artificial Sequence: Synthetic coding sequence
  source 1..738: mol_type = other DNA
atggacaagaacgagctggtgcagaaggccaagctggccgagcaggcggaacgctacgacgacatggcagcctgcatgaaaagcgtgaccgaacagggtgcagaactgtccaatgaggaaagaaaccttctgtctgttgcctacaaaaacgtggtgggggcaagaagatctagttggcgagttgtgtcatcaatcgagcagaaaaccgagggcgctgagaaaaagcagcagatggccagggagtatagagagaagatcgagaccgaactacgggacatatgcaatgatgtgctgtctctgctggagaaattcctgattccgaatgcctctcaagccgaatccaaagtcttctaccttaagatgaagggagattattatcgctaccttgccgaagtggccgccggcgacgacaagaaggggatcgtggatcagagtcagcaagcctaccaggaagccttcgaaatcagtaaaaaggagatgcagccaacacaccctatacggttgggtctagccctgaacttcagtgtgttttactatgagatcctcaactccccggagaaagcttgtagtcttgccaagaccgcgtttgacgaagcgattgcggagctggatactctgtctgaagagagctataaagactccactttaattatgcagctgctccgcgataacctgacgctttggacttcggatacccagggggatgaagctgaggctggagaaggtggcgaaaactag

SEQ ID NO: 210373 - DNA, 507 bp, synthetic construct
  misc_feature 1..507: note = Description of Artificial Sequence: Synthetic coding sequence
  source 1..507: mol_type = other DNA
atggcccgggagtaccgggagaagatcgagaccgagctgcgggacatctgtaacgatgtgttaagtcttctcgagaagttccttattcctaacgcctcacaggcagagagtaaagtcttttatctgaaaatgaaaggcgattattaccggtacttggctgaggtggctgccggcgacgacaaaaagggtattgtggaccagagtcaacaggcttatcaggaagcatttgagatcagcaagaaggaaatgcagcctactcacccgatcaggttaggcttggccctcaacttctcagtcttctactacgaaatcctcaactcccccgaaaaagcatgctcactcgcgaaaaccgctttcgatgaggccattgctgaactggataccttgtcggaggaaagctacaaagattctacactgattatgcaactcctccgcgataacctaaccctttggacctctgatacccagggcgacgaagccgaggccggtgagggaggcgagaattag

SEQ ID NO: 210374 - DNA, 738 bp, synthetic construct
  misc_feature 1..738: note = Description of Artificial Sequence: Synthetic coding sequence
  source 1..738: mol_type = other DNA
atggacaagaacgagctggtgcagaaggccaagctggccgagcaggccgaaagatatgatgacatggctgcctgcatgaaatcagtcactgagcagggagcagagctgagtaacgaggaacgaaacctgctgtccgtggcctacaagaacgtggttggcgctcgtagatcttcctggcgtgtagtgtcatctattgaacagaaaactgagggcgctgagaaaaaacagcagatggctagggagtaccgagagaagatcgagacggaactccgggacatctgtaatgacgtgctcagcttgcttgagaagttcctgatcccgaacgcaagccaggccgaatccaaggtgttttacttaaaaatgaaaggagattattatcggtacctggcagaggtggcagctggagacgacaagaagggaattgtggaccagtctcagcaggcctatcaagaagcctttgagatatcaaagaaggagatgcagccaacccacccaatcaggctcggccttgcactgaatttcagcgtcttctactacgagatcttaaacagtccggaaaaagcctgctctctagcgaagaccgcctttgatgaggcaatcgcggaacttgataccctttctgaggagtcatacaaggacagcactttgataatgcaattactgcgagacaatctcactctgtggacctctgatacacaaggagatgaagccgaagcgggagaaggcggagagaattag

SEQ ID NO: 210375 - DNA, 738 bp, synthetic construct
  misc_feature 1..738: note = Description of Artificial Sequence: Synthetic coding sequence
  source 1..738: mol_type = other DNA
atggacaagaacgagctggtgcagaaggccaagctggccgagcaggccgagcgctatgatgatatggcggcatgtatgaagagtgtgacggagcagggtgcagagttgtccaatgaagaacggaacctactgtcagtggcctataaaaacgtcgtgggcgcacggagatcttcctggcgcgtggtttccagcatcgaacaaaaaactgaaggggccgagaagaagcagcagatggctcgagagtaccgcgagaaaatcgagactgagttgcgggatatatgcaacgatgtattgtctcttcttgagaagtttctcattcccaatgcatcacaagccgaatctaaggtgttctaccttaagatgaagggagactattaccgctaccttgctgaagtcgctgccggagatgacaaaaaagggatcgtggatcagtcccagcaagcatatcaagaggccttcgaaatcagtaagaaagaaatgcagccaactcacccgattcggctaggactcgcgctgaatttctccgtcttctattacgagattttgaactctcccgaaaaggcttgcagcttggcaaagactgcttttgatgaagccatcgcagagctggacacactctctgaagagagctacaaggattctaccctgatcatgcagttgctgagagacaatcttacactgtggacatctgacactcagggcgacgaagcagaggcgggcgagggtggtgaaaattag

SEQ ID NO: 210376 - DNA, 738 bp, synthetic construct
  misc_feature 1..738: note = Description of Artificial Sequence: Synthetic coding sequence
  source 1..738: mol_type = other DNA
atggacaagaacgagctggtgcagaaggccaagctggccgagcaggccgaacgatatgatgacatggcggcctgcatgaagtcagtgaccgaacagggggccgagttgtcgaacgaggaacggaacttgctatcagtggcctacaagaacgtggtcggggcgaggcgatctagctggcgggtggtgtctagcatagaacagaaaacagagggtgccgaaaaaaagcagcagatggcccgcgagtaccgcgagaagatcgagacagagctacgcgacatctgcaacgacgtactttctcttctcgaaaaattcttaatccccaacgcctcacaggcagaatctaaagtcttttatttgaagatgaagggcgactactataggtacctggcggaggtagccgccggtgatgacaaaaaaggcatagtggaccagtctcagcaggcctaccaagaggctttcgagatctctaagaaggagatgcagcctacccacccaattaggctcggtttggccctgaacttctctgtgttctactatgagatcctgaattcacccgaaaaagcttgcagccttgcaaagaccgctttcgacgaggccattgccgaactggatactctgtccgaggagagctataaggactcaacgttgataatgcagttgctgcgggataacttgacactttggacttcggacacccagggggatgaggcagaagcaggcgaaggaggagagaattag

SEQ ID NO: 210377 - DNA, 738 bp, synthetic construct
  misc_feature 1..738: note = Description of Artificial Sequence: Synthetic coding sequence
  source 1..738: mol_type = other DNA
atggacaagaacgagctggtgcagaaggccaagctggccgagcaggccgaaagatacgacgacatggccgcttgcatgaaatctgtgaccgaacaaggagcagagctgagcaatgaagaaagaaacctgctgtccgtcgcatacaagaacgtagtgggggctaggcgatcatcctggcgggtggtttcatcaattgaacagaagaccgagggcgcagagaagaagcagcagatggcccgcgagtatcgagaaaagatagaaactgaactccgggatatctgtaatgatgtgctttctctcctcgagaaatttctcataccgaatgcctcacaggcagaatctaaagtgttttatctcaaaatgaaaggcgattactaccgctaccttgcagaggtagctgctggcgatgacaaaaaaggtatcgtcgaccagagtcaacaagcctaccaagaggcattcgagatttcaaagaaagagatgcaaccgactcacccaatcaggctgggcctggccctgaatttctccgttttttattacgagatcttgaactcccccgaaaaagcatgcagtctagccaagaccgctttcgacgaggctatcgccgaactagacaccttgagcgaggagtcttataaggatagcaccctaatcatgcagctgctgcgggacaatttaactctctggaccagcgatacacaaggggatgaagccgaggcgggagagggcggggaaaactag

SEQ ID NO: 210378 - DNA, 738 bp, synthetic construct
  misc_feature 1..738: note = Description of Artificial Sequence: Synthetic coding sequence
  source 1..738: mol_type = other DNA
atggacaagaacgagctggtgcagaaggccaagctggccgagcaggccgagaggtatgacgacatggccgcctgcatgaagagcgtgacagagcagggggctgagttgtcaaatgaagaacggaatcttctgtccgtagcttataaaaacgtagtgggcgcgcgccgctcaagttggcgagtcgtgagttccatcgagcagaagactgagggtgcagagaaaaagcagcaaatggctcgcgagtatcgtgagaagatcgaaacagaattacgtgatatttgcaacgacgtgttatcactgctggagaagttcctcatccctaacgcaagtcaggctgagagtaaagtgttttatctgaaaatgaagggggactattatcgctaccttgcagaggtggccgcaggcgatgataaaaaagggattgtggaccagtcccagcaagcctaccaggaagccttcgaaatttcgaagaaagagatgcaacctacccaccccatcagactgggcttggctctgaacttttcagtcttttattacgagatcctgaatagccctgaaaaggcctgtagcttagcaaaaaccgcgtttgacgaggcaattgccgagcttgatacactatccgaggaatcttacaaggatagtacgttgatcatgcagctccttagagacaacctcactctctggacatcagacacacagggcgacgaagcggaggccggggaaggcggagagaattag

SEQ ID NO: 210379 - DNA, 297 bp, synthetic construct
  misc_feature 1..297: note = Description of Artificial Sequence: Synthetic coding sequence
  source 1..297: mol_type = other DNA
atggacaagaacgagctggtgcagaaggccaagctggccgagcaggctgaacgatacgacgacatggccgcttgtatgaaatctgtgaccgagcagggcgccgagctgtccaacgaggaaaggaatctacttagcgttgcatacaagaacgtcgtaggcgccagaaggtcttcttggcgagtggtgtctagtattgagcagaagaccgagggggcagaaaagaaacaacagatggccagggaatatagggaaaaaatcgagactgaactgagagatatctgtaatgatgtattgtag

SEQ ID NO: 210380 - DNA, 738 bp, synthetic construct
  misc_feature 1..738: note = Description of Artificial Sequence: Synthetic coding sequence
  source 1..738: mol_type = other DNA
atggacaagaacgagctggtgcagaaggccaagctggccgagcaggctgaaagatacgacgacatggccgcatgcatgaagagtgtgaccgagcagggggccgagttgagtaatgaagaacgcaatcttcttagcgtggcctacaaaaacgttgtgggggccagacgttccagctggcgggtggtgagctcaattgaacagaaaaccgaaggggccgagaaaaagcagcagatggcgagagagtatagagagaaaatcgaaactgaactcagggatatctgtaatgacgtgctttcactcttggagaagtttttaatccctaacgcatcacaagctgagtcaaaagtcttctacctaaagatgaaaggcgactactaccggtacttggccgaggtggccgccggagacgacaagaagggcatcgtcgaccagtctcagcaagcttatcaggaagctttcgagatatccaagaaagaaatgcagcctacacaccctatcaggctggggctcgctctgaactttagtgtattctactatgaaatactaaacagccccgaaaaagcctgcagcctggcaaagacagccttcgacgaggccattgctgaactggatacgttatcagaagaaagttacaaagactccacactcataatgcagctcctgcgcgacaacctgacactgtggacctctgatacccagggagatgaagcggaggccggagaaggaggcgaaaactag

SEQ ID NO: 210381 - DNA, 279 bp, synthetic construct
  misc_feature 1..279: note = Description of Artificial Sequence: Synthetic coding sequence
  source 1..279: mol_type = other DNA
atggacaagaacgagctggtgcagaaggccaagctggccgagcaggctgagaggtacgacgacatggccgcttgcatgaagtctgtcaccgaacaaggtgccgaactctcaaatgaagaacggaaccttttaagcgtggcctacaaaaatgtcgtgggtgcccgccggtcttcctggcgggtagtgtcaagtatagagcagaaaacagaaggcgctgagaagaagcaacaaatggctcgtgaatatcgggagaagattgagactgagcttcgagactag

SEQ ID NO: 210382 - DNA, 738 bp, synthetic construct
  misc_feature 1..738: note = Description of Artificial Sequence: Synthetic coding sequence
  source 1..738: mol_type = other DNA
atggacaagaacgagctggtgcagaaggccaagctggccgagcaggcggagcgctacgatgatatggcagcatgcatgaagagcgtcacggagcagggagccgagctatcaaacgaggagaggaatttactgtcagttgcatacaagaatgtggtaggcgcccgacgttcatcatggagagttgtatcgagcatcgaacagaagaccgaaggcgcagagaaaaaacagcagatggcacgggagtatagggagaagatcgaaaccgagctgagggacatatgcaacgatgtgctgtctctgctggagaaatttcttatcccaaacgccagccaggcagagtcgaaagtcttctacctcaagatgaagggagactactatagatatctcgccgaagtcgccgctggagatgataagaagggcattgtagaccagagccaacaggcctatcaggaggcttttgagatctccaagaaagagatgcaaccaactcaccccataagacttggtcttgccctgaatttcagcgtgttctactacgagatcctgaactcccccgagaaggcctgctcactggccaagacggccttcgacgaggctatcgcagaacttgataccctttctgaggagtcctacaaggactccacactgattatgcaattgctgcgagacaatctcaccctgtggactagtgatactcagggggacgaggcagaggctggggagggaggagaaaactag

SEQ ID NO: 210383 - DNA, 507 bp, synthetic construct
  misc_feature 1..507: note = Description of Artificial Sequence: Synthetic coding sequence
  source 1..507: mol_type = other DNA
atggcccgggagtaccgggagaagatcgagaccgagctgcgggacatttgtaacgacgtgttgtcccttttggaaaaattcctcattccaaatgcctctcaggctgaaagtaaagtgttttaccttaaaatgaagggtgactactatagatacctggcagaggttgccgcgggggatgataagaaagggattgttgatcagtcacagcaagcgtatcaggaggcttttgagatttccaagaaagagatgcaacctacacatcccatccggttgggacttgcgcttaactttagcgtattttactatgagatcctgaattccccggaaaaggcctgttctctcgccaagacagcttttgacgaggctatcgcggagctggataccctgtcagaggaatcctacaaagatagcacgctgataatgcaactcctaagggacaacttgactctgtggacatccgacacacagggggatgaggctgaagctggtgaaggcggcgaaaactag

SEQ ID NO: 210384 - DNA, 378 bp, synthetic construct
  misc_feature 1..378: note = Description of Artificial Sequence: Synthetic coding sequence
  source 1..378: mol_type = other DNA
atgaagggcgactactaccggtacctggccgaggtggccgccggcgacgataaaaagggaattgtcgatcagagtcagcaagcgtaccaggaagcatttgaaatcagtaagaaagagatgcaacctacgcacccaataaggctgggcctggccctgaatttttcagtgttttactacgagatcttgaactcccctgagaaagcttgcagcttagccaaaaccgcctttgacgaagctattgcggagctggatacgttatccgaggaatcctacaaagactccacattaatcatgcagctcttgcgcgacaacttgaccctgtggacaagcgacacacagggggatgaagccgaggcaggcgaagggggggagaattag

SEQ ID NO: 210385 - DNA, 414 bp, synthetic construct
  misc_feature 1..414: note = Description of Artificial Sequence: Synthetic coding sequence
  source 1..414: mol_type = other DNA
atggacaagaacgagctggtgcagaaggccaagctggccgagcaggcggaaagatacgatgatatggcagcttgtatgaagtccgtgaccgagcagggcgctgagctaagcaatgaggaaagaaatctactatcagtagcctacaaaaacgtcgttggcgcccgacgcagttcttggcgcgtggttagcagcatcgaacagaaaacagagggtgctgaaaaaaagcagcagatggccagagagtatagagagaagatcgaaaccgaactaagagatatctgtaatgatgtgttgagtcttctggagaagtttttgattcctaatgccagccaggcagagtcaaaagtattttacctgaagatgaagggtgattattacaggtatcttgccgaggtggccgcaggggatgactag

SEQ ID NO: 210386 - DNA, 741 bp, synthetic construct
  misc_feature 1..741: note = Description of Artificial Sequence: Synthetic coding sequence
  source 1..741: mol_type = other DNA
atggacaagaacgagctggtgcagaaggccaagctggccgagcaggcagagcgctacgacgatatggccgcctgcatgaaatccgtgaccgagcagggcgctgaattaagcaacgaggaacgcaacctactgtccgtggcctacaagaatgtagtgggtgcccgcaggtcctcctggagagtagtgagctcaatcgaacaaaagacagaaggtgccgagaagaaacagcaaatggctcgggagtatagggagaagatcgaaacagagctgagagatatatgtaatgacgtactttcactgctcgagaagttccttattccaaacgcatcgcaagccgagagcaaggtcttttacctgaagatgaaaggtgattattaccgctacctggcagaagtcgccgccggagacgacaaaaaagtaagatttggcgtgtcctatcctggaattgtcgatcaatcacagcaggcttatcaggaggcatttgagatctcaaagaaagagatgcagcctacacaccccattagactgggactggccttaaacttttctgtgttttattacgagatcctgaattcccctgaaaaggcatgcagcctggctaagacagcctttgatgaggctattgccgagctcgatactttgagtgaggagtcctataaggactccactttgatcatgcagctcctgagagacaacctgactctttggacatcagacacccagggtgacgaagcggaatag

SEQ ID NO: 210387 - DNA, 513 bp, synthetic construct
  misc_feature 1..513: note = Description of Artificial Sequence: Synthetic coding sequence
  source 1..513: mol_type = other DNA
atgagccagccctgccggaagctgtggcggcacaactacgagacctcaagctgcattgaattcttaaagagcctgctcgagaaatttctcatccccaatgccagtcaggctgaaagtaaagttttttatcttaagatgaaaggagactactatcgatacctggccgaagtcgccgccggtgacgataaaaaaggaatagtagatcagtcacagcaggcataccaggaggcattcgagatctccaagaaagaaatgcagcctacgcaccctattagactcggactggccttgaattttagtgttttttattacgagatacttaatagtccagaaaaagcatgcagcctggccaagaccgccttcgacgaagccatcgccgaactcgatacccttagtgaggagtcgtacaaggattcaaccctgattatgcagctgctgagagataacctgactctatggacctccgatacgcagggcgacgaagcagaggcgggtgagggaggagaaaactag

SEQ ID NO: 210388 - DNA, 378 bp, synthetic construct
  misc_feature 1..378: note = Description of Artificial Sequence: Synthetic coding sequence
  source 1..378: mol_type = other DNA
atgaagggcgactactaccggtacctggccgaggtggccgccggcgacgacaagaaaggtatcgtcgaccagtcacagcaggcttatcaagaggccttcgagatttccaaaaaagaaatgcaacccactcacccaatcagactggggctggccctgaactttagcgttttctattatgaaatcctgaattcccccgaaaaggcttgctcattagcaaaaaccgctttcgacgaggcgattgctgagctggacactctcagcgaggaatcatataaagattctactttgataatgcagctgctcagggacaatttgactttgtggacttctgatacccagggagatgaagccgaagcgggtgagggaggtgagaactag

SEQ ID NO: 210389 - DNA, 228 bp, synthetic construct
  misc_feature 1..228: note = Description of Artificial Sequence: Synthetic coding sequence
  source 1..228: mol_type = other DNA
atggacaagaacgagctggtgcagaaggccaagctggccgagcaggccgagaggtatgatgacatggccgcgtgtatgaagagcgtaaccgagcagggagcagagctgtccaacgaagaacgcaacctattaagcgtggcctacaaaaacgtggtcggggcaaggcgctccagttggagagtcgtgagttcgattgagcagaaaactgaaggggcagagaagaaatag

SEQ ID NO: 210390 - DNA, 393 bp, synthetic construct
  misc_feature 1..393: note = Description of Artificial Sequence: Synthetic coding sequence
  source 1..393: mol_type = other DNA
gtgttctacctgaagatgaagggcgactactaccggtacctggccgaggtagccgctggagacgataaaaagggaattgtggatcagtcccagcaggcatatcaggaggcctttgagatcagtaagaaggagatgcagcccacccaccccatcagactgggcctcgcgctgaatttcagtgtgttctattacgaaattctgaacagccctgagaaagcgtgcagcttggctaagaccgctttcgatgaggctatagccgagttagacacgctctcagaggaatcttacaaggactccacactgattatgcagcttctgcgcgataacttgactttatggacatctgacactcagggagacgaagctgaagctggcgagggcggcgaaaactag

SEQ ID NO: 210391 - DNA, 159 bp, synthetic construct
  misc_feature 1..159: note = Description of Artificial Sequence: Synthetic coding sequence
  source 1..159: mol_type = other DNA
atggacaagaacgagctggtgcagaaggccaagctggccgagcaggcagagcgttacgatgatatggctgcctgcatgaagtcagtgaccgaacagggggcagagctcagtaacgaagagagaaacctgctgtcggttgcctacaagaatgtcgtatag

SEQ ID NO: 210392 - DNA, 1224 bp, synthetic construct
  misc_feature 1..1224: note = Description of Artificial Sequence: Synthetic coding sequence
  source 1..1224: mol_type = other DNA
atgcccacccccgacgccaccaccccccaggccaagggcttccggcgggcagtgagcgagcttgatgccaagcaagccgaagctattatggtgcgcggccaatctccgcgctttattgggagaagacagagcctaatagaagacgctcgcaaggaaagggaagctgcggtggccgcagcagccgctgccgtgccttccgaaccaggcgatcccctagaggctgtggcattcgaggagaaggaaggcaaggccgtacttaacttactgttcagcccccgcgcgacgaagccatcagccctgtcacgtgctgtaaaagttttcgaaactttcgaagctaagatccaccatctagagactcggcccgcccaaaggcccagagccggtggaccacacctggaatactttgtgagactggaagtgagacgaggggatctcgctgctctgctctccggcgtgagacaggtgagcgaggatgtccgcagcccagccggtccaaaggtcccgtggtttccccggaaggttagtgaattggacaagtgccaccatctagtgacgaagttcgacccagatctcgacctcgaccatcccgggttcagcgaccaggtgtatagacagaggcgcaagctcatcgccgagattgcattccagtaccgccatggggatcctataccccgggtcgagtataccgcagaggaaatcgcaacatgggactgttgccacgagctgctggggcacgtgcctatgcttgctgatcggactttcgcacagtttagtcaggacattggactggctagcctgggtgcgtctgatgaagagatcgaaaaactctccaccctgtactggtttactgttgaatttggtttatgcaagcagaacggcgaggttaaagcttatggtgccggattattaagctcctacggcgaattactgcactgcctgtcggaagaaccggagatcagggccttcgacccagaagctgccgcggtgcagccctaccaggatcagacatatcagagtgtttacttcgtaagtgaatccttctctgatgccaaggacaagctgcgatcgtacgctagtaggatccaacgtcctttctctgttaagtttgatccttacacactggctattgatgtgctcgactcaccccaggctgtcagacgaagcctcgagggcgtgcaagacgagctggacaccctggcccacgccctctccgctatcggatag

SEQ ID NO: 210393 - DNA, 1494 bp, synthetic construct
  misc_feature 1..1494: note = Description of Artificial Sequence: Synthetic coding sequence
  source 1..1494: mol_type = other DNA
atgcccacccccgacgccaccaccccccaggccaagggcttccggcgtgctgtgtccgagctggatgctaaacaggccgaggcaatcatgagcccccggtttattggacgtaggcagtcccttatcgaggacgcccggaaggagagagaggcagccgtcgctgctgctgcggctgcagtgccttctgaaccgggtgacccactggaagctgtggccttcgaggagaaggagggaaaggcagtgttgaatttgctgttttccccccgcgccaccaagccgagcgcactcagccgggccgtcaaggtttttgaaacttttgaagcgaaaatccatcatttagaaacccggcccgctcagcgaccaagggctgggggcccccaccttgagtactttgtgaggctcgaggtgcgccggggcgacttggcagccttactatctggggttcgacaggtatccgaggatgtgcgctctcccgctggccccaaagtaccctggtttcctcgcaaggtaagtgaattagataaatgccaccaccttgtgactaagttcgaccctgacttggatctagatcatcccggattttctgaccaggtgtaccgccagcggcgaaaactgatagccgagatcgcattccagtaccgtcatggtgaccctattcctagggtcgagtacaccgcagaagaaatcgccacttggaaagaggtgtacaccaccttgaaaggcctgtacgccacacacgcctgcggcgagcaccttgaggcttttgccctgttggagcggttttctggctacagggaggataacatcccccagctggaagacgttagccggttcttaaaggaacggacgggctttcagctgaggcctgttgccggcttactctccgcacgcgactttctggcatctctggctttcagggtcttccagtgtacacagtacataagacatgcctctagtccgatgcatagccccgagcccgattgttgccatgaactcctaggtcatgtgccaatgctggcagacaggacgttcgcccaattctctcaggacataggccttgccagtctgggagctagcgatgaagagatcgaaaaattgtcaacactgtattggttcacagttgagttcggcctgtgtaagcagaatggggaagtgaaggcctacggggcagggctgctctcctcttatggggaacttctgcactgtctcagcgaagaaccggagatcagggctttcgaccccgaagccgccgccgtgcagccataccaggaccagacataccaatcagtgtacttcgtatccgaaagtttttctgatgcaaaggacaagctgcgcagttatgcctcaaggattcagaggcccttttccgttaaatttgacccttacactctcgcaatcgacgtcctggatagtccgcaggcagtgagacgttctcttgagggcgtgcaggacgagctggatacgcttgcccatgccctgtcagccatcggctag

SEQ ID NO: 210394 - DNA, 1575 bp, synthetic construct
  misc_feature 1..1575: note = Description of Artificial Sequence: Synthetic coding sequence
  source 1..1575: mol_type = other DNA
atgcccacccccgacgccaccaccccccaggccaagggcttccggagagccgtcagtgaactggacgcaaaacaggccgaagctattatgggtgctccaggtccctctttaacaggcagtccttggcctgggactgccgctcccgcagcctcatatacgccaacccctagatccccccgatttatcggcagacgacagtcgcttatcgaagacgccaggaaggagcgcgaggctgcggtggctgcggcagctgccgcggtgccttctgagcccggagatccccttgaagccgtcgcttttgaggagaaagaagggaaggcggttctaaatctactgtttagcccacgcgctacgaagccaagtgccctctcaagagccgtaaaggtattcgagacctttgaggccaagattcatcatctggaaaccagacctgcacagaggcctcgggcaggggggccccacctcgagtattttgttcgtttggaagtgaggagaggtgacctggccgccttattgagcggtgtgcgtcaagtgagtgaggacgttcgtagcccagccggaccgaaagtgccctggtttcctcggaaggtgagcgagctggacaagtgtcaccaccttgtcacgaagtttgacccagatctggacttggaccaccctggcttcagcgaccaggtgtatcggcagaggcgcaagctcatcgctgaaatcgcctttcaataccggcatggagatccaatcccccgcgttgaatatacggccgaagagattgccacatggaaggaggtctatactaccctgaaagggctttatgctacacacgcttgtggcgaacatttggaagcttttgcattattagaacggttcagtggatacagagaggacaacattccgcaacttgaagatgtttctcgctttttgaaagaacgaacaggtttccagctcaggccagtcgccgggctgctcagtgcccgggactttctggctagtctggcttttcgagtgttccaatgcacacagtacatccgccacgcctcgagtcccatgcattcccccgagcctgactgctgccatgaattgctgggccacgtgccaatgctggctgacaggacgtttgctcagttctcccaggacatcggtctcgcttccttaggcgcctccgacgaggaaatcgagaagctctcaactctatactggttcacggtagagtttggactgtgcaagcagaatggagaggtgaaggcctacggtgccggtctgctgtcaagttacggcgaactcctacactgtttaagcgaggagcccgagattcgggccttcgacccagaggcagccgctgttcaaccttaccaggaccagacctaccagtcggtatactttgtcagcgagtccttttctgacgccaaagataaactgcgcagttatgcatcacgcattcagcgaccctttagcgtaaaattcgatccctacacactcgctattgatgttctggacagtccccaggctgtccgacgctccctggaaggggtccaggacgaactggacaccttggcgcacgcgttatccgccatcggctag

SEQ ID NO: 210395 - DNA, 1587 bp, synthetic construct
  misc_feature 1..1587: note = Description of Artificial Sequence: Synthetic coding sequence
  source 1..1587: mol_type = other DNA
atgcccacccccgacgccaccaccccccaggccaagggcttccggagagccgtcagtgaactggatgccaaacaggccgaggccatcatggtacgaggtcaaggtgcccccggaccttccttgaccggaagtccatggcctggaactgcagccccagccgcatcctatacacccactcctagatctcccagattcatagggcgcagacagagcctgattgaggatgccagaaaagaaagagaagcagccgtggctgctgccgcagccgctgtgccttcagagccaggtgatcctctggaggctgttgcgtttgaggaaaaggaaggtaaagccgtgctaaatctactattcagccctagggctaccaaaccatctgccctgtctagggctgtgaaggtgttcgagactttcgaagcaaagatccaccatctcgaaacaaggcctgcccagaggccacgggccggagggccacacctagaatacttcgtacgactcgaggttcgacgtggtgacttggccgctctgttgagcggtgtacgtcaggtatctgaggatgtgcgttctccagcaggacctaaggtcccttggttccctcgcaaggtgagtgaactggacaaatgccatcacctggtgacaaaatttgaccctgatttggatctggaccaccccggtttctccgaccaggtctacaggcagagacggaagctgattgcagaaatcgcctttcagtatagacatggcgacccgatccctcgcgtcgagtacactgcagaggagatagccacctggaaggaggtgtacacgaccctgaagggcctatacgcaactcacgcctgcggggagcaccttgaggcattcgccctgctggaacgcttctcgggttatagagaagacaatattccacagttagaggatgtgtcacgctttcttaaggaaagaactggattccagttacggccagtggctgggctgctgtccgcacgggacttcctggcaagtcttgctttcagggtgttccaatgcacccagtatatccgccacgcatccagccctatgcactcaccggaacccgattgttgccacgaactcctcggccatgtgccaatgttggccgatagaaccttcgcccagtttagccaggatatcgggttggcctctctgggtgcgagtgacgaggagatcgagaagctgtccacgctgtattggtttaccgtggaatttggcctgtgtaagcagaacggggaagtcaaagcctacggcgctgggctgctgtcatcttacggggaactgttgcattgcctcagtgaggagccagagattcgggctttcgatcctgaggctgctgcggtgcagccataccaagaccagacttaccagagcgtctacttcgtgtctgagagcttcagcgacgccaaagataagctgagaagctacgcctccaggatccaacggccattttctgtgaagtttgacccttacacactggctattgacgttttggattctcctcaggccgtgaggcggtccctcgaaggtgtgcaagacgagctggacactctcgcgcacgccttgagcgccattgggtag

SEQ ID NO: 210396 - DNA, 3564 bp, synthetic construct
  misc_feature 1..3564: note = Description of Artificial Sequence: Synthetic coding sequence
  source 1..3564: mol_type = other DNA
atgcccctgcggcactggggcatggcccggggcagcaagcccgtgggagacggcgctcaacctatggccgcgatgggcggtctgaaggttcttctgcactgggctgggccaggaggcggcgaaccatgggtgacattctccgaaagctctctgaccgccgaagaagtgtgcatccatatagcccacaaagttggcattactcctccatgtttcaacctgttcgccttgttcgacgcccaggcccaggtgtggttaccccctaaccacatcctggagattcctcgcgacgcgtcgctcatgctctattttcgcatcagattttatttccgcaattggcacggcatgaacccccgcgaacctgctgtgtatcgatgcggaccaccaggcacagaggctagttccgaccagactgcacaaggcatgcagctactcgatccagcctcgttcgagtacctctttgaacagggcaaacatgagttcgtcaatgacgttgcctccctctgggagttgagtaccgaagaggaaattcatcatttcaaaaacgagtccctgggcatggcgtttctgcacttgtgccatctggccctgcgacacggcatcccactggaggaggtcgcaaaaaagacctcattcaaagactgcatcccacgatcctttagacggcacatccgtcagcacagcgcgctgacccggctgagactgcgaaacgtgtttcgccgcttcctgcgtgacttccagcccggaaggctgtcccaacagatggtgatggttaagtatctcgccaccctggaaaggctcgctccaaggtttggtacagagagggtgcccgtgtgccacctgcgcctgctggcacaagctgagggagaaccctgttacatcagagattctggtgtggcccctacggatccggggcccgaatccgccgccgggccacctacgcacgaggtcctggtgacagggacgggcggcattcaatggtggcctgtcgaggaggaggtaaataaagaagagggatcctccggttcaagcggcaggaacccccaggcctccctttttggcaagaaggccaaagcccataaggccgttggtcaacccgccgaccgtcctcgtgagcccttatgggcctatttttgcgattttcgcgatattactcatgtagtgctgaaagagcattgcgtatcaatccataggcaggacaataagtgtctcgaattatcgctgcccagccgagctgctgcactatcatttgtgtccctggtggatggttactttagactgactgccgactcctcccactacttatgccacgaggtggctccaccgcgcctcgtcatgtccatacgtgacggcatacatggtccgctcctcgagccctttgtacaggcaaagttgaggcctgaggatgggttgtatctaattcactggagcacctcccatccttacagactgatcctgacagttgcccagaggtctcaggctcccgacgggatgcagtccctccgcctgcggaaattcccgattgaacagcaggacggagctttcgttctcgaggggtggggaagaagcttcccttcagtgagagagctgggggccgcactgcagggctgtctgttgagggcaggtgacgactgcttcagcctgcgacgctgttgcctccctcagccaggtgagacatctaacctcatcattatgagaggtgctcgcgctagtcctcgaacgcttaatctgtctcagctttcttttcaccgggtagaccagaaagagatcacacagctgtcccaccttggccaaggtactcgcacaaacgtatacgagggcaggctccgggttgagggcagtggtgaccctgaagagggcaagatggatgatgaggaccccctggtgcctgggcgcgacagaggtcaggagctgcgtgtcgttttaaaagtcctcgacccctctcaccacgacatagcattggctttttatgagacagcatctctaatgtcccaggtatcgcacacacatctggctttcgtgcacggcgtgtgcgtgcgaggcccagaaaatatcatggtgaccgagtacgtagaacatggaccgctggacgtctggctgcggcgtgagcggggacatgtgccaatggcttggaaaatggtagtggcacaacagctcgcatccgccctgtcctacctcgagaacaaaaatctggttcatggaaatgtgtgtggtcgcaacattctgcttgcacgacttgggctagccgagggtacctcaccattcatcaagctgtccgaccccggggtcggtctaggcgcgctcagtagagaagagagagtggaacgaataccatggcttgctccagagtgtcttcccggaggcgcaaactctctctcgaccgcgatggataagtggggatttggcgctactctgctggagatatgttttgatggcgaagcgccactgcagtcaagaagcccatccgagaaggagcatttttatcagagacaacacaggctgccagaacccagttgtccccagttggcaaccctgacatcacagtgcctgacttacgagccgacacaacgacctagttttagaactattctgcgagacctcacccggttgcagccccacaatctagccgatgtgctgactgtaaaccccgacagtccagcatcagatccaactgttttccataaaagatacctgaaaaagataagagacctgggggaaggtcattttgggaaagtaagtctctactgctatgatcctacaaacgatggcacaggagagatggtcgccgtgaaggcactgaaagctgattgcggacctcagcatcgaagtggctggaaacaagagatcgatatccttaggaccctatatcacgagcacattatcaaatataaggggtgttgtgaagatcagggtgaaaagtccctgcagctggtcatggaatacgtccctttgggatccctgagagattatctccctcgccacagtataggactcgctcaattactgttattcgcgcagcagatctgcgagggtatggcctatttacacgctcagcactatattcaccgggatctggccgctcgtaatgtactcttggataatgaccgccttgtaaaaattggggactttggccttgccaaagccgttcccgaagggcacgagtattatcgtgtccgggaagatggcgattcccccgtgttctggtatgcgccggagtgtttaaaggagtacaaattttattacgcatctgatgtctggtccttcggcgtcacgctgtacgagttactgacacattgtgacagctctcaatcacctcctactaagttcctcgagctcattggtatcgcgcaaggacagatgactgtgctgcgcctgacagagttgctagagaggggtgaaaggctaccccgtccggataaatgtccatgcgaggtgtaccacttgatgaagaattgctgggagactgaggcttcattccgtcctacctttgaaaacttaattcccattctcaagaccgtgcacgagaaataccaagggcaagccccctctgtcttctccgtgtgttag

SEQ ID NO: 210397 - DNA, 3564 bp, synthetic construct
  misc_feature 1..3564: note = Description of Artificial Sequence: Synthetic coding sequence
  source 1..3564: mol_type = other DNA
atgcccctgcggcactggggcatggcccggggcagcaagcccgtgggtgacggtgcacagccgatggcggctatggggggcctgaaggttctgctccattgggccgggccaggggggggagaaccctgggtgaccttcagtgagagttctctgacagccgaggaagtgtgcattcatatagcgcataaggttggtataactccaccttgctttaatctttttgcactctttgacgcccaggctcaggtctggttgccccccaatcacattcttgagatccccagggatgcaagcttgatgttgtacttccgcatacggttttatttcaggaattggcacggaatgaaccccagagaacccgcagtgtatagatgcggcccaccaggaacggaggcctcttccgaccaaacagcacagggcatgcaactcctggaccctgcatcttttgagtatctctttgaacaaggcaaacacgaatttgtgaatgatgttgcctccctctgggagctgagtaccgaggaggagattcatcatttcaagaacgaaagtctcggaatggcctttttacatctgtgccacttggccctaaggcacggtattccactggaagaggttgctaagaagacaagcttcaaagattgtatccccagatcatttcgacgacatataagacaacattcggcccttactcggctccggctgcgcaatgtgttccggagatttctgcgagacttccagcccggtaggttatctcagcagatggttatggtgaagtacctagccaccctggagcgcctcgccccccgctttggcaccgagagggtgccagtttgccacttgagactgctcgcacaggccgaaggggagccttgttacatcagggactccggcgtggcacctacggatccaggccccgagtctgctgccgggcctcctactcacgaagtgcttgtgactggaaccggtggtattcagtggtggcccgtggaagaggaggtcaacaaggaagagggaagctcaggctcatctggaaggaatcctcaagcctcactgtttggaaaaaaggcgaaagcacacaaggcagtcggtcagcccgcggaccggccaagagagcccctgtgggcatacttttgcgacttccgggacattacacacgtggtgctgaaggagcactgtgtttcaattcatcgtcaggacaataagtgcctggagttaagcctgccctctcgcgcagccgccttgagctttgtgagcctagtagatgggtattttagactcaccgctgatagtagccattatttatgccacgaagtagccccccctcgcttagtcatgagtatcagggacggaattcacgggcccctgctggagcccttcgtacaagctaagctcaggcccgaggacggcctgtatttgatccattggagtacgagtcatccttatcgactcatactgactgtggcgcagagaagtcaggcgcccgatggcatgcagtccctgcggctccgcaagtttcctatcgagcagcaagacggggccttcgtactcgagggctggggcagatcattcccaagcgtgagggagttaggggcagctttgcaggggtgcttgctgagagccggcgacgattgctttagcttgaggcgctgctgcctgcctcagccgggcgaaacttcaaatctgattataatgcgaggagcacgagcgtcaccgcgcactctaaatctttcccagctcagcttccaccgagttgatcaaaaagaaataacccaattatcccaccttggccagggcacacggacgaacgtctacgagggcaggctgcgagtcgagggatccggggacccagaagagggaaagatggatgacgaagacccactggtgccagggcgcgatcgtggccaggagctgcgcgttgtgctgaaggtcctcgacccaagtcaccacgacatcgcacttgcattctatgagactgcatctttgatgtcccaggtgtcccacacacacctggcttttgtccacggcgtatgcgtccgggggcccgagaatattatggttaccgagtacgtggaacacggcccactggacgtctggctgagacgcgagcgcggacacgtccctatggcgtggaaaatggtcgtagcccagcaattagccagcgctttgtcttacctggaaaataagaatttagttcacggaaacgtctgcggtcgcaacattttactggctagactcggactagcggaggggacctccccttttattaagctcagcgacccaggtgtgggccttggcgcgctatcacgggaagaacgggtggaaaggatcccgtggctggcaccagagtgtctgccgggaggagcgaactcactttctaccgccatggacaaatgggggttcggcgccaccctcctcgaaatctgcttcgatggagaagctcccctgcagagtaggtctccctccgagaaagaacacttctaccagagacagcatagactgcccgagccgtcctgcccccagttggccactctcaccagtcagtgcttgacctatgagccaacccagcggccctcattccgaaccatcttgcgcgatctgacaagacttcagccacacaacctggccgatgtgctgaccgtcaatccggattctccagcttcagatcctaccgtgttccacaagaggtatctcaaaaaaatccgggatctaggagagggccactttggaaaggtgagtctgtattgctatgacccaacaaacgacggcaccggggaaatggtggcggtcaaggcgctgaaggccgactgcggtccccaacataggtctggctggaagcaggagattgacattctgcgcacgctgtaccacgaacacataatcaaatataagggctgctgcgaggaccagggcgaaaagtctctacagcttgttatggagtatgtcccactcggcagtctgcgcgactacctgcctcgacattctatcggacttgctcagctgcttctgttcgcacagcagatttgcgagggcatggcttacctacatgctcagcattacatacaccgggacctcgctgctcgtaatgttctcttagacaatgaccgcctggtgaagatcggcgattttggtctggcaaaagctgttccagagggtcatgagtattatcgtgtgcgagaggatggggattcgccggtgttttggtatgccccggagtgcctgaaggaatataaattttattacgcctcagatgtgtggtcttttggcgtaaccttatacgagctgctgacacactgtgactcctcacagtctccgccaactaagttcctggaattaatcggcattgctcaaggccaaatgacagttctccggctcaccgagttattggaacggggcgaacggcttccgcggcccgacaaatgtccctgtgaagtctatcaccttatgaaaaattgctgggagaccgaagcctcatttagacccacattcgagaacctgataccaattttgaagacagtccacgaaaaataccagggacaagccccctcagttttcagcgtgtgctag

SEQ ID NO: 210398 - DNA, 357 bp, synthetic construct
  misc_feature 1..357: note = Description of Artificial Sequence: Synthetic coding sequence
  source 1..357: mol_type = other DNA
atgcccctgcggcactggggcatggcccggggcagcaagcccgtgggggatggcgcccaacctatggccgccatgggtggcctgaaggttctgttacattgggccgggcccgggggcggagaaccttgggttacattttccgaatcatctctgaccgcagaggaggtgtgcatacatattgctcacaaggtcggcatcacaccaccttgctttaacctgtttgcactgttcgatgcacaagcccaagtctggttaccccccaaccatattctagagataccccgggacgcatcactaatgctctattttcgcattaggttctatttccgcaactggcatggtatgaatcctcgttag

SEQ ID NO: 210399 - DNA, 2805 bp, synthetic construct
  misc_feature 1..2805: note = Description of Artificial Sequence: Synthetic coding sequence
  source 1..2805: mol_type = other DNA
atggtgatggtgaagtacctggccaccctggagcggctggccccccgatttgggactgagcgcgttccggtgtgccatctcagactgctcgctcaggcagaaggagagccctgttacatcagggattctggcgttgcccctactgatcccggccctgagtcggctgcgggtccgcccacgcacgaggttctggtgacaggcaccggagggatccaatggtggcctgtggaggaggaagtgaacaaagaagagggcagctctggctctagcggtcggaacccccaggcaagcctgtttggtaagaaagccaaagctcacaaagctgtgggacagcctgcggaccgcccaagggaacccctctgggcctatttttgcgacttcagggatatcacccatgtggtgcttaaagaacattgtgtctcaattcatcgccaggacaataaatgtttggagctgagcttgcccagtcgcgccgctgcactgagctttgtgagcctggtggacggttactttcgcctgaccgccgatagcagccactatttgtgtcacgaagtggccccacccaggctggttatgtcaatcagagatggaattcatgggccgctactggagccattcgtgcaggctaaattgcggccagaggacgggctgtacctgattcattggtctacttctcacccataccgcctgattctgaccgtggcacagcgctctcaagcccctgatggcatgcagtcactgcgactcagaaaattcccgattgaacaacaggacggggccttcgttctagagggctgggggcgctcttttccctctgtgagagaactgggagcagccctgcagggttgtctgctgagggcaggtgatgattgcttttccctgcgtcgctgctgcctgccccagcccggagagacttcaaaccttattattatgcgcggggcccgggcgtcaccaaggaccctcaatttatcccaactttcatttcacagggtggaccagaaagaaataactcagttgagccacctggggcagggcactagaacgaacgtgtacgagggcaggctgcgcgtggaaggcagtggtgaccctgaggagggcaaaatggacgacgaagaccctcttgtccctgggagggatcgtgggcaggaacttcgcgtcgtactgaaggttcttgatccaagtcatcacgacatcgctcttgctttttacgagaccgcctctctgatgtcccaagtgtcacacacccatctggccttcgtgcatggagtttgtgttagggggccagagaacattatggtcaccgagtacgtggaacatgggccccttgatgtgtggctgcggagggagcgaggccacgtgccaatggcatggaaaatggtggtggcacaacaacttgcatcagctctatcatatctggaaaacaaaaacctggtgcatgggaatgtctgtgggcgcaatatcctgctcgcccgcctagggcttgccgaagggacttcacctttcattaagctgtcggaccctggagttggcctgggggctctgtcccgggaggagcgagttgaacgtattccttggctcgcccctgagtgtttgcctggcggagcaaatagcctcagtacagccatggataaatgggggttcggagccaccctactcgagatatgctttgatggagaggcccccctgcagagtcgctcaccctcagagaaagagcatttctaccaacggcagcatcgactacccgagccttcttgcccgcagctggcgaccttgacatcccagtgcctcacgtacgagccgacccaacggccaagctttaggaccatcttgcgggacctcaccagattgcagccacacaacctggccgatgtactgaccgtcaacccggattccccagcctctgacccaaccgtgttccacaaacggtacttgaaaaagatccgagacttgggggagggacattttgggaaggtgagcttgtactgctacgatcctacgaatgacggcaccggggaaatggttgccgtcaaggccctgaaggctgattgtggaccgcagcacagatccggctggaagcaggaaatcgatattcttaggaccctgtaccacgaacatataatcaaatacaaaggctgctgcgaagatcagggtgaaaagtccttgcagttagtcatggaatatgtccctctaggctctctccgcgactaccttccaagacactctattggcctggcccaattgctcttatttgcccagcaaatctgcgagggaatggcatacctgcacgcccagcactatatccatcgcgacttggccgcccggaatgtgttgctggacaacgatcggcttgttaaaataggcgacttcggtcttgcgaaagccgttcccgaaggccacgagtattaccgggtgcgggaagatggcgactcaccagtgttctggtacgctcccgagtgcctgaaggagtataaattctactacgcgtcagatgtctggagctttggtgtgaccctgtacgagcttttaacccattgcgacagtagtcagtccccccctaccaagttcctagaactcatcgggattgcccagggacagatgaccgtcctccggttgaccgagctcctcgaacggggcgaacgacttcctagacccgataagtgcccctgtgaagtgtaccaccttatgaagaactgctgggagaccgaggcttcttttcggccaaccttcgaaaacctgatcccgatacttaagactgtgcacgaaaaataccagggtcaggccccatccgtgttcagtgtgtgctag

SEQ ID NO: 210400 - DNA, 1986 bp, synthetic construct
  misc_feature 1..1986: note = Description of Artificial Sequence: Synthetic coding sequence
  source 1..1986: mol_type = other DNA
atgctgcccgaggccggcagcctgtggctgctgaagctgctgcgggatatacagctggctcaattctactggcccatcctggaggagctaaatgtgacacgccccgaacacttcgacttcgtaaagccagaagacctagacggcatagggatgggccggcctgctcagcgtcggttaagtgaagccctgaaacgactacgctccggtcctaaaagtaagaactgggtgtataaaatcttagggggtttcgcccccgagcacaaagagcccaccctgcccagtgacagcccaagacacttacccgaaccggaggggggcctcaaatgcctcatcccagagggcgcagtgtgtcggggtgagctgctggggtctggttgtttcggggtggtgcatcgtggcctctggactctgccctccggcaaatccgttccagtagccgtaaagtcgcttagagtgggccctgaaggtcccatgggcacagagctgggtgacttcctgagagaggtgtccgtgatgatgaacctagaacacccacacgtcctgcggttacatgggctcgtgctgggccaaccactacagatggtgatggaacttgcccccctcggatctctacacgcacgcctcaccgcaccagcgcccacgcctcccttattagtcgccctgctttgcttgtttctgagacagctcgctggggccatggcatacctgggcgctagggggctggtgcatcgcgacctagcaacaaggaatctcttgctagcatccccacgcacgattaaagttgcggattttggcctggttagacctctcggaggcgcccggggaagatacgtgatgggagggccccggcctattccatatgcctggtgcgcccccgaatccctgagacacggtgcgttcagcagtgctagcgatgtttggatgtttggagtcacattatgggaaatgttctccggaggggaagagccatgggccggcgtgcccccctacctcatacttcagcggttagaggatcgggccagattacccaggcctccactgtgttcgagggccttatactcccttgccctgcggtgttgggcccctcaccctgcagataggccctctttcagtcacctggaaggattgctgcaggaagctggcccctcggaagcttgctgcgtcagggatgtcaccgaacccggggcgctgcgaatggaaactggggatccaataactgtcattgagggtagccctgactctaccatttggaagggacagaatggcagaacgtttaaggttggcagttttccagcttcagccgttacactggcagatgcgggcggactgcctgccacccgacctgttcacaggggtacacccgcccgaggagaccaacacccagggtcgatcgacggggataggaaaaaggctaatctatgggacgcaccacctgccaggggtcagcggcggaatatgcctctggaacgcatgaaggggattagcagaagcctggagtctgtgctgtccctgggtccccgtcctactggcggcgggtcaagtcctcccgagatacggcaggccagggcagtcccgcaaggaccaccaggtttaccacctcgacccccactgtcctcctcctcaccacagccaagccagccctcccgtgaacggctgccatggcctaaacgcaagccaccccacaatcatcctatggggatgcctggggcacgaaaggccgctgcattaagcggcggtttgctcagtgatcccgagcttcagagaaagattatggaagtggaactgtccgtccatggagtgacccaccaggaatgtcagactgcactcggagccactggaggagatgtcgttagcgcaataagaaacctgaaagtggaccagctgtttcatctcagctcacggtccagggcagattgttggaggatcctggagcactaccagtgggacctgagcgctgctagccgatacgtccttgctagaccgtag

SEQ ID NO: 210401 - DNA, 1986 bp, synthetic construct
  misc_feature 1..1986: note = Description of Artificial Sequence: Synthetic coding sequence
  source 1..1986: mol_type = other DNA
atgctgcccgaggccggcagcctgtggctgctgaagctgctgcgggacatccagctcgcacagttctattggccaatcctggaagaactaaatgtgactcggcctgaacacttcgattttgtgaaacctgaagacctggacggcattggaatgggccggcctgcacagcggagattatccgaggctctgaagaggctccgctctggacccaaaagcaagaactgggtgtacaagatacttggaggcttcgcccccgagcacaaagagcccactttgcccagcgacagcccccgccacctgcccgaacccgagggaggtctgaagtgtctgatcccagagggggctgtgtgtagaggggagttgctgggctctggttgctttggcgtggtgcatcgtggcctttggaccctgccctcgggtaagagcgtgcctgtcgccgtgaaatctctgagagtggggcccgagggtcctatgggtacagagctaggcgacttcctgcgggaggtaagtgtgatgatgaacctggagcacccacatgtgcttcgcttgcacgggctcgtgctgggacagccactgcaaatggtaatggagctggctcctctgggcagcctccatgctaggctgacagccccagccccgacaccaccgctcctggttgcactgctttgcctgttcctgagacagctcgctggcgcaatggcatatcttggggcccgcgggttggtgcaccgagacctagcaaccaggaacctgctcttggcatcacctagaaccattaaggtagccgacttcggactggttagacccctgggcggtgcgagaggacgatacgtaatgggcggacccagaccaataccgtatgcctggtgtgcccccgagtctcttcgtcatggagcattcagctctgcctccgacgtgtggatgtttggagttacactctgggagatgttttctgggggcgaagagccatgggccggggtcccgccctatcttattctacagcgcctggaagacagggcgcgactcccaaggcctcccctctgcagcagggcgctctactccctggcgctacggtgttgggccccccacccagccgatcggcccagttttagtcacctcgaggggttactgcaagaagccggaccaagcgaagcatgttgcgtgcgggacgtgacagaacctggagcactcagaatggaaaccggcgatccaatcaccgtgatcgaggggtcgcccgactctacaatctggaagggccagaacggcagaactttcaaagtggggagttttcccgcgtctgccgttaccctggccgacgcggggggattacctgccaccagacccgtacaccgaggaacacctgcacgcggggaccagcaccctggcagtatcgacggggatagaaagaaggccaacctgtgggatgccccccctgctcgaggccagcggcgcaacatgcccctcgaacgtatgaagggaatctcacgctccctagaaagcgtacttagcctcgggcccaggccaacaggaggggggtcttcaccccctgaaattcgacaggccagagctgtccctcaagggccccctggcttgccccctagacctccactcagtagcagttccccccagccttcgcaaccatcgcgcgagcgtttaccatggccaaagcggaaaccaccccataatcaccctatggggatgcccggggccaggaaggctgcagctctgagcggcggcctgttaagcgatccggaacttcaaaggaagattatggaagtggagctgtccgtccacggcgtcacgcaccaggagtgtcagactgccctgggcgccacaggaggggatgtggtttccgcaatccgtaatctaaaggtggatcagctattccacctctctagccgctctagagccgactgctggcgcatccttgaacattaccaatgggatctctctgctgcaagtcggtacgtcttggcaaggccatag

SEQ ID NO: 210402 - DNA, 1587 bp, synthetic construct
  misc_feature 1..1587: note = Description of Artificial Sequence: Synthetic coding sequence
  source 1..1587: mol_type = other DNA
atgcagcccgaggagggcaccggctggctgctggagctgctgagcgaggtgcaattacagcagtactttctcaggctgagagatgatttaaatgttacgcggctcagtcatttcgaatatgtaaaaaacgaagatctggagaagattggtatgggaagaccaggccagcgcaggctgtgggaggcagtaaaaagacgtaaagccttatgcaagaggaagtcttggatgagcaaagtcttttcgggcaaaaggctcgaggctgaattcccccctcaccattcacaatcgaccttccgtaaaactagtccggcccctgggggtcccgctggagaaggaccactgcaatcgctaacctgtctgatcggggagaaggatctgcgcctcttagagaagctgggcgatgggtctttcggtgtggtccgcagaggagagtgggatgcaccctcaggaaaaacggtcagtgtcgcagtgaagtgccttaaacccgacgtgttaagtcaaccagaagcaatggacgatttcatccgcgaggtgaatgctatgcattctctggaccatcgaaatttgattcgcttgtacggagtcgtgttgactccgccaatgaagatggtgactgagctggcaccgctgggatcactgctggatagactacgaaagcaccaggggcactttctgctcggaacactgtccaggtacgccgtacaggtggcggagggtatgggctacctcgagtccaagcgatttatccatcgcgatctggctgcgcgtaacttgctgttagcaacacgggacctggttaagatcggcgacttcggattgatgagggcccttcctcagaacgatgaccattacgtaatgcaagaacatcgcaaggtgccattcgcctggtgtgcccccgagtccctgaaaaccaggacatttagccacgccagcgatacttggatgttcggagtgacactttgggaaatgttcacatatggccaagagccatggattggcctgaacgggagtcagatcttgcataaaattgacaaggagggcgagagactgccgcgaccggaagactgtccacaagacatctataacgtaatggtgcaatgttgggcgcacaaacccgaagatagaccgacctttgtcgccctgcgggacttcctgcttgaggcccagccaactgatatgcgggctctccaagactttgaagagccagacaagctccatattcagatgaatgacgtcatcaccgtgatcgagggacgggccgaaaactattggtggcggggacagaatactcgaaccttatgtgtggggcccttcccacgcaacgtggtaacgtccgtggccgggctgtccgcacaggatatttcccagcccctccagaatagcttcatccataccggacacggcgatagtgatccccgccactgttggggatttcctgacaggatcgatgagtgtccgttctccgccttctctccaggtcatccaccagctgagacgtgtggtcaggtgctgtggaccggccgccgtgaggcatgcgcttcagacccacgattgcatcctgtgtcttctcggactaagggcctctag

SEQ ID NO: 210403 - DNA, 3117 bp, synthetic construct
  misc_feature 1..3117: note = Description of Artificial Sequence: Synthetic coding sequence
  source 1..3117: mol_type = other DNA
atgcagcccgaggagggcaccggctggctgctggagctgctgagcgaagtgcagcttcagcagtacttcctgcggttaagggacgacttgaacgtaactagactctcccactttgaatatgtgaagaacgaagatcttgagaagatagggatgggccgtcccggacagcgtaggctgtgggaagctgtgaaacggcgcaaggccctctgcaagcggaagtcctggatgtcaaaggtcttctcgggcaaacggctggaagccgagtttccaccccaccacagtcagtccacctttaggaagaccagccctgcacccggtgggcccgccggggagggacctcttcagtccctcacatgcttgatcggggaaaaggatcttagactgctcgagaagcttggcgacgggtcttttggagtggttcggcgcggggagtgggacgcccctagtgggaaaactgtgagcgtggcagtgaagtgcctaaagcccgacgtactgtctcaacccgaagcaatggatgacttcatacgggaagtcaacgcaatgcattccctggaccatcggaatctgatacggttgtacggcgtggttctcacccccccgatgaagatggtgacagaactagcccctctgggatcactattagacagacttcgtaagcaccagggacattttctccttggtaccctatcgcgttacgccgtacaggtggcagaaggcatgggctatctggaaagcaaaaggttcatccacagggacttggccgctaggaatttgctcctagccactcgcgatttagtcaaaatcggcgattttggactgatgagggcactgcctcagaatgacgatcactacgtgatgcaagagcatcgcaaagtaccgttcgcgtggtgtgcccctgagagcttgaaaacaaggacattctcgcacgcgagcgacacctggatgttcggagtgacgctttgggaaatgtttacatacgggcaggagccgtggattggtctcaatggctcccagatcctgcacaaaatagacaaagaaggcgagaggttgccgcgaccggaggattgcccccaggatatctataacgtgatggttcagtgttgggcacataagcctgaggacagacctactttcgtggctctgcgcgacttcttgctcgaggcacagcccaccgacatgagggcgctgcaagacttcgaagagccagacaagctccacatccagatgaatgatgttatcaccgtcattgagggcagggccgaaaattattggtggaggggacagaacaccagaacactttgtgttggtcctttcccgcggaacgtcgttacttcagttgccgggctgagtgcgcaagacatcagccagccgctccagaatagcttcatccacactggtcacggtgattctgatccgaggcactgctggggattccctgaccgcatagatgagctatatctgggaaatccgatggacccgcccgatttactctctgtggaactgtctacctctagacctcctcagcacctgggtggagtcaagaagcccacctacgatccagtctctgaggaccaggaccctctgagctctgacttcaagcgactgggactgcggaagcccgggctcccccgcggcctgtggctggcgaaacccagcgcccgggtccccggcactaaggcttcaagggggtcgggcgctgaggtcaccctgattgattttggggaagaaccggttgtgcccgccttgcgcccatgcgcaccatccttggctcagttagccatggatgcctgctccctgctcgacgagacccctcctcagagccccacccgcgcattgcctcggccactgcaccccacccccgtggtcgactgggacgctcgcccattaccaccacccccggcttacgacgacgtcgctcaggatgaggatgactttgaaatatgttccatcaatagtaccctggtgggcgctggtgtccctgcaggaccttctcaggggcaaactaactacgcatttgtgcctgagcaagcacggcctcccccccctctcgaggacaacttgttcttgccccctcaggggggaggaaaaccgccttcatccgcacaaaccgctgaaatattccaagctctccaacaggagtgcatgaggcagcttcaagcaccggcgggctctccggctccgtcgccaagccctgggggcgatgacaagccccaggtgcctccgcgcgtgccgatcccacctcgccctacacgcccccatgtgcagctctctcccgcaccaccaggagaggaggaaacctctcagtggcccggaccggcaagccccccacgtgttcctcctcgggaaccacttagtccccagggttctcggacaccctctcccttagttccacctggatcaagtcccctgccgccacgcttaagcagcagccccgggaaaaccatgccgaccactcagtccttcgctagcgatcccaagtacgctaccccccaagtgatccaggctccaggaccgcgcgctggcccgtgcatccttcccatcgtgcgtgatggaaaaaaggtcagcagcacccattactatctgcttcccgagcgtccaagctatctagaacgctatcaaaggttcctgcgtgaggctcaaagtccagaggaacccaccccattacccgtccctttgctcctgccacctccatcaacaccagcaccagcagcccccacagccactgtcagacctatgccccaagcagccttggacccaaaagcaaatttcagcaccaacaatagcaacccgggggcacgcccccctccgccaagggccacagctagactgccccagaggggttgtcccggcgacgggcctgaggccggacggccagccgacaagatacaaatggccatggtccacggagtcaccacggaagagtgccaggctgccctccagtgtcatgggtggagtgtgcagagagcagcccagtatctcaaggtggagcagctttttggcttgggcctgcggcctcgcggcgaatgtcataaagtactcgaaatgttcgattggaacctcgaacaggcggggtgccacctgcttggttcctggggtcccgcccaccataagagatag

SEQ ID NO: 210404 - DNA, 3261 bp, synthetic construct
  misc_feature 1..3261: note = Description of Artificial Sequence: Synthetic coding sequence
  source 1..3261: mol_type = other DNA
atgctggaggcccggcccccccggacccagggcagcgacgccgccggggctgctgcggggagaggcctgcgggccctcttgttatcattaacagcagccgccgggatctggggatccatgggggagcgttccgcctatcaacgcctcgcaggaggagaagaaggacctcagcggctcgggggtggacgcatgcaaccagaggagggtaccggctggctgttagagctgttaagcgaggtccagctgcagcagtattttctccggctgcgagatgacttgaacgtgacgagactatcgcattttgagtatgtaaaaaacgaggacctggagaagattgggatgggcaggcctgggcagaggcgcctctgggaggcagtaaaacgcaggaaggccctgtgtaagcgcaagtcttggatgtctaaagtcttttcaggtaaacggctcgaggcggagttccctccacatcattcccagagcacattccgaaaaaccagccccgccccaggcggaccagccggagaagggcctctgcagtccctcacctgccttatcggggagaaagacctgaggctgcttgagaagcttggagacggtagcttcggcgtggttcgcagaggtgaatgggatgctccgtctggcaaaactgtgagcgtggccgtcaaatgtttgaagccagacgtcttgtcacagccagaggccatggacgacttcatcagggaagtgaacgctatgcactccctggaccaccgaaatctgattcgcctatatggggtggtcctcaccccacccatgaagatggtcactgagttagctccactggggagcctgttggacaggcttcgaaagcatcagggacacttccttctgggcacgctgagtcggtacgccgtgcaggtagctgagggcatgggctacctggagtccaagcgcttcatacatcgtgatctggcggcgcgtaatctccttttggccaccagggacttggtcaagataggtgacttcggtctcatgagggccctgccccagaacgacgatcattacgttatgcaagagcacaggaaagtgccctttgcctggtgtgcccccgagagcctcaagactagaacattcagtcacgcttctgatacttggatgttcggagtgacactgtgggaaatgttcacttatgggcaagaaccttggatcggcctgaacgggtctcagattttacataagatcgataaagagggtgaaagactgccccggccagaagattgtcctcaggatatttataacgtgatggtccagtgttgggctcataagccggaggataggcccacgtttgtggcattgcgtgatttcttgcttgaggcccagcccactgatatgagggcgctccaggatttcgaggaacccgacaagctgcatattcaaatgaacgatgtaattaccgtgattgagggccgggctgaaaattactggtggagggggcagaacactaggacgctgtgtgtcggacccttccccagaaatgtggttactagcgtggccgggttgtccgctcaggacatatcacaaccactccaaaactctttcatccataccgggcacggagactctgatccccggcactgctggggcttcccagataggatcgatgagttgtatctcggaaatcctatggatccacccgatttgctttcagtagagctgagtacaagccgaccaccccaacacttggggggcgtcaaaagagaacctccgccccggccgccacaaccagcattctttactcagaaacctacatatgatcccgtgtcagaggaccaggatcctctcagctctgatttcaaaaggctaggattacgaaaaccagggctccctagaggtctgtggctggcaaaaccatccgctcgggttcctgggaccaaagcctcccgggggtctggggctgaggttacactgatcgacttcggagaggaacctgtggtacccgcactgcgcccttgcgccccctccctggcccagcttgccatggatgcatgcagtctccttgatgagacccccccgcagagtccgacgagggcactgcctcgacccctgcatccgactccagttgtcgattgggacgcccggcctttgccaccgcctcctgcttatgatgacgttgcccaggacgaggatgattttgagatctgctcaatcaactctacgctggtgggcgccggcgtgcccgctgggccctcccaaggtcagacgaattacgcattcgtacccgagcaagctagaccccctcctcccctggaagacaatctctttcttccacctcaaggcggcggaaaacccccctcttccgcccaaaccgctgagatatttcaggctctgcaacaggagtgcatgcgccagctccaggcaccagcgggtagccctgcgccctctccttctcccggtggcgatgacaagccccaggtaccaccacgcgtcccgatccccccgcgccccacccgcccccacgtacaactttctcccgctccacccggcgaggaggaaacaagccagtggccggggccagcaagcccaccaagggtccctcccagggaaccactgtctcctcagggtagccgaacaccatctcccctcgttcccccagggtcctcgcctctgcccccgcggttgtcctcttcccctggaaagactatgccgaccacgcaatcattcgcatccgaccccaaatatgcaacgccacaagtaatccaagcccccgggcctcgcgccgggccatgcatcctcccaattgttagggacggcaagaaggtttcatcgacacactactacctgcttcccgagaggccatcttatcttgagaggtatcaaaggtttcttcgtgaggcacagtcacccgaggagccaacccctttgcccgtgcccctgctgcttccaccgccttccacaccggcccctgccgctcccaccgccactgttcgccccatgccccaggctgcgctagatccaaaagcaaacttcagcacaaacaacagtaatcccggcgcgagaccaccacctccccgagctacagcaagactacctcagcgtggatgccctggcgacggacctgaggcgggcaggccagccgataagatccaaatggtggagcagctattcggccttggcctccggccgagaggcgaatgccacaaggtcctcgaaatgttcgattggaatctggagcaggctggctgtcatctcctgggcagctggggcccagcccatcacaagcgatag

SEQ ID NO: 210405 - DNA, 3117 bp, synthetic construct
  misc_feature 1..3117: note = Description of Artificial Sequence: Synthetic coding sequence
  source 1..3117: mol_type = other DNA
atgcagcccgaggagggcaccggctggctgctggagctgctgagcgaggtgcagctgcaacagtacttcctgaggctaagggacgatctcaatgtcactcggctgagccacttcgagtacgtgaaaaacgaggatctcgagaagattgggatgggtcgcccaggtcagcgccggctatgggaggcagtgaaacgtaggaaggcgctttgcaagaggaagtcgtggatgtcaaaagtgttttcaggcaagcgtctcgaagctgaatttcccccacaccatagtcagtcaacttttcggaaaacgagtccagcacccggggggccagccggcgagggcccactgcagtcattaacatgcttaattggggagaaagacctgagactgctggaaaagctaggggatggaagctttggtgtggtccgaagaggcgagtgggatgctcccagtgggaagactgtttctgttgccgtgaagtgtctgaagccagacgtgctcagccaaccagaggcaatggacgattttatccgcgaagtcaatgccatgcacagtctagatcaccgaaacctgatcaggttatatggagtggtcctgactcctcctatgaagatggtgacagaactggctcccctggggtctctgttagacaggctgagaaagcaccaaggtcattttctgctggggactctttccagatatgccgtgcaggtggccgagggaatggggtacctagaaagtaaacggttcattcatagagatctagccgcccggaacctgttactggctacacgggatctggtcaagatcggtgattttggcctaatgagagctttgccccagaacgacgatcattacgtgatgcaagaacaccgcaaggtgccttttgcgtggtgtgctcccgagagccttaaaacaagaaccttctcccatgcctcagatacctggatgttcggagtgactctgtgggagatgttcacctatggacaggagccttggataggattgaatggaagccagattctccacaagatcgacaaggaaggagagcgcctcccacgccccgaagattgccctcaggacatctataacgtgatggtgcagtgctgggcccataaacccgaggaccgccctacgtttgtcgccttgagagatttcctcttggaagcccaacctacagatatgcgggccttacaagacttcgaggagcctgataaattgcatattcaaatgaatgacgtgattacagtgatcgagggacgggcagagaactactggtggcgcggtcagaacacacgtactttatgcgttggccctttcccaaggaacgtggttacctccgtggcgggcctgagcgctcaagatatctctcaacctttacaaaacagtttcatccataccgggcatggtgacagcgatccccggcattgttgggggttccctgacaggatagacgaattatatttggggaatcccatggatcccccagatcttctgtctgtggagttgagcacttcgcgccccccccagcacctgggcggtgtgaagaaacccacctatgaccctgttagtgaggatcaggatcccctttcaagcgacttcaagcggctcggcttgcggaagcctggcctaccccggggtctgtggctcgccaagccctccgccagggtgcctggcacaaaagcatcaagaggcagtggcgcagaggtcacccttattgatttcggagaggaacccgttgtgccagcccttaggccttgcgctccctcactcgcccagctggcaatggatgcttgctcactgctggatgagacgcctccacagtcacccactcgggcactgccccgacccttgcaccctacgcctgtggtggactgggatgcaagacctctaccacccccccctgcctacgatgacgtggcgcaggatgaggatgatttcgaaatttgtagcatcaattccacacttgtgggggccggcgtgcccgctgggccaagccagggccagacaaattacgcttttgtccccgagcaggctcgacctcctcctcccctggaagacaatctgttcttgccaccccagggcggcggcaagcccccttcaagcgctcagacagccgaaatctttcaggccttgcagcaggaatgcatgaggcagctccaggccccggcaggctctccagccccaagccctagccccgggggggatgacaagccccaggtgccaccccgagtacctatcccaccccgccccacacggccccatgttcaactgtccccggccccccctggcgaggaggaaacctcccagtggcccgggccagcgtctcctcccagggtcccgcccagggagccactctctcctcagggctcaaggacccctagtccactggtgccccccgggagctctccactgcccccacggctttctagctctcccgggaaaaccatgccaacaacccagtcgttcgccagtgatcccaaatacgcgactccccaggtgatccaggctcccgggcctcgggccggcccttgtatcctgccaatagtccgggacggcaagaaagtttcatccacacactattatcttctgccagaacggccatcctatcttgagcggtatcagcggttcctgagagaggctcagtcacccgaggaaccaaccccactccctgtgccgctactgctgccgcccccttccaccccagcccctgctgctcccaccgccacggtgcgccctatgcctcaggcagctctggaccccaaggccaacttctccactaataactcgaatcctggcgcccgccctccgcccccacgagctacagcccggcttccccagcggggctgtcctggtgatgggcctgaagccggtaggcctgctgataagatccagatggcaatggtgcatggagtgaccaccgaagagtgccaggcagcgctccagtgccacggttggagtgtccaacgagcggctcagtatctgaaagtcgagcagctgtttggcctcggtctccgcccccggggagaatgccataaggtactcgagatgtttgattggaacctggaacaggccggttgtcatctcctgggttcctggggcccagcacatcataagcgctag

SEQ ID NO: 210406 - DNA, 294 bp, synthetic construct
  misc_feature 1..294: note = Description of Artificial Sequence: Synthetic coding sequence
  source 1..294: mol_type = other DNA
atgcagcccgaggagggcaccggctggctgctggagctgctgagcgaagtccagcttcaacagtactttctcagactgagagatgacctgaatgtcactagactgtctcatttcgagtacgtgaagaacgaagatcttgaaaaaatcggaatgggtagacctggacagcggagactctgggaagcagtgaaacgtcggaaagcactatgtaagaggaagagttggatgtcaaaggtgttcagcgggaaacgtctggaagcagaatttccaccgcatcattcacagagcacctag

SEQ ID NO: 210407 - DNA, 1827 bp, synthetic construct
  misc_feature 1..1827: note = Description of Artificial Sequence: Synthetic coding sequence
  source 1..1827: mol_type = other DNA
atgagccaggagggcgactacggccggtggaccatcagcagcagcgatgaaagtgaggaggagaagcccaaaccagataagccgtcaaccagctccctcttgtgtgctaggcagggagcagcgaatgagccacgctatacctgctccgaggcccagaaagctgcacataagaggaagatatcacctgtaaagttctctaacaccgactcagtgttgccgcccaagaggcagaagtcaggttcgcaagaggaccttgggtggtgcctctcttcttccgatgacgaactgcagcccgagatgccccagaaacaggctgagaaagtggtgataaagaaggaaaaagatatttccgcacctaacgacggtaccgcacagagaacagaaaaccacggggccccggcgtgtcaccgactgaaagaggaggaggacgagtacgaaaccagtggggagggacaggacatctgggacatgctggacaagggaaacccattccagttctatctgaccagggtgtcaggggtgaagcccaagtataactctggcgccctgcatatcaaggacattctgtcacctctttttggaactttggtgtcttccgcccagtttaattattgcttcgacgtagattggcttgtgaaacaatatccacctgaattcaggaagaaacctatcttgcttgtacacggtgacaagcgggaagccaaggcacacctccacgcacaagcgaagccctacgaaaacatttcactgtgccaggctaaactggatattgctttcggcacacaccacactaagatgatgttacttttgtatgaggaggggcttagggtagtgatccataccagtaacttgatccatgccgattggcatcagaagactcaaggcatttggctttcgcctctctatccccgaatcgctgacggaactcataagagcggcgagtctccaacacactttaaagctgacttaatcagctatctgatggcttataacgcaccttccctgaaagagtggatcgatgtcattcataaacacgatctgagtgagacgaacgtctatctgatcgggtcaacaccaggcaggttccaagggagtcagaaagacaattggggccactttagactgaaaaaactgttgaaagaccatgcaagcagcatgcccaacgcggaatcctggccggtggttggacagttttcctctgttggaagtttgggggcagacgagtccaaatggctgtgtagtgagtttaaggaatcaatgttgacattgggaaaggagagcaagacgccaggaaagtccagtgttcctttatacctgatctatcctagcgtcgagaacgtcagaacctctttggaggggtacccagccggtggcagtctgccatattcaatacagacagcagagaagcagaattggctgcactcttatttccataaatggtctgccgaaacaagtggaaggtctaatgctatgccacatattaagacctacatgaggccatccccagatttctctaaaattgcatggtttctggtgaccagtgctaacctgagcaaggcagcctggggggccctagaaaagaacggcactcagctgatgattcggagctatgaattgggcgtcctattcctgcctagtgcctttgggctggattccttcaaggtgaagcagaagtttttcgctggctcccaggagccaatggccaccttcccagtgccctatgaccttccgccagagctttacgggagcaaagatcgtccatggatttggaatatcccatatgttaaagcaccagatacgcacggcaatatgtgggtgccaagctag

SEQ ID NO: 210408 - DNA, 1110 bp, synthetic construct
  misc_feature 1..1110: note = Description of Artificial Sequence: Synthetic coding sequence
  source 1..1110: mol_type = other DNA
atggtgatcagcgagcggctgcggctgaccagcatgccccggcccagtcttaccaggacaagtttatccgctcgcaaaatgatgctgttactctacgaagagggcctgcgcgtggttatacacaccagcaatttgattcatgctgactggcaccagaagacccagggtatctggctctctcccttatatcctagaattgccgacggtacccataagtcgggtgaatcccctacgcatttcaaggccgacctgatctcctaccttatggcatataacgcgccttccctgaaagagtggatcgatgtgattcataagcatgacctgtctgagactaacgtatacctcattggttcaacacccggaaggttccaggggagtcagaaagataattggggacatttccggttaaaaaaattactcaaggaccatgccagctctatgcctaatgctgaatcctggccggtggtcggccagttcagttctgttgggagcttaggggccgatgagagcaagtggctttgttccgaatttaaagaaagcatgcttacactcggaaaagagagcaagactcctgggaaatcctctgttcctttatacttgatttatccctccgtggaaaatgtgagaacttcattggaaggttaccctgctggaggatcattaccctattccatccagactgcagagaaacaaaactggctgcatagttactttcataagtggtctgcagagactagtggacgctcaaatgcgatgcctcacattaagacatacatgagaccgagtcccgatttcagcaaaattgcttggtttctggtgacctctgcaaacctgtcaaaagctgcatggggcgccctggaaaagaatggcacacagctgatgattcgcagctacgagctgggagtcctttttctgcctagcgcgttcggtcttgattcattcaaagtcaagcaaaagttcttcgctggcagccaagagcccatggcaaccttccccgtcccctacgacctgcctcccgagctttacgggagcaaggataggccctggatttggaatatcccctacgtgaaggctcctgacactcatggtaatatgtgggtgccatcctag

SEQ ID NO: 210409 - DNA, 1827 bp, synthetic construct
  misc_feature 1..1827: note = Description of Artificial Sequence: Synthetic coding sequence
  source 1..1827: mol_type = other DNA
atgagccaggagggcgactacggccggtggaccatcagcagcagcgacgagtctgaggaagaaaaaccaaagcctgacaagccctcgacaagctctctgctctgcgctagacagggggcagcaaatgagcctcgatatacttgttctgaggcccagaaagctgcccacaagaggaagatttccccggtgaaattttccaatacagatagtgtgctccctccaaaaagacagaagagtgggtcacaggaagatctcgggtggtgcctgagttcttccgatgatgagctgcaacctgaaatgccacagaagcaggctgagaaggtggtgatcaaaaaggagaaggacatctcggcacctaacgacggaacagcgcagcgcaccgaaaatcacggcgcacccgcctgtcatagactaaaagaggaggaggatgagtacgaaacaagtggcgaagggcaggacatctgggacatgctggataaaggcaatcctttccagttctacctgacccgtgtgtccggtgtaaaaccaaagtacaattcaggcgcactgcatatcaaggatattctgtctcccctattcggcaccctcgtgagctctgcccagttcaattactgcttcgatgtggattggctcgtgaagcaatacccgcccgagttcaggaagaagccaatcctcttagtacacggcgataagagggaggcgaaagctcacctgcatgcccaggctaaaccgtatgagaatattagcctgtgtcaggcgaagctcgacattgcttttgggactcatcataccaagatgatgcttctgctgtacgaggaaggattgcgagtggtgattcatacctctaacctgattcacgccgactggcaccagaagacacagggtatttggctgtcgccgctttatccgcgcatcgcggacggcacccacaagtctggagagtcccctactcacttcaaggccgatctcatctcctatctcatggcttacaatgccccttcactaaaggagtggatcgacgtgattcacaagcacgacctttctgagacaaacgtgtacttaatcggtagcacgcccgggagattccaaggcagtcagaaggacaattgggggcactttcggttgaagaagctcttaaaggatcacgcttcttcaatgcctaatgctgaaagctggccagttgtgggtcagttctcctcagtgggctctctgggtgccgacgagtccaaatggttatgctccgagttcaaggagagcatgttgaccctcgggaaggagtcaaaaacaccgggcaaaagctccgtacccctgtacctgatttaccctagcgtcgaaaatgtgcgcactagtctggaggggtatccggccggaggctcactgccatacagtattcagaccgccgagaagcagaactggctccatagttactttcacaagtggtctgctgaaacttctggccggtccaatgctatgccccacatcaagacatacatgcggccatcccccgatttttccaaaattgcttggtttctggtgaccagcgctaacctctcaaaggctgcttggggtgccctagaaaaaaacggtacgcagttaatgatacgttcctacgaattaggagtgctgtttcttcccagtgcatttggattggattcctttaaagtaaagcagaaattcttcgccgggtcgcaggaacctatggcgacctttccagtcccatatgacctccctcccgagttgtacgggtcaaaggaccggccatggatctggaacattccatacgtcaaggcccctgacactcatggtaatatgtgggtcccttcatag

SEQ ID NO: 210410 - DNA, 897 bp, synthetic construct
  misc_feature 1..897: note = Description of Artificial Sequence: Synthetic coding sequence
  source 1..897: mol_type = other DNA
atgagccaggagggcgactacggccggtggaccatcagcagcagcgacgagtcagaggaggagaagcctaaacccgataaaccgtcgaccagttcactgctgtgcgctagacagggcgcagccaatgaaccccgctatacctgttccgaggctcagaaggccgcccataagcgcaagataagtcctgtgaagttctccaataccgactccgtactgccccctaaacggcaaaagagtgggagccaggaggaccttggatggtgtttgagctccagtgatgacgagctgcagcccgagatgccccaaaagcaggcggagaaggtggtaataaagaaggagaaagatatctcggccccaaatgacgggactgcccagcgcaccgaaaatcatggagccccagcttgccaccgtctaaaagaggaggaagacgaatatgagacctccggcgaaggtcaagacatttgggatatgctggataaaggaaacccgtttcagttttatcttaccagagttagcggggtgaagccaaagtacaatagcggagctttgcacattaaggatatactgtctccactgttcggaacacttgtgtctagtgctcaattcaactattgcttcgatgtggattggctggtgaagcagtacccacccgaattcaggaaaaagccaatcctgctagttcacggagacaaaagagaagcaaaagcccatctgcatgcacaggctaaaccatatgaaaacatatccttgtgccaagccaagctcgatatcgccttcggcacacaccacactaagatgatgctgctcctgtacgaggagggattgcgcgtggtcattcacacgtctaatctgatccacgcagattggcaccagaagacccaaggcacccacctgtag

SEQ ID NO: 210411 - DNA, 441 bp, synthetic construct
  misc_feature 1..441: note = Description of Artificial Sequence: Synthetic coding sequence
  source 1..441: mol_type = other DNA
atgagccaggagggcgactacggccggtggaccatcagcagcagcgatgaatcagaggaagagaagcccaagcctgacaaaccatctacctcttcgctgttatgcgcccgacagggcgccgcgaatgagccccggtatacatgcagtgaagcacagaaagccgcccataagagaaaaatttccccagtaaaattctctaacacagatagcgttcttcctcctaagaggcaaaagtctggctcccaggaagatctgggatggtgcttgtcatccagcgatgatgagctccagcctgagatgccccagaagcaggctgaaaaagtagtaataaagaaggaaaaggacatcagtgccccaaatgacggaaccgcgcagagaacagaaaaccacggcgccccagcatgccaccggctcaaagaggaagaagacgagtacgaatag

SEQ ID NO: 210412 - DNA, 447 bp, synthetic construct
  misc_feature 1..447: note = Description of Artificial Sequence: Synthetic coding sequence
  source 1..447: mol_type = other DNA
atgagccaggagggcgactacggccggtggaccatcagcagcagcgatgagagcgaggaggagaagcccaaaccagataagcctagcacaagcagcttgctatgtgcccggcagggagcagccaacgagcctagatacacttgctctgaagcgcagaaggctgcccataaacgtaaaatttccccagttaagttcagcaatactgactccgtgcttccccctaagagacagaagagcggatctcaggaggacttgggctggtgcctgagttccagtgatgatgagctccaacccgaaatgccacagaagcaggcagagaaggtggtgatcaaaaaagaaaaagacatatccgccccaaacgatggcaccgcccagcgcaccgagaatcatggagctcccgcttgccaccgccttaaagaagaagaggacgagtatgaaacgagttag

SEQ ID NO: 210413 - DNA, 840 bp, synthetic construct
  misc_feature 1..840: note = Description of Artificial Sequence: Synthetic coding sequence
  source 1..840: mol_type = other DNA
atgagccaggagggcgactacggccggtggaccatcagcagcagcgatgagtcagaagaggaaaaacccaaaccagacaagccctcaacgtctagcttactctgtgctaggcagggcgcagcgaacgaacctcgttacacatgtagcgaagcccagaaggccgcccataagaggaagatttcacctgtcaagttttctaacaccgactcggtcctaccccctaaaagacagaagtcaggctcccaagaggacctggggtggtgtctgtcctcatccgatgacgaactccagccagagatgccccaaaaacaagcagaaaaggtggttatcaagaaagagaaggatatttctgcccctaacgacgggaccgcacagcgaacagagaaccatggggcacctgcatgccaccgtttgaaggaggaggaagacgaatacgagacaagcggagaaggacaagacatctgggatatgctcgacaaaggaaaccccttccagttttacctgacaagggtttccggagtgaagccaaagtacaattcgggagctcttcatattaaagacatcctctctccactgtttgggacactggtgtctagcgcccagttcaactactgcttcgacgttgattggctggtcaaacagtacccccctgagtttcggaagaagcccattttgctggttcacggggacaagagagaagccaaggcccacctgcatgcccaggctaagccctatgaaaacattagcttatgtcaagcgaagttggatattgccttcggtacgcaccacactaaaatgatgctgctactctatgaagaggggctgcgagtcgttatttag

SEQ ID NO: 210414 - DNA, 486 bp, synthetic construct
  misc_feature 1..486: note = Description of Artificial Sequence: Synthetic coding sequence
  source 1..486: mol_type = other DNA
atgagccaggagggcgactacggccggtggaccatcagcagcagcgatgagtcggaggaagaaaagcccaagcccgataagcccagtacaagttccctcctatgcgccagacaaggagccgctaatgagccgaggtacacatgctctgaagctcaaaaggcagcccataagaggaaaatcagccccgtaaaattttccaataccgattctgttctgccacctaaaaggcagaagtctggctcccaagaggacctgggctggtgtctctccagttccgacgacgagctgcagcccgagatgcctcaaaaacaggctgaaaaggtggtgatcaaaaaggaaaaggatatctcggcccctaacgatgggactgcgcagagaaccgagaatcacggcgctccagcttgtcaccggttaaaggaggaagaggacgagtacgagacttccggcgaggggcaggacatttgggacatgctggacaagggctag

SEQ ID NO: 210415 - DNA, 456 bp, synthetic construct
  misc_feature 1..456: note = Description of Artificial Sequence: Synthetic coding sequence
  source 1..456: mol_type = other DNA
atgagccaggagggcgactacggccggtggaccatcagcagcagcgacgaatccgaagaagagaagccaaagcctgacaaaccttccacctcctcattgctgtgtgcccgtcaaggggctgccaatgagcctcggtatacgtgttccgaagcccagaaggccgcacataaaagaaagataagcccagtaaaattctccaacactgacagtgttctgcctccaaaaagacaaaaatcggggagtcaggaggacctcgggtggtgcctctcctcctcggacgatgaacttcagcctgagatgccacagaagcaagccgagaaagtggttatcaaaaaagaaaaagacatatctgctcccaatgatgggactgcacaacgtaccgaaaaccacggtgcgccagcttgtcaccgcctgaaggaagaggaagatgagtacgagaccagcggtgagggttag

SEQ ID NO: 210416 - DNA, 1113 bp, synthetic construct
  misc_feature 1..1113: note = Description of Artificial Sequence: Synthetic coding sequence
  source 1..1113: mol_type = other DNA
atggtgggcaagctgaagcagaacctgctgctggcctgcctggtgatctcatcagtgactgtgttctacctggggcagcatgcaatggagtgccaccacagaatagaagagcgttctcaaccagtgaagctggaatcgaccagaaccacagtacggactggtctggaccttaaggccaataagaccttcgcctaccacaaggatatgccactcatatttataggcggagttccaaggtctggcaccactttaatgcgcgccatgctcgatgcccaccccgacattaggtgcggtgaagagacaagagtgatcccccgcatcctggccctcaaacaaatgtggagtcgctcatccaaagaaaagattcgcctcgacgaagccggggtgactgacgaagtcctcgactcagcaatgcaggcattccttttagaaatcattgtaaagcatggagagcccgcaccatacctttgtaacaaggatccgttcgccctgaagagcctgacctacctgtcacgcctgttccccaatgcaaaatttttactgatggtgagagatggtagggcttcagtccattctatgataagtagaaaggtgacaatcgctggtttcgacttaaactcataccgtgactgtttaacaaagtggaacagagctattgagacaatgtataatcaatgcatggaggtcggatataagaagtgtatgctggtgcactatgagcagctggtgctgcaccccgaaaggtggatgagaacgctgttgaaatttctgcaaataccctggaatcacagtgtactccatcacgaggaaatgattggtaaggctggtggcgtgagtctgagcaaggtggagcggtctactgaccaggtaatcaaacctgtcaatgtgggcgcactttccaagtgggttggaaagatccctcccgacgtgctgcaggacatggcagtaatcgcacctatgctggccaaactcggctacgacccatatgctaacccgcccaattatggaaaacccgaccccaagattatagagaatacccgccgggtgtataaaggggagtttcaactccctgacttccttaaggagaaaccgcaaactgaacaggttgagtag

SEQ ID NO: 210417 - DNA, 129 bp, synthetic construct
  misc_feature 1..129: note = Description of Artificial Sequence: Synthetic coding sequence
  source 1..129: mol_type = other DNA
atggtgggcaagctgaagcagaacctgctgctggcctgcctggtgatctcaagtgtgaccgtattttatcttggacagcacgccatggaatgtcatcacaggattgaagagcgcagccaacctgtgtag

SEQ ID NO: 210418 - DNA, 423 bp, synthetic construct
  misc_feature 1..423: note = Description of Artificial Sequence: Synthetic coding sequence
  source 1..423: mol_type = other DNA
atggtgggcaagctgaagcagaacctgctgctggcctgcctggtgatctcatctgttacagtgttttacttgggccagcacgcaatggagtgccatcatcgcatcgaagagcgtagtcagccagtcaaattggagagcacacggacgactgtgcggacgggcctagacctcaaggccaataagacatttgcctatcacaaagacatgcccctgattttcatcgggggagtgcctcgcagcgggactaccctgatgcgcgcgatgcttgatgcacatccggatatacggtgcggggaggagacccgagtgattccaagaatcctagccctgaaacaaatgtggagccgtagctctaaggagaagatcaggctcgacgaagctggcgtgacagatgaggttctcgattcagccatgcaggcgtag

SEQ ID NO: 210419 - DNA, 1083 bp, synthetic construct
  misc_feature 1..1083: note = Description of Artificial Sequence: Synthetic coding sequence
  source 1..1083: mol_type = other DNA
atggtgggcaagctgaagcagaacctgctgctggcctgcctggtgatatcgtctgtcaccgttttttatctgggccaacacgctatggagtgtcaccaccggattgaggaaaggtcccagcccgtgaagcttgagtccacccggaccacagtgagaacgggactggacttgaaagctaacaagacgttcgcctaccacaaagatatgcctttaatcttcattggcggagtgcctcggtccgggactaccttaatgcgggctatgctggatgcccaccctgatatccggtgcggggaggagacccgagttatcccgagaatcttagctctgaagcaaatgtggagccgctcttcgaaggagaagatccgccttgacgaggccggtgtgaccgatgaggtgttggacagtgctatgcaggcctttcttctggagattatcgtcaaacacggggaaccggcaccctacctctgcaataaggacccgtttgcgttaaagtccctaacctacctgagccggctgtttcccaatgctaaatttctgctgatggtgagagacggtagagcctctgtgcatagcatgatcagccgcaaggtgactattgccggcttcgacctaaactcctatcgggactgcttgaccaaatggaaccgcgccatcgagacaatgtataatcagtgcatggaggtcgggtataaaaagtgtatgctggtacactacgagcaattggtccttcacccagaaaggtggatgagaaccttactgaaatttctacaaattccttggaatcatagcgtgctacatcacgaagagatgatcggaaaggcaggaggcgtttccttgtccaaagtcgagagaagtacggaccaggttatcaaacctgtgaacgtcggggctctgagcaagtgggtggggaagatcccccccgacgtgctgcaggacatggccgttatcgcccccatgcttgcgaaattagggtatgacccctatgcgaaccccccgaactatgggaaacctgatccaaagattatcgaaaacactaggagggaaaggctcctcccctttcagcaaaagggtaacagctag

SEQ ID NO: 210420 - DNA, 1134 bp, synthetic construct
  misc_feature 1..1134: note = Description of Artificial Sequence: Synthetic coding sequence
  source 1..1134: mol_type = other DNA
atgcggctgagcgtgcggcgggtgctgctggccgccggctgcgccctcgtgcttgttttggccgtgcagctggggcagcaggtcctggaatgccgagccgtcttagccggcctgagatctcctcggggtgccatgcgtcccgaacaagaggaattagttatggtgggcacaaatcatgtggagtacagatacggaaaggccatgccgctgatttttgtcgggggggtacctcgctctggtaccaccctgatgagagctatgctggatgcacaccccgaggtaagatgcggcgaggagaccaggatcataccacgggtgctcgccatgcgacaagcatggtccaagtccggtcgcgagaagctgaggctggatgaggccggagtgactgatgaagtgcttgatgcagcaatgcaggcatttatccttgaagtcattgccaaacatggggagcccgctcgggtcctctgcaataaggaccctttcacactgaagagcagtgtgtacctttcaagactattcccaaattcgaaatttctgcttatggtcagagacggaagagcgtctgtgcatagtatgatcactcgtaaagttactatcgcgggttttgatttgagcagctatagggattgtctcacgaaatggaacaaggccattgaagtgatgtacgctcagtgtatggaggtgggaaaggagaagtgcctcccagtctattacgaacagcttgtgctgcacccccgtcgctccttgaagctgatcttagactttctagggatcgcttggtccgatgctgtccttcaccacgaggacctaatcggaaagcctggcggggtgagcctgtctaagattgagcgttcgacggaccaggtgataaagcctgttaatttggaagcactcagcaagtggacagggcacattcccggcgatgtggtcagggatatggcccagatcgcccccatgctggcacagctgggttatgatccctacgctaacccaccaaattatggcaatccagacccattcgtaatcaataatacccagagggtgctaaagggcgattacaagacacctgccaatctgaaggggtactttcaggtgaaccagaattcaacaagtagtcacctgggcagtagttag

SEQ ID NO: 210421 - DNA, 1134 bp, synthetic construct
  misc_feature 1..1134: note = Description of Artificial Sequence: Synthetic coding sequence
  source 1..1134: mol_type = other DNA
atgcggctgagcgtgcggcgggtgctgctggccgccggctgcgcccttgtgctcgtgctggctgtacaactggggcaacaagtgctggagtgcagggcagtgctcgccgggttgcgctcccccagaggcgccatgcggcccgagcaggaggaactggtgatggtggggactaaccacgtggagtaccgctatggcaaggcgatgccgctaatcttcgtcggcggagtgccgagatccggcacaacgctcatgcgagctatgcttgacgcgcatccggaggtgaggtgtggggaagaaacacgaataatcccaagggtccttgccatgcggcaggcctggtcaaaatcgggcagggagaaactgaggctggacgaggccggggtaaccgatgaggtcctagacgctgctatgcaagcttttattttagaagtaatagccaaacatggggagccggcccgagtactctgcaacaaagaccccttcaccctgaaatcttccgtgtatctgagtcggctgtttcctaattcaaagttcctgctgatggtgagagatggcagagcatcagtgcactccatgattaccaggaaggtgaccatagctggtttcgacttgagctcatacagagattgcctaacgaagtggaacaaagcaattgaagtcatgtacgctcagtgcatggaagtcggtaaggagaagtgtctgccggtttattatgagcagctcgtccttcacccacgaagaagccttaaactcattctggattttctgggaatcgcttggtctgacgccgtgcttcatcacgaggatttgattgggaagccagggggtgtgagtttgtcgaaaatcgagaggtccaccgaccaggttattaagccagtcaacctggaggctctctcaaagtggactggacacattcccggagatgtcgtgcgcgatatggcccagatcgccccaatgctggcgcaactcggctatgacccatacgctaatcccccaaactacgggaaccctgacccctttgtaattaacaacacacaaagagtcctaaaaggtgattacaagacacctgctaacctgaaaggctactttcaagtgaatcaaaactcgactagctcacatctggggtcttcttag

SEQ ID NO: 210422 - DNA, 1134 bp, synthetic construct
  misc_feature 1..1134: note = Description of Artificial Sequence: Synthetic coding sequence
  source 1..1134: mol_type = other DNA
atgcggctgagcgtgcggcgggtgctgctggccgccggctgcgccctcgttctggtgcttgccgttcagctggggcagcaagtgctcgaatgtcgcgccgtcctggctggcttgcgctcccctcgcggcgcaatgaggccggagcaggaagagttggtgatggttggaacaaatcatgttgagtacagatacgggaaagccatgcccttgatcttcgtgggcggtgttccccggtccggcacaacactcatgcgagctatgctggatgctcacccagaggtgcgttgcggagaagaaacgcggattatcccacgtgtccttgctatgaggcaggcctggagcaagagtgggcgtgagaagcttaggttggatgaggccggagtcacagacgaagttcttgatgccgctatgcaggccttcatacttgaggtgattgccaaacacggggaacctgcccgtgttttgtgtaataaggaccctttcacactcaagtcgtctgtgtatctgagccgattatttcccaattctaagttcctgttaatggtgcgtgatggccgcgccagtgtgcacagcatgattacacgcaaagtcactatagcggggttcgatctgtcctcctaccgggactgtttgaccaagtggaataaagcaatcgaggttatgtatgctcagtgtatggaagtagggaaggagaagtgtttacctgtgtactacgagcagttggtgctgcatccaaggaggtcgcttaaattgatccttgacttccttggcattgcgtggtccgatgccgtattacatcacgaggacctcattggaaagcccggaggcgtcagtctgtccaagatcgagagatccaccgaccaggtgatcaaacccgttaacctggaggctctctccaagtggaccggccacattccaggcgatgtcgtgcgcgatatggctcagatcgctccaatgctggcccagttggggtatgatccctacgccaacccccctaactacgggaaccccgatcctttcgtaatcaacaatactcagcgcgtcctaaaaggtgactacaagacgcctgctaatctgaagggatactttcaagtcaatcagaacagcacaagttcacacctcggatcctcttag

SEQ ID NO: 210423 - DNA, 195 bp, synthetic construct
  misc_feature 1..195: note = Description of Artificial Sequence: Synthetic coding sequence
  source 1..195: mol_type = other DNA
atgcggctgagcgtgcggcgggtgctgctggccgccggctgcgcccttgtattagttctggccgtgcagctcggacaacaggtcctggaatgccgggctgttctggctggcctgcggagcccccgcggtgctatgaggccggagcaagaggaactggtcatggttgggaccaatcatgtggaatacagatactag

SEQ ID NO: 210424 - DNA, 429 bp, synthetic construct
  misc_feature 1..429: note = Description of Artificial Sequence: Synthetic coding sequence
  source 1..429: mol_type = other DNA
atgcggctgagcgtgcggcgggtgctgctggccgccggctgcgccctggtgttggtgctggctgttcagctgggtcagcaagtgctggaatgcagagcagtgctggccggactcaggtcaccacgcggtgcaatgaggcccgaacaggaggagttggtgatggtcggcactaatcatgtcgagtatcgctacgggaaagccatgccattgatcttcgtggggggggttccacgcagtgggacgaccttgatgcgggccatgctcgacgcgcaccccgaggtccggtgcggggaggagacacggatcatcccacgagtgctcgctatgaggcaggcttggtccaagtcaggtcgggaaaaactgagacttgatgaggctggggtaaccgatgaagtccttgacgccgccatgcaagcatttattttgtag

SEQ ID NO: 210425 - DNA, 144 bp, synthetic construct
  misc_feature 1..144: note = Description of Artificial Sequence: Synthetic coding sequence
  source 1..144: mol_type = other DNA
atgcggctgagcgtgcggcgggtgctgctggccgccggctgcgcccttgtgctggtgctggccgttcaactggggcagcaggtgctcgagtgccgggcagtcttggccggactccgaagcccacggggtgcgatgaggccttag

SEQ ID NO: 210426 - DNA, 147 bp, synthetic construct
  misc_feature 1..147: note = Description of Artificial Sequence: Synthetic coding sequence
  source 1..147: mol_type = other DNA
atgcggctgagcgtgcggcgggtgctgctggccgccggctgcgccctggtgctagtcctggccgtgcagctgggacaacaggtgctcgaatgtcgcgccgtactggctggactgcggtcccctaggggcgccatgaggccagagtag

SEQ ID NO: 210427 - DNA, 363 bp, synthetic construct
  misc_feature 1..363: note = Description of Artificial Sequence: Synthetic coding sequence
  source 1..363: mol_type = other DNA
atgcggctgagcgtgcggcgggtgctgctggccgccggctgcgccctggttctggtgctggccgtgcaactcggtcagcaggttttagaatgtcgcgctgttctggctggtctacgatccccccggggagctatgcgccctgagcaagaggagctcgtgatggtggggactaaccacgtcgaatatagatacggaaaggccatgccgctgatctttgtgggcggcgttcctcggtcaggaaccactctgatgagagctatgcttgatgctcatcccgaagtgcgctgcggggaggaaacaaggatcatcccacgcgtcctggctatgagacaagcgtggtcgaagagcggcagggagaagtag
